United States Patent Application Publication US 2019/0348154 A1 - sequence listing, part 50

SEQ ID NO: 184894 - DNA, 1818 bp, Klebsiella oxytoca
atgatttacggatcaatatgcagtggcattgaagccgcgaccgtcgcctgggagacgctgggatggaaagcagcctggttctcagaaattgaggcgttcccgtctgctgtactggcggaacgttggcccgaggtagtgaaccttggcgacatgacaaaaatcgcagccgcggttcgcgctggagatgtgcaagcaccggatgtgatggtcggcggaacaccctgccaggcattcagcattgcaggtctgcgtaatggtctttccgatgcccgagggcagttaaccctttcatatgtggaattagcgaatgcaatcgacgataagcgcatcgagcgcggagaagaagaagcaatcttcgtctgggaaaacgtccctggcgtcctcacaagccacgataacgcctttggttgttttctggcaggacttgccggagaaagctgtgaacttgagccatcagggggaaagtggacgcactctggttgtgtgtatggaccccaaaggacaatcgcttggatcgtcaaagacgcccaatatttcggagtggcccaacgacgcaagcgtgtgttcgttgtcgcaagtgctcgaaaaggattcgatcccggccaagtactttttgagtccgaaggcgtgcgccgggatactccgccgagcagagaaccgcaaacggcagttgccgcccttactgcgagaggcgttggaacttgtggcgcagatgacaatcaggcccaagcaggacacctcctcgctttcggtggtggaaacacagggggaaacatcgatgttgccgcctgcctgacagcgaaagggcaacgcattgatttcgacgtcgagaccttcgccgtacatggcactcaggaccctgacactaatctggagctggcgcatacgcttggacgcaatcacgggcaggaaaaagccatttttactgagccattcacccttgctattcgtggtcgcaatgaagggtccacggttgaagtccgtaatgatggcgttgccaacgcgcttttaacaccaaatggcggccgcgcaggtatgggtgttggagctatcggatggggaatgcaagttcgccgccttatgccggtcgagtgcgagcgtctgcagggatttcctgataaccacacacagatttcatggcgtgggaaagaagcgacggaatgcccggacggcccccgctatcgcgccatcggtaacagcatggcagtgccggtgatgcgttggatcggcgagcgtattgcggccgcattgccagttaaaaaatctgcgggtgattatggcggcagcaaaacaccagcggatcagcgcgacctctggcgcactccgcccgccctcttcgcatgcctgaatgctgagttctgcttccagcttgatgcagccgcagcatcgcataacgcgctgtgtcgcaagttcataacagccgagcagaacacgcttgaaacgccatgggatgactacctgagcattccgggctacgtctggctgaacccgccatatagcgacatcacgccattcgtgaagaaggcagccgccgagagcgcaaatcagatcggcacggtgatgctggtacctgctgacacttcggttggctggttcaaggaggcaatccagaccgctagcgaggttcgctttattaccgcgggaagactggcatttatcaacccggtgacaggtaagccggtaagcggcaataacaaaggctcgatgctgattatctggcatccctacccgcgcacccactgccaattcacgaccgttgagcgtgatgctctgctgaagttcggggcccgtttgattgctaagcgggaggcagcatga

SEQ ID NO: 184895 - DNA, 729 bp, Klebsiella oxytoca
atgtcttccggtcgtttacaacagcagttcatccgcctgtggcagtgctgcgacggcaagtcgcaggagacaacgctgaatgaactggcagagatgctaagctgctcgcgtcgtcatatgcgtaccttactcaacatgatggaggcgcgcggctggctgacatgggaggcggaggccggacgcggcaagcgttcccggctcgcttttctctataccggtctcgcgctgcagcagcagagggcggaagatctgctggagcaggacagaatcgatcagctggtgcagctggttggcgataaagccgccgtccgccaaatgctggtttcccatttaggccgcagctttcgccagggtcggcatatcctgcgcgtgctctactaccggccgatgaaaaatctgctgcccggcagcgcgctgcgccgctcggaaacccatattgcccggcagatttttagcgccctgacgcgagtaaatgaggaaaatggggaactggaagccgatattgctcaccattggcagcagatcgcgccgacccactggcgtttttttctgcgtccaggcattcatttcaccatgggcgtgagctggagatggaggatgtcatcacctccctgcagcgcagtaacgcgctgccgctcttctctcacatcgagcgtatcgactcccccaccgcctggactctcgacattcatctcagccaacccgaccgctggctaccgtggttgttaa

SEQ ID NO: 184896 - DNA, 1311 bp, Klebsiella oxytoca
atgaggacactcaatgctcaggaacggccgattttgccgtcggccacgcaaaagcgaactaaaacgcgaattgtaattttgatgttactatcgatcgggacgatgataaattatctcgatcgtactattttaggtattgttgcacctaagttaacgagcgaaatccatatcgacccggcgatgatgggtatcgttttttccgctttcgcctggacctacgcgctggcgcaaattcccgggggaatgtttttagatcgcttcggtaataaattaacttacgcgctttctattttcttctggtcaacctttaccctattacaaagcttttccgtaggcttaaaatcattgctgctgctgcgattaggtttaggcatcagcgaagccccctgctttccggtgaatagtcgggtcgtgagtaaatggtttccccagcatgaacgcgctcgggcaacggcgacttacaccgtcggtgaatatattgggctggccgcattctccccgctactttttttaattctggagcatcatggctggagaacgctatttttcctgaccggcggtttgggcattgcattcacttttgtgtggtggaaattttatcatgaaccgcatcaatcaaagactgcaaataaagcagagctggaatatatcggcgtagaaaatacggctagcgccgatgaaaatatcccgtttaactggcccgatgccaaacgcctgctgtgctgccgacagattatcggcgccagcctggggcagtttgccggtaacaccacgctggttttcttcctgacctggttccccacttatctggctaacgaacgccatttaccgtggcttcacgtgggtttcttcgcctcctggccgttcctggccgcggctatcggtatctttttcggcggttgggtatccgataaaatcttaaagaaaacctgttccgtaaatattagcagaaagctacccattatttccgggctgctgctttcgagctgcatcatcattgctaactgggtcgagagtaacaccgctgttattattattatgtcgatcgctttttttggtcagggcatggttggactcggctggacgcttatttcagacattgcgcctaaaaacatgggcggactcaccggagggatcttcaacttctgcgcaaatatggcatcaattattaccccgttaattatcggggtcatcatatccatgaccggtaattttttctacgcgctgatttatatcggtttaaccgcgctaattggcgttatcgcttatatttttattatcggcgatataaaaaggatcgtgttgaaataa

SEQ ID NO: 184897 - DNA, 129 bp, Klebsiella oxytoca
atgaatatcggtaagaaaacaaccaacaaacttgtaacagttaaaagcagcaaaatatcttctgagggaaaatataaagtgtcagtttgcgacgcgagcggcattttaggccattctgatgaccgttaa

SEQ ID NO: 184898 - DNA, 522 bp, Klebsiella oxytoca
atgcagggaatagttaagacagtgccgctgttatgttttttactgctgggctgtgatccggcagaaaaagaagcaccgcgcggcagcgggaagagcagctacgtggcggctaatctgctgggctataaccatatggcaggcacgaatatcaactggttctctgttaacggctaccggggacacgccggggggtttacctgctgcatatcgctgccggaaaaatggcggcccaatatgcaggtggcagtggagtgggaggttaaccctaacccgtttccgaaggatctccccagattcagcgaccctaagtatgatgaatatatagaaaaacacagggctacctttcgtcagtataaagcggtggccactattcccgaatatgaagattcctgcggcctgcaggtgcatttcttgccctgtcagcagattaaagtaacggccacctgccacgggccgacccatcctgatcacccgataaaagatccctaccgtcagtcggagcctgcccaatgtccccaataa

SEQ ID NO: 184899 - DNA, 723 bp, Klebsiella oxytoca
atgaaattaatcgtgacggaagattatgcggagatgagcctggtcgccagtcatcacgttctgggctatatcaccgcgccgcgcagggtgaatctggcggtgacggcaggcagtacgccgaaaaaaatgtatgaacatctgacggccgcgattaaaggtaaaccgttctattctcaagtccattattacaactttgacgagatcccattccgtggacaggatcgtgaaggcgtgaccatttccaatttgcgcaatctgtttttcactcccgctcagatcccggaagagaacattcacaagctcagccatgaaaactttatgcatcacgaccagcgattacaggaagaagggggcctcgatctgatggtgatgggcctcggcgccgacggccatttttgcggtaacttgccgaataccacgcgcttccacgatgcgacggtggaagtccctatcgtcggagatatggtgggccttgtcgctcacggcgaaatgggcggcgacttctctgcggtgccggatagctacgtcacgatggggccgaaaagcgttatggcggcgaaaaatctgctgcttatcgtcagcggcgccgcaaaggcgcgggcgctacaagaggtgattgaaggcgaagtcagcgagcgggttccggcatcagtgctgaaactgcatccatccctggtgatagtggctgataaagcggcggctgcggaattgagacaaccgtaa

SEQ ID NO: 184900 - DNA, 1647 bp, Klebsiella oxytoca
atgtttaaaaaaaatctgattacatctgccatacttattatggcaccgctcgcttattcgacgcatgctctggcggaatcgctaacggtcgaacagcgccttgagcttctggaaaaggcgcttaaagatacgcagtccgaacttaaaaaatataaagatgaagagaaagccagaaatcaaatctggatcgccaatacgcagtccggtaccaacacacaacgtgcttctacgcaggttgccagcgctcccgcaccggccggcggcgcagaaaaaccagccgcggttctggtgaaaaacgaacagcccgcggcgaatggcgagtccatttatagctcgatgacaatgaaggatttcagcaagtttgtgaaggatgaaattggcttcagctataacggctattaccgttccggctgggggaccgcatctcatggttcaccaaagtcctgggcgattggctcgctcggtcgcttcggtaatgaatactctggctggtttgatttacagcttaagcagcgggtctatcaggaagacaataagcgggttgatgccatcgtgatgcttgacggtaacgtcgggcagcagtattcctccggctggtttggcgataacgctggcggcgagaactatatgcagttctctgatatgtacgtaaataccaaaggtttcctgccattcgcgccggaggcggatttctgggtgggtaagcacggcgcgccgaaaattgaaatccagatgctggactggaaaacgcagagaaccgatgccgcagcaggcattggtcttgaaaactggaaagtgggcgcgggtaaatttgatatcgcgctggtgcgcgaggacgtcgatgactacaaccgcacgttgaccaaaagccagcaaattaacaccaatactattgatattcgttataaagagatccctctttgggataaagcatcattgatggtcagcggtcgttatgtcgcggccaatcagagctcatctgagaaatataatgaaggtaataatggatattatgaatggaaagatacctggatggcgggaacgtcgttaacgcagaagtttgataacggcggatttaacgaattttccttcctgctggcaaataactccatcgccagcagcttctcgcgctacgcgggatccagcccgtataccacctttaacggcagatactatggcgatcacaccaacggcaccgccgttcgtttgacctctcagggagaaacctatttgagtgatgacatcattctggcgaacgccatcgtttactcttttggtaatgatgtctacagctacgagaccggcgcgcactctgattttgagtctattcgcgccgttgtgcgcccggcctggatttgggataaatataaccagaccggcgttgagctgggctatttcaagcagcagaacaaagatatcaccggcaagaaatataacgaatccggctacaaaaccaccctgttccatacctttaaagtgaataccagtatgctgacctcccgcccggaaattcgtttctatgcgacttatattaaagcgcaggatatcgacctggataaggcagccaacagcaatactcgcagcatttttgaagacggtaagaacgaccagtttgccgtaggcgcccaggctgaaatctggtggtaa

SEQ ID NO: 184901 - DNA, 378 bp, Klebsiella oxytoca
atgaaaaagattggctttttatcatttggtcactggacgccgtcgccgcagtccggaacgcgtgcagccgctgatgcgctgttacaatccatcgaccttgccgtcgccgccgaagaactgggcgcggacggcgcctatttcagggtgcatcattttgctcgccagcttagttccccgtttcccctgctggctgcgataggggcgaaaaccaaaaaaattgaaatcggcaccggcgtgatcgatatgcgttatgaaaacccgctgtatatggcagaggatgcgggtgcggcggacctcatctccggtggccgcctgcagctgggtatcagccgcggctctccggagcaggttattgatggctggcgctattttggttaa

SEQ ID NO: 184902 - DNA, 723 bp, Klebsiella oxytoca
atgaaaaaaacgctgcttgctttcactcttctttcggcctctttgccgacactggcatcttcgccgcttacccctgcgcaggaggctcgcgtccaggcactggtgcaggagacgctgcttaatcatcccgaaatcttgatcgccgccgccgaaaagctcgatcggcagaatgcccttgccgggcaggaacagcttcagcaggttcttactcagtacggcgatgttatctttcacgatcccaactcgccgcgtatcggcgcgcagcgaccgaagctgacgctggtcgtctttacggatcacaactgcccgtattgcaaaaagtttgacccgtatctgcagaagattgtcgagaaatatccggatgttgccgtggtctttaaatttctgccctggcgttctgaaagttcgctgacttcggcaagggctgcgctaactctgtggcgtgcgcatcctgaacagtttgtgaaatttaaccatatcctgatggcaaaaaagggatatcacgacggcgctagcattgagcaagccaagacgaaggccggggtcagcgtagcaacgccggatgaacaaagcctggcgacgattaagcaaagcctgctggtggccgaaaagctcggcattcagggtacgccagccacaatcgtcggcgacgagatgctgtcgggctggatcccctgggagcaatttgacgccatggtcagcgacgcgctgaaaaaacagtaa

SEQ ID NO: 184903 - DNA, 2025 bp, Klebsiella oxytoca
atgctgaatatcttcaggggcctcgtcttcctgttgctgacctgcgcgagcgttgctcatgcggcagacaccggatggctgacatccccacagaacgaccacgcccgggtccgcttccaggcggagaaagagaacgatcggatcgacgccctgctctctattgagctggcttccggctggaaaacttactggcgctcgccgggtgagggcggcgtcgccccgcaaatcgtctggcataacggtgaacaggcgcagtggtactggccggttccctcaaggttcgagatttccggtctgacgacccagggctaccatcagcgggtcgttatcccgataatcatcaccgccgttcccggcgacctgctggacggtacgctcacgctatccacctgcagcaacgtctgtttgttaaccgactacaggctgcgtctggatttgagtcagcccgccactgccggttttcaggaggcttttgcacaggcgatgcgaaccattccggcagataaaggcgtgtcggacgatctcgccgcgcatcgggtcggcagcgacctggtgataaccgccaccacggtcggtgagtggaaaaaccccgctatcttttttgatcccatggagggcgggataatcgctggcgctccgcgcctccgtaccgagggcgccagcctcaaggtaacggtaccggtaaccgatgaatggggggaagagcccgcaacccttgcgggggaagcgctgtcgttggtgctgacaaatggcgcaaaggcgcagcagaccagtctgacgatcggcgcagatcttgcgccaacctcaacggttagcctctggaagatgctgctttttgccctgatcggcggattaattcttaacctgatgccctgcgtgttgccggtaatgggcatgaagctcagcgccgtgctgcagtccgggtcagataagcgcgcgatcgggcggcgttttcttgctaccagcgcaggtattctgacctcatttgtcctgctggcgctgatggtaacgatactgaagcttaccggcgcgtccctgggctgggggatccagttccagaacccctggtttatcggcttaatgattgccgttacgtttatcttttcgctcaacctgtttggcgtcttcgaggtgctgctaccgtcatcagccgttaaccggatggcgaccgccggcggcaccggcatggcgggcagtttctgtgaaggcatttttgccacgctgctggcgaccccctgctctgcccccttcctggggaccgccgtcgcttttgcgcttgctgccccactgcaggaactgtggctaattttcctggcgctcgggctgggtatggccatcccctggctattcgtcgccctgttgcccaggtcggccgctctgatcccgcgccccggtcgctggatgaattcactgaaaatggcgctcggcctcatgatgctggcctccagtttttggctgacgacgctgctgggcctccatctgggtgagacccccggcggcattattgcgctggttcttaccctggcggcgctggccgccctacgggtaacccataagcgtacgacatctgccttctggctggtgattattgcgctggcggcgtttgccggcttccagcttcgcggcctgctggcaggagaacccgcgcgcgctaccacggaggcaatggctcagccgatccgctggcagccccttagcgaggaggctatccagaacgcgctggcggcgggcaaacgggtctttgtcgatatttcggccgactggtgcgtgacatgcaaagtgaatgaacatcgggtattaaatcagcccgccatcattagcgcgctctcccagcccgacgtagtagcgctgcgcggggactggagtctgccctccgaaccgatcgcccgtttcctgcaaagcagaaatcgctacgccattccgtttaatcaggtctacggcccaggccagccgcaaggcgacatactgtcgccgctgctcgataaacaaaccgtcctcaacgccctcagccgtgccaaaggttaa

SEQ ID NO: 184904 - DNA, 306 bp, Klebsiella oxytoca
ttgaaaccattcagcgagatcgagaataacatgaacggtgcattggtcataccaaaattgatatgcatcaagttttactgcatattttttgagcgcgcaatcgcagaaatggataaaaaaagcccgcattgttttcacattgcgggccgggagcgatcagccgagggttttgaaggcttttattcgctggagatgcggggagatatttttaaacttgtgggtctgttcttcatcccagatgatctcatagtaatggtgcagcaggtccgcagaacgctggctatccagcgcttcatcctgtcgtga

SEQ ID NO: 184905 - DNA, 423 bp, Klebsiella oxytoca
atgaaagtgttattaactgtcgttcgtttttttaaaacacaattccggccggtaaaatacctgagcctcggtctggcctgcatattcacatctcaggcccaggctcttcattgtgaattcacaaagttatataccgataacatttcaatccccgttgttggtctcggaatatccaccgccggtgaagacgttccggtaggtaaaattttatatcgccaggactatcgaagtgccagcagaactacatcattcgcatgtaccgttgagcttgaagatattgcatccgcgccatacacaatgaacacatatacaaaaactgaggttatatccacgccgtcggggccggcagtgaagtcaggtggtaaagatatattcccaaccaacgtttccggtattgggctattttttatctttccgggatag

SEQ ID NO: 184906 - DNA, 135 bp, Klebsiella oxytoca
atgggtagcgcaagcgctgacgtggttaaagggataacggaaaaccaaaattatcccggtaccattgctgcgcagccctgtcctgacgcggcctccgccgttgcctgcagggagcgcagcgttctcctgctttga

SEQ ID NO: 184907 - DNA, 1677 bp, Klebsiella oxytoca
atgtcgtgtctttcttctgccagatacgggtttctgctggccagtctcactgcaacagccctcccggcagcgcccctgagccctgcggaccagaatgccattgagcaacaacaaaaggcattactggaacaggcgcaacagcagcgcgacctactccgccattccacacctgatccctcactaccggaagcaacccccgcagaaccgaccggtcagtgttttgcactgcggcatatccgactcgagaacgtcactgtgctcccgctatctgtgcagcgaaacttgacagcaatcccaacggagggatgtatgtcactcaagcaaattcagcagcgggtgcgggatgttacgcaggtttatcttgcccgcggattcattacttcacgcgcctggttacctgaacaggatatttctgcaggatatctggttatttccgtgacggaagggaaagtggaaaccgttatcctgcaggggcaggaggaaaatgcactgaagatggcctttccgcaaacgcaagggaaaatacttaatcttcgcgatattgaacaagggctggagcaactgaaccgcctgacttcgcggtcgctgaccgtggatattctgccggggagccgggaggggttttcccgggtagagctggtaccggtcagtcagcgttttcctgtcagtcttgatgtgggcgcagataacagcgggcagaaaagtaccggcagcggacagctgaatgcccgcctgacagcagacaatgtgatgggactggcagaccagtggacactggccgcaggcagggacagtgagtttcaccataacagacgcagccgcagtatgcaggccggcgtaacagttccttacgggtactggctgttcagtgcgcagtatgcgtggtctgatttttatcagacactttctgttggtggatccccgcagcgctggcgctatgcaggcaccctacaatcacagcggctggccgccagccggacgctactgcgtgacggtaagcaacgtcttgcgctggatgccgctttttcccgccgggaaaccgaaaaccggctgggcggcgtacgtcttgacgtcagcagcccgacgctcagcagcgtgactgccggactgagctacagccggagtatcggtggtggctatctcaccctgggcccgtctctttctcacggcgtcccgctcgcgagcgcgacgcgggatgacccggcgcatcccggcctgccccgcagcaaattccggcgcttcagcgcaagtgcaagctggttttacccgatgacatccactgtgtactggctgaccgcagcctgggggcagaccacgcctgacagactttatgccagtgagcaactgtccgtcggagggcagtattctgtcagggggtttaaagagcaatatctcagcggcaaccgcggcggctactggcgcaatgaactgacatggcaatggatgacggtgccgggcgtgggggcattctcagcaacgggggcactggataccgggcatgtcatgcgccagaaagggataaccgacggcggtacgctgacaggggcttccgtcggactggagctgactggtcgcaggcttagccaggctctgaccctgggtatgccgttgtcgtatcccgacagactcagtccggataaacacgtggtttactggcaggccacagtttcactttaa

SEQ ID NO: 184908 - DNA, 948 bp, Klebsiella oxytoca; identical to SEQ ID NO: 176871

SEQ ID NO: 184909 - DNA, 1704 bp, Klebsiella oxytoca
atggcggtggaaaaactgattgtcgaccacatcgacacctggaccacggcgctacaaacccgctccaccgccgggcgcggcagctcgggtaagatcgacctgtacggcattaagaagctgcgcgagttgatcctggagctggcggtgcgcggcaagctggtgccgcaggatccgaacgacgaaccggcgtctgaattgctgaaacgcattgcggcggaaaaagccgagctggtgaagcaggggaaaattaaaaaacagaagccgctgccggagattagcgaagaggagaaaccgtttgagctgccggaagggtgggagtgggttcgtctaggagaaatagtagaagttttagactatatgaggaaacccatttcaaaagatgagcgaacacagggtatatatccttattatggcgcttcaggcattgttgatcatgtcagcgattatatatttgatgataaattagtgcttgttggagaggatggtgctaaatgggggaagggtgataagactgcgttctgtatttcaggaaaaagttgggtaaataatcatgtgcatgtactaaaattatttaactcaattataaccaatgagtttttagttaattacttaactatttccgatctagcacattttattactggaacaactgttccaaaacttaaccaagcaaaattaatatctatccctgttattatttcaccaattaagacacaaattaatattaacgccaagatcgaacagttaatgtccctctgcgaccagctagaacagcactccctgaccagcctggacgcccatcaacagctggtcgaaaccctgctaaccacgctaactgacagccagaacgccgatgaactggccgaaaactggtcgcgtatcagcgagcatttcgacacgctgtttaccaccgaagccagcattgatgccttaaaacagaccattctgcaactggcggtgatgggcaaactggtgccgcaggacccgaacgatgaaccggcctctgaactgctcaaacgtattgcgcaggaaaaagcgcaactggtgaaagacgggaaaattaaaaagcaaaaaccgttgccaccgattagcgatgaggaaaaaccgtttgaactgccggatgggtgggtatggtctagattagatcatgttgcaacaaagattaccgatggtgatcataaaactccaccacgcattgctgaaggttataaattactttcagccaaaaatattcgcgatggttttttagactatgaaaactgtgattatatttcagagtctagctatataaaatcccgtgaaagatgcttacctgagaaaggtgacctattaattgtttcggttggcggaacaataggaagatcatcattaattactggcgactctgaatttgcactcgtacgtagtgttgcaataataaaaccattaattattgaaccaaatttcttgaaaatagctatggactcccagttattacaatctatgattcactcgcacaaacgcggtggagcacaaccttgtttatatcttggcgaaataagcaaatttctattccctgtacctccattaaaagagcaaaaaagaatcgttaatacagttaatatattcatggaaatccttgagaccttaactttagcattcaaatccgcccaacaaacccagctccacctggccgacgccctcaccgacgccgccatcaattaa

SEQ ID NO: 184910 - DNA, 981 bp, Klebsiella oxytoca
atgaatatcccgttccttcgccctcttagcgctatcgcgttatgcctttttaccgcctctgcctgggccgccgaagcgccttcccgtaccgaatgtatcgcgcccgccaagcccggcggcggcttcgatctcacctgtaagctgattcaggtgagcctgatggaaaccggcgccatccaaaaaccgatgcgcgtcacctatatgcccggcggcgtaggcgcagtggcctataacgctatcgtcgcccagcgccccggagaacccggcaccgttgtcgccttctccggcggctcgctgctcaacctggcgcagggcaagtttggccgctacggcgtggatgatgtccgctggctggccagcgtcggcaccgattacggcatgattgccgtccgcgccgactcgccgtggaaagatctgccgtcgtttatggcggcaatggaaaaaaatcccgccagtatcgtcatcggcgccggcgcctcaatcggcagccaggactggatgaaagcggcgctgctggcgcagaaagcaaacgtcgatccgcacaaaatgcgctacgtagcgtttgagggcggcggcgaaccggtcaccgcgctgctgggtaatcacgtgcaggcagtatccggcgatctcagcgaaatggtgccttatctccagggcaataaaatccgcgtgctggcggtcttcgctaacgaaaggctgcccggcgcgctcgccgatgtccctaccgccaaagagcagggctatgacctggtgtggccgattattcgcggtttcttcgtcggcccgaaagtcagcgatgccgattatcagtggtgggtggcggagtttactcgactgcagcagaccgacgcgtttaaaaaacagcgcgagctgcgcggcctgtttgaattcaatttgaacgggaaagagctggacgcctacgtcaaagagcaggtggaagagtatcgcctgcaggcgaaatcttttggcctggccaaataa

SEQ ID NO: 184911 - DNA, 1449 bp, Klebsiella oxytoca
atgagcaaaaaaggattaaccaccggctccggcgcgccggttgtcgataataacaatgtcatcaccgcaggtcctcgcggcccgatgctgctgcaggatgtctggtttctggaaaaactggcccacttcgaccgggaggttatcccggaacgccgaatgcacgcaaaaggctccggcgcttacggtaaattaacggtcactcacgatatcagccgctacacgcgcgcaaaaatgttcgccgaggtcggtaaaaccaccgatctgttcctgcgcttttccaccgttgccggagaacgcggcgccgcagacgccgagcgcgacatccgcggcttcgctatcaagttttataccgaagagggcaactgggatctggtaggcaataatacccctgttttttatcttcgcgacccgctgaaattcccggacctgaaccacgtagtgaagcgcgatccgcgcaccaacctgcgcaaccctacctggaagtgggattttttctccctgctgcccgaaacgctgcatcagttgactatcgacttcagcgaccgcggcatcccgcgctcttatcgccatatgcacggcttcggcagccacgcgttcagctttataaatgccgacaatcaacgtttttgggtgaaattccactttaaatcccagcaggggatcgccaacctgatggatgatgaagcaaaacgtctggtggccgaggaccgcgagagttcgcagcgcgatctctatgagtcgattgaaagaggcgattttccgcgctggaccttttacgtgcagatcatgccggaagcagaagccagccgggtcccttaccatcctttcgatctgaccaaagtatggccgcatagtgattatccgctgatagaagtgggggtacttgagctcaaccgcaacccggacaactatttcgccgaggttgagcaggttgcgatgaatccggctaacgtggtgcctggcgtcagcttctctccggatcgcatgctgcagggtcgtttattctcctacggcgacacccagcgctaccgcctgggcgttaaccatcatcagattccggtcaatgcgccgcgctgcccgttccataactaccatcgcgatggcgcgatgcgcgtcgacggcaatagcggcaacggcgtcacctatgagccaaacagcttcggcctctatcaggagcagccggactttagcgaaccgcctttaaatcttgaaggcgcggcggctcactggaatcatcgggaagataacgactattttagccaaccgcgcgcgctgttcgggctattaagcgaagacgagcatcagcgtatgttccatcgaatcgccagcgatatgcgggatatccctgaatttatccagcagcgacaaattggcctgtttagtcaagtccatcccgactacggcgcgggcgtggccgcggcgctgaaagtcttacagaaaaccctgtaa

SEQ ID NO: 184912 - DNA, 903 bp, Klebsiella oxytoca; identical to SEQ ID NO: 174989

SEQ ID NO: 184913 - DNA, 1185 bp, Klebsiella oxytoca
atgcctttaaacgatatgcagattcgccgcgctaagcctgaagctaaagcctatacacttggagatgggcaaggcttgtcattacttatagagcctaatggaagcaagagctggcgattccgctatcgctatgccggtaagcccaaaatgatctcgcttggcgtgtatccgacgattacccttgccgatgctcgctctcgtcgtgatgatgcccgaaaactggtcgcggaaggaaagaacccgagtgaagttcgaaaagagcagaagatcgctttgcaaacggaatccgaaagtgcgttcgaaaagatagctacagagtggcatcagatgaagtccgccaaatggtcggcaggatatgcgtcagatatcatggaagcgtttcaaaacgacattttcccgtatgtggggacaagacccatcggtgaaataaaaccgctagaactgcttaatgtgctgcgtaaaattgaaaaacgcggggcgttagagaagatgcgcaaagtgcgacagcgttgttcagaagtgtttcgttatgccatagctactgggagagctgaatttaatcctgctgcagatctctctagcgccctcgaagtacatcaatccaatcatttcccgttcctaaaagctgatgagctaccagattttcttcgtgccttacacagttacacagggagtcggctggtccagattgctacgaaattactcatgattacgggtgtgagaaccatcgaattgcgtgctgcattgtggtcagaatttgatctagataacgctatctgggaaattcctgctgaaagaatgaaaatgcgcaggtcacatcttgtgccattatcgactcaagcgttagatttacttaatgaactcaagatgatgacaggtaactatcgttatgtttttccggggcggaatgatccgaacaagcctatgagtgaagcaagtataaatcaggtcatcaaacgcattggttatggtggaaaagttactgggcatggttttaggcatactatgtcgacaattctgcatgaccaaaattataatagtgcttggattgaaatccagttggcacatattgataaaaattatattagaggtacttataatcatgcaaattacatttcacaaaggaaagaaatgatgcaggtttatgcaaatatgattttaaatttaaatgagggtcacttatga

SEQ ID NO: 184914 - DNA, 2097 bp, Klebsiella oxytoca
atgatcgatttttttgggattgaatcaggtaatatcgcccttattaggatgtttgaagcagctttagctgcgaaaaaaaacatatcaggacaatattttagagggtttcctgtagtatacctagcagatagtactctcaagctaaatgggctgttgtgttctccagaactcggcgtagtaatttgtcatgtcatggaagaaactgaggtcaatgaagactatttagattctatagaccaaatccacatgaaatttaaaagtaaattgggtgaagtaaaactccttagagttaataggactctacatgtcccaataaatacaattgtttattgtcctaatgtaaaaaatagtgaaacattttctggtgaggatgttttatttattaacgcattagatgacatcaccaactctttatctgatgttaaatggaattacccagagagtttaaatgttttattatctaatattcaatccctttctaaactgaaaaatacaaaaaaaagaaactcagttgaaaacagcgaatcaaaaggcagcgtactgaaaaaacttgataatatgctgtccgtgctagatccttgtcaattaagagctgttttagaaaatattgatggtgttcaaagaattagaggccttgctggttctggtaaaacaattgtattggcaaggaaagttgcacatattcattcacaaaaacctgattggaaaattgcagtcacattcaatagcagatctctaaaagagcaattcaaaaatcttattgaaacattttctgatgaagatggaattgattggaaaaaaattgatatcattcatgcttggggtggaacatcatctaaaggattatactatgaggcttgtttagctcacaatattaagttccatgatctaagtagtgcaaaagcaataaaaaaatttgatgaagagatatttcaagcggtttgcagagattttcttgaaaataaaaacaaagatattaaattatatgattttattttggttgacgaagctcaggacttttcatcagaattcctacaaatttgctattcattattagatgataataagagacttgtatatgcttatgatgagttacaaagtttaagtgacagatcgatgccctcacctgaagatatatgggggatggatgagaacggacaaccaaatgttacattccaatccaaagagcaagatgtgaccctagatatatgttacagaaatcctggtgcagtcctatcttcagctcatgcattaggttttggtatctatcataacccaatgattcaaatgtttgattatgaaggcctttggcaagaaatcggatatgaggttctagacggtaaattagctgaaggtgaaagagttgtacttggcaggactcaaaagtctagcccatccttgcttagtggccataatagcattgatgacattattagttttgttgattttgacaataaaaaaaatcaatccgattggatagcccaagaaataataaaaaatgtcacacaggaagagctcctgtttagtgatattttggtaatccatcctgacactcagaaaatgcgcactgaagttggctatctacgtgggttgctttttgatgccggaataaattcttctatagccggagtgacaagctctcctgatgaattcttttccgatgatagcgttacatttacatccatttttagagcaaaaggtaatgaagctgctatggtatatatcatggatggacaatattgcaatgcaagcaataggagagcatggcgtaggaatatactctttacagcaatgacccgcactaaagcttggttgagagtatgtggtgtaggtcagtattttcaagagctaaaaagtgagtttgaaactgtaaaacaaaatggttttcgtttaagtttcatatatcctacgactgcggagcgagagacaatgagggttgtaaatagagatatgacctcagccgagcgccgtcgtgtcaatgaagctaagagaagcgctgcaaatttaaatatattattagatgatggaacagttaatatcgaagatatcccattagaagttagagagcaattaattagaaaattgatgggaggttga

SEQ ID NO: 184915 - DNA, 654 bp, Klebsiella oxytoca
atgacgccggatgaaacgtgtgatgcaatcaataaaattactcgtcatttgatgacagtggggcttgctgattcacaaaatttttcgcgcgttgaaaataaaggggatcatgtaaatgtagtttataaaggctatagtgatgtttccaaggccctcagagatgtatcatataaagaaatgtatgagttcttagatgaaaaggatcaatattccattaaaatgcttgatggtggattaattcattacaaatatcgctttgttgggcggggagtattagaaaagcatacattagcttattatccagcccctcattttgagtcattccaaaatgatccagagctatttttagatgagagtcacttttactcagaagtgataaacaaaaatatcctaccagtccctttgcgatttgattatgcgcctgaggatgctgaatgcattgaacatccggcatcacatttgaccttagggcaatataagaattgtcgaatcccattagcggctccactttgtcctgtgagcttcactaatttcatactacgctctttttacaatacagctttcgtttctattgaacatagccagaaaaatttcttacacacaagaacaatactccctgaggaggaaaaaatccttcattttaatatatggtaa

SEQ ID NO: 184916 - DNA, 921 bp, Klebsiella oxytoca
  misc_feature (792)..(801): n is a, c, g, or t
atgaaattttttattgcaatacctacctataatggtggaaaaatctggaaagatgctgtgtataatattcagcaatatgctccaggaaagtcattagttcaagtaattgattcaagcagtaaagatgaaacattaaatatagcgcgaaaagctggattttctataaaaactatagatagcagtgattttaatcatggagggacaagaaatcttgctgtgtatgaacatgctgaattaaatgacgtagttatttttttaactcaagatgcaatccctgagcctgaatttgttactaaaattattgcggcatttgaagatcctttggttgcatgcgcatggggccgtcaattgcctcataatgatgcgaaccctattgctcaacatgcgagatattttaattacccatgcgagagccatatctgtagtatgcatgatagttctaagcttggcttgaaaacagtatttatgtcaaactctttttcagcttataggattaaagtttttcaagagcttggcggttttccatcgaatactattttatgcgaagatatgtattttactgctaaagctgtattagcagggtacaaggttgcttatgtttcggatgcagttgtacgccattcacataattacctacctttggaagaatttcgaagatattttgatattggagtatttcattgcgaacagccatggattcgagaaacattcggtggcgctgggggagaaggcataaaatttctaaaatcggagcttcgttttctcatcaagcatggaatacattatattccnnnnnnnnnnttggctttacttaataatttaatgaaaatagccggttacaaacttggacaaaaatataaaaatcttccacgcggtttagttaaatcattaagtatgcataaacgttattggaaaagctaa

SEQ ID NO: 184917 - DNA, 2169 bp, Klebsiella oxytoca
atgttagtgactaggaaaaacgcagaaaaagattctgatgagattgatttaggccgtttagttggagaattaatagatcatcggaaattgattatatctgttacagcattgtttactctcttttcccttgcttatgctctatttgctacgccgatttatcaggcagatgccatgatacaagttgaagagaggcaggctaattctatcttaagtaatttgagtcaaatgctgcctgacagccaacctcagtcagcgcctgaaattgctttaatacaatctcgcatgatcttaggtaaaaccgtagacgatctaaatctacagacgagggtagtacagagtcactttcctctctttggggcaggatggtctagaatcatgggtgataagcaacatacactttcagtttcgagattttatatcaagaatagtggtgattacgatagtgatattgttaaagcaaaagttaaagtcatagatagcacacattatttactgttaagcaatggtttcgaattaaatggaactgttggtgagttgataaatgaacatggtatagcgataaagattgatgaaattaatgctcctgcgggtacctcatttgatatttatttagtgccgcgacttaaagctattacagatcttcaaaaaatgctttctgtaagcgatcaaggtaaaaacactggaatgcttactttgacagtcactggagatgatccttctttaattgaaaaaatacttgatagcatcagtggaaactacctagcccaaaatatagcacgtcaagctgcccaagatcagaaaagcctagagtttttgaatcagcagctacccaaagtaagggcagaattagatactgctgagaataagttaaatacttatagacggcaaaatgattcggtagatttatctttggaagctaaatccgtattagaccaaattgttaacgtcgataatcagttaaatgaactcacatttcgtgaatcagaaatctcgcagctttatacaaaagagcacccaacgtataaagcactgcttgaaaaacgcaaaactttagttgatgagaaagcaaaactaaataaacgcgtttcaggtatgcctgaaacacagcaagaaatattacgcttgagtagagacgttgagtcagggcgagctgtatatatgcaaatgcttaatcgccaacaagaattaagcatctctaaatcgagcgcaataggaaatgttcgtattattgataatgccataactttgcctcaaccagtgaaaccaaaaaaagtcattatagttttattaggtatcatatttggcagcatgttttctattgggttagttttgcttagagtgctattgcgtcgtggtatagaaagtcctgaacaacttgaggagataggcataaatgtttatgcaagcatcccagtggcagaggctttttctcagaaaacattacaaaaaaataactggctgaggaaagaaaaggatgaaattcaagggttccttgctatcgaaaatccagccgatattgcgattgaggccattaggggattacgaacaagtctccattttgctatgatggaagcaagaaacaatgtcctgatgatttctggggcgagcccaaatgcaggtaagacatttgtaagcacgaatcttgcaacaataatagcacagacagggaaaaaagtcctgcttgttgatacagatatgcggaaaggctatacacataaattatttaacgtatcaaatgaaaatggactttcagattttttatctggcaagactgaaatgggaaaagttgttaaaaaagttgatgcgataggctttgattttatatctagggggatggcgccacctaatccggcggaacttctaatgcatcgtcgctttggagaactaatttcatgggccagtcagaattatgatatcgtagtattagatacaccacctatactggctgtaactgatgctgcaattattggtcattatgctggaaccacattacttgttgctcgctttgaagaaaatacagtcaaagaactagaggtaagctttaaacgtttcgaacaaagtggagtttcggttaaaggatgtatcctaaatggaattgttaagaaagcaagtagtcattatggatatggctataatcattatggatattcatatagcaatgataaataa

SEQ ID NO: 184918 - DNA, 135 bp, Klebsiella oxytoca
atgctttttggacattggataaatcagaaaaatatccccgacccttatcgtaaaagtgaagaagcatttgcttcggtgtatgacttgattgaacaagccggaaaactctgggtcgagaagcttagtgctaaataa

SEQ ID NO: 184919 - DNA, 366 bp, Klebsiella oxytoca
gtggcgctggacaccaatacgctggccaataacgtcgaccttgatgatgcggtggtcagtattgtgcccacccacggggcgattgcgcgcgccgaatttaaggccagcgtcggcatgaagctgctgatgacgctgactcacaacggtaaaccggttccttttggcgccatagcctccgctgtcgatagccaggccagcagtatcgtcgccgataacggccaggtctacctgagcgggatgccgctggcgggcaaggtgcgggcgaaatggggcgaaggtccgaacgccagctgtgaggccagctacagcctgccgccggaaagccagaaccaggcgttaagccagctgtcggcagcgtgccgctaa

SEQ ID NO: 184920 - DNA, 1257 bp, Klebsiella oxytoca
atggctctgacagatatcaaagtgcgttccgcaaaatcgcaggaaaaggagtacacccttgtcgatggggatggcatgtttttgcttattcatcccaatggctcaaagtactggcggttccgctttcgctttggtggcaagcagcatctgatggcgtttggtgtttatcctgaaacatcactagccgatgcgaggcagaagagggaagaggccagaaagcttgttgctgctggtattgatcctcgtgagcataagcgtgctgtaaaggaggagcaggcaaaagaggccattacctttgagtcagttgccagagagtggcacgcagcaaataaaaaatggacagaagaacatagccgacgggtgctgaagagcttggaagataatttgttcccagcaattgggaagcggagtattgatagttttagtacgcgcgatctccttgtccctatcaaagtagttgaggctacagggcgtcttgaagtggcttcgcgtcttcagcagcgtaccaatgcgattatgcgttatgcagtgcaaagcggtttgatcgattacaatcctgctcaggagatggctggggcagttgcttcaagtaatcgtgtccatcgaccagcacttgaactgaaacgcttacctgaactactccagcgaattgatagctactccggacgacctttaacccgtctggctgttgagctcacgttattaatctttattcgttccagtgagttgcgctttgcccgttggcccgagatcgattttgaaagggcaatgtggacaatcccggcagaacgagaagctatagaaggtgttaagcattcgcaacgaggttctaaaatgcgtacacctcacttagtaccgctgtctcgccaggcattggaaattctgaaacaggttcacaagtttagtggcgagcgtgattttgttttcgttggcgatcataaccctcgtaaaccgatgagtgaaaacacggtgaataaggcgctgcgtgttatggggtatgacactaaggtggaggtttgtgggcatggcttcaggactatggcatgtagctcgctgattgagtcagggctgtggtcaagggatgctgtagagcggcaaatgagccatatggaacgtaacttagtacgtgcggcttacattcacaaggccgagcacttagatgagcgccgattgatgttgcagtggtgggcggattatttggatgtgaatcgggagaaggggattagtccgtttgattttgctaaagtaaagacatag

SEQ ID NO: 184921 - DNA, 1125 bp, Klebsiella oxytoca
atggcccttgcataccgtaaagaaaatgcgctgaatgctatttgcccatattttactatgtttccgttggaatatcctaataaaataataaagaaatacaaaaaacaacgcccggtggttttagatccgttttgcgggagaggtacaacgcttttttcagctcgtacatttggagtttctgcatgggggattgattcatcacccgttgcagtagctgttgcaagagcgaaacttgctagttgtgatcccatgtcacctattgagcttgcagaaaatattctttctaaagttgatccaaataaaatacctaatactccattttttagggttgcatatcattctgatactctaagagatatttgcgcattaagagaaggactatctaaattaccattagatacagacagttccgttatacttagagctgcaatattaggggcattgcatggccctcttgcaagaaatatagataatatgagttatttttcaaatcaaatgcctcgaacttatgcttctaaaccagattatgctgtaaggttttggagtgagcgaggaatgagtccacctaaagtcgatgttttgcgagtccttcgtcgtaaaattgaacgtcttgtcggtctttcaagcgggattccggacacatttaaacaagtgatccaaggagactcaaggtctgctgatgtttttcagtctttgaatatgcgtccttcacttataattacctctcctccttattatggtatgaagacctatgtacaagatcagtggctaaggaattggtttttaggtggtcctgaatccgtagattacagttctggatcacaattagatcattctggtaaggatacattttcaaaatcacttggtgaggtttggcgtaacattgctaaatgtgcttctgaaagtaatgatctgcatatgtatgttagatttggaattattccatctgcatcagtgaatgctaaagagatatttagaaattcactagaagaatcgaacattctatggcgattgatatctgttcgggctgctgatagtgctgaagcaggtaagcggcaagcccatcaaatgagaacaggatcttctgccgctatagaatatgacttccatgtcgagcgaatttag

SEQ ID NO: 184922 - DNA, 4248 bp, Klebsiella oxytoca
atggcagataaaagaatatcaaaaagcactttgtcaatgtttctaagatcaaagtgtgacagaagtttatttttatctcttcaccaagattctgagttggctactcacaacatgccggttcccttgcaagctcgacctggagttggcgttcttcaaacagccggtcgtaattttgaggatcagcgtaacgaccaactgattcgagcttttggtagtagagttatctaccagccagataaattaggtacaaataaaccggtcaaagcttctctttctgatttattaaaaaaagtcaactctcttccgtctgtcattctccaaggaaaatttgagccaatagatttccaaagtgactttctaaataacattggacttaattcatctcactcctcacttattcctcctatagcagggcttataccagatattattttagtaagagagcccagagaggacgacgaggaaataaaaccaaatggaagccggaatgttatacaaactgcaacagaaaaacgttttgccctaagcattattgatattaaacatacaagtgaggcaaacccaagttattctgctgaggttgcattgtatgcgctactcctttcaaattggattattaaacaagggttgcagaataaatatttcgtcaccattcgtagttatctatggacaagattcaagcaaggacagtccatacttgatacgctattattaaaccctaacaacatagcacctgagcaatacatcaacgctcttatttcagatagtgaagatgcgaatcttcgattttatctacctacagtgttacatttttttcgcgaagatttaccgcgagtaatttctattggtgatagttctaataaaggctgggaaaatctggaatggcatgttgacagccgatgcagtgcctgtgactggctcggaaatgaagtatgggcaaatacaaaagataaaaccagaatttctgcctttcccaatcactactgcttcacagcagccaaaattaccggccacctaagccaaatcgcaggaatgacacgaggggcaagaaaaacacttaatctgaacagaataaattgcacaaacgatgtcgctacattgcctccttcagatattgcttttcaatctcatagtcacttaaagaaagagcgcagccgaatcccagcaagagcaaatgctcttttatcatcgaatacaaatgttgatacttcagctgtacttgctagcttagctccatggccacaactacattcatgtatagccgttaactttgatccaagcgccggattattaacgggattatcaattacaggaaaaacaactgcttatataaaaggtcaaagtccacgatacttcccaactaaatcgtttgttgtagatcagaaaaacttagacgatgaatggaacgctctcgaaggtttattatctacactatctgatatgattgatcaatccgaaaaatatattcgagaagcaggaaaaacccctctcacagctcaaattgcattttgggaaaaacgtcagtttgaggagttatgtaatgcgatggggagacatctaccacgcgtacttggtctaactgatagaaaaacaaaagcattagcatggttattcccagcggatgaacttatagaaaaaccggatggagcagttagcccatgtgtagtattcattgatgacattattaagagagttgttttctctccatcacctcatgtcatcactttatttgacacagcaacaaactattacttcgggaactttcctgtcgtacaaaaagatgcttattatcgtgagtttcttactaatggtataccccgtgaaagaatatatgaaatatggagtaatgcggccacaataaaaagaggaagtgtcatatctccaagaaatactgttattcaagaatttgcaaacgctttagaaaaacaatgtaaagcgttaaacagtattgttgataaattacgatttgacttcagcgggcatttaaaggcaaatgctcctaaactctctctttctatccccagaggtacaacaaatgttgcttttgactccaaactatgggtttggtgggatgaattacaatatcagacaaaaaaattagagtcacatcagagaatcgctcttgacgccgagacattagaggcaaactacgatgctattagaattacaaatggaagaccaacaggtcaacctaacgagtatgtattcgatgtactaactggttctacagaggctaaacttgatgacaatgatggttttttgattcttggaaaagaaggattccctggttttccattacaacgtgcattagatatcttaaataagggtattaactattctttaattcaagatgcattgttgaccactcccttatggtcatcacttagcgtaacattaatttcattcgatagaaacactcgtaaggcagtactatcaatatttaatagaaagcaaactaatttctttcagttacttgtcgcaaattcgcctatagatttcatgaatgatgtttttataacaaaagggcaatcatcatttaaatggtatgaaaaagtaaaaaatatcttaagcttagttggaaatccatcaatagctgttgcagatactaacgctgcacatgcaatgggggctaaacctgcaaaatctggtaaagatgttgtgactcctcttgcccgcgtattatgggaagctgataccctttataataattcaataatttcaacagcagatgctaaatctattgcctcatatgcgaaagcaaaatttggtttgaatgatagccaaaaggctgctatatcacatgcttcagaaaaaggattaacgctaatatggggaccacctggaacgggcaaaactcaaacattagcagcatgtattcatagcatggtctatcatgctatgaataccaacgcccccttaaaagtcttagtaacaggtccaacatataaagcagttgaagaacttatagaaagggtaattaactcactaagtgcggaaaaatcgtgtaacactgagatattcgtaggatattcacaatctcactccccaaaaaacatctcatgttgcacaacacacttaaaagtgtcttcatttaaactctcaaatagcaataatgaaacagctgattgcattgcaagtttaagggatacaaaatctactacaatagtcgcaacatctactatgcaagcttataaacttgccgaatggatgcatggttcttccgtagctcctatttttgacattttaatcatagatgaaagctcccaagttcaagttactacagctatttctccgttagctacaataaaagatagctcacgtgttattatcgcgggtgatcatttacagatgccgccaatattagccttagaaccaccaaaaggatctgaatatttagtcagcagcattcaaaaatatctcatggaacgatcctttggcagtaaaatattgccatgtccattagaagaaaattatcgttctgccgaagatattgttgcgtatgcaagaactataggttacagatctactcttaaagcatcaaatgagaaaacaagccttcatttcttgtctaaatatccgaaaccactatcaaactatcctagcacccttccctggtctactttatggtctgatattctagatgaaaacaaaaagatattaacattattacatgaagatgaactatcatctcagagtaacattttcgaagcgaagattgtttctgctttaacttggatattaagtcagacagttagtaataacttgaacggcagggaagcatgtgttcatgatacgccgaccgccgaacacttctggcaaaaatgcattggtatagtgacgccacatagagcccaacgagcactggtaataagagagctaaaatctatttttcctgcagatcaaggagaacttattgatagcgcagtggatactgtagaaaaatttcaaggtggtgaaagacatacgatcattgtaacatttggagtaggtgatgcagatgtcatcatcggtgaagagacatttttaatgcaactagaacgtacaaatgttgctatatcgcgtgcaatggccaagtgtattgtagttatgcctcagactcttgcagggcatgtgccccaagataaaaaagcacttgagacagcccatgcaataaaagactatgttgatgaattctgtaatcaagaaatccttgcacagattcaatatggctcagaagttaggaatgctaaattgcgatatcatgtttag

SEQ ID NO: 184923 - DNA, 450 bp, Klebsiella oxytoca
atggctattgaaaatattagctcactggatgtacgtctgcgaggttttctgaaaaacactattatcggtcactatcctgagaaagggtttagcgttaacaccaaggttgttcgcagatcctacgggatatctaccttgttcgggatatttgcagttgccacgtttatttatgcagtatgggatgccgtctctactttctggaaaaacaaagagacagggttgtttatcttgtttttattgatttatgcttccgctattattactgttataggttatataatttcccagattgaagatatctacctgggatctaaatttgggcatttattcgagacttggctcaggaaccatccaccgtataacgatgtgaaccctgatacttctgtagcaacgccaacagaggagcaagcatcatccgaaggtccccaagaagattctctcgcaagttaa

SEQ ID NO: 184924 - DNA, 180 bp, Klebsiella oxytoca
atgtcatcgatttctgggattgatattgttacagggttgctcatccctgtagttctgtatttgataaagaaagtcattgactggacaggaaaagtcgttggcaacccacgacctaaacgaaaataccagtttgataaaattcctgcggataagaaagtagagatttttttcgaaaattga

SEQ ID NO: 184925 - DNA, 282 bp, Klebsiella oxytoca
gtgaggagatcaccatgcgtaaagcccgattcaccgaacaccagatcatttgccgttctgaagtctgtcgaagccggacgtaccgttaaggatgtctgccgtgaagcgggaatatcggagacctcgtattacaactggaaagcaaagtacggcggtatggaagcctctgatatcaaaaagatgaaagatcttgaggacgaaaaccgttgcctcaaacagatgtttgccgatctcagtctggaatgccgggcgctgaaagatgtcattgaaaaaaagctttaa

SEQ ID NO: 184926 - DNA, 606 bp, Klebsiella oxytoca
gtgtaccggatttactgtctgttgaaactgaattttcgtcgcaggggaaagcagcgtctgccggtacgcaatctcgcgccactggccacgccggaagcgctaaaccagaactggtccatcgattttatgcatgatgcgctggtcagtggcagacgcttcagaaccttcaatgtggtggatgactttaaccgcgaagcgctggcgatagaaattgacctgaatatcccggcccaacgcgttgtgagagtgctggacaggatcgcagcaaaccggggctatccgctgagggtgcggatggataatggtctggaacttatctcagtggcactggcgcagtgggccgaagaacatggggtaatgcaggaatttatcaagctaggtaagccgacacagaacgcgtttatcgagcgctttaaccggacgtaccggacagaaatcctggatttttatttgttcaggacactgaatgaagcacgggaaatcacggagcgctggctggccgaatataacagcgagcgacctcatgaatccctgaataatctgacgccggaagaataccggctgatggctgaaaacccggaaatctcaaaaagtacgtggaactaa

SEQ ID NO: 184927 - DNA, 273 bp, Klebsiella oxytoca
atgaaaagaagaaattttagtcctgaattcaaacgtgaatccgctcagttggttgaggatcaaaattacactgtttctgatgctgctaaggctatggatgttggtctttccaggatgacgaaatgggtcaaacaactgcgtgatgagcgtcagggcaaaacgccaaaagcctccccgataacaccggaacaaatcgaaatacgtgagctaaagaaaaagctacaacgaattgaaatggaaaacgaaatattaaaaaagctaccgcgctcttga

SEQ ID NO: 184928 - DNA, 555 bp, Klebsiella oxytoca
atggagtatttaaacgatgagctgacagaaatgcagcaagtaaagcgggtagttcagcaggccatcgaccattacccacgtctggctgtatttcggttggcgttggactgcccaggccctgagacaatcggatgttttcaggataccgtctaccgacaaataagtgaactggcagcaacccgacaattgaggggcagaccatcgccaccaacaattctcagatggattggaagcaaaacttctccccacgcatatcagacactactgatgctcaaccaggacactttttacctttcccgacacgactcacttccggagaagtgtttccagacaatgaaaactctgctccgtcaggcatacaatacaacccgaataacgaatgaacagtatcagagtaatgaaacaaaaataaccgtcttcagagtggacagaacccaggcgggccactctgatgctgagcataaattattacaggaaaatgccctgtcgttccgacctgtagcgattacacagagcccccagtatctttccctgagtgacgaaactaaagactga

SEQ ID NO: 184929 - DNA, 504 bp, Klebsiella oxytoca
atgtttgccaaattcttcctagcacacaacggtaaacggtgcagtctggtctgccagaccgatagatacattacagaacatcctggtcgaggtactggcatgcgcatgctgaaatgttaccttgccaataatcgtgatgggcacattgtgactgctaaagacgcgatgcagtcaccaggcagggtatggacctgctcttcctgtggctgtcagttgatacttcatgcgggttcatctggtaagtccccctggtttgaacatgaccagcgaacagtgacgacgaacgttctgatgcaatgtacccatctcgatcctgaagtgaaagccgaagcccgatgccaaaaactacgcagaatcatcggcaatctggatgcacctgtaatggtgctgttctggcattgcgtgtggtgcggaaatcattacagtgggaaaaagcattgcacttcatgcggaacaggcatctacagtatcgaagaaactgacaagcaatcagatgcgaactga

SEQ ID NO: 184930 - DNA, 534 bp, Klebsiella oxytoca
atgaactcaaccatttttaccgcgcactgtcagacctggcttgatgaccccacccggctgcaggtcactcatgggctctgccagcctgaaattaaaaagtggcacaggctgaccgtgacgtcctgctcgttaccaaacgggcttaccggactgctcattatcccgcagtttttgctgacggtaacgcaggctgcttgtgtggaagaagaatcggtagcgggacgtatcattaaacgtgctgagggaccagcgctggcggggatgttgcgcagtgaatgttaccgactgggactcagtgcccttgctgagcggttatcgctgctcttccgccagtatccacagcccggtatacgtgaatcactgatgttgctgtgctggtgtgagctggtgaaagggattgagccggaagcatggtacgcactgcatctgctgcttccggccacgctgaagaaatggatcaatacacgacaaaaagagttcaatggtttatcggcactgactgaggattacattcgtgccacccggccactgtga

SEQ ID NO: 184931 - DNA, 333 bp, Klebsiella oxytoca
atgtccacccggctggattcagataccacgctgctgcttcaccatcccatgctggaaggcatattgctgagtgaatgtgcccgactgaagcagttcccggtacaacgggcactgctggtgatgctacagcggctgaccagccgagaaatccgacacaaaatagtctggctgtgctggcgcgatttaatgtgcggggatgacccttgcgactggctggagcgtctggtcggacagccagacgacgcgctgtatctctggctgggtgaccgccaggatagtgatcccgttttaaccctgatgatggatgaatacctgctgtttaccggcaactga

SEQ ID NO: 184932 - DNA, 267 bp, Klebsiella oxytoca
atgaccattaaaccttccctgtctgaagaccagttcgtcaatatggctttcatcacccatctcaccggattaaccgataaatggttctacaagctcatcaaagacggtgagtttccggcccccatcaagtttggtcgtagttcccgctggcgacagagtgaagtcgaagcctggctacaggcccgcattgatgcatcccggggagagaattccgccatggcaatgacccacaaacttaccgtaactcccgtggaggcgttgtcatga

SEQ ID NO: 184933 - DNA, 582 bp, Klebsiella oxytoca
atggactttccctggccctggaaccgcaaatacacgatgaactggttcctgctgtcgttactgaaccaccatcttgatcagctactggaacgttactcccgccttcagcccctcagactcgatgtgttctatcagaatgacacgtggcgttataaccatcacggatggtacgagacagaaagggaggtacgtcagttaacagaacatctgatgttagagagcaacatcgtaggtcacttctgggtgctggagtgtacttcccgacacaaatgccatgcccatatcgtgatgtatcttgatggtcaccataaccaggccacctttccgatggctgaacaggcaggggctgtctggcagaagattacacagggtgaggggtaccacaatcgctgtgatcgtaagaaatgctacgaagccgatatcacccgtcccgtcaattacgatgatgctgcagccatcgacaacctgcgctacatcatcagctacctcgccaaggagaaatcaaaacacgggcagacttactacggggccagcgaggtaccacccgcaagtggactgggcagaccgcgagggcttcgataa

SEQ ID NO: 184934 - DNA, 2310 bp, Klebsiella oxytoca
atggagttatggatatttataatagctatttatttgatttacattatttttttcaaaaagaagaaacctaagtccgcgggctcttatacttccgctcctgtgaaagcaccacctaaagaatggcttgctaacaacaaaaaacatcaggcggtaatgcacaacgatgacagcgaagatgacaatctggctacgtttacacgaagtggcggacggaatgtcgaatacagcataactgccactcaacgccagaatctctcaaaaactaccggtgctttggctcgctggattttaccgggagaggtgatcacagtcggtggggtagaggttaccggtggccacttctatcttggacagcgaatgaaacctgccgggcataactcaggtggttattatgatgatagtagcgaggcatcgctaattgacgacacgcttaagatataccccacaccttacatttacgaagatagttcattagggtactggcccagtttttcctcactttcacctgaaacacgtggcgcctacctaagttggcttgccagcgacagatgtgacacttcttgcccaattggttacgtttttatttatctgtatggtctggaaagacgggcgcttgttgacagcagggacaacaatatatctgacgatgagttctattctcttttcaaagagatctgtcgtctcagatcggttttcaatgaaaaccgatctttccggaactactcgtcccagctacttgaagcgatgtccattcttcgcccgaacgaaaatcttgcagcagctctcggcaatgattcggagttcagcaatagtatgcagttcaggctaatcctggcaaagacagttgaggcaggagccccggtgccagctgatctggctctgacgtgggtgacaaaccatactgaatattcattgcgaacccccgcccgccgctgcgcgaaagaatttgctgcactttttaaacggcgttacacccttaaatacggtgaagggatggtagtgaagccgaataaagcgcgtctgcgtttagattacacacctgcaagtccttgtttgcgaggtattcggcttcctgttcccgacttgcctgatccaattgtattgaaaggtcctgttcagaagcttatgacccttgccgatatatgcacagacgaactggatgcttacagtcgttaccttggtagaaaaggcacttcaacaaatgataccgctgcaattttgttgctgccttcagaaatcgttaacgaaagcgcagaaaaattattaagtgcattcaaacgctgggctgatgacgcgatcctcagtaagggtggagtagtttcagttgctgactactggtcacatatgaatgctacctgtccggcgaagataaataaaaaagaggccgacttgatgcaggcctttgcacagaaaatggggtactgtctggctcctgacccctattaccaccacgtaaaggcagatgtcgatggcgttcttgttttattccctgcaggagaaggtagacgcttctcaccttctcctgaatttatcacagctgtattgacgctccgattaggtgcggtagtcgccttgattgacaattctctcgatcaagccgaacagaaagtgctcgcgaatgccataaacaacaatgccagcttcagcgatgatgaaaagcgctctctacacgcatatttaacgtggcaacttcataccccggcgaatatgacgggaatgaaaagccggattgaattacttggtgctgcggaaaaatcagctgtgggtaaggttatcgttagtgttgcttgctctgatggcagaattacgcctgctgaagtcaaacagcttgagaagatttatacaagcctggggctggatccctcatccgtatcaagcaatatccatcagcattccgcaactgaaactgctctcgtttcatctgtaccagctaatcagtcgacggcagggtttacactggatgcaaatgtacttgcccgtcacgaatctgccactgatgatgttcgtaaattactgaactcgattttcactgaagaagaaccagaacaaccagaaagcgctccagcctcattaaccggggaagggggccttgaccccgctcatagccaactttatcgcaggttgctggaaaaagaacaatggtccagaaaagaggcgacagagttgtgcagtaactggaacctaatgctcggcggtgcgcttgaggtgatcaatgattggtcctatgcggtggttgatgcaccagtgctggaagatactgatgatcatatttgggttgacctggaaatagccaaagaattagagggttag

SEQ ID NO: 184935 - DNA, 699 bp, Klebsiella oxytoca
atgaaagaaacttgggcctccggctcaattgagttgttaagacatgctgattctcatattaagctggagacagcttttgatagtagaattgctttcataagtattgataattcagttgagacctccatcagaacgttcctgtctcttccagaaaaaatatcgggcgtaaaattccaacgaaaagaagttgaagaagctggtaacagttttccaaaaatggttgatcttctgtttgacaaagctcggcagaaaatagctggtctagatgatggtgatatcgagcactatcatcgcatcagaaatcagctatatcacaatggaactggcttaggtgttgaccgtcgatacctaggtgcttatcggcaaatagcagccgttctattgaataatttatttggtgtaaaagctgatcctaatgtggtagagggcacgctagacaatcttatattactatttaacgaagtggaaacattagttaaaaaaatattcgatggttccggtgtagacgccggccaaacgttcaaatgggaaatagcagtacgggcgggtattttggaaataaatgatattaaactgattagcgaattacgcatgattcgaaattctcaagtacattccactgccgaaaatatcgacaaaaaacgtatcgaactaggtgtcgaaatagctgaaaaattaataaaaaaaatgaaaaactaa

SEQ ID NO: 184936 - DNA, 438 bp, Klebsiella oxytoca; identical to SEQ ID NO: 113033

SEQ ID NO: 184937 - DNA, 810 bp, Klebsiella oxytoca
atgaaaactaactatttcacccataagttattccctacagatggggtaaatatttgcgaatcattgaaaacaagctttgatgccatgattgcaaatggcaggaatacggccacgctctcgaatgagtatcatgtcatccaacatatatctggcgatgtctatacatttataaaaacaaatagcagagatgtttttagaaagctagatactagcaacaatatatgcgttgatctttctaacattttaaaccaaaatgaaaagatagcattcgcatcattttttatattgaagggtgatttaataggctttagtaatactttgtattcccctagaattggtaagttggcggaaatatatgatgcaacaatgtttaccagaaacagcaatcacaatataaatttcacaccaataactaatgtagttacagagcaggatgttatgaattatgcccatgttggtaaaataaccatgaaaatggataaatctcaaggtatcattggtgggcttaacacactcttttctggtaatgtaacctatgatgatgtggattcttttgaaataaaaataatccccaagagaaccaaagatataaaggatactttctcaggactgatgcagggtaagcccacagaggttagttctgtagcagtgtcggctaaagaacacattggtgatgtagcaacagatctgaatgttataatgtcaaatgttgtatatgatttcgtaaatcctaatgacaccactactattgaagtccagatggaaaggaatttcaataataactctacgctgagaaatttgggttactga

SEQ ID NO: 184938 - DNA, 1134 bp, Klebsiella oxytoca; identical to SEQ ID NO: 113031

SEQ ID NO: 184939 - DNA, 2529 bp, Klebsiella oxytoca
gtgaaatacactcttgttttatgttctgtaatagcatcaatctccggatcgtacgcagcggatagcactccggaaaatgcattgtccgactcatctgcggcggatgattatattttcgagcctgaattatttcgcggtggaagattcagccagtcggctctcgcacagctggtgaagaaaaatagcatcgctccggggaaatacagagtcgatgtctctgtaaatagccactttgtcgataatattgaagttgaattcatcaaactcaatgacgattcggtttctccttgcttacctgagacctttttcaaaagtgcgggtattaaacttacgccgccaaccgccgccaattcatcatcagccccccgctgctattttttaaagcaggtagtaaaaggcggtagcgtggatatgaacgttgcgcagctacgtcttaatctcagcgtcccccagacagaaatggacagagcgcctcgcgggtacgttgacccggaagagctggattcggggacttcagtcggtttcgtaaactatattagcaactattatcatgtttcctattccggaaagaatagcggcaatcaggactcggcctgggcttcgctaagtggcgggatcaatcttggaaaatggcagtatcggcagttatccaatttaaactggagccgcgatggcggtagtacctggaaaaatatccgtagctacctgcagagacctctacccgaatatggcagccaactcacggcgggcgagctggtcacggcaggtcgtttcttttccggtctgaactaccgcggcttcagccttgctacggatgaccggatgctgcctgattctcaacgcggctacgctcctgttattcgtggcgttgccgtcactaacgccaaagtatccgtccgtcaaaatggtcaggaaatctaccagacaacggtcgcgccgggagcgtttgaaattacagacctctatccgacgagctatagcggcgatctcgacgttgaggtgagcgaagcggacggatcggtcagccgcttcagcgtccccttctccgccgtaccggaatcgatgagggcgggcatatcccgctacaacttcgagctgggaaaaacccgcgatactggcgacgaatcgctattcggcgacataacctggcagcgaggcctcagtaacgccatcactatgaacagcggtttgcgcatcgcagactcctaccaggcaatcatgttcggcggcgtttacggtagctggctgggggccctgggcatggacctcacctggtcgcatgcaaaggttcccgataccggctattccgaaggctggatgacgcacctttcctggagcaaaacgtttcaggagacggatacgacggtctcccttgccggataccgctattcgaccagcggctatcgcgatcttagcgatgtgctcagcctgcgcgatagcacacattatggcgatagctggcaatcgtccacctacagccagagttcccgattcgatatttcattgagccaaagcattggccagcttggcagcctgtatttgtcgggttcgacgcaggattaccgtgatggccgcaatcgagatacgcagttacagtttggctatagcaacagtttccacggcatcagcaccaacctgtccgtcggccgtcagcgtatgggcagctatggcgataacggtagcatgcaaaccatcacctcgctctcattctcaataccgctgggcacctccagcacgcgagcgccgacattaagcacctcctggactcattcgaccgatggcggcgatcagtatcaaagttcgctgaacggggtgattgatgaacagcaaacggccagctatggcctgaatatcagtcgcgatcagcagtaccgcaacaccgtcttcagcggcaacctgcaaaaacggttctcggataccaccgttggagtgaacgcttcgaaaggcgacgggtactggcaggcatccggcagcgcccagggcgcactggctattcactccggcggcctcactttcggcccgtatctgggcgacacttttgccctcgttgaagcgaaaggcgcggcgggagcgaaagtgcttaacgctcaacaagtgacgattgataaccagggttatgcgctggtcccttcgttgacgccatatcgctacaaccgggtcacgctggatccgcaaaatatggacggtagcgccgagctggtggatagcgaaaaacgtgttgcccctctggcaggctccgtcagcaaagtggtttttcgcacccgtagcggtacagccttgttaattaaagcccgattagccagcggcgaatcattgccgccgggttcggatgtcctggatgagggcggcaacgtcatcggtatggcgggccagggaggacaaatatacgtgcgtagcgaaaaaagccaggggcactttgtcgtccgttggggagataagtcagaagaacgctgcacgctgccttttgatatttctggcgcgcagccagagcagccgatggtcagattatcctcagtctgttcacgttaa

SEQ ID NO: 184940 - DNA, 171 bp, Klebsiella oxytoca
atgaaccgatcacaaatcacggtagcactttgccgggagcatcttcagtccattcgtgaaattcaggaagaggagcgcaagcgttctccgattggtgtagcaccaacggtaaacgctattgcccgcgcattggtcgctaagggccttgaatccgttaagcggggtgggtga

SEQ ID NO: 184941 - DNA, 186 bp, Klebsiella oxytoca
ttgataaaaggctacctgattgtggcctacctgacggcgattgccgcttggccagtcacactggcgttaattggtctctctgcaggagcggcattctatatgagacgcagggggctgggtgtagtcctcgtcgttctgttcatgctggtggccatcgctgcgtggcagtttgaacgctacatgtaa

SEQ ID NO: 184942 - DNA, 873 bp, Klebsiella oxytoca
atgacagcccaagttgaagctcttaacattgtatatactggcaaagccttagatacccataaaatggacatattggcattagcgcagagccttaagggattaggggatgctctttatgaagctaatattttgctgaatggggatgaaaaatttgaagtgaatgttgatgctgaacttattgcaggttcatttggctttcaacttcaggttgtacaacatttgagcaatgcaaaggatgtgctgaagctttttggcttaaaggcttcaaagattattattggcgaatcaacagtgttggaagttttagagaaactggatggtcgcaagatcgacatcgttgaaactgataaatcatcgggaaaggttaaacttttggttgacggtgaggaaattgtttgcagtcaagatgtagaaaagattgttaactcgcctgagattcgcaaagctgtagattcgttcatcagacaaccactacttaaagaaggaatcgaagggttagttgtcaaaccgtctaaaaattcaaaagatgttattttagaggtaaaaaaggaaaacgcagacaacttcaaatcaccgcgggtccttttcgagacgaaagaggaagatgatgaatccgaaacaacggttactttcctttcagcggatatcgagaagaagactggctggcgagtgatgctgaataaggaatcccggactgtgcggatggatgatgaagaattcatgcttcgtctaaagaataaggatacccccaatatttttggggaactgtatgctgttacgatacaaaagaaagttaaaaacactggtggtgatgtaactgagtccctgaagattgtgaaggttggcaggcgcttgggtggtaaaaagagttaa

SEQ ID NO: 184943 - DNA, 255 bp, Klebsiella oxytoca
atgctacataactttaactttgtaagcttgctaggtattctggcagcgctacctgccattattttaactatcagggttcttgctaaactattgatttcatgcatcttttataaagaaaaagtcacagttacttatcattcagaaaatggtgaaaagttcgagacaaagctttatctcaagaaaaatgatgatctgcttaacatattagatgatatagcgcgcaagagcagtcatgaggggaaatcccatggctga

SEQ ID NO: 184944 - DNA, 450 bp, Klebsiella oxytoca
atggctgaagatagtaaagcaggtggtagccgagctgttgggattgctggtggtggcggcgtaggaatgtttctaacccaattagccccactaattatggatgaaacaaaacggaatatttatatcgcagcgataccttttttcgcgcttcttttgggggagatttttacctttttgactaaattggtatccttggatgctgataaaatcagattaagaattagacttaagttcttgaaattcaaactctggcgagggaaaagtgataagtcggtgtcttcagagttaagggcgttagctcaacagcgttacgatataataaaaggtattgaaatgggggtctatgatattgatatgtacttccaacaagcaactgctccagcacccagtttagcacccagccagccagaacaaccgccactggtaccgccgccagaagatccgcgataa

SEQ ID NO: 184945 - DNA, 444 bp, Klebsiella oxytoca
atgacggcacaaatttcagcatacgggcggctggtggccgaccctgagacccggacaacgggaaaaggtacgaacatggctatggcccggctggcggtatcgctgccgtgcaatgccgcagcggacgggcaggctaccttttggctgggcgtcattgcctttggtaagcaggctgacgcgctggccaaacaccataaaggcgaccttgtcagcgtggcgggcaatatgcagctcaatcagtgggctggtcaggatggcggtacacaacaaggctatcaggtcattgccgatagtgtactcagtgccagaacggtacgccctaggggtaaagcaggacaacaaggacaggctactgatgctctacgcagggctcatgagcagcaactacccactaccgggtatgaaggattcggccagacgccaccgtatgacgatgatttttag

SEQ ID NO: 184946 - DNA, 2763 bp, Klebsiella oxytoca
atgcgtaatatcgaccttattcgcgaagtgactcatgccgccgctggccgctggccttcggtgctggcgggcctgcatatcaatgtgccggattcaccgcgcaggcatggcccgtgcccgtcctgtggcggttcggatcgcttccgtttcgatgatggcggccgcggcagctttatctgcaaccagtgcggcgccggtgacggccttgacctaattcgaaaggtgaacaaatgcgatacctcagaggccgcgcgactggcggctgatgtgctgggtattgattaccgggcagcagtacaggacgacgccaccgccagccagaggcgggagcagctggaagccgagcgtacacaactggagcaggagcgcctgcagcgggcggcagtggacgcacagcagcgccgggctacgttttcccgtctgtacgatgagaggcgccagaacgccactcagggcgaatctgaatacctgactgataaggggctgaacggcttcaccttccccattctttccgatggttcaattttgctgaccctggtagatgaggctggcgcagtcgtggcagcgcagaacattacgcgtgaaggagtgaagcggctggtggccggctctgcaaagcgcggcgcatatcacgccgtgaacacgccagaagacccgcagaccgtgttaattgccgaggggttggctactgctctaacgtgtcacttaatttgccctgatgctctgacagtagcaggaatagacgcgggcaacctgctgcccgtcgcggaagtgatgcgccgaaagtacccgctggcgcagatcgtcattgccgccgataacgacagattagacgacaagcccaacactggcacagagcgtgccgagaaagcggccttatccgtggatggttatgtatccgtgccgccgacagactataaggccgactggaacgactaccaccagcagcacgggctggcagccgctacagcagcctttaacgattcgatgtatcaaccgcagggggaccgcgtgaaaccgcagttacaggccattgagggcggaaagtccggtcagccagagaaagacccgcttaagccgcatgttgagagccgcgcagacggcgttttctgggtaacaccgaaagtggacaaggacagcggggaggttatcaaccaggaagcgtggctgtgttcgccgctggaagtggtgggcaccggccgggatgataaagaccagtacctgattatccgctggcaggcattcggtgtcagcgcgctgacgactgccgcaatccccctggctgatattggcgagcgtgaaggctggcgcaccctgaaggcgggcgggattaacgtcaccaccaaaagcagcctgcgcgcgatcctggccgactggctacagcgcagcggcgcgcgggagctgtggcgcgttgcccacgcgacgggctggcagtgcggggcatacatcatgccggacggcgaggttatcggaacgccggaacatccggtgctgttcaacggccgcagctcggcggcggccggctacaccgtcaaaggcactgctgaggactggcgcggcagcgtggcgcacctggtagccggtaactactccatgatgactgcgaccgccgcagcgctggcggcgccgctgattggcctggcgggcgccgatggcttcgggatccacttctatgagcagtcgagcgcgggcaagaccaccacggcgaacgtggccagcagcctatatggcaacccggatttactgcgcctgacgtggtacggcacggcgctggggctggcgaacgaagccgccgcacacaatgacggcctgatgccgctggatgaggtcggccagggatccgacccggtaagcgtgtcgcagtctgcctatgcgctttttaacggggttgggaagctgcagggtgcgaaggagggcggcaaccgggacttaaagcgctggcgcaccgtggcaatcagcaccggcgagatggatttggaaaccttcatcgcgggcgccggccgcaggaccaaagccgggcaactggtgcggctgctgaatatcccgctgagtaaggcggttcacttccataagcaccagaacggcaagcagcacgcggatgcgctgaaggaggcataccagcaccaccacggcgccgctgggcggcagtggattaagtggctggccgaccaccagcagcaggctacagaagctgtcagggagtgtgaggcccgctggcgcggcctgatacctgcagactacggcgagcaggtacatcgcgtagccgccaggttcgctattctggaggcggcgttgctgctgagcgccgagatcaccggctgggatgcacagacctgccgggatgcggtacagcacagctataacgcctggctgcgggagttcggcaccggcaacaaagagcatcagcagatcatcgagcaaacggaggcgtttcttaacgcctacggcctgagccggtttgcgccgttcccttacagcccggccgacctgccaataaaagaactggccggctaccggcggcgccatggggaacacgacgagagcccgatatcgttctatacgttcccggcaacgttcgagaaggaaatcgccgcgggctttaatcacaagcagtttgccgaagtgctgaaaagagcgggaatgctgacgccgccgagcagcggccgcggatatcaacgcaagtctccacgtatccagggcaggcagatcaacgtttacgtcctcagctacctgccggaggactacgaccagccagaggaatag

SEQ ID NO: 184947 - DNA, 351 bp, Klebsiella oxytoca
atgattactaagaacttccggcttaatgcgctggcgaaccagtacgcagcggcgctgtatgaccatattaccgccaccagccacggcgactacttcatgattgatgcgggtggtgagcctgtgcgtgtagagattgctggtggagtgaaaggtatccgtaaccttatcgacggctacgcgctggaggcgctgaaagaacattacccgcagtgggaaagcgtagggatcgagctgcttagccgctgcgttaccgctgccggtctgaccggtcgcggtcgtgagatatggcaaagcatggttaacgatatgggcgcaaccgtggcaggcaatcacgggggtaagaatgcgtaa

SEQ ID NO: 184948 - DNA, 627 bp, Klebsiella oxytoca
atgagcaatatttacccactcccgaaaaagccgggtagtaccgatccattccgtgcagagcctacgcctgaagggctgagaataaccagctctggtggcgatggtcgtgaaacagttcagcttatcgcttatgacgaagccgtgaaccgtctggacgcgggagattatgacgattccagcacgggttatgacattcaccttgctgtagcagagggcggaaactgtggatatttcgactttaccgcgcagcataacgtcactatgtggcgatggctgattgccgcggcgttcatcaccgagatgaagctgaaaaacggtacgaccattgttactgagccggacggcacgtcatcgcaggtggcggtttattccaatggcaaagcgtctatcacggtttatccattctctgagcgcctggcgatggcaaataacatcgagggggcaatgattgaacgctacggctcagaagagggcgcggaaaacgccattgtgttttatcaggccatgctggatgtggaggccggagaactaaccgcattcggacgagaaacgctggcagaactacacgatcacttcatcagcgatctgcagcaaaacggatggcctgaaatgccattgacgcactga

SEQ ID NO: 184949 - DNA, 210 bp, Klebsiella oxytoca; identical to SEQ ID NO: 101280

SEQ ID NO: 184950 - DNA, 504 bp, Klebsiella oxytoca
atgatgaatattgctcaaagagatcgaatcctggcgtctgtaaaccaggtcattgggcgcaaagagagtgttgtgcctaataccccagaaaataattctcacgatcgtttattgcggataagcgctggtctcttgcacctgttaaatgaggttctccctggcatggccaatacagctgaacgcgacgaaatagccgtgtgggtagatgcgatgtattccatcacgatgatagaagcgttggatgcaaaaccacctacgcccaccaccgtgccagccttgcgcaatgagataccagtgccgactggtaatgatgccgcaaccacagtgcgttatgccgcagaactgcaggtattgtgggagcttcatcttgatactcgcttgcgagaagccaaccccaaagctggcgccagactatggacgctaattaacgaacttaactacgcagctcagcgtacggaaagcagatacaaccgcctgttgttaaagctggagggcatgaaatga

SEQ ID NO: 184951 - DNA, 180 bp, Klebsiella oxytoca
atggttaagtccaccagcacgccgctgccaaatcactcctaccgcgacgctcacggccagatggtgagcgtgaccgctgtagcgcataaccgcgtgacgttctatcgcgagggctatcagttcccatgcgtacagcccattgagcgcttcatgaaggagtacacggaggtaaagcaatga

SEQ ID NO: 184952 - DNA, 198 bp, Klebsiella oxytoca; identical to SEQ ID NO: 101286

SEQ ID NO: 184953 - DNA, 726 bp, Klebsiella oxytoca
atgcctattgtcgaaaatcttcctgacttatcccattggaaaacagttcaagagttcagtatttcccaagccgctttattactggctggaattgatccatttgattttgatgaaggaaaagagcttgatcaagtacgggcatgcaaccatgaacgttggaagcaagcatggggaatgagttcggggattttaacggctatcaggcgaggtatattaacaccgatcctgtgctattcagagcaaatggtggaaaattggaatgggcctgattatattgaatatacgccgataaaaccaactgacagaaattgcgaaatttcaaagagtaaaactattataacaagagactcattgtatgcatggattgagaatgagagtgttgattttgtgcgcaagtcagttccaaagaaagtaatttctttaaatcgcgaagtaatctcccctccgaatatcattgatgttgttcccgagtcagtcgatgacggtattttattgcttcctaagtatgagcatcaaagtgaaggtttagagtttgttcaagatgctataaaggaactttggtcaacttatgatgcagatgaaccacagacggcgccaactaaaaaagaagtaattgactatttaacggaaaggggggctggtaaaaacatggcggaggcggtaaaccttgttttgcgtcctgtctgcctgcagggaatagggagaagggtaagaaaatcaacatga

SEQ ID NO: 184954 - DNA, 1215 bp, Klebsiella oxytoca
atgaagctcacagcccgtcaggtcgacacatccaggcccaaggacaaaccctataagctgtctgatggcggcggtctttacctgttggtgaaccccaatggctcacgatactggcgcctgaagtaccgcatcgctggtaaagagaagctactggcgttgggggtatatcctgatatcactctggcggtagccagacagaagcgcgcagatgcaaaaaaagttctcgctgctggtggtgatccgggacaggagaagcaggaagagaaacaagcgaaagagcaggctgtggcaaacagctttgagcgcctggcgatggaatggcatacccataaaagcacatcgtggtcagaaggctatgccgagcatctcctgatgtacctgaagaaagacatcttccccttcatcgggcaaaaggcgattacggatatcagccaggttgaaatgcttaacgtcctgcgaaaaatggaacaacgcggcgttctggataaactcaagaaaacccgtcaggcctgccggcagatattcacctatgccattattaccggtagagcggagcacaaccctgtatccgatctggctggcgcgctgaagtcgcccaagcaacagcactacccacaccttttagtcgaccagatcccggattttctccgtgcgctaagtgaatacagcggcagcaccatcacccgcaacgcaactcgactgttaatgcttaccgggctcaggacaattgagctccgtgcctctgaatgggttgatatcgactttgacaaaggggtctggaatgtccccgcagagcgaatgaagatgcggcgcccacatctcgttcctctctcaactcaggttcgcgagttgctggaagagatccaccaacttaccgggcgagggaagtatgttttccccgggcggaatgacgccggcaagccaatgagcgaggccagtattaaccaggtgattaagcgtattggctacgacggtaaagcgaccgggcacggcttcagacataccatgagtaccatactccacgaacagggctataacaccgcctggattgaaacgcagttggcccacgtcgataagaactccatccgtgggacatataaccacgctcagtatctggatggccgccgggaaatgctccagtggtatgccgactatatggcggctcttgagaatggtgaaaatgtggtccatggctcgttcggaaaacgtgcctga

SEQ ID NO: 184955 - DNA, 288 bp, Klebsiella oxytoca
atggctttcaaattatcagcaacaaaaacagtccagatttattatctgggtgggtatctgtgcgataaagagatagacatcgacctgatttactctgtcgaaagcgtcaggcaggatgatgcggggctggttaaagcctctttgtctgttcgatacaatgacgcggcaaaggttaatgtaggcgagtatcctgtcactctggatacgtcatcctcaaaaccgtggactgagcaggaagaatatcagcttatgcaaactgatgaatttgctggagctgtagctatgtaa

SEQ ID NO: 184956 - DNA, 2565 bp, Klebsiella oxytoca
atggcacaagtaccactaccaaccccgaccgacaatgacgtgcctagcacagatatcagggacgctgtttacgccggtgctatgctggataaggttgtcaccagcactgatctgacgtacaccgatcgtctcggcggcgagcactacaccgtagacggaattaaggctgaaggggataaggtcgttgaggaaacgcgacagaatctcatcccacttagtcgccagtatatgacgttagccgatgctcaagctgatatagctaatatccccgaaggttcaaccacctatgttcgtagtacagatgatgcatatcttgctatcgaatatatgaatgtcggcggaaccctggttgcaacgggtcgtaaaataccatcagcgatgccaacgggatatcagtctgctaccgcggttagcagcagcgcggctaatactatcgctatcaccattcctggactgttgattgaaggtagcctggtctattttctttccccaattctaaacaccgctgcggtcaatgtgaccgtgacagatgcgaagggaaacagcgtcacgcgcgcaatacagaagcaaaacaacgggacgttaaccggaggtgaattacttctgggccagcccgttttgatgcaattcagaaccgggactgctaataattttgttatggtggcatccggtccggtagcggccgagttggctggcagaatttcagcgctggaattaaacagcatcgcgttactttcgggagttgttaatactggcgacgcatattccggcaccgcatctacaatccctggtattgttgcttctgatcgtgtgttcctctttactccgaacgctactaacacgaccagaacgccaacgctttcagtcaatggcggtaccgctcgccagataaagcagaataacggttcgaacgtcgcggctggtgatttggtagcgggttatacgtatctcgttaaattcaattttgcatcagcagattttcggctgctgacctaccctagtgacagggctcgggttctcaatgcgtataccaaagggacggtaacaagcgactcctcaagccctaatgctgtgtccgtaatcattcccggtctgcttggtgacggtactcagataacgtttgagccggttgctgcaaataccggtgcaacaacgctggttattacagacctctacgggaactcagtcacacgtagtttgtttaaaggagccaataccgcactaactggcggagagttgcgggcagctatgcctgttaccgtgcaataccgaggctcaccacagaataactttaaattgctgtatgccggggacccgactaccgacattctgaacctcataagcgatgtcaccactctgcagggtgcaatcactgacccctacgttaaactgagcaaaaagcttatcggtgacggaacccaggccaatacctcgccattcggtaaaatttcgttcagcaatggcgtcagaactgtaaccaagaagcgcataattataaccacgcccggctcctccataggcctgggggctgggtccactggcgggggtgtggtgggcgcgccgttctctcctagcgcattgtttattgaagcgatgaaagagcacctttctggctatggcgaatttgagtttatcgacgacaaccagagtatcggtggccaggcgatacaccagtttgccgcgcaactacaaaactcgccctattttacaagcagtgaccccgacgactggccggatatcgtgctgattgtcggcgggatgaatgatgccacaccgaccgggaactttaaccggggcaggacatacccactgcagcaggcagtgctggaaaatctgattgaccagtgcacggcaaaaggcgctgtggttattgtctgcaccacgccgcaccacaatgttgagtccgccaccgtcaaaaacatcacgctgggtgacctgaatgtcctctggccggtcagaactttcaacgtccctacgggttttacatttgattcagcgaacaaaactatcaacagcacggcgtttgcctatgacacgggaaacgcagcgaccagctggggcgggcaaatccttagacctgggcacattcttcgggttggcggggtgaatgccggtgattacaccatcagtgcaatatccgaagaccgtcaaaccatcaccgttgctgaaaatattccggtttctggcctgattaataccaccattcagcacatcaacctcgacagcattatcgaagaggtactcgatccaccgccgtcaaaatcgtttgtggaggccaactggtcggggagcggcgttaaagttgttggggatgcgcgtttcggcctctacaacagcatggtgcgtgcagtggcgcgtgggaaatcagcgtttgtactggaggctgaaatcccctcgttcaggctgggtgttgaggttcacggatggtcggcgcttttcaactttcctaattacaaccacccgaatgacctcggctataccgttagttacaaggctggcgcggatactgcggcattcagtctgtgcaagctgatttatggcgaaaaatattatttaccttcgtga

SEQ ID NO: 184957 - DNA, 267 bp, Klebsiella oxytoca
atgtcttacacgcacagcagggattacatggagggcggatcaatcgtttccgttcagtgctcccaccaaatcaacgtccttgttatggatgacgctgcttataaccgatacaagagaggtgaaagctgcaaagtctatggcggattctataagcagtttcccgccaacattgtggtgccgcactccggtcactggaatgtcgttctggctctccctgccgggcatcgcgctacatacagatattcaatcaacgtaatcaggcaatag

SEQ ID NO: 184958 - DNA, 180 bp, Klebsiella oxytoca
atgaaagtagcaatcgaagttaatggtgaggttatctggtaccgcgacagcgataaacaggagggggtggcgtcgttgggctacttgaaggacggcacacagcagaaaatcattgccgcccttgaagaggcattattccaggcgaaagggcagatgctattgcctgattacgttgattga

SEQ ID NO: 184959 - DNA, 243 bp, Klebsiella oxytoca
atggggaaagataatatctatgggcctggagaaagttttagtaggggtatggagataggcaagactaccattttccgccaaaacagaccggtaaaattccgtctggaaatggttaacgggagtgttgtggaggggatcatcccggctaactctgaatttaagattacgcctcaggatggggatatcaaaaaattcgacattataatcgaagatactcctaagtctccgcaggcaattgaataa

SEQ ID NO: 184960 - DNA, 3369 bp, Klebsiella oxytoca
atggctgagaacgctggcggtatttattacgacattgaaatggatgtgcgcgggctacttaccgctcagcagcgcgttaaccagcgccttgatctgatggaacggggatttgataaaacatcacgctctattgacaccactgagcgctctatgtcgagcttgtcccgtgttgcggttgcactgacagcagctctttctgtccagcaggtggctgaatatgctgacgcatgggccacggttaataacaaattatccaactctcttcggccatcagagcagttagcagacgtaacccagcgagtttttgatgttactcaggctaccagaagtagtctggatgcaactgctacattgtatgctcgactggaaagagggacgcggcagtacaatacatcagccgaagatctggcaaagctcaccacaataattaaccaaggttttgtcgtttccggcgctacagcccaggaagcagaaaacgcaatcatccagttgtcccaaggtattgcctctggtgttctgaggggggaggaattcaactcggtagctgagcagggtagtcgccttatggttgccttggctgattctttaggtgttggtattggcgagttgagggcgatggcggctcaaggcaagctaactactgacgtagtggttaagggtcttttatctcagggatcggttatcggagctgagtttgctaacacaaccacgactatcagccaggctcttcaggttgcgggcaataacatcactaagtttttcggcgaaaactctaccgtaaaaaccggtgtggcaattttcagtgatgcggtcgttactatcagtgaaaatatcggcggcctgagcgctttgctgacaggcgtcgcggctattcttgggagtcggtatgtcggcgccttaactatggctactgcggctaaaatcaaagcagctgccgcatcacgcacgctttcagcagaagaatcattagcagctcaggcttccgcgaataaagcagcggcagacctcagggctgcagcggtcgcaaaacaacgggccttagatgagataaggctcgcagaaatgatgcgccttactgctatcagcgaaaccaacgctgcggcagctgaacagcgcttgtccgttgccagggttgcggctgccggtgcggttgataattataatcgagcactggcggcaaacagggctgctcaaatggctctctcatctggtgccagccttgctagcagggctctcgggttaattggtgggcctgccggagcggcaatgcttgctgctagtgcaatcctttacttttcacagcgcgcaaaagaggccaggaatgacgctaatgcccttgcagatagcgttaacgatctgagctcaaaattccagacgatgtcgcatacagagctggcggcaacgataggaaagctaagccaaagcctgcctgaattaagtgacgcggtatcagacgcacaaaaggaattcaatgacgcgacatcggctgtccagcgacagcagcgagaaattgcaaactggggtacgaatacaacgagagggcggcaggctgccgaggcgcttagcggcgcacaggataacctagctatagctacccttgagctggagaaggcccagaacagactgagtcagacccaaaacgccattaacattggccgcgctacgctaaacggaacgatgaagcaaggtatcgatttgctgcgcagggatgggcaggaagcgggaattgctgccggcatgatgagcaagttgggagatatgattaattttgcggccaaggcaaaagacaaattcaactccagcagcctcatggttgaacgcccgaaagatgttcaggagtatctggataagctacaggatcaggtaacacttcagagcgagcttaatgacaggaagcgagcgcaattaagggctgagcaggacattaggaaactcggtggatcagaggcggatgttaaccttgctcgtgacagagcagcagctgaattcgatgctcaacaagcgcagcaaaataacaaaaaggccaccaaggaagcggaatctgaggctaagaaacttgctaaccagcaggaatcggtaaaccaaaaacttgaaaatctgcgccagcaatcagagctcgctgctggctcaacgcaggagttaagccgggagcaggcagtattacaggctcagcaatcactaggtaagggagccacccaacagcaaattgctcttgccggtaaataccgtggagaaatatgggatacggctaatgccctcaaagcccaggctgcggcagaaaaactgctccctgaagccagagagaatgcgtcttaccagcaggatgttaaagatctgcaaactgcactggccgccaaaaaaatcactcagcagcagtacaatcagaccagtgagcaactggaggctcagcaccaggttaatctggctaagatacgcgctcagcaaactgtaagccccatgcaggaagctcgggggcagattgaccctgtccaacagctggctaatcagcatgctcaggagttggctctcatccagcagttcgaaacgcagaaggggcagataacccagcgcggtcttgaactgatgaatgccgctaacactcagtacgaacaacagcgcatagcggcgcagtgggagatatggaggcaacaaaacgcaggatatgaggtagctgctgcggcatttgattcatttgcaggaaacgcctctaataccctcactggcatactcactggcagtatgtctgtcagcgaagccatgagctcactcggatcaactgtcctaaacagcgttatcaactcctttgtccagatgggagttgagtggttgaagtctgtaattatggggcaggctggaatgaccgccgcttctggaatggctattgcgcaagggcaactaatagccgcatccatggctccggctgctgcaatgacctcccttgccacggctggcgctaacgctatccccgctcaggcaggaatagcttcaacagttggcatggcgcaggccctttcaatagccggcgctcgctacaacggcggcccggtatcagctggcggcctgtatcaggtcggcgagaaaggtaaaccagagatttaccaggccagcaccggcaagcagtacatgatccccggcgataacgggaaggtcatcagcaataaggatatgcagggcggcggcgggttgaatgttcaggtagtcatcaacaatcaagcgtccaatgctgagccgcaatacatgggggccactcagaatgacggtaattatgtgctggaattcctgatttctgatgcggaacgcaatgggccttacatcagcacgctacaatcgacgcttgggttatctcgtaaagcaaatggagcgttttga

SEQ ID NO: 184961 - DNA, 381 bp, Klebsiella oxytoca
atgaaaaaggttctattggttgcagcaatagcggttgtacttgccggttgtgcttctggcggcaataagtcgattgagcaagaaacgcagattggcgttcagagtaaaataatcaaaggaaagacgtcgaagcaagaggttaaggctgcatatggagatccaactggggtatcaatctccagtgatgggaaagaacagtggcactatgttttcacaaacacacaggtcagcgggaaagcatttattcccatctatggactatttgataacggcgctactaccaacatgaagcagcttataatcgtgtttaagggcgatattgtagataattacttatttaataattcaaatacagaagttaaatcaggcctcctaaactaa

SEQ ID NO: 184962 - DNA, 240 bp, Klebsiella oxytoca
ttgtcgttaccgctagatggtgaaaaaatgaataataaaataaacggcattgtggatgtaggtgaaaaacaagagagtccaaccccaggcgagcgcgcggagcttggtgatataggggccgatattaagtccatggaaaacaggattgttgacaaaatggacgaaaaccagaagtggctgattggccttttggtgtcggcaatactggtgcctttgttcatcgcgttggttactaagtag

SEQ ID NO: 184963 - DNA, 363 bp, Klebsiella oxytoca
atgagcagattccctagccaagaaatggacaggtttaacgtaaggctgccctcaggaatgcgtgaagcaatagctgagcgcgccaaggccaacggcaggtcaatgaactcagagatcgttcagatacttcaagaagcgcttgataccgataaggctatttctgaaagcgatctggttgacttcgactcaactcaggctgcttttaatgccacctcaacgcctgaagaaaaagaaatattcttaaccactcttgcgaaaaaagatccgttcacggcggaaatcctgcgcgaaggtgaagagcacgccaggagacttgcagcaatacttggtagacgcatgggatacctggatcacgaaaagtaa

SEQ ID NO: 184964 - DNA, 222 bp, Klebsiella oxytoca
atgatttacccattcgatgcgtcctatgcgcagaaggtgctgagaatccattacgaatatgctggcgtcattgttcgcaagcgggaaaggcttgcggcaaaggcaacaggattaatcgctcacgacagaatacttgcggccgctgaaaatgatgttgccaacgcggagaatcgcagagagctttcattaaacactcagcggatagaagcccgggcggcttaa

SEQ ID NO: 184965 - DNA, 951 bp, Klebsiella oxytoca
atggcaacgaagaagacgaagccgccgattctaccgcgtaactatcaggacccgaccggagccgacgcgctggaacgccgggcgatgaaagacttcgccaggcgcataaataagattggcaaagcgtacaaatcagcactcgacaaaataccgtcctccctcgcagtaaacgccagatacgaataccagttaaacccaacgctactctccatcattctgagcgatgccagttacctggtagatcaggtgctgcttgagggtggcgattatgatctgtggttttacgagtacatcgacctggcatcggagaaaggttcggggcagtcattctacaaccttagccagcagtcgccggcatatgcagccggtcgcgaatctctggcctctatcctcgcaagtgacccatatcagcagcgcatggcgctggtgcatgcccgtgtgtttgaggaaatgaaagggctgagtgctgacgttaagcgcgacatggcgcgagtgctgaccgatggtgttggtcgtgggcttaatccgcgtgaagtggcgcggaacctgaccgagcaggtgggaatcgagaaacgaagggcgaaccggatagcacgcactgaggttaccactgcgctgcgccgggctcgatgggatgaggctgagtcatcaatggatgatctcggattaaacatcaggcttctccacctttccgcattaagccccacaacgcgattaaagcacgccctgagacacgcgcacacatacaaagtccaggaggtaagggactggtacgccgttgatgcgaattcaataaactgcaaatgcagccaggtagaagtacttgttgatgcagatggtaagccgctttatccgaacgtcatcgagttggctaagaaggaattcgacagccattggaagaagatgaaggtcaatcattcagtttgtcattgctgcaaaaaggcagcttga

SEQ ID NO: 184966 - DNA, 480 bp, Klebsiella oxytoca
atggctgcactaaaaccagaagtgaaagccttcatcattcagatgcttgcgtgctatgacacgccctctcaggtggtcgaggctgtccagaaagatttcggtatcaccatcacccgtcagcaggttgaaactcacgatccgacaaaggtcagcggtaagacgctggcgaaaaaatgggtcgacatgttcaatgccacccgcgaccgcttcctcaatgaaatctccgacatcccgatcgccaataaagcttatcgcctgcgcgtcctgcagcgaatgtcgacgactgccgagaacatgaagaatatcggcatgaccgcgcagctgcttgagcaggctgcgaaagaggtcggcgaagcatataccaacaggcagaaagtggagcacaccggcgctaatggtggcccgatcgaatcgaccaccctgacgaaggacgaatacaagaaagctcgacaggagatgctggaggatgacgactgttga

SEQ ID NO: 184967 - DNA, 138 bp, Klebsiella oxytoca
atgcttctactcttcattctcctgtcgatatggctctgtcgactaccggagaagacggcctggctagcggttaggccaaatatctcaatgctggcgctcgaagatgagcatccggcacgcagtaaggggctgcgctga

SEQ ID NO: 184968 - DNA, 468 bp, Klebsiella oxytoca
atgagccgcttaaccgccattatcagcgcagtggttatctgcctgatagtcagtcttgggtggctggctagccactaccacgacaacgccgccgagttcaagaaacagcgtgataaagcgactgagcagctcaacctggcaaacgccactatcaccgacatgcagatccgtcagcgtgacgtcgctgcgctggatgccaaatacacgaaggagttagccgatgcgaaagctgaaaatgatgctctgcagcgtaagcttgataatggcggtcgggtgctcgtcaaaggcaagtgtccagtgtcagccgcaacccaacccgccggcgccgccagcatgggcgatgatgccaccgtcgaactctcttcagttgctggacgaaacgttctcggtatccggtccggaatcctcagtgaccaaacagccctgagggcgctgcaggaatacatcagcacgcagtgcctgaggtga

SEQ ID NO: 184969 - DNA, 540 bp, Klebsiella oxytoca
atggccaatctgaaaacaaaactcagtgcggccatgctggcgctgattgctgctggtgcctcagctccggtgctgtttgaccagttcattagcgagaaggaaggtaatgcgctggtggcagttgttgatcccggcggtgtgtggtcattgtgccacggcgttacggtcatcaatggcaaggccgtcatcaaggggcaaagagcaacagaagcgcaatgtaagcaggtaaacgcaattgagcgcgacaaggcgctggcgtgggtagaccggaatatcaagatgtcgctcactgctccgcagaaagtgggcatcgcgtcattctgtccgtataacatcggccccggtaaatgtttcccctctacattctataagcgcatcaactccggcgaccgtaaaggtgcctgtgaggcgatccgttggtggattaaagacggtggccgcgactgccgcctgacaaaagggcaggccaccggctgttatggccaggtcgaacggcgagaccaggaaagcgcgttgacgtgctggggattggatcaatga

SEQ ID NO: 184970 - DNA, 276 bp, Klebsiella oxytoca
atgggaatactctccgaactggattctttactggaaaaaatcccactgtggaaaaggttaaaaacagtgcccgacgaagtggatcgtctcaaacagcaggtcgccgagcttgagtcatacatcaaatccagcggtggggagaaatgccccagatgctcaaagatgagctatagccttgaccgaactgtagatgaccccgatttcattgggttgggagttcagagagactattacaaatgctccagctgtgggtatgaaacctttaaacagcgctga

SEQ ID NO: 184971 - DNA, 690 bp, Klebsiella oxytoca
atgaatacccaatacctccagtatgttcgccagcagctgatagtggccaccgccgatctgagcggcgcgacgaaagggcaactggtagcctttgctgagaatgctcaattcgcggcgacggcgcgcagccggggaaggaagaaagtagccgatccggtcaccgggcgcatggtaaacccatcaaacccgccaatccccggacagcagtcccgcgcgaaaggttcagcaatcgctctcgttctccccgttgagtactcgacagccagctggcgccgcgcgctgctgtcgctggaagagcatcagaaagcgtggttgctgtggaactacagcgacaatatccgctgggagaaccaggagacgatcacccggtgggcgtgggagcaattcagccagcagttggccggcgtgcgcattgcaaagaaaacggtagatcgcctgcgtcagcttatctggctggcggcgcaggatgcgaaagcggagctggcagggcgcgaccagtatcagtacgcggaccttgcggctatggtgggtgtagaggtgaaaaactggtccaagacgtttacggtgcactgggaggctatgcttgcggtgtttggtcagttggatcgagaagcattactcaccttaacaaaaacacgttcggaacaaaaatcgacattttcgcagcggagtattgcaaaagtagattaa

SEQ ID NO: 184972 - DNA, 171 bp, Klebsiella oxytoca
atgcacagcccactcgctaaagtcatggagcgttcgatattccgcacctccagccctcgtaagcgcaaagtcgaagttaaaccttccgacattccaacctttcactatacggcccacctggcggatgtccgctggctgcgccacgctgcccggagaaaaattcatggctga

SEQ ID NO: 184973 - DNA, 303 bp, Klebsiella oxytoca
atggctgagttacgcgcaggtgggttggctataattatcggtctaaaaataaacgttaatctcaatggtaagtgcgtagtgctccagcagctggtgaggcacctggatgaatttatttcgccagtcaatgactgcatatggattcatgatgacccacgtaatgcgtggattgttactggagatgttacacacccaagtggggaatatggttggagctcattatctccggcaaacctgatacctatcgacggcgacgacttcagcaatgaagacgagcaccagaaggagcgggagcatgcctaa

SEQ ID NO: 184974 - DNA, 843 bp, Klebsiella oxytoca
atgaccagaaaattaacccgagaagaactacgcaaacgggcaaaagaaaatatcaataacttgaggttcgcatcaaagcagcgagccttcgaaagcgctcgtaaagaaatcctggccgatcttcaactggcagaatatgcactggaagcaatggaaagtgagccatacggtttcactgaaggtgagcgttttggaatggttttagagccgcgacaatggcctgctccaaaagacggagaacctcaactgcatatcaaagagcaaccagggccagatatcgacacgttacgacatgctttcgaaacggaagagcgagaggaaactggcggatttaacctacacaaatctggtattgactatgtggataaatcaactcaagcgcagtgggaggcatggttagtctgccgcgccgccatgctccaggctggcatctccgcggtaattccggatggttacgtgatggtgcctaaggagccaacgcaagccatgtgcgctgcatttaacgatagcgactacggacgcaagtctttgcgcgagcgttatgtcgccatgctcgccgccgcccagcaaccacaagacgaaccacaaaatattcctgaaattattccgggatggattccggtaagcgagcggatgccggatgatgatgactttgtctatatctggcctcgccctgactttggtgttgagcttcacgtcggtcagtactgcgaatgtagccctaaaggtgacggctggtatgctcaggtttatgagcaaaactatggcattgagtggtatccaatcactgtaacccactggatgccgctgccagccgacccgcaggaggtgaatcatggctga

SEQ ID NO: 184975 - DNA, 192 bp, Klebsiella oxytoca
atggctgaaaaatcatctttggaacgtttgcgggaaatcaatgcggacaatcaacgcagggtcacggtcagcgtcggggttctcaaggcggctcgaagcgaaattaacgcccatgtctcagtgaatggaaagggtatcatgacggatatggttctcaacgccctgaatgcgattatcgaaggagataattaa

SEQ ID NO: 184976 - DNA, 132 bp, Klebsiella oxytoca
atgttcaacccaaatgataatttctgcgctgtatttctcgtcttggggataatctgcggcgttgttggctggggagtaattgagttcatcctctggctgttctcgttcgttcacatttctttcggaggctga

SEQ ID NO: 184977 - DNA, 537 bp, Klebsiella oxytoca
atgacaaatgatatcaccgaactggcgcagatgaaggggcagaaagtcgaagggtcttactacctggctgaatgcaccgactgcgggaaaatgtatccgagcaacaaactgaatggtggagaacctcttttctgcggtgattatggcgaatgctactgcccgcactgcaacgctgatgatgccgctattggcgattgtggtgataccgcagcaacagcgtggaactatcagcagaaccgcattgatgcgctggtagaggcgctggagaaggcgcaggccaaaatcatcgaattgcaacagggctgcgaaaacgatccgcgtactcacgaaattatcgacctgcaggagcgcatcgcagagctggagtcccgcaccgtcaccgtgaagccgccggaaccttacggttatctgcgagaaaacgatggacaaatccaaatctccataggagcagagcgcccaagcgaccgctcaggaggctatgcctctccatggtttgccatctataccgccgccggcatcaagtgggaggctgagtga

SEQ ID NO: 184978 - DNA, 171 bp, Klebsiella oxytoca
atgagaaacgctgaagatgtaagcaccccacatgaatgctgtcaaaagtgccgttgttactatcatcccagcgaacgaaaacagcatgtttgtgtgtcgcatgaagatgagtttgacgatcacccggctgatgaaatgagccagtaccaggaccattcatatgacaaatga

SEQ ID NO: 184979 - DNA, 303 bp, Klebsiella oxytoca
atgaaaaagaactctggcaaacaagccgttattaacttcatcggtcagcaccctgggtgctcgttcaatgagatacgccacgctactgaactggatccgtctgtggtcaattcagcgctctggcagatgaacagggatgggcaggtcaagcgcgaaggggagtgtaggcactaccgctacaccctgatcgacacgacagctgtaaccgaaagcgatccgtcttttgagtatcgccagcgtcctggcggcgtaaacccaatgacaaacctgtttaaccagtgcctggcaggagtgagaaaatga

SEQ ID NO: 184980 - DNA, 213 bp, Klebsiella oxytoca
atgagcgacacagtcaacgaggcaatcaagcgcgccatctgcatagctggttctcaaactgagctggcaagaaagacaggggttaaccaatccactgtcagtaaatggcttaacggcgctgagatcggctcccggtttatcaagtccattgtcattgccactgatggtcaggtgagcgcctctgaaatccttaattcaatttcacatagataa

SEQ ID NO: 184981 - DNA, 270 bp, Klebsiella oxytoca
atgatatttgaagacggacaaagtctctttgagtctgacgagaaccaggtcatcagaggttgcaatagcctctggatcgacaattacgatggcgccggcgggagcttgagcgatgccagtccggcccttgattatgtaagcgcggaaatgttcaggaagttcgctaaaccaggatacataatcgccagtaaagccatcaaaatcataaaccttaacgtttttagagacgtcgatagcctgcagaggttggttagaatctccgtatattga

SEQ ID NO: 184982 - DNA, 195 bp, Klebsiella oxytoca
atggctaactcaattcctaacagcggacgcgccgtgatgatgcgcaatcgccgcaccggcgccgcctggcttgtcagcttcgactatcgcgatggcagctactggcatgagccacagggcaatctgcgccacattcgcaggtcgtacgcatcacgcagcattgagccaaacctggttccagccgggacgcattaa

SEQ ID NO: 184983 - DNA, 552 bp, Klebsiella oxytoca
atgactgactacaccggaagaaaaactccagttgagcagagaaacctttggcaaacgccgatccctctgttcgtcgctctggatgcggaattctgcctgacactggacgcggcagcatcagctgataacgcgctatgcaaccgctatatcacggaaaagcagaacacgcttgaaacgccatgggctgattacctgagcattcccggatacgtctggctgaacccgccatacagcgacatcacgccgttcgtgaaaaaggcagccgccgagagcaccaatcagatcggcacggtgatgttggtcccagctgatacgtccgtcggctggttccgggaggctattgagacggccagcgaggtacgcttcatcgtcggcggctgcctggcatttatcaacccggtatctggtaagccggtaagcggcaacaacaaagggtcaatgctgattatctggcatccctacccgcgcactcactgccagttcactaccgttgagcgtgatgctctgctgaattttggcacccgattgatagccaaacgggaggcagcatga

SEQ ID NO: 184984 - DNA, 471 bp, Klebsiella oxytoca
atgttgacctcttttaacgttttaactccgggcaatatccgctttgggcgcggccttgctctaagcgcggccccctggctcgccgggcgctcgacaaagattctgctgattcacggcgccaccccgcagcgcgcggagtgcttgctaagcgaactccacgcgcttcggctgcacgtcaccacactctctatcgcccatgaaccctgcctgcaggatattgaacggggcgtgagtctggcacgggaaaaaggcgtcggcgccatcgtcagcctcggcggcggcgcggtcattgatgcgggcaaagccattgcggcgctggttcccgcgcaggggcccgcgatcgaatacctggaagtggtgggtagcggccgcatattagaggccaatccgctgccgttcgtcgccattcccacgacggccggtaccggcgcggaagtcacaaagaacgcggtgattaacgtccccgagtag

SEQ ID NO: 184985 - DNA, 216 bp, Klebsiella oxytoca
atgattaacaaaccagttttcattggagtgaaatcgggaatcgaacccattggtggttatcggctgacggaacgcgcccgaaagacggtcagtaccgtttctgacgtgccggcggggtttaaccccctgcgaattcagcgaaataacgaaagggttattgccagatgcgtgccagaacgaaaaagtgacgaaataaatttttatctcattgattaa

SEQ ID NO: 184986 - DNA, 789 bp, Klebsiella oxytoca
atgacgtataacggtgtggatgccgccatgcgccataaggtgcggcggcagttacaggaggtggagcagcgctacggcgtcagggtgctctacgcctgcgagtccggcagccggggctggggctttgcttcgccggacagcgattatgatgtgcggtttctctatgttcatccccctgagtggtacctgcgggtggatgcgccgcgcgatgttatcgagctgcccatcgacgctgagctggacgtctgcggttgggagtggcgtaaggcgctgggtctgctgaaaggggcaaatccgacgctgatcgaatggttggactcgccggtggtgtatcagcaggatgatgcgacggttcaggcgcttaagcggctgataccggagtggttttctccggtacgcgcccgctggcattactactcgatggccagaaagaattttcgcggctatctgcagggtgaacaggtgcggttgaaaaagtacttttacgtgctgcgtccgctactggccgtccgctgggttgaggcgggaaaaggggcgccgccgatgcgctttgctgaactgctggcgggaagctgtctggaggcgggcctgcgtcaggaaatcgacgagctgctggcgcgcaaacagcgcgccggcgaggccgaatatggtccgcggcggccattactgcatgcgtttattcagtccgagctgctcagaggcgcgatcccgccagcgctgcctgagagccggagcggtgacatcagggagttggacagattgctaatgaccacggtgatgggaaactaa

SEQ ID NO: 184987 - DNA, 2592 bp, Klebsiella oxytoca
atgattatggaatgcctggaccgaaatataccgccatcattcaataacgttggaaagcgttatacctttttattgaccagcggctatgccgccttcattttcagctttgccacaatacctctcccggcgatggcaggtgagtacttcaatccccacctgctggaggtaaacgaaaccggtacctccgccgttgacttaacctatatttctgaagagaccattccgccaggtgactacaacctggatatctatattaaccatacgtttgtggcttctgagtccgtcatttttacgcgacaggatcaaaataacgccgcttcatcccggccatgtctttccgtcgcgcgtctgaaagagtggtcgattaaaaccgaagattatcctgagcttaccgtggcgggttcggagtgcgcaaaactgtctgcgatccccggatgggagacagcggtacagctctcgcaacaacgaatcgactttaccttaccccaggtggctttagtgcaccgtccgcgggggtatgtcccggaaagccgatggcagcagggcattaccgccgggctattgaattacaacatttccgggcaaaaaaccgatccgcgagatggaggcgtttccacctccagccagtttgtcagcctgcagccggggttgaacgttgggccgtggcgtttacgtaattacagcaccctcaatcataatgacgatggcagccagtgggactccgtctatagctatatttcacgcgatatccacgccctgaaaggtcaactgatagtggggcaaacctatacttcttcggcggtgtttgacagcatcagcttcaccggcctgcagctgaactctgataaagagatgctcccggacagcctgaacggcttcgcaccggtcataaaaggcatcgcgcgctcgaccgcagacgtgacggtttatcaaaacggatacagcatttataaaacaacggtctctcccggcgcctttgagataaacgatctttatcccacgggaagcgcgggcgatctctacgtgacggtgaaagaatcagacggtagtgagcagagctttgtggtgccgtttgcttcactggcaatattacaacgtgaagggcaggttgattacgctttcagcggcggcaagacgcgctcgggaagcgcgggcggaaaggagtatcagtttctgcaatccaacgttgcctggggagcgttgagtaacgtcacgctgtacggcggctttcagcaattagaggataaatacagtaatctcctgctgggggccgggtttaatttgggttcagtcggggcgctctcttttgatgcttctcattcctgggctgacataaaagaaaattcctcatcggataacgcctcatccagcgaagggcagtcataccgcgtgcgctttagtaaagattttccacagacggggacaaacttttccgttgccgggtaccgttactcaacgcatggttattattctctgcagaactttatcgatcgggcggactctcatcgcgcctgctgttcgtcatccggtcggactaaagaccgctttgacgcttcagcgtcgcagattttctccggattcggttcactctccctttcgctggtcagtgagtcttactgggataactcgcggatggagtcgctgggcgtgagttatagcaatacgtttggccggatgtcctacttcattaactacgcctataaccgcaatgtgcagagcagcggccagaatgaaaatagctcgccttccagcgacagcattatttcgctaaccgtgagtattcctttcggcgccgatatatcagccagctacaatatgaacagcagccgggtgggagacaccactcacagtcttggtttaaatggctccgctttcgccgatcgttctctgaactggaacgtgcaggagggatataacgccagcgataaaagcacctcagggaacatcaatctcaactaccagggctcaaaaggtgaagtcaccgccggatacggttatgacagcaacagcgcccactataattattcgctacgcggtggaatgctcgcccattccggcgggataacgctgtcacgctatcttggcgagagcgttgcgctgattgaagcgcctggcgtcagggatatcgcggtacgcgggcagactaacgtcatgaccgattctgccgggtatgccgtagtgcctttcgttcgcccttatcatgaaaacaatctctcccttgatgaacagcaggtctcgggagcggaaatagataatatcgtcagaacggtggtcccgacgcgcaatgcgatcgtaaaagttaaatatgatacctggattggctataaggccatgatgaccttgcaatttcatcataaagatgtgccgtttggcgcggtgattacgctagaggatgaaagtcaggagtataaacaaaaacgcagcgctattgtcggtgattccgggcaggcctatttgaccgggctgccagaaaaaggccgcttatttgtgaagtggggcgatgctttaactagccagtgttatgtcaattatgatttatcatctaacaaatcaattgacgatattgttttttatacggcggattgccgatga

SEQ ID NO: 184988 - DNA, 1008 bp, Klebsiella oxytoca
gtggatttcaccccgccggtagaaggggaaacactggagacccatgcgccgaacttctggcgctggctcgaccgggcggccagtggcaacccgacaaaacgtaacgtgattctggccgcgctgtttatggtgctggcgaaccgctacgactggcagctctttctcgaagtcaccggccccggcggcagcgggaaaagtattctcgccgaaatcgccacgatgctggccggagaggataacgccacatcagccgacatcgacacgctggaggacccgcgcaagcgtgcctccctgataggcttctcgctcattcgtctgcctgaccaggagaaatggagcggtgacggtgccggacttaaggccattaccggcggcgatgcggtctccgttgacccgaaataccagaacccgtactcgacgcatattccggcggtcattctggccgtgaataataacccgatgcgcttcaccgaccgcagcgggggcgtgtcacgtcgccgggtgattatccacttcccggagcagatagccccggaggagcgcgacccgcagctcagggataaaatcgcccgcgagctggccgtgattgtgcgccagttgatgcagcagttcagcgacccgatgagcgcccgcgccctgctccagtcgcagcagaactccgacgaggcgctcagtattaaacgcgacgctgacccgacgtttgatttttgcggctatctggaaatgttgccgcagaccaacgggatgtttattggcaatgccagtatcatcccgcgtaattaccgtaaatatctctatcacgcgtatctggcctatatggaggccaacggctacaggaacgtgctcagcctgaaaatgttcgggctggggctgcccatgatgctgaaagagtacgggatgaactatgagaagcggcacacaaagcaggggatacaaaccaacctgtcgctgaaagaagaaagctacggcgactggctgccgaagtgcgacgaacccaccgcgacttaa

SEQ ID NO: 184989 - DNA, 618 bp, Klebsiella oxytoca
atgaagtatcgcctcaatggaaaagagaagcgtatggcttttggtgtttatcaagcagtgtcccttgcacaagcgagggcactacatgatgaagccaagaaaaaactggccgaaggtatggatccatcgtttgccaagaaagaagaaaagctggttcgcgatgtgcaactcaataataccttccagtctgtggcgcttgaatggcacggtacgaaggcgagcagatggtcagaagggtatgcttctgacattatcgaagcctttaataaaaatattttcccctttctcggccacttgccggtgaaaaacattaagcctttggtgctgctgaatgtactgcgtcgaatggaaagccgcggtgcgacagagaaggctaagaaatctgttctccgactcttccggcgtcagcccaccgttgtaatggtgaggcctgacgctattgtagtagctccatatatgatcattaatttgctgccgggccctgtccttgcctgcgtaaacctccgtcggcacccatactgttttctgactgcggaagaagcgctccatgggactattatcccagcagtttccccgccggctaatgctgtgacttattctgtaacgccagagaagtga

SEQ ID NO: 184990 - DNA, 714 bp, Klebsiella oxytoca
atgtttaaatataataagataacagcattatggactgcgactctggcggtatcttcgatcgggaatcaggcgctggcggcggaggaaacgcttgtcgtcaccgcgggcagtagcgaagatcctacagcgccgcttaagggaatagtggccaccaggacgctatccgcgacaaaaaccgccgcagagatcgtcaaaacgccgcagtcagtatcggtggttacccgcgatcaaatgcgcgcgctggacgtcacctcggtatcccaggcgctgcgctatagcgcgggcgtttttaccgaatatcgcggttcatctaaccgcaacgacgaggttttcgttcgcggctttagctatgtgcccaagtttctcgatggcctgagctacggcgcgacggcctcctcgcaaaccggtactttcgacccgtggctgctggaacgcgtcgagctggtacgcggcccggcctcggtgctgtttggccaggtaaaccccggcgggctgatcgccatgaccagcaaacgccctgtcagccagccgattcatgaactgcagttccgcaccggcaatcatcatcttgccgaaggcgctttcgattttggcggcccgctgagcgatgatggccgcctgctctatcgtctgaacgggatcgcccgtacccagaatagccaggttgaagattataaagagacgcggatggccatcgcccccgccctcacctag

SEQ ID NO: 184991 - DNA, 582 bp, Klebsiella oxytoca
gtggctcgtcctaagagtgaagataaaaagcaagcgttactggaggccgcaaccgccgcctttgcccagtcgggaatcgccgcctcaacctccgctatcgcccgcagcgccggggtagccgaggggacgctgtttcgctactttgccaccaaggacgatctgcttaacgagctttatctctctatcaaatcggggttagtacaggtcatggtggccagtcttaaaccgaacgaatcccgtccgaaagagaatgcccgcaatatctggaacagctatatcgactggggtatgcgcaaaccgatggagcataaagccatacgccgcatgtccctgagcgaacggattaccgatgaaacgcgtacccgggttaaagagatgtttcctgagctcaacgagatatgccagctttcggttaagccaatttttcttagcgatgcctatcgcacctttggcgatgcgctgtttctgtcgctggcggaaaccacgattgagtacgccagcaacgatccgcagcgtgccccggagctcattgcgctaggctttgaagcaatgtggcaggcgttacatgaggatacgcgctga

SEQ ID NO: 184992 - DNA, 1023 bp, Klebsiella oxytoca
atgagaaacctattctttttaataatactacttagttttagcataacagccgaagctacatgcacgtacagcggttcggaagttacagtaaacatgtcattatcttccaaaatattatctgataatacacttccagcaggttctgtattggcggtaagaacagttggcggcaacgttagtaacatgaaaagcttttccaattgcggtacagccgacgtttatgctgttgtggcgtcgcctggggctattgaagctcttggcgtaaaaggaattcaaggggggaaagtttatgaaacaggaataccaggtattggctaccagatatcagatgcaatatcaggaacgaataacagacccattccagctgttatgggaatgatctccgcatggaaattaaccgcaaatcccgtatcacaagttacgatatggttgataaaaactaccgagaatattgacacaagtaaaacaagcgctataaaaatttcagtttcatatttagctggttcagtgccacaggttcagtcaaattcgtccactgcgcgacttttaaaaattaacgccacgcttggtccttttacttataaagacacttcatgtaatgtaactccaagcaatggtagtacagtaatgctttccagtatagaagcatcacagcttatagctacctcacaaggaggatttaccggtaagcaaaagaatataaatcttaatatttcatgccccgactcatcgactggaacacaatacacatactggttcaaccctattactgaaaactcagtatcaatcgatggagtattgctaaacagcatttcaaaaacatcgggaggcgcgcagaacgttggctttatcataaaaaaaggaacttctgctatcaagttttacgactatacaagttattcaattcccaacatatctaaatcgcaaaccatcactctcactgctgattactataaactttcaaatactgtaaccccaggaaaagttcaagcgatatttgaaataatcctccaagagaattga

SEQ ID NO: 184993 - DNA, 366 bp, Klebsiella oxytoca
atgaaagagttaacaataattgaaatgaacaatgtttcaggtgctggtattagtcagattctgaatggttctcagaatattttgactggattggtcgatgcagctgtaggtgcagcaattggtgctattggctatgcttccggtggtggtctgcaaggtggtttgaccggtcaaggtaaaggcggtggtattctcggattcggggttattaccgttggtattggttctatctggggggctattcagggagcagtttttgggacaataatgggtgcctataatggtgccgattatgtaaatggtcaaattacccgtttgatcgacggtattcttgatggtaccgctggcggatttaagcctaactaa

SEQ ID NO: 184994 - DNA, 1395 bp, Klebsiella oxytoca
atgtatgcaggatacttatcttgcatacattactttataaccaaacggatatattcattacaattttcaaagccgcgtttaacaatcaactatattaagcgaagtataatgggtcaaaatttatatcgcaaggaagcgattgaacataaaaaaaaccactggaaaggtaaagcgttattgctatcagggatgcctgcatggttaatattaacgttctctgccatatttcttttaattttagttattaccttgcggttttgtagttatacacaacgcattgatgtaaagggtgaggtaatcacttatccccactcaattaatgtatatgcttctcaacaagggtttgtggttaaaaaatttgtagagactggagatatagtaaccaaaggcgatcctctctatgagttggacatatctcgctcaacaattaatggcaatgtcaatactacaatgagcgccgttataagtgagaaaataaagaatgctgaagaaataatctctaaaaccttaaaaaacaaaacagaaacaatggaggcattgaatacccagttacatcagtacacaatttcacttaaagaaactaataagatgctagctaatgcagacattggtttgaagaaaatgaaggaaaacctatcaagctacgatcagtatttgaagcaaggtttaattactaaagatcaatttaactatcagcactcactttattttcagcaacagagtacatatcaatcattaattagccaaagaatgcaacttgaatctcaattgactcaattaaaaagcgatcttgtaactaaggcagctgattttgacaatcaagtatcaaatcaaaagaatcaaataaatgattataaaaatcagcgagttgaatcaacagccaacggtaaccttattatcaaagctacatcaaatggaaaaatagaatcagttactgtaactgttggacaaatggttgataagggtagtagccttgctcaaataaaaccaactggtaaagttgagttttacttggtgttatggctcccaaataacagtataccctacattaatcctggtgatacggttaatatccgttatgaagcttttccgtccgacaaatttggtcaatttccgggaaaagtattatcaatatcgtcagtacccgcttcgcgtcaggagatgtctgaatatactaacgtcattacaaatccaaaccaacaggaattagccctatacaaggctatagttaaaatagaaaaaactaaattttcctataagaataagactctggagctttctagtggtctgaaggcacaggcaatagtttttcttgaagaacggcctctctatatgtggatgtttacaccattatacaagattactcagagcgtaagtgggccattacatgactga

SEQ ID NO: 184995 - DNA, 2127 bp, Klebsiella oxytoca
atgactgaatcattgtttaaatctatcactgaaaaacttaatttttctcttagaaaaaaaacccctgttattctacaatcagaagctgcagaatgtggtatcgcatgtctagctatgatttctggcttttatggattaaatattgatctatttaattttcgccaacgctatggaagcccttcacaaggtgtcacattactatccttaagtaaaactggcgaacgtgcaggtttaaaaagccgggctttatcactcgatattgatgaaattaaacaattaaaactcccttgtattattcactggggaatgaatcattatgttgtactaacaaaagtacgtaaatccagttttattatacatgatcctgctcttggtaaaagagtcattggcatgcaggaaatgtcaaattattttactggcgtcgctttggaaatttggcctgaccaaaattttcagcaagagcaggcaaagtcacggctacgcttgcttgatttaatgcgtaatatcgtggggttaaaaagtacactcataaagatatttgccttctcagtagtcattgaagccattggtttactattacctgtcggtacgcaaatggttacagaccatgtcataatggctcaagaccaaagtcttcttacggttatttgtattgggctagtttcctttactttattccgtacatttattagcatgctgcgagcatggacatctttgacccttaatacactaacaaacatacaatggcaaacaacactctttgatcatctgacaagtttacctttatccttttttgaaaaacgtcatttaggggatatccaatctcgtttttcatcgctggatgtcattcgttcaacatttactaatagtatcgttaccggaatcatcgatactattatgactatcggcctcctcatcatgctgactttgtatggtggatggcttgtctggatagttatagggtttactttatgttatgcgattatgcgcctagctacatatcgtttctatcgccgtgtgtctgaagaacaagttattaaaggtgctcgttctagctcacactttatggaatcactatacggtatagctacaattaaagcactcaacctgaaagagagacgctcacagaattggttaaatctcaacattgatgcctgtaacgctggaattaaacaaacacgctttgatatgatgttcagcggcattaacactttaatatcatctatcgatcaagttgttattttatgggtgggtgcgctggctgtcatcgataacaacatgactctagggatgtttatggcatttaatgcctatcgtggacaattttctcagcgtgcatcaagtttgatcgatctctttatgcaactacgaatgttatctcttcataatgaaaggctttcagaaatcgtttttaccgaaccggagagtgagatgcctcctcgtcgtgtatttgagcaggataaaggagttaagcttgaagttaaaaatctaagttatcagtatgatgcttttactcagcctgtattttcgaatcttaatattattgttgaacccggagagtcagttgcccttgtgggtccatcaggtgtaggaaagacaactttgttaaaagttatgtgtggattactttcaccaactagtggcgatgttttggcagatgaactggatatcaataaaattggtttaaataactatcgtttgagcacggcatgcgttttgcaagaagaccgtctgttttcaggttcaatttctgaaaatatttgtgggtttgaggataatccagatgaagcatttattatagaatgtgctcgccatagtaatatccatgatgaaataatgaaaatgccgatgggttatgaaacaattattggagaactagggactggcatatctggtgggcagaaacaacgtttgctaattgctcgcgcgctttatcgcaaaccaggtattttatttatggatgaagcgaccagtcatcttgacttaaataatgaagcaaatattaatcatgcaatatcgaacttaagtattacgcgtatcatcgttgcccatagaccctcaactattgcatctgccgatcgtgtaattaatttatcaacttatagttcattatcacataatttctaa

SEQ ID NO: 184996 - DNA, 855 bp, Klebsiella oxytoca
atgaaaattaagggaataattactgcacccatcaaacaagatgaccatctatgccttatgacatttaaaataaaagataatgatgataaatgtcatatttttcatatgccggtaatgacgttggtggatttcctcattattctacgcagtcgcatgactaaaatttcacaatgttttcaaaatgggaatgacatttatattgccaaaatgcaaactagcgttgaatcattgacgataaatattccaacaattattgccgatgaggtaatgcaacctgatctaggatggctagtaacatctttaacgcctaaaattagagaagaagaattttctattatccttacgttacaaaacgaagatatttttatttttgagttggacgacacacatgtcgaatttataataatagctattcaaaaagccattgaaatgatcaacgataaagaaagcttaagggttatcaattctctattagatttcttgctatgttattgcgttgatttaactaatcttgactatttgcattttaaagaaattaatcatgctccatggaaacaaaatcttttttctaaatatatagctgtactttattgtttcgaaactgaagtgggtaaagaaatactttcaggagcgattatcaaaaccaatgcccaaccagatacgcaagaaatagaaagcattgcccatagagttgcacaaatgacccctatgttaaaaaaaatgcaagaaaaacatccattatgtcagatactttatcagcatttaccgtcacaacctatgcaagtattaacaaaagatgaatgtctccgctcattacatgctttctgcctcaaaagtcagacgcccctcaagtaa

SEQ ID NO: 184997 - DNA, 264 bp, Klebsiella oxytoca
atggctacggggcaaatgatggttggtctggtagcccggctaaggcgcagcgcgccgcaagccgggattctgacgaaggattatggcagagaggtagcccgggcaggtgcgcagcaccgcctccgggactatggagagctggattacgccagctgcgcctgcgcccagaatacaccgctggcgtattccggcggcagcagcggcttcagcgcttccagcgtcgcgctcaggcgatcggtatcgctgtcggtcaggttcaggtga

SEQ ID NO: 184998 - DNA, 240 bp, Klebsiella oxytoca
atgttcaaactaattcagagaggtcagctctttgccgattgccacggatggccggtaattatcgccagcagcgacgacaagacggttcgctactggcggcaggggcggatcaacaccgcaagcatagaccgctttaacaatgacttcgagccgctctctcacgaagaggcccagcagataaaggcagagctggagcagagcgaacatattaagaaactgcgcgcccagcgggcggcgtaa

SEQ ID NO: 184999 - DNA, 1260 bp, Klebsiella oxytoca
atgaaaaatagaagtgtcattaatgctctatggatgatgtcagaaaaactggtaacactattcggtcttttctttgtaacttcttttgttgcgaaatatattggtccttatagattcggacagcttgcccttgcaattgctattttccaagttgtccaagttatggcacaaatgggttgtgataatattatattcaaacgtgtgtcacagaaagtaacttcgggcataaaattaatatattcaacattcctggtacgagggtctatatatcttgtactgtctacatttgttttattatatttcattcctaaatccgattttgtaaatcttgtttttcttatatctgtatgtctggcttgtctttttacatctctcgatgtttttgtaatttacaacgatgcaacattaaattcaaaatttaacacaatcgccaatgttgtggggcttataattggtctagcattgcgatatcttattgcttactttgaattatctatgttttatctgtctataccaatcgttttgactacactcattccctttttaataaggatgtattactctccatcaataccatttataaaaagtcagaataaaattcgctataataaatatttaatcataactggcattccactagttatctctactgtgtctatgactatttactcaagaattaatcaatttaccttgtcctattttaaaggagattatgatcttgggatctattcagtagctttaacacttggcacagcttgggtgtttataggaaatgcgctagctatttcttttttatcgaagatttatgctgaaaaagatgatgatgttgctctaaataaggcatcaggcttatcagcttgtatttttataatgctttctacctttcctcttttcttctttttattcggcaagaaaattatttttttattatatggggagcaatatcttcaagcatataatttgcttatcattttgtgtttttcaactgtagtaacgtcattaggttttgtctcaaatcgctatattgttaagttatctggttacagttacctatcgaaaaaaaccgtattgattttactttttagtgttcctgtatcgacattaatggtttactactttggtatttatggcgctgcctatagtgtcctgtttatcgaaactatttcacttactattatgaattatttttttcataacggtattatcttgaaaatgcacttaggtgcattcaatctcaaaaatattcttaagatgaagtaa

SEQ ID NO: 185000 - DNA, 1290 bp, Klebsiella oxytoca
atgaatcgtcgtctttttgccaaaagagcacttgtaattagtgcaactctgccgctttcaaaagtttcttttagtaattataggtgtttctctgcttctcaagaagataatacatgtgtcgtgaacattgatgattatggatgtcatagccacagtcaccatagttactttgacaacagagcgattttacaatatataattgatacatgtgctcaattaagtctaaagaataattctcgaatggtgattcatattcctgaaggaacatattatttatctgctacggcttcaaattcaaagagtaattcaactataggggcgtattgtctcttaatgcgaagtaatataattcttaaaggtgaaggtgtattaaaattattaccaaaccaatatggtaaaggcgcatattttaggattctcgcaagcgaaaaaaatgataaaatagaaaattctgatattcgggacattacatttgatggtaactcatcatttcagaccgatggatttcaagcaagtaatattctattagagtgtaaagctaatattactattgctaatgttcgtagtataaatgcaaatggtaatggtattcttattaaaggggaagcattacaaaatcagccagtagcagatgtgtgtattaatgattgttttgttactaattgtaagaagattggtattcaggtaagtcagtttaatggtttgaaaatttataataacatcgtctcacattgcaacgataatggcatagatatttatggtgatttgggtggcactttcccaaacataacaaatgggaatcactttttaatatttaataataaagtttcattttgccttaatggcatttttccagaaaccgtgtcaaacggtaaagtctacggtaataaaattgaatatatgaaagagtctggagttcatatcaatcgaattcatggattgccgagtaatattatcatcgaaaataatcaaatagttaattctacttccggtgttttttttactggagatatgaagaatattctagtgaaaaacaataagatttatgaagtcactaattccttcttttcctttggtggaggtaaagggaatacttctgggatacaggtaattaataatttaatatttgtaggtgataataaaagtacattgtcttcatttgcaggagaaaaaattcgtaatatcaatgttagctataattatattacacaaaaacacagtgattttaaattctccttgaatcgtaataatgcacgttttgtggatgaaaaaacggtgataattaaatga

SEQ ID NO: 185001 - DNA, 627 bp, Klebsiella oxytoca
gtggttgtctggcgaaagatacctctgcagaatgagacaatcacctttaaacatgaccttaattttagccatcacaggctactgaacccggatccggtgagcgctctggctcacataagaaagaagcatatagaagaccaggctatgcgtactcataaactgaacaagtcacgtaaactatatcgcagtgacaatacaactacgcggcattattcaattaatccggggggggagtatcgctgggggcgaaaccgtaaaaaagccgaagacgagctgctggcaaagcgcgagacaatgcatggcaggcaaaagagaggccgtgactataccccattgttttactttctcgtcaaacagattggccaaccgtgggataaggtattcagcgaagtatgtggtcgtcttgatacaacagagcctgttttctggttggtcgcgctgcatgagcatcagaaaagagatttggtacgtatcggtgacagcagcttttatccgggcctgtttgttgatggaaatggaatcttacaacaggtaaacccttcgattacgggaaaggacgttaaggtaatttgccgttgctgtacccacacttatatgggggagccagtcccagggaggtatgagtaa

SEQ ID NO: 185002 - DNA, 1500 bp, Klebsiella oxytoca
atggcaaatataattacatgcaaaactaaggatgggaaaaccattcagtatgtcgatgaagtcatcggctctggctcaatgaaagacgtttatttttctccggataaatcatatgtcgtagccttctaccataaacctcagaatgaacaggcccgggaacgtatcaacatgatcaccgggaggtaccggcagaatatttttgagcagactggtggagattactggaaaggtctcttctgctggcccactgatgtggttgagcacgctgataaggtgggtattgttgtacctgcttaccagcagcatttcttcttccgatatggttccaaaaacaatgatttcctcgggatcaaaggacgagaaaaggaagggaaatggtttgccagcgcgaacaatcagaataaatttctggatccgcgtgaacgtggcaatacgcttaactatctgaaggtctgcatccatctaacgcgtgcagtcagacgaatgcatgctgcgggcctgtgtcatagtgacctgagttataaaaatgtgctgatagatccggaactaggccacgcatgcattattgatgttgatgggctggtggttccgggaaaatatcctccagacgtggttggtacacctgattttattgccccggaagtagtgaagacaagccatctccccaaagacgatccccgccgcgtattgccgagtatcgctaccgaccggcatgcactttcggtgctcatttacatgtatcttcttttccggcacccgttacggggaggaaaaattcacgatatcgatgatgaggtcagggatgaggcgctttccatgggagagcgggcactttttatcgaacacccgactgacagaagcaatgcagttaaagttaatcaggtctcatcgttttcgctcccgtgggcagatcctcagaaaatcccgtacaccattatggggccctacctgaaacctctcttcgaccgggcttttattgacgggttgcatgatccgtcgaagcgccctacagccgatgaatgggagagcgccctggtaaaaaccgtcgatctcatccagccatgccagaacaaggattgtgaccagaaatggtacgttttcaatggcaagacgaaacccgtttgtccctactgcggtacaccgtacaaaggcaaactccccatcctgaatctgtattcgtcgagaaaagctggaactttcaggccagatgatcaccggcttatggtgtggagcggtcagtcattatatgcatggcacgtcaaccgactgattgctcctaacgaacgaaccaccgatgagcagaagaaaagggttggttatttcgtcttccataatgaccagtggtggctggttaacgaggggcttagcgggctcatatcacttcccgatcggaaaacggtcggcattggtgaaaagttgctgctggaggacaacacccagttcatcctttcttcagaggatggtgggcggctggtagtggtacaactcgtggtgaattaa

SEQ ID NO: 185003 - DNA, 1734 bp, Klebsiella oxytoca
atgagcgagttcattacacctgaacataaaattattgctctcattctggaggcatcaggggaaccgactgatgctgataaagtatgctgtcttggtaacatacctgatgttgcccttgctgtgcggcagctgagagaaacggtcattcaacactgtgcaagcgaagccatactggcggagaacactcaaacagtttcagaacgtcttacccagcctttttctgacaatatcctcccacctcaaaactctggtgaaagcgaagctgatcgacctgagattgaacccgtccatgccgctactgcacttcagggaaatgataagcaggaagcgcatagtgaaatggtggatgatacagcgtcagaaggcgttcagggacacactgaagaagttcctgatgcaaccggggtcttacagaccgaggcttccgtcacggcgcaaccagaagacatggataaaaccagtccggttgtttctgacaacctttcaactgactccgcagtcagtgctttacggcccggggaagtacctcagagagtggagaataaaacatcccctgcccccggaaaagtgccggaggtgtttatcatgctgccaaatgcacgggcaggtgaaccctacgatgttcgactggaaatagcgaccgatacaggtgttgaggcagagatcacggaggttaacttctctcaggacatagggctgatatttgatatcaatgagcgacgcctccaggggacaccagggcagagcggagactttgaactgactgtgaaatggtcatgcagctcacatcgtgataatgaaaaaaagttactttttgtcgtgaaccctgatccgaaaagtctctggaaagtgattgacccgccttctgatgcaccattctacaagaagagtatcgaccaccagagtgtctgtcggtcaggtattcatattgccggagcaagccgtcgtggacgctcccatgaacatgtaggctcttttcgtgacgacgattattacctcaacttcagtgatgtatccggatggagtgtattactggtagctgatggcgcggggagcgctaaatattcccgggaaggctcccgtatcgtttctgaaaccgttggtaactatctcttcaaccagttcaagactgaaaaagggcttgagatcaaaaacagggtccttcgctggaacagtgaagatcagcgagcagtatgggagtttatgaaccaccacttcagacaggcagcggtactggccgtaaacaatatcagcagtgccgcaattttggctgaagataaagtaaagtcattctcaacaactttactcgcgaccgtcacttttcgcgacggtgccgatctgtttgccgcgtctttctggttaggtgacggtgcgatagctgcatatggacctgctggcaaagtcagagtgctggggacaccggatagcggagagtatgcaggtcagacgcggtttctggatgccgatgccgtcagtgatgccggattcagtaaacgtatcagtatcggtaagtggaacgacatatcgcatctggttctgatgactgatggtgtttccgatccctggtttgaaacggataacgggcttcagaatccacaaaaatgggacaggctgatggccgagctctctcccctactcacagaccctgaacatgcctcggcacaactggtggagtggcttaactttttctctccgggaaatcacgatgatcgcacaatcattgtgctctggtga

SEQ ID NO: 185004 - DNA, 1041 bp, Klebsiella oxytoca
gtgagacgacttcccgttttttttgttctggactgttctgagtccatgattggtgaaaacctgaaaaggatgaatgatggcttgcagaagattgtgagcgatctgcgtaaggaccctcatgctctggagacagtctgggtgtcagtaattgcctttgccggtattgccagaacgattgtcccgttacatgacattgtgtctttttatccccctcgccttcctgtcggtggaggaactaacctcgcgactgccttacgggaactgacaacacaaatagattctcaggtccgaaaaacgacgctggaagaaaaaggtgactggaagccagttgtctacttacttactgacggccgaccgacagatgacatttcagctgaggttaagcgctggaacgaattttacgcaaaaaaagtgaatatgattgctgtggggatcggaccatcagttgatctcagtgtactcaggcaactgactgaaaacgtcttatcgtttaccgaaaatcaggaaggcgatttttcgcggtttatccagtggatcacagcttcagtcacagctcacagtcgtagtgttggcgaggattctcagccacccctgaaacaaactgactatatcgtcaagcttgccaaagatgacacagcccgtgcatacgatgaaaactgtgtggtattaaccgggcgttgcagtaaaacccgtcgaccctatctgattaagtatgagcgtccgccagccagggtatcgggcctcgctttcgatctaaaccttaacagcttcaacattgctggttgttatcctgtggatgaagattacttctcatggacggatatgtccgtagccggggcgcagataaacaccagtgaactccatggcgtaccagggtgcccacactgcggaaacagtagtgcttttgcgatgtgtacctgcggaaaacttctctgtattgatgggcctgatgatgtgaactgcccatggtgtgggaaaggtttgtcctttcagagcgagggtggaaattcagattttaacgttagcagaggacgcggctaa

SEQ ID NO: 185005 - DNA, 639 bp, Klebsiella oxytoca
atgcgaagactacccgtatatctgctcatcgatacttccggctcaatgagaggagaatcgatacattcagtgaatgtgggtgtgcaggctatgctgagtgccctgagacaggacccttatgcgcttgaaagcgtccatatctcaataattacatacgataatgaagcccgggagtatgttcccctcactgccctggctgactttcagttttctgatatagaagtaccaagtgcgggcggcacctttaccggcgcggcgcttgaatgtctgatccagtgtgtcgaccgggatattcgccgctctgatggtgaacagaaaggcgactggagaccgctggtgtttctgatgacagatggtactccgtcagatgcctgggcttatggggaagctgtgaaagaggttcagcggcgttcgtttggctccattatagcctgtgctgttggccctaaagcgggacacgaacatctgaaactactgactgacaaagttgtggctcttgaaacacttgattcgaccgcattttcaggctttttcaaatgggtcagtgccagcgtggcttcaggaagctccagtgccggagtcactactgattcggacacacttccaccaccaccacctgaaatccagcttgttctgtaa

SEQ ID NO: 185006 - DNA, 642 bp, Klebsiella oxytoca
atgacagtcagcttacgaaaaggtcaaggcgttagcctgcgtaaaaatgagttcgatctttcttcggtcactatcggtcttggctgggatattaatgaagaaaaaaaaggtcttctaggtgggcttttcggtaaaaaagaggaagagtatgaccttgatgtcatcgccttcctttgcaacgatgccggaaaggttactgacctcggaaatgttgaaaacggtaaacccacgctggttaatggcgatattgtgttttttaacagtcttcgccataagtctgggcaaatctggttgactggcgataaccggacaggtgccggagacggagacgatgagcaaattatcgtaaaactaaacagcatcgatccgaagtacgaaaaaattgtctttattgttcagatctacaacggcgaaaaattacagcagcactttggaaaagtgcaaaatgcatttatccgggcggtagacggaaaaaatgtggaaatggcacgctttgacctctccggcggtgtagcctttaatggtcagcgatcgatggtctttgctgagcttgtccgggaatccagtggctggaaactgaatgcgataggcgagccttccacctccgattcgttcgtaagccatctgaggaactatatctaa

SEQ ID NO: 185007 - DNA, 639 bp, Klebsiella oxytoca
atgagaagactccccgtttacctgttgcttgatacatcaggttcaatgcatggcgaacccattgaggctgtaaaaaatggtgttcagacgctgctaaccacgttgaagcaggacccatatgctttagaaacagcgtttgtgtcggttattactttcagctcctcagcacaccaggccgttcctctgacggatctgcttagtttcaacctgccctctttgaccgcgagcggaaccacagcgctgggcgaagccttatctctgattgcgaatcgaattgactcagaagtcatgaaaacaacagcagatacaaaaggtgactggcgaccgttggtgttcctgatgactgatggcgctccgaccgacgactggcgaaaaggccttaatgattttaaagcagccaggaaaggcgtcgttgtagcctgcgcggcaggccatgatgcggacaccagtgtactgaaagaaattacagaaatcgtcctacagctcgataccgctgacagctcttctatcaaagcgttcttcaaatgggtatcggcgagtgtttctgtaggaagtcagaaagttgacgcgggtaagaaagaggttatcggtcttgatgatttacctcctccaccgccagaagtgaacgtagttttatag

SEQ ID NO: 185008 - DNA, 474 bp, Klebsiella oxytoca
atgcaactaaacacccgacaggaacgaatttatactctggcaaacttactgggtacgggaaaacccgtttctgcggcaaaaatcatcagcgttcttgactgttcggaacctaccctcagtcgtgcactgaaggagcttcgggagtcctatgcggcggaaatcaaatacagtaaagccggtcattcctatcagttagtttgtcccggccagctcgataaaaaaacattacgccggatgaatgaagctctcactcagaatgcagaacagaaagcgcaggatatttcgacaaaggtggtgctggataaagatctgaagacgactgtctctttatccattcgacgtcgggtactgcgtaaaattgacaagctggcggaactaaccggcacgtcccgaagtgaagcggtagagactctcgctgaaatgaaggtcgaggactttattaaggcaattcagtttaaaaataaaccggaataa

SEQ ID NO: 185009 - DNA, 1032 bp, Klebsiella oxytoca
atgcaattacaaaacaaaatccattccaatccgggactgagggaagagctggagcaggaagtggaaagtctgatgtccgctataacggccatttccagtattcatgagctttccccttcacctgtgggagggaacacatgggcatcgctcgaatcacattatcttgagctccaccagaggacgttcgaccggcccgcgcctgttcgtcctgccaaacctgaatacagtcctctcccgtccgcaccagacgaacgtagcggtcgtggttttctggggggatggttcgaaaccgatgcggctcgcaccgaacgacagaatgagaaccagcgacggtggcaactggaagtggcggacgttgaacgcgaaaacacactgcttaaacaacggtatgagaaacaacgtgtggcctgggctgagcagtatgcaaactggcagtttgacgctcaggaatataataaaaactccgctctcactgcaggtgttgcacgcgagcagttccgttcggatgcccgtttctttgaagactgcctggcagaggtgctctcacaaacggaatggccgcgcgaaacgcttgtgacttttgaagtcaggcctgacgcgtcaatggtcctgcttgatattgatttacctgagattgaggatatgcctgataagatgtatggcgtcaatgcaaggggaacggatatcactgaaaaaacgatgacacagaaagcggtccgggagagttatgcaagacacgtccacggttgtctgatgcgattagctgccatcgtatttcggacgcttccgtttgaatacgtcgtgctttccggctttactcagcggatcagcaaacaaacgggttaccttgaggatgagtacattctttcctgcaggatagaccgccatcatatggaaaaaattaactatacgaaccttgaagacgtggacccgatcgcggtactgagtgttcagacgcttatccggaaaatgagcgccactttcctgtttcaggtcattgacccttttacgataactgcaggcaccagctga

SEQ ID NO: 185010 - DNA, 228 bp, Klebsiella oxytoca
atggtatcattttcaaacatggatggtgctcactgcgattccgtagtagatcactataccttgccatcaaatagtattcagatggatgtaaaagttcctgttcaaccatcaaattttgaccctttgcagaagggggccttaatgggggcctcaacgtttatggaacaagataaaaaccattctaatcaatgcaattacaaaacaaaatccattccaatccgggactga

SEQ ID NO: 185011 - DNA, 654 bp, Klebsiella oxytoca; identical to SEQ ID NO: 151160

SEQ ID NO: 185012 - DNA, 189 bp, Klebsiella oxytoca; identical to SEQ ID NO: 151161

SEQ ID NO: 185013 - DNA, 204 bp, Klebsiella oxytoca; identical to SEQ ID NO: 151162

SEQ ID NO: 185014 - DNA, 492 bp, Klebsiella oxytoca; identical to SEQ ID NO: 151163

SEQ ID NO: 185015 - DNA, 378 bp, Klebsiella oxytoca; identical to SEQ ID NO: 151164

SEQ ID NO: 185016 - DNA, 360 bp, Klebsiella oxytoca; identical to SEQ ID NO: 151165

SEQ ID NO: 185017 - DNA, 483 bp, Klebsiella oxytoca; identical to SEQ ID NO: 151166

SEQ ID NO: 185018 - DNA, 219 bp, Klebsiella oxytoca; identical to SEQ ID NO: 151167

SEQ ID NO: 185019 - DNA, 474 bp, Klebsiella oxytoca; identical to SEQ ID NO: 151168

SEQ ID NO: 185020 - DNA, 255 bp, Klebsiella oxytoca; identical to SEQ ID NO: 151169

SEQ ID NO: 185021 - DNA, 819 bp, Klebsiella oxytoca
atgagactagccagccgctttggacggacaaaccagatccgtcgcgatcgtccgttaacccgcgaagaactgatgcaggtcgttcccagcgtattcagtgcagatcgccacggttccaggagcgaaaaatacgcttacatacccaccattactctgctcgaaaatcttcaacgcgaaggctttgaacccttcttcgcctgccagtcacgcgtacgcgaccctgaccgccgggagcacaccaaacatctgctgcgcctgcgtcgtaccggtcagataaccggccagcaggttcccgaaatcattttgcttaactcgcacgatggtagcagctcataccagatgctgccggggctgttcagagccatctgcaccaacgggctcgtctgcggacagtcgttcggtgaaattcgtgtaccgcatcgtggcgatgtggccgggaaagtgattgagggggcttatgaagtgctcggtgtctttgatcgggtggaagaaaagcgcgaggccatgcagtcacttcgactaccagcacccgcgcaacatgccctggcgaacgccgcactgacataccgctttggtgaagaatatcagccggtgaccgcagcgcagatactgacaccgcgacggtatgaggaccatcaggacgacctgtggaccgtttataaccgcattcaggaatcgttgctgaaaggcgggctgagcggacgcaccgcacagggtaaacgtacccacactcgtgcggttaacggtatcgacggggatatcaaactcaaccgcgcgctctgggtgatggccgaagaactgcagcaggcactgagctga

SEQ ID NO: 185022 - DNA, 234 bp, Klebsiella oxytoca; identical to SEQ ID NO: 151171

SEQ ID NO: 185023 - DNA, 222 bp, Klebsiella oxytoca; identical to SEQ ID NO: 151172

SEQ ID NO: 185024 - DNA, 513 bp, Klebsiella oxytoca
atgaccgacatttcgacactcagccagcgactgacgacgccaaccctgcattttgttctactcaccgtcgccacctgcggcatctggccgttactgtggctgtaccgaaaacagcagattatcagcgacaccaccggatatccggtttgcggcaatctgtttatcatctggctcgccgtctgttttgggctcggacgacagttcggcgtgatggcctcaccggacctggcgggctactacacgggcagcgatacactgttggccttaagcggcattctgtcgctcacctgcggcgtgatgtacatcgtctgggcctttaaggccagagcagcactgcgacactatgcgctgaacaccttccggtttgacctgaagatgaatgcgttttataccgtggtgctcaacgtcttctacattacatactgcatcaacgatatgccgcaggcactggcgaagcaccgcattattcatggtcaggcccctgtgccgccggagtctccgtcaccgcagtaa

SEQ ID NO: 185025 - DNA, 471 bp, Klebsiella oxytoca
atgcgattcatgcacgccatcctgtcagcaggattactgacctttgccatcacggcacaggcggtccccaatatgtggagcagtggcttcggtatgggcgtcaccgagtacatcatcaccagcccggaaaacgtgatgatgaacctgaactgcaccggcaaccctgacgaccagaatatcctgcagcatcacgtcatgctcaccctgcctgacggcagcggtgccgattcacaggatgagaaaaccgccatcaccgtcgtcacggatgaccagacgttccccctgccgtcctctctgggctggcgtaacggcgacaacgcctggctgtcgttcattgatgccatcagaaaagcaacgtcgtttgagatttacgtcaacgacaaacaggtggggcactttaccccttcggctggaaacgttcacaaggttctggctgatatgcccgaatgcacgacactgaccgccgggtaa

SEQ ID NO: 185026 - DNA, 312 bp, Klebsiella oxytoca
atggcgcttgtcattaaatatttcgcgattgccttcgccatcgcgcttgtggtcgtgctgtttaacgtgttcgggagtaccggcgagatacgcagttttggtcagggaatggaatatctgttctggatgacgcttgggcccggagccggtatgacggtcggtgctgctcttcgacaatggctgatgccggatgcggtatacacccgcgaaggaatgaccggattactcaaggcccgtctgttctggcttgtgggcccacagtatatcggctggctggccggacttatcgtcgtgggtaaacaactcatgtaa

SEQ ID NO: 185027 - DNA, 267 bp, Klebsiella oxytoca
gtgaaacctgtcgaaggccctctgctgctcttcaccctgatgttgtctgccgtaaccctgagcggctgtggcgacaaaaatgaacgcgagtttatccggggatgcaaatcaggcggcggtactaccgccgtctgcggatgtatccgggatgacctcaaaacgaaatatacgcacggggagctggagaaaatgaaccagcaatacggttatgtccccccgcgcttcatggacaacatgctgagcgctgctcagcagtgcagaaaataa

SEQ ID NO: 185028 - DNA, 729 bp, Klebsiella oxytoca
atgcaacgacccgatgaagaggcccgctacgaccggctggccgtcagattgtcggtcattatcagccggttaatggccggagaaacgctgacccttcagacactgtccggtgagtttggtgtatcgatacgcaccctgcgtcgtgacttacatcaacggctggtccacctcgacattatcggggagaacggcacgtatcggctcagtgagagcgccacgcgtgatcactctccgggggccgtttcctttgcccgcagtaccggtatcgcacgcattatcccgtcgcagaaccggcaactgatgcacctgctgatgaatgaaacgggcacctcaccctgctttatctggcacgacttaccgccagcatggacacaggctgacagttttcatcgtctggccgaagccatttgtcatcaccgggtggtcagtctgctggtcggcggtgtccgtcacgatgagcaggagccttaccgcctgatttaccggcatcagcactggtatctggtcgtctgttgccgggggagccttcgggtgttccggctggaagacattatctcggcctcactctcagagcaaaccttccgtcgccggagcgaaatcagttcgctcattactgaagagggatttatcagcgcactgccccactttcgctttatcagtgatgtcattcacaccttcagggaacaacaccctgaacatccatccagacccaaaggagtcaaatcgtga

SEQ ID NO: 185029 - DNA, 504 bp, Klebsiella oxytoca
gtgtccagtaagaacaaacggggtcccgataccctgttaccgtcgttattccttctcccgggtcaactgtcccacaaaatacccgtgcgtatgcttctcgcgctaagtcacagctatgctttctgttccggtacccaggtctctctgatacacggtccgccagctcatgaaggcggctatttattgccagtaataagggagaaagaaatgcattgtccgaattgcggttcgcaaaacatacgactgcgccatgtgggtaaaaagacgggtggggtcattggcgcaacagccggaggcattgccgggcttgaaggagcctccaccggtgcgctgataggttcagtcattccggttgtcggtacgatagccggaggcctcattggttttctgtccggcgcctgtgctggtgcggtggcaggctctctggccggagaacaactggacggtaccgtctttgatgaatacggctgcacgcagtgcgagcatatcttcagtgcaccgtaa

SEQ ID NO: 185030 - DNA, 969 bp, Klebsiella oxytoca; identical to SEQ ID NO: 151173

SEQ ID NO: 185031 - DNA, 570 bp, Klebsiella oxytoca
atgagttacacatacgacccttactggcagcaacgcatcgctgataccttcagttgcgctcttaacgcttacacccgcttactggccctgcgtgttgacctccgtctgccggatacgccagcggccaccgatgctgctgttatctcccgcttcaccgattccctgaaagcccggattgatgcccttcagacgcgtcaacgtcgcgagggcaaacgcgtctggccgaccacgctgcgttttatctgggcgcgggagtttggtgaaatcaaagggaagaagcattaccacgcggtgctgttgctgaaccgcgatacgtggtgcggaccgggagattacaaagacccggattcgcttgcaggtatgattaaacaagcgtggtgcagcgccctgaaggtggatgcacaggcgcatgccgttctggctcgtttcccggcgagtccagtctcatggttgacacgtggcgatggtgctcaactgcaacaggccctgtcgcaggcggcctatttagccaagctggagaccaaaatcaccggtgacggtgagcgtaacttcggttgcagccgtggctga

SEQ ID NO: 185032 - DNA, 240 bp, Klebsiella oxytoca; identical to SEQ ID NO: 128897

SEQ ID NO: 185033 - DNA, 420 bp, Klebsiella oxytoca; identical to SEQ ID NO: 128896

SEQ ID NO: 185034 - DNA, 417 bp, Klebsiella oxytoca; identical to SEQ ID NO: 128895

SEQ ID NO: 185035 - DNA, 567 bp, Klebsiella oxytoca
atgaatcattcttacatacgggcgtctgatgctgtcagcgcggatgccgtcagcacgcgtgcatttctgcaacaggccgttgaccattacccgcgactggcggcattcagctttacgctggcgctaccgtatcgtgaagccatgagcgaataccggtcattgattctgcgttttcactctgaagtctggcagcgcaccggcgaatattcgcgccagcgtcagcaggcacgacatcgttcactcccgacgctgttacgctggatatgggagacggccagcgcaccggagtgcaaaatggtgctgctgctcaatctcgatacgctgggtacagggcgaaacctgcaactgaccgacagtgcgcctccggggcttaacgccatcatcgccgacgcatggcaaaaggtgaccggtaccgcctgcactgacggtgtaacgagtatgacgcagatcattattaaccgcgtcgctcagggagtcttcgcaacaccctttaaccagcttaccgtgcatgttaaggccatgtcagagccaatagcaacggccagaacggggatgatttgtccgtga

SEQ ID NO: 185036 - DNA, 606 bp, Klebsiella oxytoca
atgaaaaaagctcacgataccttacccccggaacaaaccgtcacagcacttgcgcatttcgcctggtgcgcccttgtcgccttacgtaccgctcagcaggatggtcaggcattgtcgccactcagcacgcatgcatttatactgcgctggttaacggtggcgtataagcaaaaacggtttccacgtgcaatcgcatctgatattgagggattgctgacgctggggcgtaacaaaggccttgccgccagcttattcagtcgtctggaatatctgtggtcttcgtgcaccggaccggtgtcagcgcagtcggatttgtatcggctgacgtacgcaattgaacagcttaaatcgcggggctgggtcaatgcagcggtgagtgacagggactgggacaatgaaacgcttctggccctggaatacagcgatgcgaatgcactgctggtaaggaagtcggcactgacctgcggattttcggatggagggaaactcgttgcgccggttgagtttcttgtgaatggcgacttgtcagcctgtatggctgtttttgcggctcatacactgtcggctgtcatgctggagtcgaatcggatcgtgttacaaccttga

SEQ ID NO: 185037 - DNA, 177 bp, Klebsiella oxytoca; identical to SEQ ID NO: 128855

SEQ ID NO: 185038 - DNA, 453 bp, Klebsiella oxytoca
atgctccatcacctcggctacggtaaacatcagtctaaaccgggtgccaactcccgcaacggctatttcacaaaaaccgttaccaccggcgatggcccgctggaactgcgtacgccgtgcgatcgtgacggctccttcgagccccaactggtgaagaaaaaccagacccggatcaccgggatggataaccaaatcctgtcactgtacgccaaagggatgaccacccgtgagatagtggctgcgttcaaagagttgtatgacgcggatgtctcaccgacgctggtagtccttcatgctccggaaggtcagactgatgttgtcttcactgccatcatcagcaagcgtgtttttaacggtaagattgacttttggggaatattcagaaatgacagaatcacaattatttttattcaaatcaacttttttgcgctcagacaaggggcagactcctga

SEQ ID NO: 185039 - DNA, 129 bp, Klebsiella oxytoca; identical to SEQ ID NO: 128856

SEQ ID NO: 185040 - DNA, 240 bp, Klebsiella oxytoca
atgcagcaattgagctcaccgctgaagactcacgccagaccttcccccttctcccgggatagccgcctgcggcagcatgtcattcgtcatcgcgctgccaacctgaccattcagaaccagcggcacaacatgccgcatttctttacgcaactggctgatttgctagcgcgggaccagcagatgattggtaggtgcttggctgtccgcgtgtctccggggtcagacactgacctttactga

SEQ ID NO: 185041 - DNA, 1215 bp, Klebsiella oxytoca
atgaaaatgaaaattggggttctgattgtgtcggccgcaatcatcgccactgccgggattgcgtttgcccgggatagtggcggcaacgatgagccggccgcagcggccgcacctatggctccccaggttcccgtagccgaagtgctctcgcgtcagatagtcccttcggcagagtttaccggttcattggcggccccaaaaaccgtagagctacgcccacgcgttggcggtaccatcgacgctgtcagcgtacctgaaggcagcatggtgcgtcaggggcagctgctgttccaaattgatcctcgtccattccaggtggctcttgacagcgcgcaagcacgactcaagcaggcagaagcgctggctatccaggccaatcgcgattttgaacgagttggtcggctggtgaacaatggcgcggtatcccggaaagattacgatgacgccgcttctacacgtcatgctcgtcaggctgaggtgcaggctgcaaaggccgaggttgcggcggcgaaactggacttgtcttattcgcgcgtggtggcaccgattaccggccgcgtggatcgcatgctggtgactgagggaaatctggtcagcggcggtggtacgggatctgcgacgctattgacaacgattgtttccgtcaatccgctatacgcttactttgatattgacgaagcgacgttccttaattcagtcagcaaggcacgtcctgacgcagttaacaaggtggaagagcgtttacccgtgcatgttgggctggcgacagaaaaaggtttcccgcatcagggaacgctcgattttgtcgggaatcagatcgatcgtagtaccggtactgtcagggtacgtgccgtaatccctaacgacgatgggaaactgacgccaggtgcctttgcccgcgtgcagctggccaccggtgcggcacatcaggcgattctgattgacgatcaggcgatagggagcgatcagggacgcaactatgtcctggtggtgggtgcggataataaggcgcagtatcgcccgattgagctgggcgcggtggttgatggtttgcgcgtggtcaagagtggcctgaaagccggtgagaacattattatcaaggggctggtgcgtcccggtatggcggtgacgccgcgtttgaccccgatgcaggcttctggcgcgtcggttagcgagggggaaaaagccggctccgttgaagggggaggccaataa

SEQ ID NO: 185042 - DNA, 3174 bp, Klebsiella oxytoca
atgaaattcccacacttcttcatccagcggcctattttcgcgattgtgttatcggtgtttatgctgatagctggcgctctggctttctttcagcttccgctgagtgaatacccatcggtaacaccgcctaccgtgcaggtttcggcaagctaccctggtgctaaccctaaggtgattgctgacaccgttgctgctccactggaacaggcaatcaacggggtggaaggcatgttgtacatgagttcccagatgtctgccgacggtcgaatggtcttgacgatttcattccggcagggaaccgaccccgatattgcgcagattcaggtgcagaaccgggtttctcgggccttgccgcgcttgccgactgaggtgcagcagatcggtgtcgtgacggagaaaacgtcaccggatatcctcatggttgtgcatatatttgcacagggcgatcgctacgatccgctttatgtttccaactatgccatgttgaacgtgcgtgatgagctatcacgcttgccaggtattgccagcgtcacgcttgggggcgagggtgaatacgcgatgcgcgtctggctggatccgaccaaagtcgcttcccgcggtttgacggccagtgatgtgaccgcagcaattcgtgagcagaatgtccaggtcgcggccggttctgtcggtcaacagccgaacagctcctcagccttcgaagtcagtatcaatgcccaggggcgtctgaccaccgttgagcagtttggcgatatcgtgatcaaagctggcgctgacgggcaggttacccgcctgcgcgatgttgcgcgtctggaattgggatcggacaactattccctgcgcagcctgctggacgataaaaatgccgtgggtatgcacatcgttatgacgccaggcgccaatgcgctggacgtctctgcctcggttcgggcgacgatggcgaggctgcaggccaacttcccggaaggtatcgaataccgtatctcttatgacccgacagtgtttgtcagcgcctcgttgaaatcagtggcaatgacgttgctggaggcgacggtgttggtggtactggtggtgatgctgttcctgcaaacctggcgggcttcgatcatccctctggtcgcggtacctatttcgttggtcggtactttcgccctcatgtatttgttcggcttttcgctcaacacgctgtcgttgtttggtctggtgttatcgattggtatcgttgtcgatgatgccattgtggtggttgaaaacgtcgaacggcatattgcacagggccgttctccgaaagaagcggcaagaagggccatggacgaggtgactggccctattttagccattacttccgttttggctgctgtgtttattccttctgcgttcctgtcaggattgcagggggagttctatcgccagttcgcgctgaccatcgccatttcgacgatcttgtctgcgatcaactcgttgacgttgtcgccggcgctggcatcggttctgcttagaccccatcaggatatggcgcaggccgacaggttgacgcgcatcatggatcgcgtattcggtggtttcttccgtcgctttaacgctttcttcgatagattgtcgaacaactacgttggcgcagtccgccgggccgtacgcggcagtatcatcgtgctggtgctgtatgccggtttcctgggcctgacactgttggggttccagcaggttcctaacggttttgtgcccgctcaggacaaatactatctggttgggattgctcaattgccttccggcgcctcgttggatcgcacggaagccgtagtgaaagagatgtcccgaattgcgctggcggaacctggagtggaaagcgtcgtggcgtttcctgggttgtcggtaaacggccctaacatgcctaactccgcattgatgtttaccatgctgaaacccttcagtgaacgtaaggatccttcgctgtctgccgaggctattgccggtagcctgatggggaaatttagccagatacctgacggttttgtcgggatcttcccgccaccaccggtaccggggctgggcagcatgggaggatttaaactccagatcgaagaccgggcagggcttggctttgaagagctgacccgtgttcaagggatggttatggcgaaggccatgcaggctcctgaactggcagggatgatggccagtttccagaccaacgcacctcagttgcaggttgatatcgaccgcgtcaaagccaagtctcagggcgtcgcactgaccgatatctttgatacgttgcaggtgaatctggggtcgctgtatgtaaatgactttaaccgcttcggtcgtacgtatcgggtgatcactcaggcggatgcgcaattccgtatgcagcctgaagatatcgggttgcttaaagtgcgtaatgccgcgggtgacatgatcccactgggaacgctggtgaacattacccgtacctctggaccagaccgtgttatgcgttacaacggttatccgtcggcggatattaccggtggcgcagcgcctggctactcctccggacaggcaacggcagctattgagaagatcgttagtgaaacgctgcctgagggaatgacatacgaatggaccgatctgacttaccaggagaagcagactggcaactcggcgctgtatatcttcccgttggcggtgttcctggcgttcctgatcctggccgcacaatacaacagctggtcgctgccgtttgcggtgctgttaattgccccaatggcattactttccgcgatcgccggggtttggctatcgaatggagataacaacatcttcacgcagattggttttgtggtgctggtgggactggcggcgaaaaacgcaatcctgatcgtcgagttcgctcgcgccagagagagtgaaggcgtcgatcctctggctgctgtgctggaggccgctcgcctgcgtctgcgcccgatactgatgacctcgttggcatttattgcgggggttgtgcctttggtgatcgcgagcggtgccggtgcggaaatgcgtcatgccatggggattgccgtgtttgccgggatgctgggggtgacgctgttcggactcttgttgacgccagtgttctatgtcgtggtccgtaagctggttattcgccgggaaatcaagcaggcacagcgggcaatcagtgattcacggccatga

SEQ ID NO: 185043 - DNA, 1470 bp, Klebsiella oxytoca
atgaaagcagagtatgaaatgaaccatcgtattaataaactctcggtgctggcgatggcgctggtattggccggttgtactatggcgccggactacgaacggccttctgcaccaacgagctcaagctatccttcgggagcggcttatgctcagggaacagtttcagcggctcagactgccgtggctgatatcggttggcgcgatttctatcgtgatccgttgttgcaacaattacttgaggtcgcgttggcaaacaaccgcgatctgcgcaagtcggtgctggatgttgaggccgcgcgggctcagtaccggatccgtcgtgccgatatgttgccaacactgaatgtggatgcgggcgctaccgtgcagcgtctgcccgcagatgtcagcccgagtggtacaacgcagataacgcggagttatgacgttaatggtgcggtgtcagcctgggagctggatttgtggggacgggttcgtagcctcagcgatcgggcgctggcaacgtacctggcgttggatgaaacacggattgcggcaaggctgagcctgctcgctgaggtgacaaacgcttatctgacgttgcgtgcggatcaggagttgctgcaactggctcacgatacgctgagcacgcaaaagaggacttacgcattgacccaggcgctgtttgatgcgggtaatgcaacgcaaattgatttgcggcgcgcagagattgcgttgcgtactgcggaagtcagtcaggctgcttatacgagggtggcggcgcaggatcgcaatgcactggttttgcttttagggcagccattgacggccgaactctcggccagcctggataaggcgaataccttgcccgatgacatcatcccttccgcgttgccggcgggcttgccggcagaattgctggtgcgtcgtccggatgtccgtgcggcagagcagcaactgcgtgcggccaatgccaatatcggggccgctcgcgcggcatttttcccggcaatcagtttgacaggatcggctggtacggccagttcgagtctggacgggttgttcgagccggggtcagcggcctggagttttgttccgcaaatctcgttgcctattttccggggaggcgctctgcgcgccaatctggacctagcccaggtacaaaagcgcatcgaaattgcgaattacgagaaggcgattcaggttgccttccgcgaagtggctgatggcctggcgggcagacaaaccctggacgatcaattccgttcagaacaattgttggtgcaggccagccaggctaactatgaattggcctcacagcgcttccgggccggtattgacgataatctggcggagcttgacgcgcaacgagcgctgttcagtgcacagcaaactctggttcagacccgactggcgcgaatgagcaatttggtcaatttgtataaagcgctggggggcggatggacagaaagctctccggctaagccataa

SEQ ID NO: 185044 - DNA, 192 bp, Klebsiella oxytoca
atgcaattacatctagaaaatatgacatgcggcggatgtgcccggacagtgactaaagtgattcaaaatattgatcctgaggcaagtatcataactgatccaccgactcgtaagatcgaagtgaaaacttctttatctactgaacaagttgctaatgctttacgtgaggcaggttttcctccgagagagtag

SEQ ID NO: 185045 - DNA, 237 bp, Klebsiella oxytoca
atgagaaatatcgccttattccttacggtatgtaatgggattgtcagggcatcgtacaatagcgtgttcgacagcgtgatgaactactatccagaagagcttgaccgtacgttcgagataattctcgatagcgtggaggctcatataaaggtctatgtgtcggtcaagaatcttgatgccagtatggcggtagaagtactcaatgaagtaatatcagcaaatattattgctatctaa

SEQ ID NO: 185046 - DNA, 279 bp, Klebsiella oxytoca; identical to SEQ ID NO: 151174

SEQ ID NO: 185047 - DNA, 786 bp, Klebsiella oxytoca
atgatggcaacgtattcgtctgtaacagggtgtacagtgatcctgctggcagcgacctgcgggtccgctattgccgacagcggcaatcaggatggagtgacggtggggataatgggagaaaacgccccccgctacagtggcgcggataagcagcactggacagtgatgccttccctgcaggtccgtaaaggcgcgtttttcttcgactcaacaaaaggtatcggttatgacctgcagacggataatggcctctattttgaaaatgcgttcggatacagttttggccgtgccgatcaaaattcatcgtggcgcgatggttctgacaaactgaaaggaatgggaaacatccgtggtgcactgaacacgcaggttgctgttggctggcaggtgaacagctggtttaccccggaaatccgtgcaactctgccgctgacggattcacagggggtacagtaccaggcctcgctgacgctcgtgccctggcagaacgacacagatacggttgccctgcagggcgcggcactttttggtgacgcccggtacattaacacctggtacggcgttaatgctgcccagagccgcacaaccggtttccgggaatacaaccgtagcgcaggattttatgctacgcagactaccctgagctggcagcatcagtttaatgaacactggggcaccctactgggcgcttcatatgcctggcttgcggataaaaccagtgacagtcctgttgtgtcagcgcgagacaatatcagcggttttgctggtatcaactggacattctga

SEQ ID NO: 185048 - DNA, 696 bp, Klebsiella oxytoca
atgaacacaaaacgtattctgattatcgaggacgaccgggatgcggcgaatgtgctcgaagcctatcttcgccgtgaaaacttcggggtcatactggcccatgatggaaaagcaggacttgaagccgcccttacccagcatcctgcacttattctgcttgatatcatgctgccgggtatgaccggaacagaaatactcagccggctgcgccgcgaatccgatgttcccgtgataatggtcaccgcaatgggcgaggccccggaccgtatcggggccttacgcttcggtgcggatgattatgtcgtcaaaccttatgatccgggtgaggtcgtggcccgggtgcaggcggtgttacggcgtggggcggcagcgcatgctagcgctgaaaattatcgccgggtgggggccgttgaactcaaccgggacaccatgtcagtcgctgttattcacgatgaaaaccgggtgcaccttgagctgacccccaccgagttttcactgctggacatgatgatgacccgcccccggagcgtctgttcccgtcagacgctgcttgaacactgcctgccggaaagtgatgcgctggagagggtggttgatacacacatctataacctacgccgcaaactggaaaaagcgggggtcagcggtgtgctgaccagcgtgagagggatcggttaccggtatctgcagccatga

SEQ ID NO: 185049 - DNA, 1167 bp, Klebsiella oxytoca
atgaaaaaaagagagtcccgttcattatggcgctggatttgcgtcagggtgttgtcgctggcggccggcagtgtcgtgcttatcgccctgtgcatgtggctgcgttttgccctgctggatgcctgggtacagcatcggatgccggaggcggtacgacaggaatttctgcatctgcgggaaaatcccgatcttaatcgcatccgttaccatgaaattattgatgactggtacggactgcagttctcagatccgtccattgcgtcaacagactggctgacgctgggagggctggtcctgtttgtgacaccgctgataattatgctcggtttgctggccgcccggcctctcgcccggcagttcggtctgctgacgcgagcctccgcagcgatagcgcaggggcgttttaccactcgctcaaaaatggatgcaagtgcgccctctgaattgatgttgtttacgcagaacttcaataccatggccgaaagacttgaacgttatgaccgggaattacgggcatctcatgttgcagccgcgcatgaactgcgctctccactgacggccgcggtgggccgtctacagggaatgatggacggcgtattcccggctgataaagcgcagatgaatatggtgatgaaccagctcctgagcctcagccgtctgattgatgatttgcacctgctctcactggctgatgcagggcagcttacgctgaataaacaacgcttctcacccgccggattactgcaggaaaagattgcctggctacggccacaggctaccgccgggcatttcggttacgacacggatatccctccgggagaatgttgtgcggacccgctgcgaatcggacaggtctttaccattttaatggagaacgcactgcgttacgcgacggaaggcgggaagcaaacgatacagggttccgttcagtcaggctactggacgttctccttccgggattacggcgcgggcgtcgaaccggattttctgccggtgatgtttgaccggtttacccgttctgatgtttcccgttcccgtcattcaggaggcagtggactgggtctgtcgattgccagagccatttgtgagtctcacggcggaacgctgaccgccagtatcccgcaagaggggaacggactcctgtttcgggtgaaactgcccgtatga

SEQ ID NO: 185050 - DNA, 1116 bp, Klebsiella oxytoca
atgccatcatattcattcatccccctgatagcgtctttgcttttctggcgacggggctcagccctggttttcgccctcgccctgcaactgaccggctgtgataatgagccggtatcccgccatgtcccaccaagaccggtgatgaccacggaggtatctgccggcaatcatggcggacagacgctgatgaccggtgaaatattgccccatgaagagacgattatcggcttccgtaccgatggccggatggtgaaacgactcacggatgtggggcagtcagtggttgccgggcaggtactggctgaactggatgataccgatttgcgtaatcagtaccgcagtgctcaggcggcagtacaggaagccgaggcaagcgccaggcttgctgagataaacctgcgacgcatgacgctgcttgccccgcagggtgcggttgcccgggttcagcttgacgaggcccgcacaaaccgcgacacggcaacagcaaaactgcagagcgctcaggccgacctgagcagtgcagcggaccgtctggggtatgcgcgactgctctcaccggttaccggggtggtcaccaccgtcagcgccggtccgggacaggtagtgaccaccggacaggaaatcctgcgggtggcgcagtcaggggcccgtgatgcggtcttcagcgtaccgggggctctggctgacaccctgaaacagcagcagacactcaccctgcgtatggcggataacccgtcggtgtcggtaaccggaacgctgcgtgacatcagcccgcaggccgacacacagacccggacctggcgggtacgctatgaccttgagaatgcacccgcggtaatggctatgggggcgacggtcaccgggtcattacccctgggcggcagtgaagtgtttcaggtaccggcatctgccctgacgaggaaagaacagaaaccggcagtgttcgtggtggacaccggcaaaaatcgcctgcgcctgacacccgttgacattgcggcctatatgaccgattcggtgctcatccgcaaagggctgacagccggtgaacaggtggtcactgccggggtcagtcagttacgtgacggggaaaacgtgctgacggagaaccaaaaatga

SEQ ID NO: 185051 - DNA, 3060 bp, Klebsiella oxytoca
atgaaaaatgttatgcacgcttccggcggttttaatctttctgcctgggcactggcccaccgacaactggtggcttttctgatgctgatggtcacggtgacaggcgtcatgagctttctaaatctgccgcgcagcgaagatccggcgtttaccattaagaccgccgtggtgtcggcacagtggccgggcgcaacggtaaaagataccgtcagtttcgtcaccgacacgctggagaagaagctccaggaaatcccacatctggattatatcgagagttacacgcgtccgggctcgtcggtgatttttgtgaacctgcgtgatgacacaccgccgtcagaggttgcgggtatctggtatagcgtgcggaaaaagatggacgacatccgggcatccctgccggacggcaccaccaccccggccgtggatgatgaattcgatgatacatacggcacaatttatggcttcacgtcggacggcttcactccccggcagttacgcgataccgtcgatgatatccggacatctctgctggctgttccgggaacagggaaagttacgctgctgggtgacagcgaacaacaggtggtgattgcttttgatccactgaaactgtcgggaatgggactcgatcttcagcaggtgacggcggctctgcaggcacagaatgccgtcacgcccgccggacgtatccggacatcacaggaaaatatgtcggtggaagtcagtggcgccttcacatccgtggacagcctgcggcaaattgtgctgcataccggaaaccgttttatcccactcaccgatttggccacggtcacactgcagcaggcagatccgccctcaccggagtttagggttaacggtaaaccagcactcgggctggcgatttcgatggctcgcggtggaaatattgttgattttggtcgggcgctgaacgcgacgatggacaggatccgcacgcatcttccttacgggatcagtgtggagaaggtggcagaccagtcggccgtagtcagtgacgcggtgggaggattcgtccaggtgctggttgaggccgttattattgtgctggccgtttcttttgtttcgctgggcagccgggcaggtctggtggtcgccgtggccattccgctggtgctggccatgacatttaccgggatggaactggccggaatagggctacagcgaatctccctcggtgccctgatcattgcactgggactgctggttgatgatgccatgatcaccgtagaagccatggtgtcgcggcttgaggctggcgatgccctgagtgtggccgccacgcaggtatttcgtaccaccgcgttcccgatgctgacggggacactggtgatgattgccggatttataccggtgggatttgcggcatcgagcgcaggagaatactgctactccctgtttgtggtggtactgacagcgctgctgagctcatggctggttgcggttcttttctcgccgcttaccggcgtctggttactgccggaacagcattcacatcagtcacataagcacagtttctttcaccgtcattatacccgcctgctcgaccgggtgatgcagcaccggcgcaagacactcggttgtgccctggcgatactgatattgtccgggggcggagccctgctgatgcagggtgagtttttcccagcgtccgatcgcccggagctgctggtgagcctgactctgccgcagaatgtcagccaggcacagacgcaccgcgacgtcctgaagtttgaagcgaagttgcgcgataatcctgatattgaccattactcaagctacatcggttccggcgctgtgcgtttttatctgccgatggatgttctgctgcagaaagagaacattgcccagctggtcgtagtggcgaaaaatgaagcggcgagaaaccggctgcagaaacagcttgagcagatcctgtcgaaagatttcagtacgctcacaacccgggtatccacactggagctgggccctccggtgggctggccggtcagataccgggtatccgggccggataatacccgtgtacgtgaactggccacgcaactggcagggatgattgcccgcaatcccgatacccggggtgtcaatctgacgtccggtgaaccggagcgggtcatccgtctgcgggtggatcagacgcaggcgcgtgccaccggcatgacgtctcagtcactggcaggaacgcttgccacgctgttttccggaaccaccgtgaccaccctgcgcgaccgtaaccgccagattgatgtggtgctgcggggaaatgaagcctcacgacaaaacccggcgttactgaatgctctgatgctgacatcatcgaccgggaataaagttcccctgggacaggtcgccacgccagaatggacgctggatgatccggttatctggcgtcggcagcggttgccgtttatcacggttcagtcggataccgcgcccggcgttcgtgcagagaccgtgtcatcggcactctctccggtggttgccggtttccgggagagtctcccgccgggttacagtgtggaggaaggtggagtggttgtggaatcggagaaaggaaacagctcagtgtatgcggtattgcctgtcacgctgatggtgatgctgttactgctgatgattcagttacaacgcttttcgtcgatgctgctggccctgctgatggcaccgtttggtttgcctgggatagttgtggctatgctgccttttggcataccgatggggtttgtggcgctgctggggatcattgcactggccgggatgatcatccgtaatgccgtcattcttattagcgaagtggatgtggggatgaaaaatggtttcactgcggatgaggcgatcaaagtcgccgcgctgcaccgttcacgccccatcatgctgaccgcttcggcggccattctcgggatgctgccgattgcccgggatgttttctggggaccgatggcatttgccattattggtgggctgctttcagccacactggcaacgctgacactactgccggcagcaataagtctaatctttcactggaaaccgtatccctga

SEQ ID NO: 185052 - DNA, 261 bp, Klebsiella oxytoca
atggagatgctccctgagaatatcgtgaagggactttccgaagccgaggtgcagacccggctgggtcaatgtggctataacgaagtgcgtgaacagcctccggaccaggtgcgtgctatcctcaaacgtctgctgggtcccatcccctggatgctcgaaattgcgctggtacttgaagtggttctgggaaagacgactgaaccagtgcgcgctcagacaacgacgaaccatccattcacctcattcggaggtcacagatag

SEQ ID NO: 185053 - DNA, 483 bp, Klebsiella oxytoca
atggaagcgctgaatcaattgtggttaccggtggacaaatcatggcggttaaatgaacgtcattacggtgcgcttcagggaatgaacaaagatgaagccactcaacagattggccagaaaatcgtttatcactggcggaggagctatcgtggtatctcccctccgttgccggatgcacctgcttcacttcatcgtgaggcacgttatcgtcatgtgtccctgacggatttgccggggggagaaagtctggaaatgacgcaacgaaggttgttgccttactggcaccacgtcattgtcctgcgcgtcgccagtggcgaaaccatgttgctggtcagtcatgctaatacactgcgtgcgctgaccatgtttattgagcagattgatgaaaataaggttcccgatctgcatgtcctgacgggaatccccgtactgtatgaaatgaatgaaaaacgggccatcaccgcacgttattcccttgaatga

SEQ ID NO: 185054 - DNA, 963 bp, Klebsiella oxytoca; identical to SEQ ID NO: 128874

SEQ ID NO: 185055 - DNA, 213 bp, Klebsiella oxytoca; identical to SEQ ID NO: 151175

SEQ ID NO: 185056 - DNA, 351 bp, Klebsiella oxytoca; identical to SEQ ID NO: 151176

SEQ ID NO: 185057 - DNA, 300 bp, Klebsiella oxytoca
atgactaaatcagtaaccgtcagtaaaaagccgcgtaaacagcacactcccgaattccgccaggaagctctgaagcttgctgaacgcattggcgtcgctgccgctgcccgcgaactcagtttgtatgaatcgcaactctatggctggcgaaaaaaacaacagcaacaactgacatcatctgcacgcgaaagcgaactggatgctgaaaatgcccggcttaaacgccagcttgcggagcaggcagaggagctggctattctccaaaaggccgcgacatacttcgcgaagctcctgaaatga

SEQ ID NO: 185058 - DNA, 855 bp, Klebsiella oxytoca
atgaagtatgtttttatcgaaaaatatcaggctgagttcaccatcaaagccatgtgccgggtgctgcgcgtggcccgtagcggctggtatgcctggtgctcccggcgtcatcagataaacacgcgacagcagttccgtctggcctgtgatgccgcggttctcagagcattcactgatgcaaaacaacggtatggtgcgccacggcttgcggatgagctcccggcctacaacatcaaaacgatagctggcagcctgcgtcgccaggggcttcgggcaaaggcagcccgcaagttcagcccggtcagttatcgtgagcatggcttgcctgtgtctgagaacctgctgaagcaggacttttacgccagcggcccgaatcagaagtggtcgggagacatcacctacttacgcaccgatgaaggctggctgtatctggcagtggtgattgacctgtggtcgcgagctgtcatcggctggtcaatggcaccgcgaatgacggcacaactgacctgcgatgcgttgcagatggcgctgtggcggcgtaaacgcccgaaaaatgtcattgttcatactgaccgtggcagccagtactgttcagcggactatcaggcgttgctgaagcggcataatctgcgcgggagcatgagcgcgaaaggctgctgttacgacaatgcgtgtgtggaaagcttcttccactcgctgaaagtggaatgcatccacggtgaacgctttatcagccgggaaatgatgagaacaactgtatttaattatattgagtgcgattacaatcgctggcgtcgccacagtgcctgtggtgggctcagtcctgaacaatttgaaaaccagaaccttgcttag

SEQ ID NO: 185059 - DNA, 141 bp, Klebsiella oxytoca; identical to SEQ ID NO: 151177

SEQ ID NO: 185060 - DNA, 267 bp, Klebsiella oxytoca; identical to SEQ ID NO: 151178

SEQ ID NO: 185061 - DNA, 324 bp, Klebsiella oxytoca; identical to SEQ ID NO: 151179

SEQ ID NO: 185062 - DNA, 330 bp, Klebsiella oxytoca; identical to SEQ ID NO: 151180

SEQ ID NO: 185063 - DNA, 1137 bp, Klebsiella oxytoca
atgtctaattcatttagtgcgcgaattgaacgcatgaagtctcgtcgtaaagggacattcgatcaattaaacgtagccagagagtcaatcagtaaccagaggattgatggactggaaaactatgctttgctagaaggtttcctggatttaaatgaaagttgggaaaccaggggaaaacaagattctgcaacccgctatgttataggtgccatgcaaccggttgataaccgctataccgaaatttcttttgaaactgccaagcgtattgagaaccaactggtaaagaaattagatcttaatctggagtttcgtgtccaaggctctgtaccactggatattcatattaaaagtttcagtgatgtggatctgctgattatagacactcagatgcttatttatgatagcgacggtattggccgctacacccctacgaacaaaaatgatggggatgtcatccttgaactcagggatgccgctagggatgccctgaaagcaactttccctgcggcagatgttgatgacaacaacgccaaatctttgagaataacgggagggtctttgcagagagaagtggatgtggtgccaagcatctggtgggataccaaagagtaccaacatactaaagatgtagatcaacgtggggtcactattatagataaaaacacacgtcaacgtatctacaacctacctttcctccacatcaaacgaattaaagacaaatgcgatcaatgtaatggaggattgcgtaagtctattcgttttcttaagacactaaaagcggatagtgaagctgagggtactaaaattgaactcagtagttatgatattgcctcgctgatgtaccacgcagatggtaacaatctccgacatagccaatactacgagctggctgtccttgtagagactcacagatggctaaattatcttgcacagaaccctaatgctgcaatgctgctctacgttccaaatggcaccagaaagataattgacaagaatgaaacttttgccgaattgcttaaactgacgggaatggtcaatagtattgtcactgaggtgctgcgtgaaataaccggccagcctactgaatattacacacccgccaaaggaattttacttataaaacaagcggtttactaa

SEQ ID NO: 185064 - DNA, 627 bp, Klebsiella oxytoca
atgaaaagtcacgagtacattgtgatttgcggttttaaccgcagtaaagtcggccgatatattgccattgttgcctcagttatatcgttcgttctgattttactagcactcacactaatcgaatggctgaaaaactttcacattaacagccacatacctgcctcagttttttcacttattagcgccggtgggatctacatggggttgtatacatggtttgataaaaatctctggcataacacctacctcgggaaatttttatgtgtgccaaatcttgcaggccgctggaatgttgaaggccatacccgatctgaaggtggtaaaccctgggaaggtgagctgagaattgtccagtcatgggacaaagtcagaattcatctgaaaactcaatcatcgcattcggatagtgtgacagcctccatcattcatgacgagggaattggttaccagctgctttataactaccgcaaccaacccaagacaggtgaagaacacctgacttcacatgttggattcgcagagttcaggttcgacgacggactcaaatctgctgaaggccattattttaacggtcaaggccgggctacttacggaacaatgacaatcactaggatcgacaatgtctaa

SEQ ID NO: 185065 - DNA, 585 bp, Klebsiella oxytoca; identical to SEQ ID NO: 151154

SEQ ID NO: 185066 - DNA, 885 bp, Klebsiella oxytoca; identical to SEQ ID NO: 94235

SEQ ID NO: 185067 - DNA, 501 bp, Klebsiella oxytoca
atgaccaccagcagcgaccacgcttacccgccagcgttgaggatggtcactggtatcgcccctgtttacccgccagcgttgacggtgaccaccgacagcggccacgcttacccgccagcgttgaggatgactaccggcagcggtcccgtttacccgccagcgttgaggatgagcaccggcagcggtcccgtttacccgccagcgttgaggatgagcaccggcagcggatctgtttacccgccagcgttgaggatgagcaccggcagcggccccgcttacccgccagcgttgaggatagccaccgtcagcggccccgtttacccgccagcgttgaggatgagcaccggcagcggccccctttacccgccagcgttgaggatgagcaccggcagcggccccgcttacccgccagcgttgaggatgagcaccggcagcggccccgtttgcccgccagcgttgaggataagcaccacagcggttccgtttacccaccagcgttga

SEQ ID NO: 185068 - DNA, 219 bp, Klebsiella oxytoca; identical to SEQ ID NO: 23434

SEQ ID NO: 185069 - DNA, 540 bp, Klebsiella oxytoca; identical to SEQ ID NO: 23433

SEQ ID NO: 185070 - DNA, 1245 bp, Klebsiella oxytoca
atgagtcattctacaaattataattcaccggctaaaacccctatgcagtacgcgcaagaaacttttgaccttgtcaaatctcatgtgcagcaactgggtggatggcgtaatgtattaacgtactatcctgagtttcaggaggctttagaaaaagctccacgttctgtcaaatgcccgtttactggtagtggcaaaacgaaattcagatttaaagataggacgctagaaagtgttcatgctattcatgaggattatccccataatacttttattgatggcattgatttaattgctgaactaaaaagcattagtaaaacgcaggctgcaaaaaacattcttgaaatgcttggtgtttccaaggatagaaagttaactgaagccgaccgtgttaatattgttctttatgacaaaaaagctcaatctttttcagatattggtgaggaagagagacttagtcgtataaataagttagaagccgtgtataaatacacaaaatttgtgacacccgattcattggttgctcgatatctatcagggcgcggtataaaacggatgctcacaaaaattccagctagtctggggtttaatgctaagatgagatactggcccggttctaataagccagccagttttcatccaacgatggttgctatttttaacgataaattcggtcgcaattgcactatccataaaactcatcttactgatgatggacttaaaaaagctgatgttgaaaacccaaagttaatgatgaaaccggtctaccagatgaatggtggttcgatgcagttatttaaaccaacttactgtgatgaaactaaatcatggtttttgggggttagtgaaggtattgagaatgcgctatcagtaactgaggcgacttcaattccttgctgggcatcttcaagttcaacatttatggaaatgctggaaatacctgagtatttaatgccaccttctgattgccaatttattgaattgtcgatttgggcagataaagatcgggtaaatccaaacaccggtaattcagctggtgagtctgctgcacgtgttctcaagagccgtatggagcccttacttgctgaacgctatcctgaagcaacagtccgggttgagattcatttgcctgaactggatatacctgatggtgcgaaaggtgtcgattggaatgatgtattaatgctcaagggtcatgaagctttcccaggcaaactggaagaaagattttttgacttgattaaataa

SEQ ID NO: 185071 - DNA, 231 bp, Klebsiella oxytoca; identical to SEQ ID NO: 23431

SEQ ID NO: 185072 - DNA, 1593 bp, Klebsiella oxytoca
atgcctgacggaaccgctagtttttcctctaaagaagaggagaaaaaagcggaaataaaacttaagaggcttcatcgttctattaacctcttcgaagacattcagatggaagagaaaactggtaatcagtttccgctttcaaaagtaatgcttgctgaaatgtattcgtttatggttagtgatggaaacatgactggtgacggttctaatatcgtttcctacattgaaatgtatattttaaacaagcttcgtgtaaatcagcttgggcaagaaggcgttcctgaaatattgaatgatttttttgctcttgctgatactgttctattcgacatgaaagaccgttttgattctttgattctcgaagccacaggggttaattcaactcttatggcatgtgagttaggattgaaactatatgaagaactagaaaagttacgtgatgatctaaaagataaagaagaacaaaaccgattagatgactctgatgactctgatgactctgacggctctgatgactctgacggctctgatgactctgatgactctgacggctctgacggctctgatgactctgacggctctgacggctctgatgactctgacggctctgacggctctgacggctctgacgactctgatggctctgacggttctgatggttctgatggttctgtaacttctgcacgtacaacacaaagtttctcaccagcgcaattaagaaaggcgattgaagatcttgatgaatacctagacacagaggctgaacaggataattctcatgattttcatgaagctataaaaaaatccatatctcaaatggcatcttctttcagtgatgctgaaattcaaaactttggttttcgttttggttttatcactctgaccgaggaggactataataatgctctagctcactctcgtgagctaagaaagttactttcttctttaaataagcaaactgtacggcgtaacaacaggctaactgatcgtggatctcgtattcatagtagaaagcttgttgaagtacctatgggtgcaacctctgtgtttaagaaaaacggggagggatacaaaaggtctgatgtaggtgtaataaacctgcgtgatatctctgtatcaatgcatgacgtatcagttttagccttaaaagcaaatcttgcatttacccttgcttgtgaatcggtgaacaatattgatgttgctgatcttgtttatccagttcaaaaagaaggttatatagatatacttaagttttttaataaatctgtatctagttgcttttcaaattatgaaaatgtttctagcggattacataccccaactgcgacagcgattaattcatgcgtggaatatttctcacgtttgaatttctcacgtaaagttatctttattgcgactgatggtgacccatctgaatcaatagatgatgtatgctctgcagttaaaaatgctaaaaaacatggcatagatattgtttgtgtcggttatggcattgataaacctctaggctttgatggtgtttattttaaaaaaataaacgatatctctgaattaaattctttgtataaagatttaatcagaagcctagtttaa

SEQ ID NO: 185073 - DNA, 1077 bp, Klebsiella oxytoca
atggctaatatcaaaatcgctgctattgctgataccactcaaatcagtaacactgtaaaaagtttcatcgaccgcaatcctgaattacaagatggtgccgttattattaaggtagatgtcgaaggatgtcagggtcgccgtagaacgaatgaaattcgacagtttcttgatgaagatgaagtatcggaccaatcgagtgtgagtaaggttgaagtccaatggatttctactaaggctttgaactttaaaagcgctgttcatacaagattgagtaatctcaaacgtaaatactgcattcctttcagctccatgaatatactgccaacctctaagttggaagagtatttgattgaagtagaggccgtccgagaatatttcaaggaaggcattcagaatgctctagagcgttatgaagaatacattcagatggaaaaagacagaagtcctaaattggcagaattaattgaaaaattaagaatgactaaagatgacttcgaaaaatcgtttcttttccagattagccatccaatccctttcacaccaatgtcaattgatggagaggatttaggagaccgctattcagttggtttaatacaggatattgctctgactgctgaatctatctatgcttcctgcacaaaacctaaaattgaccagactttcgtagaaaaactgtcaaatttaaaagataaggttgtgagttttatgtttttggatgatcgtgcaactaaaattgctgactctatccaaagcgtactaaaccatcttccttctggtaatttggattccccccttcacatgagtttgtttcgcgaatggttattactgctaagtgatacgaatcgtttgaacagaattatggatggtgacgatcttgtaacaggttttattgccgaaattaaaaatcgttttaacgatttagatgataatttggctaataatactggttccattttcgttgatccttttactggaaatggtattcctgctaagacatctaattcttcgataactccggtctcaaataatgatgtagtccagaaaaaagtaactttctcgactccatttaatttttga

SEQ ID NO: 185074 - DNA, 1053 bp, Klebsiella oxytoca
atgacacccgctactactgctaacaacaatgcaaaaattctaactttgaatgttaactctgacttagaaattaaatatttcgaacctcatgagttaaccaaggctatagaatatcaagatgaagaggaatacattattgtccgtgcaaacgagcactttaatgttgactgttttggagaaaatgacgttatacctattttcaaaagagttactccttttcgtgctccgttaaacagtaaatatcgtccaaatccgatcactctacgccgtatggtgaagttacttttaaataatgaagtaactgctggcatctgcctgcaaggagaatctggatctggtaaaacggagttagcattatatatcagccatatgctgaactggcctatcaccatcaaacaaatcaacaatgagttatcgattgatgatcttgaaggtatgagaacgctagaaaatggaaatacacggtatgtttatagtgaccttgtgcaaggctatcgtgatgggcatatcattcttcttgatgagatagataaaataaacccagatacggcagctaagcttcatatgccgcttgagcgtaaaccgtgggcaaccggtaaagaaggtggcgagttgatttatgcaaatcgctacacccgctttattggtacagctaacactaacatgagtggagaggatatgcgtttcgcttcatcacagtcccaagactctgcatttattaagcgttttttaatattgccgatgattcgacctgatgaacaagctatgtattgtgcagctgaggctcattttcctgatttgaaaccttcatgtttaagaatgtttgcaaaagttgcttttgaacttaacaatctgaaagatgacgaactggtgatggatattcgtgaattgatttcatggatttctacctccaaagtccttgatgaagaaatttctgttgggtttaaaattgcattcacgtctaagttatcttctgaagcatgtagtaaagctgaaattttgcttgagcaacttttcccggaagaagtatcacgttcaatttcacaattgtaa

SEQ ID NO: 185075 - DNA, 822 bp, Klebsiella oxytoca
atgcatttaagtagtaaattaagaaagattgagaatgaaaaccaacttagtttcagattcttctttgaggatgatggaattaaagaaaaggtatatatacctgtggaatcaaactcaatagttgaagatcatggtaacaaagtaccgaaccatgattatcaagagctagatgatttcatttggacagatgaacatatatgtacgttcttctataaaataatggagtcatcttttgtaaccgttcagtaccatatagaccaatcgatggtctataaaattgatgccaatgggtttcgatatctaacaccgaaattaaaattggagttagattggtattgtactaaacaatttcaaattgtgtgtcatcgcttcggatatgacccagatgaaattattgattttattaagtcaagacttcttcttgcaatacgttcaagagagtcaaggcaagatcttattaaatctttagaaactgacaacttaacattttctcatcctattataggcccgattaaatggtcagatttcttagatgatagatattgttatacaaggagatcattgatcattaaatggtcaatagctgacagattgaaactctttaaaaagattttcgatgagcaaatgattatccttgaaaatctaagtgaaaatggtgcctggactttggatcagaataccgattcttatgttcttaaaaccgaagctgtggattatgttgagtggttatattccgatgcatgtaaggtaatatctcatgtatacggttttgattacggattacttttcagcacttcgaaagccattatcaaaaacctttaa

SEQ ID NO: 185076 - DNA, 354 bp, Klebsiella oxytoca
atgtttacaaatcacataaatactgtttgcgtttccggcgaggttaataaggtgattgttcgtaatgaatatgacactattatgctaatactggataacaaacaggaaatggaaagaaatggtaaaatagaaatggtagtttcatcgatccaagtgaaaatacctcaagacctgtatgataaggagtttaaagagattattcgaggcgataacctgatgataactggttgtctggtgactgataaagttcactctggtgaattgacggttgttagagtccaggcccagaaattgattcaccgagctcctaagcctattgaaggtttcggcggttcaaggttcttaacacgttaa

SEQ ID NO: 185077 - DNA, 987 bp, Klebsiella oxytoca
atgactactgctactactgctaaacccaaagctaaaaccccaacacgtgctaaaaccgccaccagtgctaaaccgtcacgcccggctgctgacaaaattgagaaagattcaattttgatggcttattccaaagcgttttatggtgaagaaattccaccatcgaatactggcagtgatatttgtaaaatagaaaaaggcaccgatgacgataagagttacatctggtatatgacagaatctgtcagccgtgtaattgagttaaaggcgcttgaagaaagttctaaactgaagcatttagttggttgtgaacgttctgtgatttacagcgtgaatgttggtgatgtcttcattaatgagatcaacctcgatgaggctgaacaacttcttgaagaatttcccgacatcccacgtgaaaaaaccctcgaagcttttttatcatctcttgatgaaaagcttgttgagttgaatatcagctccattgttacttcagagtctcttcacttcggtaaagataaactgaccaagctgggtgctgttaaagtaagtcaatggcttgatatggttattgatgaggtgcatgttttttataaacgtcagcactttgttgagaccgttgaatctcgtcatgaggacctcaatgacctttatggtaaattgaagcctttgatgagtgaattcgggcttcaagacaaatactatgacttatcatttaacgagatgatgattcacaaagtaaatggttttgattttgtagttgcagatttaatgccacgactgcttaaacttgaagcatcattgaaagatgatgaaatgaaagctaaagcagctatggaaacaaatcaagctcaagaaattaaagctgtagaaaataatagttttgtaaagggatatgataatacggtatcaagagtactgaaaggtgctgcttgtgttgccattctctatttcggaatctcaactattatgaacttcattggctataattga

SEQ ID NO: 185078 - DNA, 1800 bp, Klebsiella oxytoca
atgtcatcgagtacagaagaacaagagcgtgttatacaaaatatggataaaaacacgatggtcattgcctgtccagggagtggcaaatccttcaccatgaaggagggaacaaaagccatttttcaacgtcatccattggcccgggtatccctggtaacctttacccgtgcggccacagactctttaaaaaatagcctccagaaaatgatagagccgaggtttctcaaccgtatagaggtcgatacctttcacggttttataaaaaaaatggtaaaccagaccggttggaaaggagggcttctaatcggacacaaacaaatggcgatggtatcacgggtacaaaaacatcttaactaccatgaaagtgtgaacgacataatgccattcatcgacggcattggccgggagcttaacccggacattatcaggattaaatatacacgcgaccaggtggcgttctacaacgagtacatgagcttttgcaaaaaggataatgttgcagattttaactcactttcaaagtatgtagtgggcatgttgagtgccgataagatgaggcctttaagtattactcatctgattgttgatgaagtacaggacaccgatggtattcaattcacttggatatctgagcacgcaaagaggggcatcaacaccacaatcgtaggcgatgatgaccagacaatatacagtttcagagatgcaggtggagttaagatctttcgtcagtttgataaagcatataatcctaacgtttttcacctgaccaaatgtttcaggtgtgcaccattgatccttaaatttgctgatacagtgatcagaaagaacaaagcccgctatgaaaagagtctcgtgtcaggcagaaatggggataaaggaaaagtaacttttataagatcggataaggcagacgaccaatttgatgtgatcaaggagctggtggagaaaaaccctcatgattgggcgattttaagccgaaacaacacgacactcgacaaaatggaaagttatcttgaagttccggttacgaggatagggggaaaatccttctgggagggattagagccaagtaacattctccatctgttctcctttttccgacagccaggtaacatcggtctgatgaaacgagttctatctttcctcaatgaggatgaacaagttttggacacagtgtggaagcatatgagttccaaaaaagttacttttcaacaaactgatttacctcctgatgcatcagtccttaccaaaaccctacacaagcacatggcaccgatgatgactgatacacgagtcaaagaagaaattgaaaaccgttttaaaaaaattaaagaatggttagaaatggccggatacaagatgtccaatacgaaaggtgattcgtcagtaacccggatttctttaatgtcatgctaccgttgggcaatgaaagatggatggcttaagatgctaaatattgcagctggcatgaccatgggtaacaaagtggaatctagtgaaacagagcaaagtggaatctgtctctgcacgctccatggttccaaaggactggaatggaaaaaagtactaatcatcaactgcaaccacgaccaaataccctcaccgaaggttatcggtgatgaagggatagaagaggagcgtcgtttattttttgttgggatgacaagggcagagcttgagctttacattacctggcatgggaaaccgtcagagtttatcactgagtcgttcccgaaagtagttgagttagctgaagaaataccaattattgagggaagtgaagatatgtgtttacaatga

SEQ ID NO: 185079 - DNA, 249 bp, Klebsiella oxytoca
atggcatttcaggtactaaccactactgcagcaagcatcacagagcttaaacgtgatcctatgggcactttcaatgcaggagaaggtgcccctgtagccatactgaatcgcaacgaacccgctttttactgtgtaccgcctgctctgtatgctcaactgatggagcttcttgaagatcaggagctgggtcgtattgctgatgagcgaattggtgaggcggtaatcgaggtcagtctagatgacttataa

SEQ ID NO: 185080 - DNA, 285 bp, Klebsiella oxytoca
atgacttataagctggcctttaatgaatcagctctgaaagaatggaaaaaattgggccataccattcgggaacaattcaaaaagaagctcgctgagcgcctgttgaacccacgggtgcccgcatcgcaactacatggacgcaaagaccaatacaaaataaagctccgtggcgcaggctaccgactggtttacagtgtcaacgatgatgttgtgacggtcaccgtaattggcgtcggtaaacgtgagaatgatgatatttacaatttaaccaaacacagaaattaa

SEQ ID NO: 185081 - DNA, 1224 bp, Klebsiella oxytoca
atgctaatccagaaagcgtataaatacagactcaacccgacagatgcacaggcgcaacgactgcgtcagatgtgcggctgcgcccgttttgtctggaattacgccctggcagagacgcagcgtattcttgaggccggacaaaaactcccttccgcctttgagctgaataagatgctgacaggatggaagaaactccctgagctggcgtttttatcagatgcctacaccgacaaccttcagcagaaactgaaagacctgcacggggcatgggaacggtgctttgataaaaagctggcagcgaaagcgcccgtgttcaaacataaaagccacggcaatgactctgttcgtttcgtcaattttgacaaatactgccagcttcagcacagacgcgttaagttaccctcggggctgggctgggtgacattccggcagtcccgcgccgttgtgggtaaaatcaaaaacgcaacggtcagccagcacgctggcggctggtatatctcatttcaggtagaaatggtggtcgaacagcccgcgcacccgtcaacgtctgctgtcggcctggatgccggtatctgcaagctggtaacgctgtcagacggcacggtgtttgaacctgtcaacagttttaaacagaaccaaagcagactggcaaggttacagcgccagcttgcccgtaaagtgaaattcagcgcaaactggaagaagcagaaagcaaaaatttcccgcttacacgcgcatatcaccaatatccgccgcgattaccttcataaagtcacgacaacaatcagcaaaaaccacgcgatgatcgttattgaggacttgaaggtcagtaacatgtcgaaatcggcaaaaggtacggcagagcggcccggacgaaacgtcagagccaaatcaggcttaaactgttcgatactggaccagggctggtatgagatgcgccgccagcttgaatacaaacagctctggcgcggtggtcaggtactggcgatacctccggcatacacaagccagcgttgtgcgtgctgtggtcatacggcgaaagaaaaccgtcaaacgcaaagtaaattcgtgtgccaggtatgcggctataccgcgaacgccgatatcaacggagcacgtaacattttagcggcaggacatgccgtgctcgcctgtggagggatggtgcagtcaggccgcccgctgaagcaggaacccaccgaggcgagtcaggctccggtctga

SEQ ID NO: 185082 - DNA, 1239 bp, Klebsiella oxytoca
atgtctaaacagaaatatataataaagggatattatcgcagagcactcattatgtacagagcgacaaaagtacgtatttacccaacgcaagagcaaactgaattgctggataagcagttcggagcagtgcggttcgcgtacaataaagccctgcatatccgctcgcactggtacaaaaagcacggtgtatcgctgaataatgcaaagcatatccagccgttactacctatagccaaaaaatcccgccgttatagctggattaaggaggcagactccaacgcattgcaggtatctttgcacaatctggatcgtgctttccaaaacttctttgagaaacgggcgaaatacccgaagttcaaacgcaagcacgggccgcaatcctcctaccattgcagtagcctgaaaataacggccgacacaatcaagatcccgaagatttcccctatccgggctaacattcaccgggagattgtcggcaaggtgaaaagcatcaccatcagtcgcgcaccgactggcaaatactacgcctcaatcctttccgatgatggacaggaagcgccagcgaagccgaacttcatcaccaaactgacaggctatgacattgggttgaaagattatctgatacgcgatgacggcaaaaaaatctctaacccacgtcatctggtcaatgcctatcgccgcttacgccgcgatagcaaggcgctatcccgtaaactgaagggaagcgcgaatcgtcgcaaggcgcgtattcgcctggcggcacaatacgaacgggtagccaatgcgcgtaccgattttcagcacaagttatctcgcgcaattgttgacgaaaaccaagcggtaattgtcgagacgctgaaagtggcgaatatgatgaaaaaccaccatctggctcgttcgataggcgatgcgggatgggctggattcatcacaaaactggaatacaaagcagcagaaaaaggcgtgcatctggtgaagctggaacaatggttcgccagttcgaaaacctgccattgttgcggtcacaaaatggcagaaatgccactgaaaatacgcaaatggcaatgtcctgtctgcctgactcaccatgaccgcgatatcaatgcggcgatgaacatcagacagaagggcataacagaactaatggcggcgggtcacgtcgtcaaagcccacggaggcctgcgtaagtccgttttaacaacggttgcggcctgtgaagtgggaaaccaagccctttag

SEQ ID NO: 185083 - DNA, 468 bp, Klebsiella oxytoca
atgttacattttttggacttatattgggatgaaatctcttttgtattttatgtgatctttttttctacgattgctataggtaaattatttttagtttttcgcaaaaataaaggatcatccgaaattaagttagtgccaaaaagtaaagttaatgtgcagagttcgcaattccgaaaaaatattgacttttcttttggtacagattcacacaatcagttgagagatgaaatttttaatgtacatgaccatttgcggtttaccaaaccaaaagaagatgattggttaaatggtaaaaagaatgagacactcaattttgatgctcattacgctcctgtacctcacgatctttcagacccgcgttctgcggctatctacccagcaaatatgtttgatacacattccacgatgagcaatgatagcatacctgatattagctcaagttgtgatgaaagtttttctaaattctaa

SEQ ID NO: 185084 - DNA, 1371 bp, Klebsiella oxytoca
atgggagccaatgaacaaattcttgcaccagctgcagaaaaattagatcagtttgtggctttgggaagtggcggtcagtatgccaactaccaagaacaagctcaaatggcccccgatacttcagctgtgccaacagcaggagagattggtggaaatgttgccgggcagagagctcaagctactgcgaacctgagtcaacacagagatgcctccacagcacaaccaggtaatacaattggcggaattacggctcaaagccttaacgaggacaatggccgtttgcacgttgcaaatgaaggtggcgcaggtgaaggacgagtactttctcaggcagacagagatactcttaaccaggttaaaaataatcttccaatggggtcaacaaatgacacaatagagagaggaatacaggctggttctgtaggagacgcaaccacaggaagggtccaacctcttcttcttggtgacgcaccttctaacgatttcaacgcctcaactcagcaaacaatgaggaacctgcagtcaagtgaagcacctaaaagctttgatagctttaggagtaccggtgacaagacacaggatgctaaggcagcattaactcaggcaacattgcatagtgaaaacgcacgtaaccaaatcgggcaagagcgtgaggcaagcctggcagaaagcaaagcatacctcgataagtataatgaaatcaccggtgcaacaatgtccgaatcaggagttgaacggattggaagacaagcgtcggatgggaaaaataatggtttcaggggcgggctcaatgatgtcgtaaatgcagaagtcactggaagcggtacgacaggaaaagcagcaagaggtagtgcagatgcagcattaggccaagaactgagagaaaataatggagccagttcgcatccaatggataaggcttcagcagcgtggcaagctaccggggactcactgcccggccatgagatcgcgtcagatatcgtacaacgagttgctggtgctatccctggtggtcatgctatcgcaccaaaaataggctctcaggacaatgtgccggacgcaatgggtataagtagtggtagagcgccaggctctctcatcggaaacatcagcaataatatccagttagggcaagcattaaataatgcaggtaactattccggtatgaacgatgaaaaatttaccaggatggcggaccaaaacgagatgttaacccggcaggttcaacatgctctttcaaatgattctcgttatgggcctgatgtagctgccgagtatcccaaatttatagccaacctgccaaaggatattggagtaaacgagggaatagcgaagactaaagaattccttgataaacataggaaaagttaa

SEQ ID NO: 185085 - DNA, 129 bp, Klebsiella oxytoca
atgcgccgggacaaaacgcggcagctgcgtcgtgagcgccagaccgccgatgctgccgatttctttttgcgcaaaatgctgtattatgcaagttattgcagcattttgcggaatcataatagtgcataa

SEQ ID NO: 185086 - DNA, 1566 bp, Klebsiella oxytoca
atgaggggatctctcagtgctttgcacgaagcaactatgggggaaccatttgaagatattatcttcagtgaatacgagtctatctatcctatacaggcaagaacaatctaccgaacaatttgcacattgaataggctacgagttcctgttagagcaggcctaattgctagaattttcggcatcaatttcactgagttcaaacagcagttttttactccattggagaaaatagtattatgggattcagaggggaatgatgattatcattatagagctcgtcactcggaaatagcggaaatagtattcaatcgtgcatttagcaatacattagaaaaatataatgaatatactcaaatattggataagataaatattgcatttgaatctgataggatttcttttagacaatttatgcgagcaaaatctcttaatgagattttccccgattatcaagatgtaattagcatttatcaacaggctctcaaaaccataggggaagatccctatttgttacagcaaatggcaaactttgagaggataaggccaaatggaaatttaactcttgcgatagaattacttgagaatgcgaaggaaaaagctccttatgacagcagtataattcacaccatggcaacagtatggcgagataaagccaataatagtaatgaagcctatgataggataaagtttcgtggagaggctcgccatttattacaggaagcacaaagacgatggggagggagtccgtacatctcaacaactcttcttgagctttctatcgataattttgaagataatattaaggatgataatgtttctgggaaaattatagatgatctaatccgtaggattgaagaagaaattaccattagcaagcaaaaatatccggatgaagcaatgctctcaaacctggaagcaagatttgccggaattatgagtgatgatggaagaatactaagttcattacttgctgctttcagtgataactctagggatccctttatagcgataagactttcgaaaatatatattgataaaggtgactttaatgaagcttctaaggttttgacgcaggctttagaaagaagacgaaacgaccatcggttgaattatcagtatgcggaattgctaagattaatggacccctctaaaagagttcctttgatttactattatagaagggcatttactccgaacgataaaaactttcatgctcaattttggttcgctcgatttgcatatgagtcaagtgatcctaaagaacttgcattatctgctgacattttcgagtatcttcggacttccagagtatcaaaagatgaccggttcaaaattagagattatataggtggtgaaatcaacccaacaatatttagggggagtttgaaaggaatcaacagcggatttgggttcgtaacggtcgatggaagtggaaaagatattttttttccacgatctgaggttcaacatgacctttgggaagcattgaaggtaggtgataggctgaagtttaatatcggtttcaattatgctggtacggttgcatgtaatatcgtcccatcatag

SEQ ID NO: 185087 - DNA, 1194 bp, Klebsiella oxytoca
atggcgcgcattacacgcccacttactaacaacgaaatacttaaagctaaaccacgtgaaaaagacttcaccttacatgatggtgatggcctgttcttgctcgtcaaaactactggtaaaaagctctggcgcttccgctatcaacgtccgaacagtggcagcagaactaatctcagcctcggctcatatccggcccttacgctcgcaacagctcgtcagatacgcgaccagcatttaaccacactcgcacaaggcatggatccacagcagcagcaagagctagcgtcagaacaacatcagattgagctggatagcattttctcaacagtagccgcaaactggttccagataaaaagcaaaagcgtcacagaagattatgcaaaagacatttggcgctctttagataaagacgtgttccccactataggttcgatacctgttcaggagataaaggccagaacgattgttgaagcactagagccaattaaagcgcgtggtgcacttgagactgttcgtcgtttggtacagcgtattaacgagataatgatttatgcggttaacaccggtctgatagatgtaaatccggcatcaggtgttggtatggcctttgagaaacccaaaaagcaaaacatgccgacgctgcggccagaagagttgccgaggctaatgcgttctctggtgatgtcgaatctctctgttgcgactcgctgtctcattgaatggcaactccttacgcttgtgcgcccttctgaggcctcaggtgctcgttgggcagagatcgatctcgatgccaagctctggactattccagccgaacggatgaaggccaagcgagagcacatcgttcctctatctcaacaagcattagatatcctggaactgatgaagccaatcagtgctcagcgtgaacatgttttcccgagtagaaatgatccaaagcaggcgatgaacagccaaacggctaatgccgctttgaaacgtatcggctatggtggaaaacttgttgctcatgggctgcgctctatcgcaagcacagcaatgaatgaagctggtttcaacccggatatcattgaagcagctttagctcatagtgataaaaatgaagttcggagagcatataatcgttcaacttatttagtacaaagacaagaaataatgaaatggtggggtggattggtaaaagataaacattaa

SEQ ID NO: 185088 - DNA, 417 bp, Klebsiella oxytoca; identical to SEQ ID NO: 23373

SEQ ID NO: 185089 - DNA, 459 bp, Klebsiella oxytoca; identical to SEQ ID NO: 23374

SEQ ID NO: 185090 - DNA, 1224 bp, Klebsiella oxytoca; identical to SEQ ID NO: 23375

SEQ ID NO: 185091 - DNA, 957 bp, Klebsiella oxytoca
atgaaaaaacaacccaacccatgggaactcggtgccacgctgtatatgcctgccacacgcaaggatatcgctgaggtcgttctggaagggaaaataccggggctacgctctctggttgtctgcctggaagatgcggtcagcgagcatgacatccctcttgcgattcagaatctttcactgtttttgaagcaattgagacacgcaagagccgtcaacgatgatgagaagtacccactggtatttatccgcccacgtcacactgatatggggggatggttaacgactaatttggacctgagtgcagttgatggttttgtactgcccaaattcaccctttccacgctcccggtttggtgggacatcatggcaggaacatcattgatgatgatgccaacgcttgaaaccgaagaagtctatgatgttattaaaatgcaggcgctggcaaatgaactttcgagtcatgactgccgtgaccgcataatcgctttgcggatcggcggaaacgatctcatgaacgtcgtgtctctgcgacggccacgggatctgaccctttatgacactcctatgggttatgtcataaaaatgcttgtgtcagtattcgctcctcgtgattttgcgctaaccgcaccagtatgcgaacacatcgacgatcacggcgttctgggacgagaactctctatggatatcgcccatgggctggtgggtaaaacggccattcatcctgatcagattagtgtcatagaggaggcgctaaaggtgtctcctggtgagcattcagatgcgttacgaattctgaattccacccaggcagtcttcaaatctcagggagcgatgtgtgaaccggccacccatcgccggtgggctcaggggatcctgggacggggacaggtatacggtctgactacggggcaaaatccggaaggaatcaggcttattccagtttctaagcagcactaa

SEQ ID NO: 185092 - DNA, 1080 bp, Klebsiella oxytoca; identical to SEQ ID NO: 94133

SEQ ID NO: 185093 - DNA, 774 bp, Klebsiella oxytoca
atgaataagcccgtcgtcttcagcgacctcgatgacaccctgttccagacccgccgaaaaatggttgatgaacttgcccttgaaccgttccggaccggcgcactggatcgcagcctcacgcctcgcagttttatgaccgaagagcaggccatgctggtggactggttgctggaacatgcggacctcattccggtgacggccagaggtacggaagaaatcagtcgggtacagatccccttccgttcctgggccgtgaccactcatggcgcggtgatccttcgtccagatggtacgccagacagcgactggaaagcccatatgctggagtgcctgtcctcctacgccgaccgcttaacatcaatgcaacatatcatcaccgagctcatggatgcgcgaggcattaatgcctgggcacgcctcaactacgaatatgaggggacgccggtgtatctggtcatgaagcaccgcgacagcacgaagcttgatgaactgaacgctgtcggggatgagattgagcgcgttttttcgaccgaagggttttacatccaccgtaacagcaacaacattgcctggttaccctgcccggtagaaaaagggctggccgtttcatggttgctggagaaactgcgtcaggagcgcggggttttcccggtgatggggctgggtgacagcctgagcgaccatcggttcatgaaactctgcagctggtttggtcttccacgccagagtcagtttgccgaggccatatcacagcgtatttttggagagcaataa

SEQ ID NO: 185094 - DNA, 1143 bp, Klebsiella oxytoca
atgtcagcaattgatggtaatttcgtttatcaaaagacattatcctgtgggcgaattgaggtaagcagcgaggaaaccgattatcctcttactgatctctttgatatcgccgaacggcggaatccaaaacgcgcatttctgtttgtcagtaaagtgctgggtcgacatattcctgtctctcctctggtcatgcgcaatgtttatacacagctggcggagaagtttcccgggactctggacgggccggtggtatttatcgggatggctgagacggctgtcggcctcggggcgggagtgtttgatgaggtgcgtaagcatcaccctgactgtatttatctgacatcaacccgccatccggtcgatgccgaactgttgtgcgagtttaaagaagagcacagccatgccacagaccacctgatctactatccagtttctgctgccatgcggcaaaccgtagcggaggcacaaacattagtgctcgtggatgatgaagccacgacggggaaaacgttcctcaatcttctcgcctcattacgtgcatcgggtgcactccggaaggtacgacgggttattgctgtcacgctgactgactggagcggagaagcactcagtcagaacagccccctgcccctacatacagtatcgctcatctccggcaactggcgctggacacccgaaccggatgccccgcttcctgtcatgccccaggtaaatgtgacctccagagggagcgtcccgatcacaggcaaacaatcctgggggcgactcgggatgcagataccggcgagtgacctgggtctccaggttcaggtttcgcacggtgaaaacattctggtactgggcaccggtgaatttgtctgggagccgttcctgctggctgagcgacttgaagcggcaggtgctcaggtcgtgttcagttcgacgacccgctcaccgatttccactggttatgctatccagtccgccattgctttcagcgataactacggactgggtattccaaattatgtctataacgttgctcatcagcagtttgaccggatcctgatttgttgcgaaacgccagcttccagcgtggacccccggctgcttgaggcgctttccgctgttgctcccaccgtagaggtgattacctatgaataa

SEQ ID NO: 185095 - DNA, 1059 bp, Klebsiella oxytoca
atgaaaaagaaaatttggtttatggaagggctatcttcccagcgagacattatccttggagtgaaatcatttgcggaaaaggaaaatcaggatattgaaatcttttcttctcatcgcaacgagaggaaagagatcttgtctgtttccgatttttcaatgatcgaacctaacaacgaagaagaacgtctttcttttattcattccattactgacgctcatggtattaatgcgatacatactggtcgcaactgtaaatggtttgaaagccaccgggaaaacattcaacgttctggtgtccacctgactaccgggtcaacggggactcactggtttgaattagccgatgaaaaagttactttttccgagtttatggaaaaaaatggacttccggttgtcccgtcggttcgggtaaaaaatgtagacgagcttcgtactctgctgagtcatccccctttcccttctgattgcctctgcattaaacctgttacaggcatttatggcatgggattctggcgttttgatgacaatgtttccccggtagcttttctcaacaatcctgatagccgtgttatccacccatcacagtttctggctgctcatgcccggatggactgcttcactccacaagtactgatgccctatttacccggaccagaatactctgtggatatggtggtaagtcaaggcacggtcctggccgctatcgggcggcgtaaagaaggtgtgcttcagtatctggaaaatgaaggggaagcgattgaacttgccatcaactgcgcccgcctaatgaacgcagacggcatggtcaatgtacagactcgccataatgccgaaggcaaaccgctattgctggaaattaacatgcggccttcaggaggtattggttatacgcggcacagtggcgtgaatcttccgggtctgtatgccttccatacacttgggctgatggatgatgatcaggtcaggcagtcagcgaaaactgatttttcacctgcagtcgtccgctctgtcaccgatgtcattctctatccggcatcattgaccaacagaattgattaa

SEQ ID NO: 185096 - DNA, 585 bp, Klebsiella oxytoca; identical to SEQ ID NO: 23381

SEQ ID NO: 185097 - DNA, 1152 bp, Klebsiella oxytoca
atgaatctgacaccggggggcaatgcccctttaatagctcaggatctccgcgtgagggtcatttctggtggtcctgttgacgcttcggcgtttcgattattcgctgacgggaaagttcggggtgacagcgatatggtcttttacgggcaaccccgtaatgaagatggttccattagcttcagtgctgaagggaccaatagcgttttcaccgttgatctgtcccgcctcaagcccgacgtgcagaaagtcgccttcaccgttacctgtgacggcagtcataccgtttcctccctgaatcatctgtccatacaaattgaaagtggcaatacctcgctgatcagtggtcaggtagaactgagtggccgtcaggaagccgctctgatcctcggtgaagtctatcgcaggaatggtgactggaaatttcgttttatcgcccagggcttcaatggcggcctgaaacctctcgctgagtactatggcgtcaacgtcgcggatgagccagctccagtcactccgccaccagcacctccggctccgcctaaagttagcctgagtaaagtttctctgaccaaagagaagcctgccatcagccttgccaaaaaagacaattttggtgaaatccgcatcaatctgaactggcatcgtggctcgggttcaggcgggttactgggcggtatgtttggttcgaacaaagcgatagacctggatctcggtgcattcgttgagctcgcagatggctataagtcagttgttcaggcactcggtaatgcttttggtaactatcactctgagccatatgttcaactgcagggtgatgatcgtaccggcgaggctctggatggtgaatggctacacatcaatggccgcgaatggaaagaaattcgccaggtactgatatatgcctttatctatcagggcgtgcccagttgggacaaaaccgatggcgtggtgacattacatgttccggagcaaccaccgattgaaacgcgtctgactgaaggtgataacaaacgcacgctgtgtgcgattgcccgtctggtcaacgagaacggttccattcgtgtggaacgtattaaccagtacttcagaggccaggaggaaatggaccgcgcttttggctgggggtttcgctggtccagaggttccaaataa

SEQ ID NO: 185098 - DNA, 456 bp, Klebsiella oxytoca
atgagttttttcgacaaagtcaaaggggctttgacctcgggtcgtgaggaattgacccgccaggtaggccgttacaaaaacaagaaatttatgcagggtaccgtcgcggtatgcgcccgtatcgctgttgccagtgacggcgttagctccgaagaaaaacagaagatgattggatttctgcgatcctcagaagagctgaaagtcttcgatacagcagaagttatcgaattttttaacaagctggtgaccagtttcgactttgatctggaaatcggaaaaggcgaaacgatgaaatatatcctcgccctgaaagaccagccagaggcagctcaactggctcttcgtgtcggtattgctgtcgctaaaagtgatggcaacttcgatgatgatgagaagagtgctgtccgtgaaattgcccgttcgctgggtttcgacccggcagaatttggcctctga

SEQ ID NO: 185099 - DNA, 1041 bp, Klebsiella oxytoca
atggtttccactcacatcggttttccggctgagacagtgacggtctttgttgcgctgtcggtcggcgccatctttattgacctgttcatgcaccgacatgacaagccaatttccctcaaaagcgcagccttatggtccgttttctgggttgttgtcgcgatggcatttgccggtttcctttttgtgcatcacggagccgaggttgccagcctgtttgtcacgggttatgcccttgagaaggtgctgtcagttgataacctgtttgtcatgatggcgattttctcatggttctcagttccggaccgttaccgtcaccgggttctgtactgggggatcattggcgctatcgtcttccgggggattttcgttgcgatcggtaccggtctgcttagccttggcccttatgtcgagctgatctttgccgttgttgttgcctggactgcggtcatgatgctcaaaggcggtggggatgatgacgaaattgaggattattctcagcaccttgcttatcgcctggttaaacgcttcttcccgatttggccgaaactgtccggacatgcattcctgctgacacaaaaagaagtggacgccgaactggctaagccagaaaacaaagacgtatctgtagggcgactgaaaaaggcagcgctttacgccaccccattgatgttatgtgtggctgtagtggaactctctgacgtaatgtttgccttcgactctgtcccggcaattattgcagtcagtcgtgaacctctgattgtctatagcgccatgatgttcgcaatactgggcctgcgtactctgtattttgtactggaagccctgaaacagtatctgtcccagctggagaaagctgttatcgtcctgctgttcttcattgcgtttaagctgggtctgaacgctaccgatcacatctggcaccatggttacagcctgtctgcgaccaccagcctgtatgttgtactgggtgtactggctcttggtattctggccagtgtcatctttccggaaaagccggaagctgaaaataaagaaagctga

SEQ ID NO: 185100 - DNA, 579 bp, Klebsiella oxytoca; identical to SEQ ID NO: 23385

SEQ ID NO: 185101 - DNA, 576 bp, Klebsiella oxytoca
atggctgtttctctcgttaaaggcggtaatgtttctctgactaaagaagccccgagcatgaatgttgctctggttggcctgggctgggatgcacgcgttactgatggtcaggcatttgatctggatgcatcagtattccttgttggcgaaaacggtaaagtgctgtccgattcgcatttcgtattttataacaacaccaccagcccggatggcgcagtacagcatcagggtgataaccgtaccggtgaaggcgacggtgacgatgagcaggtcaaaattgatctgacaaaagtggccgcagacgttaagaagctcgtattcgcagtcaccattcatgaagcagacagccgtaagcaaaatttcggcatggtcagtaacagctttatgcgtgtggtgaacaacgataatggctccgagattgcacgctttgacctgtcagaagatgcctcaactgaaaccgcaatgattttcggtgaactgtatcgccatggcgcggaatggaagtttaaggctgtaggacagggctttgctggtggcctggctgcgctggcaacccagcacggcatcaacatctga

SEQ ID NO: 185102 - DNA, 1242 bp, Klebsiella oxytoca
atgcaattacaatcaggacagaacattccgcttcacacagctacactgactctccggcttgattatccccccagtcctggatttcacagtacccctgagacttgcctgtttatgctgaatgctgagggaaaagtgacaggcgatgctgattttatcttttacaacaatctcagtgccgccggtggcagtgtgaagctcaaccccggtcaccagtacgcagtcgttcattttgcgcttgaccagatcccggatacgattcagaagattgcaatcactatggtgatagatggcagtgatacgataagcggcctcgcgcaactgaaactttctgctgaaagtcaggccaccttttttgtcgatctcaatggccgcacagaaaaggcagtaattatgggggaagtttaccgataccagggcaactggaagctcagggcgcttgggcagggatttaatggcgggcttgagccactggcagttagctatggtgtggacgtggaacctgcagcagaagttgtaccgcaaccagccaggatcagccttgaaaagaaactcgaaggtaaagcgcctgcgcttatcagcctggctaagaaagccagtatttcactggcaaaacacaaactggataccgttgaagcacgagtcgcttttgttctcgatgcctcaggctcaatgaccggccagtttaaaaaagggcatgtacaggccgttcttgaccgtatagctgtcctgtctgtccagttcgatgatgacggcacgatggatgtatggggctttgctgagcgtcacaagaaataccctgacgtcacactggacaaccttgacggatacattgctgcaattcagaacacgggtaaacgatctgcctgggaaatccttcccggccttggcgggacgaacaatgagccgccagtcatgaatgaggttatcgattatttcaaggacagcaccctacccgtttttgtcgtgtgcattacagatggcgggatcagcaaaacacgagaaattaaagaggccatccgccgctcagccaactatcctgtcttctggaagttcgtgggactgggcggatcaaattatgggattctggagaggctggacacctttagcgaccgtcgcgtagacaacagcaacttttttgcgatcgataattttgcccacataaaggacgaagagttgtatgaaaaacttctcgaagagttcaaagactggcttggactggcaaaaaaggaaggcattatctga

SEQ ID NO: 185103 - DNA, 648 bp, Klebsiella oxytoca
atgaacgtcattcagccccgcatgctctctgtatttgattttgacggtacgttaacgcggcatgatagctttatcccttttctgcggtttgcctttggcaatcgggcgttttcgcgacgtatcgtcagcatggctctgcccacgttacgctgtatgcgtaagcagatgacgcgtgatgagcttaaagaaacgctcatcacaacttttcttactggtgttgaggaaaagtgggtgtcttctaaagcagaggaattctgtcagctctactggcatcgcctcatgcgcccggcaggtttgattgctgtggcgaatgaagtcacttccggcgcgatcgtcaccttatgttctgcctcgccggaaattgtactcagaccctttgccgaaaaacttaggatcaaactgattggtacacaattagagacaaaagacggcattctgaccggcagaatcagtggtcataattgcaggtgctcacagaaaattatccggcttgaaaaagaatatggacctctgactgactatcatcttcgggcatggggtgatacgcggggtgattatgaactcctttccgcagcgactgagcctcactggcgtcacttccatcaaggtttccgtcgtaagcttccgtcgaagctaatcatcagataa

SEQ ID NO: 185104 - DNA, 390 bp, Klebsiella oxytoca
atgacaaagcaaatattacccaatgaactggctgaaatcgtaaccggtcttcttattaaacctgaactgctgggtgaacttgactcccgtgaggcgcaccagtccttcatgctggatatagggcgggtaattgctgatcactgtggtggacgggtcaacggcattacggatggcgatgtcgcaaagccctatctttcagacatagagtgtacccccacactccacattgaacccgatgaccgtctgccttcgactgaacgtaacgtatggtcaaattatcatgttgaagcctgggcagacgagggacaggaaactatcctcgacagggcgatccgaaactctgacagagctgccctgcaatctctgcttattgtggccgcacaaaaataa

SEQ ID NO: 185105 - DNA, 759 bp, Klebsiella oxytoca
atggctgactattattcagaatgtgcttgccttatcgaagcaaatcctactcaagctgatatattacttgaggcaatgaatgaattgtttgaaccggatgatagttttattcaaaaactcatttcatgtgataacacaaacggcctgtcagaaatggagattattgtacgtcactgtgtcctgaaccatccattcagaaatgttgcagatattcctgaagacctggactggcattttgatggggaaaaatgcccagaaggttttcttattaacagtgatctcggtgatttcaattctgaacatggtgcgctgtttgctcaggcggcacttattgcatttgacaggaacgaattgatagagttcaaaattgcttttacatgcagtaacttaaaaaggcctgacgggtttggaggcgctgcctgtgtcgtgagcaaggatttcatccggtggacaggtctacacaattttctggaggctgaacgaaccgctttcgccgagaagatgaattacttcttttgtgaatttacagaggtcgtcggtgagcttgaatatccagtatcgtttatattgcgttgcccgaacagcgttaatgcagcgcataggtatgatgagattcagcttaactatcgcgatggtggggaaaaagatgccgaaggagggatacaatttagttctggctctgccatcaaaaaatccagtatgaaaccaatcactcctgatgagttccgggtgatgaaatcgtacctgaacgtcatgtga

SEQ ID NO: 185106 - DNA, 603 bp, Klebsiella oxytoca
atgactatcatgaaagttcattattcaccaactgacgggatacctttgcactccctttatctgaaggaaacttcaactactgaacgatcaggttcagtactggggggcggcatttcgggagactctgttattctgggaggcggaggttatgccggttcggaaatgcagaagacgactcgttctactgtctttgcaccacctgatgaagttactgctgagcctgacaacacaaaaatggtcctccggatttcctgtgttatcggtgtaatgtttttacttataattattaccttattcagtaatgctgttgttgatatttttgacgtaaacgtatctaaaacaatgtcttctttcctggaacatgctcccttctttatcattggactatctgtcatttgtgctttctttgttataggaatgaccgatcatgattacaccccggtacttgaagagcataaaaggaatgaagcgcgtttgtctgtataccacaggctacgctatgtcgaagctgataatattgtttttgatccgcaatcaatgaaaggatgttatgcagaaagaaaattcattgcttcactagttgaaagctgtatcactaagtaa

SEQ ID NO: 185107 - DNA, 270 bp, Klebsiella oxytoca
atgattcagttagtagcaaaccaggttgttaatattcaggaccatgggcaggacgtctatggtcgcttgcttggcacaatctatcttaacaacaaagatgttaacgccatcatggtcgcaaacggcatggcctgggcatatcggtatcaggggaggttaattgttcctgaatatggacctcttgaacaaaaggctcgaaatgaagggaaaggtctgtggtctgatccgcactctattgaaccacgtcaatggcgaaaagcgaataattaa

SEQ ID NO: 185108 - DNA, 819 bp, Klebsiella oxytoca
atggtccagattcttaacacaacaggtttaaactatcatgtagagcaaaccatcgctaatgccgaagagcgcattattttgataagcccttatctgaaacttagcgcaagaattaaggagctcattgaagacaaaaaccgtatgaaggttgatattcgtatcatctacggtaaatctgaacttaaccctaaagaccatgaatggcttgtcagtttaccttatgttcgtttgagtttttgccagaaccttcatgctaagttttatgctaatgaaaatcaaagcctgatatgcagcttaaatctatatgattttagtcaaatcaacaatcatgaacttggggtgttaattgtaaaggatgatgaccgtgacgctttcaacgcttctatcacagaggcccagcggttaatcaggatcagtacagaaaatattccatcaccaatatcattacaatcgggtagatctgagttgcaaaaaaatcatgagcagaagagtgaacatacaagaacatctcaaaaaaatgatgaaaaacatagtatgttaacagatcctatctcaaccgagtcagatgagagaacaagtaaagagggggatacaaacccagaacccgcaaataaactaacctcaactaatttagctaaacaacataaaatgggtttatctgaaatgtatgcggaattgatgaattcaggatacctcatagagaaagacggaaaatatgagttaacgcctttaggtatttccatcggaggtgagagtaaacccaatcgttataaaaaaggtgagttttattttttatggccttctgatatttctctctaa

SEQ ID NO: 185109 - DNA, 399 bp, Klebsiella oxytoca
atgagcgagacattacaggttctcaataacatccgtacacttcgcgctcaggcacgagagctcccattagaagtgcttgaagaagtattagaaaagttcactattgtcgtcgctgaacgcagtgaagaagaaaaggcggccgaagcggctaaccgtgagcgtttagaaaaactctctcattaccgggaaatgatgatcgctgatggtataaatccgagcgaactgatggacgcagccgtcaacattaaagtacgcaaaaaacgtgagcctcgtcctgcgaaatatgcttacatagacgatgccggtgagcaaaaaacctggacaggtcagggacgtactccggcaccaattaaagctcagctggatgcaggaaaaactctcgaagatttcctgatctaa

SEQ ID NO: 185110 - DNA, 267 bp, Klebsiella oxytoca
atggatttgtttaacggatccagacatctaatcattgctggtattgttctaatttatctggtgttgatatgccgtatagtcagtcattatgaggtttatgcggtaatgaaccgtagacagacatcatccagggctggtaagtatgaagatgaggacacggatttagctaaccttctgataagcaagagtatggtttctctatggttaaacgtcattacattagtattgattacatttttcactgtaatgatgtatgtgtcagcctga

SEQ ID NO: 185111 - DNA, 1356 bp, Klebsiella oxytoca
atgttctttggtgtgttctccatgcagcaggtccatgctgccaacgtcatggagggcatatttaaaggcatggtggcttcaacagatcccgcttccgtaagaacggcatcacgtgtcggagctgttggggggagtttctcataccgccagcctcaggtgaataccaacctcgtcaatgtcagtttcccgaaagccagcgtcgggtgtaacggcatcgatattttcctcggcagtttcagcatgatcaatggtgatcagcttgtgcagattggacgcggtattgcgcaggggtcagcggtatatgcttttaacacggcagtatcggcaatctgtgccgactgcgcagcaatcattgccaacattcaggacaagctcgcagcactgaacaaatttgccaaagacagctgtaacgcaacctatgagtttttgcaaaacgggctgggtacacctcaggagtttactgagaaaatagggctcggcggtggcgctgttgactccatggtatcaggtatattcccagattttggtagcaccatgagtcagcctgccagtgaagtcaacaaaaagaactatgcaaaagatcctgatgcctttaaagagaaatatgcagggaatattgtttaccagggattcatgagcattgataacggcaatatgaatgtggggggcgtgactgaattaacaggttacaaacttgcagaacaaataatgtcgcttacaggaacacttatcgtcagctgggatagtaatggagaaaattcagcgataacaccgatcccacctacgatgaaagccgctgatttcataaaggggacaggatccggcaacgttaaattaaatgtttgtaacccaacacctgatttacgtagtaacagaaaagcacagtgtcttgaaatgcgtcaggactctatacaatttaaaggtctttctgaaaccattattgaaacattactcgaaattcagcgggctgtcaggaatgacactgagttgacgcaagaccaacgtaaacttatcagtatgttaggtgttaataacatcattccgactcttcagaccttgtcagctgctgagggggttcaatacatcaatgatatcagtacgatcgcggccaaaaacttcacaatagagttgctgagtagtgtgcagaataaaatgacgaatatgactttgccttcagaggcaatggcatcgtttaaggaccaactagaaaaaataaaccaaaccttcagaaaccagatccgcagcgcttcagaggttcagtccatacagaacactgaggaaaaaacggtcctggcttactgggatatggcatacgttaaaaaacggacctatggcgatagcgggaatggtggctga

SEQ ID NO: 185112 - DNA, 1038 bp, Klebsiella oxytoca
atgcagaacaccaaaacttttatcctgaaagccgccattagttcgttgctggtgctttccactatgagcctggcggatacgcagaaagttgagaacacaccttttgtttcgggacaatccctgaaaaaaggtttcttctggtataacgataaagaaccggtaaaagatgaagaagaacaaccacaacagccattaacggggtcgccgtctcaggacaaaaaagaagagcttaagctcgattcacgctggctaaaagaaaacctgctgaatcttcgttatgcggcaatggataacccgaccaacgaaaacctgtcccgctattatactgcgcaacgtttaatgctggatatagccacccgtttctctgaccggacccgggactatttccttaataacccgatgatgtcagaaaaacgacgacagccaaccgaaactgtcgcgttaaatgcacaccgtgcaggacttgaggaaaatcagcaaaaagcacttacctccatctttcagaaaggtggattgtttttctttttccagagtacctgtgcgtactgtcacgagcaaagccagatactgaatttcatgcagaactattatcacattgacattatgccggtgagtatagacgggcgacctcttcacaatggtttatttccccgttatggacgggcaacaatggagatgattaagcaatacgccatcacagaagttcccactatttatctcatgtccaatgatggttctcaggctacacgagtcagtaccggtctggtgtccgctgacgaactaaaaaatacgattattcttgcggccagaggtatgaaccttctcgacgaagcgacattccagaacacgctcgatattaagaaacaatatgccattggcgacagagatgtcctgaccgtgaacaaagagcgctatgaacaggatccttatctgcttcagcacataatggatgaaaaacttagcgggtacgacatgccaacaaccgatcgggttaataccggtatttcagaaagtgaagggggcttaagtggctactga

SEQ ID NO: 185113 - DNA, 543 bp, Klebsiella oxytoca
atggaaaatcagcttttacacacggcaagcaccatctgccatatcgcgtttgcatcgacgggaataacgacaccgtcagatgagcagggtttttttcatctttccgacagcatccataatcgcctgcgtgcgatttctcctgaccttcatgtccgttgtgcctcttatttattcctgcctgtcattcatacagagttaaaaactggcgatcttaaaaaccattttcctgcttatatcctgcaacttgttcaggaacttgcaccgttaaaaaggactacctgtccatccggaaaaatcaggtttgataaagagctggacgccatgttttcagccagtccagatgctgtcagcattcgtctggccgaatatctttcgggcccatcccgttttctccggatgataaaaaaccctgaccgtaaggcgagagttgagaaaatactcactgccagaaaatgtaatctttcgcatcagctggcactcctgatgcaggcagaagaaaccgtgtccagatttaaatcgccgggtaatacctggcgtccctga

SEQ ID NO: 185114 - DNA, 267 bp, Klebsiella oxytoca
  misc_feature (174)..(183): n is a, c, g, or t
atggaattccgcgaggagatcacggattggtttaattttgttttctgtttcctggatcatctccagttcccagtccagggcatttttaaaacaactaacgctgtatcctccgagtttaggtttaacaaccacgccatgatgttcaattttgtttttgaacctgggcgaaaaatnnnnnnnnnnctgcacactactcagcaactctattgtgaagtttttgcgacgatccaacctttctcagcacaggagcaaaacgaccaggtataa

SEQ ID NO: 185115 - DNA, 2940 bp, Klebsiella oxytoca
atgagtattatatccaggctttttttgaaaattagggtcgccctcttcggagggcctgaccacgatattgtttttgatacagatgatgagtacgatatcccgcacacgcctaacaaggatgtgcaaagctatcttgattatccaagtaagcctgcgggtataactctcttttcagagcgtgagattctatctgtacatgctaaccggttacaggaaattaatatgtatatcggtttgccaaattcagacctgagtgaggacgcctatactttcactaatctggtcattaagccattgatggaatatacacgctggatacatcttttacctgcgtctgaaaaccatcaccatgccggtacagggggcctgttaacgcacagtttagaaactgctttcctcgctttaaaatttgcgtacagcactgaattactccctattggtctgcaggatgaagaacagatccgaaaacgtcgttatctttatgcagcctttatttgtgggcttttacatgacgcagggaagatatttgatgtcgacgttatttcgtccaccccgggcgttaaaagcacctggcgtccgctctcgtccagcctgatggactgggcaaagtccaaccgtattttttcctatgaagttatctggcgtaaaaggcaggctaacgagcattccgtgcgggcacctgtattcctggaacgctgcttaaacgttacgtgccttaattatttgagcgacgtggtcaaagaacggttgtacgataaaatgctgtcggctttaggtaattatacaaccagtgatgattttatttctcgttgcatgagaacggccgactggcattccaccggcaccgataccagctaccggtatgataaacaatccggtattcgggcttctgatactgctgcacgagccatcgcgattctgaaagacaacatcagtactcttaatattaatggtttcgactcatcgtcagtacgacatgacagaaactcaccgcctccggtacatattatgattatcggtggctctgtttacatcaacgaacatgcggctcttgatttcatactgaatcagtttaaacatcttgggattaacttcccggatggggatattggccgcaaagcgttaaccgaccttctgttaagcgggggctatatagagccttacggcgaacaacgggttgcacactttttccatcgtggggattttacggaaactgacatacaacgaatgtttgatgagggtatcaaaggtctgagctggttctctctgttaaaaatcaaatgggttggctttctgtttaaatacgatattctgcccgaaagtacgccgggtattttcagtattaatgagactaatgactatgtttttgtcgaccgcaaagggaatgacacactttatgtacgccctcttgctaatggaacgaaatcaatccgtcttggagtaactcaatccactgataacgcagcagtctcaacggctgatacacatactgcagctgaaagtaacagtacagtttcagacactgataatactgctgattctgaaaatgatcaggctacttccggagagaatcagcaggttcaggaaaacactaataaaacatcccttagaacagatgcatctgaacctgagacacaagaacctgattctaaaaaacctgttaaaacccgccgtaaaaaaggtgaagtgagtcctgatgagtacatttccagactcctgcatcagttcaaaaataatgccattaatgctaatgaactggctttaatcgatggggtcctgtatgtatcagaaactcatattcgctccatagcgccgcttgaagagccgcgcttaatggagaccggtctttttgatctttctttacggtcaggaagcctcgatgaagaattcagcattccgtgcaatgacgggaaacggtatgttcagttaactgacgaagtatctcttgtccagttacgtcatcaacctgatattagagaggttgagatgctgcctttgctttctccagatttatttggtggggttaagactgatgatgaaggggtgtctttcacttttccgccgccactggctaaggtgaaacctgagccactccctccggaacgttatgaagagcaaacgcctgaactgaatcgaactgaacatgaaccgtctgacataccatcagcggaatttcccgatgatcaggaagatgatgttgaacaattctgggcggattacgcttcatattcgtacggtgatggctgtataaacccgataaaacaatccattgagagcactgatgttgatgttgatctagcacaggtcaaaaagtcactttcagagcctacaccggatgatagtacctctgttcacggaaaacccctggcagaggaggatgatttcgaccaaacggaagaggaagcgcaagaggaagattctggtgaggggatcggtgacattaacagcgactttgaagcgctgttttcccgtcagagtcaaattatcactgatcccgctgtcgtcattgcagacaacatagaacagttaaaatccagtactccacccgttcaggcgcatgctgatgccggaaacatcgaaacgcttcattctgatattgatacgattattattcagttaaacaaaatacgactgaataactcgccaattcagaccagagagttacgtcttgctattgttgtaactgatatcaatttttgcatgaggctgagaatctctgaagacattgcttcatggggttttcgtcaggaggagttaactgaactgcgtgctgctttcgcgcattttcctgtcgcgaaattaaaggtgggtataggcaggcctatcagtcactacatggttcgactgagtgaccttcaacaaggtgcgctgcgtaataacattttctacgaagaatttatttcgtttttcaaccatcaggaagtaagccatgaaacgtag

SEQ ID NO: 185116 - DNA, 2127 bp, Klebsiella oxytoca
atgaaacgtagaagccgtaacaatctccatacgcaggaaatgctctaccgccctgcccttgaatttcgttcagcgctaatactcatacttttttctgcttacgtgcttatagactcatggaccagtaagtacggtatcagtgaaatacccttctattgctctctggggttaatagcgatggcaggatggagggtatggcacggggtaccggtcttcatagctcactggcgattatttcatcgcacgatggattttttatcactcgaagattttcgaatgattaataatgcacatttttttgctgatgaccgtaaatatcagaaaatggtcagtttgcaggagtctggtggagcaccatcgaagaaaaatgtttacaagctccttcgtaagaaagaaaagattgtgatcccccagcgtacaacgtttctgtgcaatggtttcaaatggggaccggagcactctgaacgtacctaccaggtgcacaacctttccagtgatatgcatgaggtgcagttaccgtttatattgaatcccattacccgtcactatcgaaaacttgccttcgacctgggcgggaattatgcgattttcggcgttgataaaaaaatcccgatattcgtcaatgaagaaaatttctttggccatactcttattacaggaaacgtaggtaccgggaaaacggttctccagcgccttctttccagttcaatgctacaccttggacacatcgttctcgttgttgaccctaaaaacgactatcagtggcaggaagggttaaaggaagaatgtgaaagtcttggtaagccttttatgcattttcacgcaggcaatccttcaacgtctgtatcttatgatgtcagcgctaactatgttaaggatacagacctttccgcccgtattatgagcattatttcaggtactgaaggaggtgaagatccgttcgtgcgtattgcagaggggcttgtcacaacggcgataggtgccctgaaactgggtggtacaaaaccgactatccagaatatttactacgccatacgctctaaacaggatctcattgttaccactcgtaacgctctccggggtttttatacttaccatctcggggctgactggcatttaactgttcaggtatctccaaatcttactcttgcagacgaaatcgaaaggctgaaagaatatttccactgcaactactttgaagacaactctcccaaaaacatgcatggcatggatacggttctggaatgttttaaatacatctccggcgatgagtcgcactattacaaaatcactgccagcctgatgcctatgctcaagcgattgtcccagacccctatggatatattgctttcggcgaacgatgtcgagaaccctgaccgtaacatcgttaacagccatggactctttaacagcggtggcgtgctttacatttcgctggacggcctgtctgatccggcaacagcacgggacctctcccagctgattacttcggatattgccgctgaggcgggtagtcgctataacacagcatctgatttgtccactgtgcccagggtttccatattcattgatgaggctcatcaggcagttaatatgcaactgattaaccttctcgcccagggacgcgcggccaagatcgcattgttcatctctacgcagaccatttctgattttgtatcggccaccagcgccgatactgctgaccgtttaacgggcctttgcaacaactacatttccacacgtgttactgacgcgaagactcaggagcttgttctgaccaaagtcggccagactaatgtctcaatgaaccaggtcacttacaccaccagtgctggtacaaaacagtcacatacagatttcaatggttccatttccgagcgaaagtcgacaacgatggtaaatgctataccacaggaattactgtcgatgatcccaacccttcacttcatcgcctgcttacaggacgggcgtaaaattgtgggccagatgcctataaccgtgccgggcaaatcaatgcgtaggtcaacaaccgtctttgatatggtaacgacttcgccctacaaactaaaaatgagacgtaatctcaatgtagaagaaatacttagcaaatcacagaaggtgggctaa

SEQ ID NO: 185117 - DNA, 1098 bp, Klebsiella oxytoca
atggaatgcaaacaggtatcaagggaatcgttattcggtatgaattcctcccagcccaaatacatttcacgtgcaaccaagacactgaaactgtatggcatagatgttgatgacgaaggcctgccggaactactgtcacgttatgcgaagaagcttactggtgacatttgtaaggtctacgcccaatacacggttgatagtctcgacgtgctggcccgcacgctggcggagttttttattatccgttatgcggtgactatcgttacgcacgatgatacagaggtcacctgcaactggtctgtatcccagggcccttttaccgagtggctcaaggagcagctgagtaactgcatggcgaagagccacacggttgaagtgcagattgataaaaatcaggaacgcatggctttcatccagctcaatgccgagcgtcttggctggtacctgctgcctgagtttattgatattgcaggcttcctccccgttttccttgagatgcctgaacaggttgaataccaggtaatgcggcgcaagcgacacggtaaggtgccagacatccaccagcacgatctggggattttcgaagaggatgctttgatatccggtttgaaagaaaagttacttttctggagtggcaacctgagcgatccacaggatgaatacacgtctcttttcaaccgtgttatagatctttccattctgggtaaccgccaccagcccgcgatgtaccgtaaaagcagcattattcagtcgttccttgatgaattttccgcctcggtgctcactcttcccgttcgctttaacgacggtacccttatcgcactctggacgccatgggcagagccatttagtcagttctcgcgcttgcggccggttgaagaagatatggtatacacgccaaccccgggacaggtgcgctggaaaaatgaagatgttcgcagaaaagtaactttttctctcatctcccggttaatcgcgtcggatgacctggcgtgttcgggaattcttcacggctggaaaaatcattaccttaacagagaaagcaacattcgcctggcagccctttgggcagagctgttcactaataaaactgactga

SEQ ID NO: 185118 - DNA, 675 bp, Klebsiella oxytoca
atggctggaaaggatatgtcggcgcagagaatgacgatgatccggtttggattagggttgggtctgctgatttattttctgtttaacgtttacctggaagacactaacaaactttataaggatatcaccgctgaggtgaacgccagtaagttgcttatggatgtggagagatggcaggaggtaacgcgtaatacggaaaagacgtttaattacctttttgtcgaactaaacattacggcttacctgaataagactcttttgcctgaggatgataaaaccaaaccggcacgcggaatgaatctcgcggcaaacaaattcatgagcccgagctataccgctgcccgaaacatcccgttaatggtgtatcaggcgatttaccgctggtatttgctggctggctggttttttacattcctccccctgatgatagctctggcactggatggttattaccagtggaaaatgaagagatttgtttttggcgatgttacaattcagctttatcgcctctggttccgttcgctgtcgataatcggtgttttgataattgcttatctggtcatccctaacctgaatttattttatggactgacacagtattttccgccacttgccctggcgttgctcgctattgccattaaccggcttctcgcgcactaccaaaaactcatgtga

SEQ ID NO: 185119 - DNA, 1137 bp, Klebsiella oxytoca
atgtttaaaaaaagaccatcgaaacctgaaacaggctcggttcaggacgtggtatcgcgtgaaagtaagaagttttaccgtttgtataaatcgcatgtgttatcaaaaataaccctgacgattattggtattgggtttgcaggttttagcggctggtccatgtatcaggataaacagaaaaacggtaaaggggcagaccatatcgcggttatccgtattcatggtgaaatgggtactggctcgcctacaggcgacggtgtaattattgcccgcgctttacgtgaagcatgggataacccgcacgcaaaagcgatcctgattgaggccgaatctggcggcggtggtccgtctgacgctattaatatttatcgtgagataaacgagcttcgcgactccctccatggagtaccggggctcacaattgaaaactccgaccccacaacatccccgaataaaaaggacatgccaccagcgccctctgaagcggttaaacaggcgttgctgaaagccgtgggtactgggcatggcaaactgccagccgccgcccgggacgtccgccccatcatcgtcagtattaaaaatatgtgcgcctccgcctgttattacgcagcctcaccggctgatgcgatctatgcggatcccaacgccatcattggcagtattggcgtacgtatggaccactgggatgtgtccaggatcatggaccgtcttggtgtggctaacgaaccgttgacggccggagcctggaaggcctcacttgacccctggcgtccgattgatgacgaaaccaaggcctttctgcatagtgagttactcaacaaaatgcatgaccagtttatcaatgatgtcgaagccggtcgtaaaggaaagttactttcgcgtgaacaggcggataaagaacagctctacacggggcgtttctggctgggggaccgtgcgaagcagtttggccttatcgatgatacagccaccagcacagaggtgcgtgaacgcctgagtattgtctacggcaccacgcgttttcgcgactacaacgcgccaaaagcatcgttaagcagcatgttaggattgtcactggacgtgaaccttaaagaggctttatccagtgcgcttcacaccaccagcacagtgaggtag

SEQ ID NO: 185120 - DNA, 774 bp, Klebsiella oxytoca
atggacctgaccatgttgtcgaccatttttcttgtgttcgtcatgctgatcctgtcatgcatcatcctgtgcatctggccgcttatcagtaacatgttcagcgagcagcgcacacgaaatgccttaaagggggttttagcagaccttgaagggacgcttatatctgacattaccctaccgctcaacgcctcccagacaacgcagatagaccatatctttatcagcacgaagggtattttcattatcgaagagaaaaactataccggtgacatttatggtgctctcgatgataaaacgtggacggttgtatacggtttcggtaaagcgaaacataagatgttaaacccgtttgttcagaacaaaacccacatatccggagtgtgtcgggccataaagcggggtgatgagggtattgttaatgttgtgttactgacgggctccagtaagtttatggcagatccagcaccggagtggttgtgccgtaattgtgatgacctcgggaacaagttcactgcgtacgatgctgagcccgtgtttagtgttgaggagactggttggatcgaaaatgacctgcgtaaagcaatgctgccgcagacgctgttgaccgacctgggtcacgtctattcactgaaactgaaacaccgacaaccaatatctgtaccgcacagggtgacctattttacgctactgacaaccaccctgttcttccgtgcgctgaaaaagttattttcgcgtaagcgctcagaggtcatccacaagcagtaccgtgaatag

SEQ ID NO: 185121 - DNA, 357 bp, Klebsiella oxytoca
atgacatttctcaaatctctggactcgccgccgttcatcgcaacatatcgttgggcggggtcattcgatggacggtatatgccacaggcatattctcttttgctggaactgaatcaacacacttatctgccggtggttaatgccgagtttgatatctgtgtcatcagctgcggcaaagagtggtggcgcttcaggctggtggatgtgaaatctgatgaacgtcaggaaggaatggtagcccggacggcataccggttaaaccagtcaatggggattgctgagcagatggttaacatgatccgcgcctggcagtccgttccgtaccttaatcctcctgcatctgactactttagctaa

SEQ ID NO: 185122 - DNA, 348 bp, Klebsiella oxytoca
atgtacagccgtttcatgaacgatccacttgatgaggaatacctgctttcccctggtattgtgggttcctatgctgatggtgaaatcccggcagaagagattgaggtaagggatgcggtaatacgattcaaagtcacaggcgatcaggtgttgtccatgaatctgttccacaggctgtttcattaccagcgttacagggaggttagggcatcattcaacaaaagcaggttagcgctggtggacatggttaatcgttccccattccacaaagcagcaatgcggcgtatctacagtgatttgccagagcaaagcattgcccgtagggttctggttgatttcattggatag

SEQ ID NO: 185123 - DNA, 258 bp, Klebsiella oxytoca
atgaccagacatagaatagcagccagctacgtcaaacgtttgtactacgcgaaaaaaatgacccctctaccaggaggcaaaagtgctttacacaatgcctcgaatcctccgatgagcaactatcaaaaagttacttttttaggaaagttacttttctcagtagtgctgccaggagtcgatttaatgcaaccatcatactcagttagttcactcattcttccccgcccaattgggctcagtgtccggagggatttttga

SEQ ID NO: 185124 - DNA, 852 bp, Klebsiella oxytoca
atgaaaaaaacaatgactgctgtactggcctgctctcttcttgcaggatgcgcgacacaaccaacgagtccggataatcgtatgtacacgaaagagcatggcgtttactggcattctgatcctcaaaagtcagttgcaacgaacgcatactcacttgcaggtgtacctgttaatgtagatgaagcagagaattcagccgggggagttgatgaaggtcttgcttcaaaaatgctcttgaacactacgacaggtgctattactggtggtctcaagacagggattggaatgttcacagcttcattgtatagcgaaggtgatgcggaatatatacaggtcatgcaatatgtggtctttgttccaaacgaaaaaaacttaccgattgacgatgaatcactggtaaaggccggagctaaaactattattgagtcattaaaagataagccacaaatcggtgatgctacctatgaagctcaaatgaaagcattgaaagaatgtaagattagcaaagctattgttggtatgtgggatagttgcgagacagcaaaacatataccaggttctggtagcaataaaacgcgctttttcgatttccaggttattagacctgctactggtgatgaattgaaagagatgaaactgaataaaggcaattactcagtgattcgttatattgactttttccctttagggcttgaatttgatacaaccaatttcccggggtttactttgatgccacaaacacctaaaacagcacctggttatgcaagtgtatcgataaatgggggcgagtattattttatcaaaggcaatatggggcataaagcattcccattgaaaaaagcagttaaataa

SEQ ID NO: 185125 - DNA, 3183 bp, Klebsiella oxytoca
atgctatttaaaaggacagtttccctggccgtagctgtgtctattgtgacaaatacactcagctgggcgtattatgtcacgcttatcaatattgtgatgacaccgaaagtatatgcggcaaacgaaatatatgagcaactggaaaaaaatttcgatctttcaaatccagcagcgaacagaacttccacagtcactgcagaggacattttagaaaaatataagaatagtgaaaatccttcatatgccgacaaaataaatggttatgatagcaccaacagctcgtcacttgacctgaataaatatggtggaaagacattcacaaatgatgatgttttgaactatgccaaaacagatggatctgacatagctggcaccgtatcgctacccaacatggacggtaacagtatcaacattaaagggtcagaaaacggcggaaagttactttcccgtaatgaagatggaagtatatcaattactaacaaccccaatcccggaggcgcgatcactggtaccaatacagctgaaatgtacagttctgagcagaataatgcagatgttcagtttaatgcagaggacagttacggcgatgaaaaaggattcattaacgatataaaaactcgtaagagtcaattattcactgctaatagttatgatgggcaagcatatcgttcgctggtggctgcaacaaaatccaatccagcccctaatatttcgccaaatgacccaatgtttacaagtggcagaaatgaaatagcaaacgcagcggctggtacgggtcaatggttgcaaaactgttcaacacagaccacaactacaacaaaagaaaaacatattcctgattataaggaatattactgtaatgcacctaaaaaagataattatggtagttgcactattacacgtgacttcagtgtaccagtttacatctctggtggtaatggtgacctaagcgtatgtggcgataattgtatacgtatctggttcggaaagcgtggtaatgactactggtctggtggtgtttatgacaatagcatgacgcttcatttccaccaggatgctatcttaaaatcagcaagcatagtaaatgctgagtgggatgaccacatgcaagttaatcttgatggcaagcagatttttgctcatatcgatggtgaatatcgcgaacctggttatggcccaccacgtaatggcatggagagaaataaatcgaataaattaaaggaacctattgatataacaagccaggttgcaaactccgtttataaagaagcagatcatgaagttgagatgtcttctacggtatgggtcggaggtgggggtgaaggatactttgaagtagagcttatttttgacaatattaagcttgaagacaaacatatacaggatcctccaggttgttatgacgttgtaaagcaagctggttcattttgcaggttcgaccggttttcagatttagatgttggcacaaaacgtttgccacagtctatattgcaatatgcttcacctttatatgatgctgataaaggtaacttaacctggaaaactaatcttgaaggatatttttgtgatcctttagggaaagaaaaattatgtcagtatgatgcatcaggaaatatccttaaagatgaaaatggtaatgaagcttgttacaactatgaccagataaagaatatgcctgatgcatgttcaaaatactcgacaaactcagcatgcaccatgtccagccaaacatgcgctgagggatggttcgattctgctactaatcaatgttacatgtacgaacaaaagtggacctgtgatgaaggaataacaaggactgtgacagtaacaaacgaagcaaacacctgcgtgggcatgatcccatgttcaggaggtacttgtaataccggtgcggatgaacaaaacagtgatttcggtaaggtcgcagcctatagcagcatggttcagaacatgcagggcgatgctatgtgtagtgaccctaacgaccccaacagttgcattgtcttctccggggagaagcaatggtgtggccgttctgtaggctttgtaaacgggttggcaaaaacagattgctgcgaagctcctaaaggtgcagccggaaaactagaggcaattatcttagccgggacaatgctcagaaacacaaactgggaaaaaatatcagcaaagctgacaacctggactggtggtcagtcaggtacgtgggcatcgatgacgaacgctgtcggccaatggacctccggggtatcttctagcgtgagtcagatgtggcaacgtgtgacacagccacttacttctgcttatgaatcaataacaggaaacgtctcgagacttattggctcctccacaattgaaggaggaggatctgcggccactactgagcttacgaaagacggcttacagacaggagggcttgctgcaattaagcaacagctaatgaataaggcctacgatatgttgccagatgctgtaagagacttcgtttttgatcaaaccagaagtgcggctggtcaagctgtattctcatcgacagtgactaattttatgctggctttgaacgtaatcggatggatatatacagcatatcaaataactaaaatgttattagagatgctattggcatgtgaccaaaaagaaatggaaacgtcaattcacaaaaaccaaggtgcatgtttcgttattgatacagatcgttgtgttaaatatctcaacgttggtttcactaagaagtgcattaagaaagcaaccgacatgtgctgttataattctttattatcaagagtaataatgcaacaggcatatccacagttaggaattaatccagtagaaagtggttgtgtgggattaactatctcacaggtgcagcaacttgactgggataaaatagatatgactgaatatattgaatcagcagttgtagcgggagaagtccctgatgaatacgcggcattcacagaaaactctgtagccaatatggggccttataaaaatgataatgctcagttaccctctgagcgagctttagattcaatgggcggtagtgtcaatatgacaaaagcaagagaggagaatgtacaggcacttaaagcagagaatgtcgactgttcatatctaccaagacctgctatatgtgaagtagggtctatatattcggaccctacgacaggaaatgtaataaactaa

SEQ ID NO: 185126 - DNA, 1035 bp, Klebsiella oxytoca
atgagaaagttacttttgccggcattcactgctgtcatgctcatcctagctttaccaggaatggcgattggggctgagacggatggcggaatctgtcaatcggctggtgtttggaaaggtttgattaaaaacatctgttggagctgtatttttccaatgcgcattatgggcgtaggctcctccccagaaggggctgcaccatctcagccagtatgttattgcacagatcaaaatggggtcccagaggtaggatggcaactgtcgtttttccaaccagtaaaaatagtagaggttgtacagtccccatggtgttcgccattccttgaaggggtgagtcttcagtcttccagtttcgatatggggaaaggagcaactaacaggcccaaagggggtaatgaggcagggttttatgatgttcacttatgggagtttccgatcctagtgatgcttaagctcctcattatgggggattgtaccgctgagccttatattgacccatctcttacctacattagtgaagtagacccgctctgggaaaatgacctgcttacgctcgtattaaatcctgaggcagttgttttcgcaaatcctattgcttcaatgtggtgcgcggctgactgcgtgaaggttacagctggcgctgacaatttgagtgcccacttttgtgcaggctgtgatggcaacctctatccgctaaccggccatgtttttgcgaatgacgattcagtcagggtttcctcattattaacgcaacgaatgattaccaagttgcacaggcagggaatgctgatgaaaaccatgggtcaggacgctatgtgcgaacgaggattcagttacttcatgcccagatcacagtacaggctatcgatgctgtatcccgtaccggaagcagaaggaccggaatgttgtcatagacttggtgattctgttcatgactggtcgacacggaagggcggacgaaaacgaataggtgtaaataactatgtatacatgctttggcgttataacgactgctgcgtaaggtggctggggtaa

SEQ ID NO: 185127 - DNA, 1278 bp, Klebsiella oxytoca
atgaatacacaatgtctgccacggcgaatatcgatttcatttttcatagttcaaagtataatagatagaatgaaacgcctacaagcttttaaattccagttaagaccaaatggtcagcaggagcgtgatataagacgcttcgctggtgcttgtcgttttgttttcaatcgggcgttagcgtttcaaaacgaaaatcacgaagcaggaaacaaatatatcccttacacaaagatggcttcatggctcattgagtggaaatctgacacagagacacaatggttgaaggaagccccatctcaaccgttacagcagtcacttaaagatttggaaagggcttacaagaatttctttcagaatcgtgctgcttttccccgattcaaaaaacggggtgttagcgatgcgtttcgctatccgcaaggtgtgaaactggatcaggaaaacagccgtatttttctccctaaactcggttggatacgctaccgcaagagtcgtgaagtcataggtgtggtaaaaaacgtcaccgtcagccagtcctgcggaaaatggtacgccagtatccagactgaatccgaaatatcagggcctcatcatgaatcaagctcaatgattgggctggatgtaggagttgcaaaactcgccacgctttcagatggaacggtatatcaccccgtcaaaagttttaaagcaagccagcgcaagctggcagtgctccagcgacaattaagccgcaaagaaaagttcagcgcaaactggcagaaacagaagcgaaaaatccagcgccttcattcgcacattgccaatatccggcgggactaccttcacaaagtcaccagtgaaatcagcaaaaaccacgcgatgatcgtcattgaagacctgaaggtcagtaacatgtctaaatcggcaaaaggcacggcagaaaagcacggacggaacgtcagagccaaatcaggcttaaatcgttcaatactggatcagggttggtacgaaatgcgtcgccagcttgagtacaagcaactctggcgaggtggtcaggtattggcaataccgcccgcctataccagtcagcggtgtgcctgctgtggtcataccgcaaaagaaaatcgccagtcacaaagtaaatttgaatgccttgaatgcggatataccgaaaacgctgatatcaatggggcacgtaacattttagcggcaggacatgccgtgcttgcctgtggagggatggtgcagtcaggccgcccgttgaagcaggaacccgccgaggtgattcagacgtcaatctga

SEQ ID NO: 185128 - DNA, 1347 bp, Klebsiella oxytoca
atgccatcttctgaatgtattaaaaagttactttttagctgcctgttagctacttctctgtcatatgccgatgactctattgatcatgcaaagactcaaagcataaagtcgattgtcggcacaccccggtacaatcccagctctgtctccgacagtgtgcgtgcggtgatagaacacacaggtaagctgcgtgaagcggaagcgatgagtgatattgcgcaggacataaaaaagaatcagtctacagaggccttctctgaagaggcagacacaattaacaagtcaaaaaacgagtcaatgcgaacccagtcttccaacgttgaaaaaatgtttgggaggtcggggattactgcacaggacttcgaacgtaaattagataacaacaaaaatgaagaactatcgactgataatggcttgacaatatttgcatcattcagcatgccagactatgtattgatagacctgattaaaacagcatcggaaaacaatgcgcgcgtggtgttcagggggcttaaggaaggtgtagaaaaccttattcagatgcaggtagtgctgcgtgattatatatctaaagcaaaaataaaaaaagaacctttagtcaccctcgatccggaaagttttacccagtatagcgtaaaagaagttccaacgatggtgtacagaaaagatgataaaacctacaagattagtgggtcgattaacattaagtatttcatgaaacagatcgaggaaaacccagaaaaaacaaccttcccggtttcagcccaaacattccctataaaagagaaaagtattgtacaggaacttgaggagagaagtaataaatatgactgggaggcggccaaaaagaacgcaataaaatcaacttggcaaaatcagtggatggcgtcccttcccgtatctgacgagaataaaatctggtatatcgacccaacaattcaggtaaaccaagatattagagataaccaaggtaacctcattgctgccgcagggcagaagggaaatcctcttgctcaatttccacagaaactgacaatgatcgtttttgacccaatgaattccgagcagctgacatgggccaaaatacagtttcgtcaccgttttggcgaaggaaaagtgatgcccatttttacgcggatcaaacgtgatgatggctggaagcatttagaggagttgcgcggccagttctatgggcagatgtacaaaatcaatcctgaaataattagccggttcctgattaagtccactcctacgatcatatcggttgaaggaacctacttcaaagtacagcagtttgctcaggcagatgtacgcgagtatacgcgtttgacatcctccccgccctaa

SEQ ID NO: 185129 - DNA, 525 bp, Klebsiella oxytoca
atgttgatgtcccttagatatctttctccgcacagaagaggtgttttacgagttgataaatcactgattctgcacctggtgatcatctcggtattaatgcatctgttcttttcccgcttcactctggggcatggactcctgcacggctgtattccagctgattattacatggtggataaatatgataagggctatgaaattggggatatgattaacttcaccatggacagagatgttcgattcattaaacctggggagaaggtaataaaaatcgttgctggtaagggtggggacaaaatccagattacagaaacatacgttaaaaacggcgaccgtattttccgggttgacggaaggcgtattgccaaaaaataccatattgaaccgcaaattctgaaccgtgaaatcacggttccagctggacacattttcgtagttggccagaccgattactcatgggattcccgtttttggggaacaataccagaaacgacaatcacaggaaaagcatatgccatcttctga

SEQ ID NO: 185130 - DNA, 4242 bp, Klebsiella oxytoca
atgactaaaattaataaaatctctttcctgatgttctgttctgtgttcagtgctttttcaaacgcagaatcgataatggtttccggtaccctggaaacgtcattaccagatgtcaaattttctaccagttcacaagtaaatacggccttcgtgaaagaaagtacggttacagctattccggtatctgagggatgcgaggtgtcttctgatcctaatgtcaaaagtacggctggtagcctgaaatgtgtgtttgaatggttacctaataattccggtatgccgattgctaatgggttctcactgaagggcatccctgcgatcgctggggatatcaaacttccatggcaaatcgtttactactcgggctcagaacgtgaaaaagtcatagtcaaggaaggggagtacaacttcaagactgttgcgcctgtagctcctgtgattacttctataaaaggttcaatgagcaacggttcttccggttcaacactgacgtcatacattaaaaacgagacactctcaaatattgatataaccgttgaaccccgagactacgatatggtcgcgtctgtcggttctgggacatcctgcgccattgctgcaggagcctcaaaatgttctataacgaccggaagcgtaggcatcagtgatgggagttccgatttcggaagcagggatgtaggcgtaaccttaaactcgttcaataattacttctccccaccagtaacctctaaggtgagattaagctgggattaccgcgctccagcgatagacaataccttctggaacgtctctaaagaagctcggtcattcaagatcggagataaagatatctacgttgctccgcagacgatcgctgtagctgtctcggttcctgcccggtcagataccaatgactggtggaaacctgctgcaatgtcgctcacacttgctcctgatggtagcttctctccaatgacaaaagttactttagatgatggtacggagcttaatttcaacaaaatttggtcaactccgtcccgtcgaactcttcaacctgtcgccggatatcaggaagttgcgggtaaatttgtttatttttttgatataagcgatctggccagcgcttcttacgttgcaacatattctgtgtctaatacagcgggcaatgattccagttataccgaaccggaatctaaacttatactgtctgatgaaccatctgtttccgttttcaaggacggctcagagcttgttaagcgggaccaggtgtacttcctgaatgagatcgttattgctgcattccagggcgaagagggtgttgccgacatcaagagcgttgtcattgataacgtcatggcttcatacactcccacaaacgtcaaagggatctaccggttaaagccgatgccgtcactcgaaacaaacaaagtccatactttgacggttgttgctgagaatgttaacggtatatccaaaacctattcaatcgattttacctatatgccgatgactttcactctgaagtccatcgaatcagcgtctacgatttacggttacgtccgtccttacacttcgctggttactcagcaatcagggaatacctgtaagattttctctactgaagaagacgctcaggcgtttcttagccagttcggaactgcggtttatggaacggcctgttatgttcagtggaacaacgttccatctggtctcgaattttactcgaagtctaaagttcctggcctgacgggttacttctctaaagttggcgataacgtccttgactacaacgtctatgtgattaatacaaaaggctctaaagccattgccactcataaccgtaaaaccgttaaagccgttgaaccgtttgcacctgaaatttcatacaagatgagtaaaacggtagagactcttggtaaggatacagcactggtttatatcactggtggggacgcagctaaggtgcttgcaaaatcagtaccggctaacgttgtccttacaactaaggttgaaggccaggacgctgaaactaaaacctacaagaataaatcaggtggtgatacgccggtaacttattctgagcgtataaaagtacctgcagcgccattgtggacgcaaacgaatgtaaacatcgaagcttcctacgaaaatgaagccagtataaagtcatccagtgtgctcaaagtttatactgttccaaacttcagtattcgtgcctatatgaaagttgcagagcgtaaatcagcaacgagtttgaaagtaccggtatcggtaaacatcggccaatggaataacagctgtaactgtacattgtacgatgcctccacaatggggcagtgggatgtggtggtttacaaagttacctctaaatgggttacggatgaagaaaccggtaaagatgtttcggtaactgagcgaactcctctgaccggtgatctgcccgttaactctgaggggattgcgaccggtgagctcaacatggacgatctgactctgggtagtcaccgcatcatcgcagtagctacggtacgcagtccgtttaaagattttgtactcaaacgtgagacatcaacaacaagtatcagggtgtataaaggggccaacctcgaaggtgggctgtctaaatcgcttattgtaggccgagttcctctgtcagcaatggtctcattcagaacgaaaagtaccgatgattatgattccctgagtccgactgaatggcagatgtccagtaacaatggatcaacctggaatacgcttgaagatatgaccggacttcgaagcgtaagcatcaaacaaaaagaagtaggtaagtggctttaccgcgccaaactgaccaacaaatacacaggtaaggtctcatataccgataatctcacggtggttgcttaccgggaacctaaacctgttatctcggttggaaaggttcttgaggggcacagcatcccggtgacactgactgataacaatgaagatgtacaaggtagtgcagttgaagtccagtggtcagaggatggagaggaatggactgaggggggggttaaatacatgattacgtcctcggaggtgcccaagtatatctttgcaaaagtacggtataccgaaaccgacgaaatggccgggaaatcggcatggaaagaaactcgtgctcgtgtcactgtcattaagcataagaaattgtcggttaaggttgaggggaactcgcaggtagaggtaggtaaaaaagttactttgcagggtacctacacgaaccctaatatcgagtactcatctgatgctaaagttgtccaggagtgggtgctccctgatggaagcgtaaaacagggggggctgcttgataccgtcctgaccgaagacatgttagatgaacgtgggtatgcaacgtttacgtatcaggcctacatgccggaggcaaaagacagaaccatagcaaaacggaaaatcagcgtaaaatcttgggtatacaaattcccggagccacgcctgaatacaaaactgaaatacaccatgataccttcggaactcaccgtatcagtctctggtgtggatgtttcttatcctggagttgtgttcacccaggactggcaatacgacaaaaatgtgatgacgctgtccagcgacaataacgggacgaaagtgttccaggtaacaaaatcgggtacacatacgttgacgtatgtcctgaaggataacaggaacaatgaagcccgggttgattacacttttatcgtgaacgaacagagtccgatggaaattagcgttactcccaaatactctaacaagttcatgagggccccgctggacctgtccttgaggtccagtgtaaagctggcccactcggcagactcaattgacaatgtgacgtttaagctgaatggtaagcctgtcgatggtggcaaaaattactggtcacagacgtttgagaacatcatggaaggtagttataaactggaaatggacgttgtcagtacgcagggtcagagaggggttgttgtggttgattttgacgtgataccgaacacgcctcctacatgtaacctgacatacactgaaacgcaactgagctgggcatttactgcaaaatgcagtgatcctgacggcaagatttccagttatgtttggaaggtgaatgatcaggttcgtggtgtgttcggaagtactgcaacactgtccaaagctcaaaataagggtaagctggtggtgtctataacggcttacgatgacagcggtgattcagcgacaagtttcattacgttgaataactaa

SEQ ID NO: 185131 - DNA, 405 bp, Klebsiella oxytoca
atgacgatgaagatagtgagtattaaaaaagttagtttcttcatagttccacttattaccctgctaggtatttattctctaactatgaataaaccaagcctgtcgagctttaagcaaaactcggttcatgccgcaagtctggcgggcgctgaaaccagtatgaattttaagatcgttgatgaaaaaacaataatgataaacaacattccttctattgttaaaaaggagtacattaaaagtcttagctctacagaggttccacctggtgctccatcgggagactatctaatgctagagaccagtgcttatatttttgcgatgaagcaatctggagggaatacctacattggtctggtgaaggatttaatcaacgaaggtgaaggacatatttggtggaaaatataa

SEQ ID NO: 185132 - DNA, 2439 bp, Klebsiella oxytoca; identical to SEQ ID NO: 100640

SEQ ID NO: 185133 - DNA, 522 bp, Klebsiella oxytoca; identical to SEQ ID NO: 95523

SEQ ID NO: 185134 - DNA, 129 bp, Klebsiella oxytoca; identical to SEQ ID NO: 95522

SEQ ID NO: 185135 - DNA, 1179 bp, Klebsiella oxytoca
atgaaacaaacagctgacttttttatctctacagagcggaacgggaggctagtcaaaaatttgcgtgaatttagtgacgcaaatcctgacatttgccacaaagcggttaatggccaaccgtttatgatcgacccaagggcattagtgttagttccaaactggaactgccgtgagatgggtctgggagaggcatactacaaattacctaaacctgccgagcatattcagaatcttaaaaaagcatttctgaatggggcagacattgaccctataactgtcgttattgttgacggtaaaccactggttcgacaggggaactgtcgtacaagagctgcgcttttggctcaacaagaatcaggtctccccatcctagttagattgcgtgagttccagggtgacgagatagaacaagaatggcattctctggatggggcgaaatctctccccctttgccccgtaggtcgcggcattgcctatagcagactggtaaatgatgccgggatgtctgttgagcaggttgcacaacgggaaaacatttctgaaatggcagttcgccaaatcatttctcttgcaaccatcgatgacgaattaaagacgttgattagtcaggatgtgatttcgtacacactctgtcttgaattaattcgtgatcttggtgaaaaggaagctcttgataaaattcgggccgacctaaacgccaagataatggttattaatagttccaccgggagtgatacccttcctctgaatgttgccgaaataattaagtctcatggtagtcctaaggctgtcagggtcactaaatcttcactgggagtgcaaccaattcctcgtaaactggcacaaaatctcgcagccagtactaaagaggtttgcaacagattacgagcctcccttccctcttcgtttgatctcaatcagattggacccaacgaaaaaataaatattgaagttgacagacatctaattgaacttatatttaattcagatgactctattcgtggccatgaagctaagctcgagcgtaaaacaacaaagggaaaactttctagttctgccccatcagtaacatcagaggtaaactctaatgcgctgccagctaatgatcctatggaggagcccgcttcagaaagtcaggaaaatgaattttcgctattgaatttacattccgcagtttga

SEQ ID NO: 185136 - DNA, 765 bp, Klebsiella oxytoca; identical to SEQ ID NO: 95481

SEQ ID NO: 185137 - DNA, 669 bp, Klebsiella oxytoca
atgtgggtcacaaaagataatgaaattatctcagatgctgaaccggattcagacggttttatggaagttcgccgtccatgccctgactgtttaggttcaggtataaactgcctccagtgtgcgggttctggctcattgccggctgttatggaaaaagtatatcctgtgtacgagtgggcttctaaaaactctctacagatgccatttaaatcacctgaacaagcacttattaaaagctttcttaaagttattttagaggcacccaatcagggtaaaagtaatttttactcagcactcatccaaaaattggataaaagttactttcctacaaagttacaatttcgatgtctgaaacctaatggatatagaaaaagttcagcagtcagccttcaagtacggccctttactgccaaaatcggtaccaaactgtatctggctctcaccgtaattaaaattcaggtgctcaccagaaaatgttcttctgagagtttttcatctttacttttggagacctctgaccaccggcattttattgcttatgatacgcacccatcagggtttattcttggtaatataattaattgcaatgtccaagttgttaaacgactctgggttaataatatgagtatattgctggtgaaaatgatttcatcttctctgattaagtga

SEQ ID NO: 185138 - DNA, 315 bp, Klebsiella oxytoca
atgaaaagtcggatggtagaggtcgctgggttaaatcttaaaattaccatacataacaacatgttagctttgagttataatattgatgggctcagtatttacaattcaagtcgtattattcgcaactcaaaactaaccgaatctgagattttcgcaagaattggcgctgatttggttagcaaagttttttctgtaaatatcaagcagataaacaacatcgtacactctaatgtctgcgtaatacctatacagactcaagctaaacaggttaactttgcggctggagtaatggcgtcttgtttcaagaatttctga

SEQ ID NO: 185139 - DNA, 369 bp, Klebsiella oxytoca
atgatccagaaatcaatggctatgagcggcactactgctaactacactctggctgaaagcctgcgtaatatgcttagcaataaaatgttccagatatttattgcgctgttgtgcgctgcgttgttctcatctattgctttggcgggcggggatgacggagccttgggtgaaatttggacccaactttcagaagctttaagtggcgcgcccgggaaggccctggccgcatgtatgctgatctctgcattctacttctccatcggccgtccgaacccgggtttggcactcgtttcattcctaatgatgatgattttggctaacggcgaaaaaatcatcaccggattccttgatgcgggtgttgtgctttaa

SEQ ID NO: 185140 - DNA, 861 bp, Klebsiella oxytoca
atgaacgagaaaaagtcacttttagaaaacgtcatgaacttcttcaggtttgtaccgaagaagaagacagttgataaatcaaaggatgatgaggctgacgacgtccagtatgaaaaaactgaaagttacagcaatgataaaattcagcgtcataagtccatcctgaatttgtcaaaagaactcgagcctcctaaaaaagggaagaaaacgggtgctgaacttacctacagtcagttaattcagcgtgacaaaaaattaatcttaaacaatggattattgacggtgattgctggccttttggtaattaaagtggtctttttttccacaactgaggtcattgccatccctccggatatgactgaggaagtttccgttgccggaagtaaggcaagtgagtcatataagacgcaatgggggctatttatagcaaccacattggggaacattaaccctaaaaatgttactttcgttaccagttatattcttaagatgtttccggcatctaaacagagcgagttagaagcagaactcaaaaaagcctcggatttaatgcttgcaagaaaggttgatcaaacatttgttgcagaggacgtcaactttttacccagtgataatgttctttatgtatggggtactcgcaaaactaaattcctaaacgtctctgataaggaacaaactgagcgttggacttacgagatggttttgagtgtgaaaagtgggcgacctcgaatactgtatctgaaccagtattcagggacccctaatatcaaaaaagtcacagttaacgggaaggtattggaaaaagagttcactgaaaataccgatatgaacaagcaactgaacgaagcagaagctcaataa

SEQ ID NO: 185141 - DNA, 1170 bp, Klebsiella oxytoca
atgaaaagaaaactcttaggtatactaatcacattaaacgtgctggctccatttgttcatgcagatgaaccgttcagtattccggcgtcggcagtgaatacacaagctttcgatgaaccaccagattccgccgaagctatgaatattgtaactaatgcagttaaacaagttccggggacagtggctgttaatcaaccaccaattgacagcaatcagccgcctgttaattcgaaccgcccgacaactgcactacctgctgcccccggactttcaccagcgagtgcttcttcaccagcggttcggtcaatgaccgattccctgttgaacaataccccttctgaggggcctgggcagaaagcggtaaacgaagcaaaaaaacggtatcagccaatgcaaaacgtcacggtgccgccgggtggaaacattgttctccctgtttcattaggtttacaaaaccgtatccagacgacttttaagaacgtaagcgtttctacaactgcaccgtcagaagatacaaccatctatgtagaaggtggcagtgtctttataacaactgtaaaagatgcgcctataggtatcatgttgtccgaagaaggggttcctgaatcaacatataacctgacattgatccccatcgatgtaccgggagctatgattcgtgttcaaacacagttaacgcgaaacatggccattgaacgtgatcgccatatcgctgaaaacacaaataaagaacttcttgaaaaagcgcaatcgggtgagcttgacgaaaaagctattgctcaggatgaccgcaaacaaaggataatagatattctttatcccgttgctaacggtgaggtacctaccggttttgcactccaactagataaactttcggttatacctaataacgaaaaatccccttgccggtttaatttttacgcaaaacttgggcaacgtcttattggggctcgtgaactggttgatgtcattcttgtgcaaaacacactgacatatccatcggttgttgatgaccaaaaatgcataacaccaggtgtgattgctaccgcaatctttgataaagcattcttacaaccgggtgaaaaaactgagctgtatatccttcgtgacaagctttatcaggaacgggagtcacgtgtaactaaacgaccaagtttgattaatgaatga

SEQ ID NO: 185142 - DNA, 519 bp, Klebsiella oxytoca; identical to SEQ ID NO: 95475

SEQ ID NO: 185143 - DNA, 1371 bp, Klebsiella oxytoca
atgaaaactttgaagctgaaggaattgtgggaagaaaataaagcaattcgaattgcttttttgcttgtcctagcattagcggctcttgtgatggtaaccatcacgcttatgggcggagatgattcgagcaagaaagctaaaaaaattaagcctgtgactaacttgcttgacacttcttccatcgtcaatatggatgaagaaggtcagaaaaggtttttgcaaacagttcagcaggaaaaccgtaaagatcaacaaaacatgttggatcaggtaaagcaaatggaaaaatataaggccgaaaattccagtgagctgactgaacttaaaatccaaattaagcaactgaaccaacagatctctgatatgcagaatggaaagggacctgcgagcaatcgtagtcttgataaccgcgtaggccagccggtctatgaaaatcagcagcaaaatccagcctatcagctaaaccgtaatgcagaagggaatcgcaatcaggaaataccagttgcaggagggattgcgcctcaacgcactcagttggtacgcactataaccagcaacagcattaccacggccaataacggtgttcttgaagtcacaccaattgttgaaaagaacattactaacgcgaatcaaaagcgggtcgttaaagctggacctggagctgctatcgcaggagatggtactaagccggttgatagcaatgctcgccactcaaagcgtgctgaagaccagtatttgcctgctacgtctcaactgtatgcagttctggtgacaggtgttgaagcgccgacatcattgtcgtctcaagaagaacctttgggagtaacgttcagggttaaacgcgatgtgtttttacccaataactacagaatggatctacgtgactgcaacctcttaggtactgctcgtggagatatggcttctgaacgagtctatatccgcacaactagtctgagctgtgttaattctaaaggcaaaagctttgatatcaaattggaggcatacgctgttagtgaaatcgatggtaaagccggtatcaaaggtacgcttatctccagaaacggtaacgccattatgggtagtgcttttgcaggtggacttagtgcgctggcgcagggactgagcccaagcaaagttagccagttgaatatcgaccctaactcacaagcacaataccagggacctaatattggtgctcttggcgctgtgggtgcaagcggtatggtctcaggaggattaaacaagctgacagactggtatacccacatgattgatcagcagtggccagttgtagagctttctccgggtattaatgcgacttttgtcgttcttagtggtgcatccatcccaaccaatttatcggcgaaataa

SEQ ID NO: 185144 - DNA, 465 bp, Klebsiella oxytoca
atgactcaaccagttaaagatgaagaccaacatgacgctgattttgaaaaagtgtcaagcgaacagaaaagcctgacattctcactgtcttattctttagtcgaaaaggctgttaaaatcatcattgtcgtcgctatcctggtatgtatttcagtgtatattgggaagagaatgaatgaaggagtaggactgtttcataagagcgtaaaaattgccgttcttaacccttctgctttaaatgaacagtatttaaaagcacacaatggaaaaggtgaaggttatctcccttatattcgaaagttgatggcactttaccgggcacgtgatttcctggtgctcgatatgaattatgtcattacacgaccatcaacagtaaatgaagtagcttacatagatgaatcagaagtagaaagcgaactgactgaatatggtatagaccctaaatattttgagggtaaacagtga

SEQ ID NO: 185145 - DNA, 858 bp, Klebsiella oxytoca
gtgattatgagaaagttacttatcaagttgctcgtgtgtatagcactactcaattcaactcattctgctgcagctgataagtatgatgcagaagctgcggcgttaacacgcgctgctgctgaaaatggtctcgctttaaatcagtcgtcaaggggattagttagcaagcttagtccttaccagccaaaggatgctgtctacttaccgacgggtgggatttttttatttgaggatcagcgaagtggcctcaccctagttaccacaacgggtcgctactctttttcagaaggtaaagtttatgatgttctcaggaaaaaacaagttcaatcgatatcagatatccgagaaagttactttttaccattgaacgaagcaccgttcaaacctgaggatgcctttactatccagttcgggaatccgtccctcaaacgacaggcagttatattcatttctcttgattgtcaagattgtattgactttctgaaaaagatgaatgaagaaagggaacttgttcgctttgatattgttattttacccagccctggcgaatcagctaaacgggtaaaacaaatgtggtgctctgttaaagctggtaaaattaccaattacgatattcttcagtcgttattaggaaaatcaaaagatataaacaaccggcttattcctcatgaaaatctgaaagattgttcagttgaacctattgttacaggtctatacctggcatccatttataacgttcaaggcatcccatctgtagttcgtgaagatggagtgttgggcaatggattaccgactgattataaaaactggttaaaactgaatttacaacctttgcttaaaaatccctttaacaaataa

SEQ ID NO: 185146 - DNA, 591 bp, Klebsiella oxytoca
atgaacaacatcacgaaatttctcatgtctgttgctgcggtgtcttctttatcagggtgcataggtcaatctgagagcagctgcccaggtattgaaaaaggtgtgctgtgtatggggccacgggcaattatggaagcaactaacaatcatgacgatctcaaatatttaaaaaaggaaggtgatgagggaaagcaggatattgcagatagcaaatatccaacgtcgttgactccgccaccgggcgtgcagtacccaaagaaaccggtagtaagtgctggccctaaacccttgttcaccggaacttctaagccggtgaagccgctgacaacagcgagttatgtgtcgcagcagcgcgtaccagcaggaaagggactgtattcagaatttgatggcaagccggtaaacccaacgctgagttcatatcaagagcgtcagtatcaggtacagggtacgagacaagctgttatcgctcctgagccgctggctgtgttaagacaaggcaaagttatgcgtgtgcttatcgcgccttacacagacgataacgacgctttgaacctccctggctatgtatatgtcaatgttaagccctga

SEQ ID NO: 185147 - DNA, 198 bp, Klebsiella oxytoca
atgatagttcaggagtttggggaagattacggctgcttcgaaggtgtgctgaagaatgaatgcgatcttatcactaagcctactttttatcccgacttgcgaagtgcagctatgtccggttttggtatgatgaagcaattatacccactgtacgatgataatctctttaatgaattcctctcagaaattccggaatag

SEQ ID NO: 185148 - DNA, 510 bp, Klebsiella oxytoca
atggccaatatccttatgcccgattgtcttgcgaagttaaacaatctcttacaggctattgagaatgcacccgttgagtgcgatggtcatacattaatgataagcagtgctctaaatcatgcaggcatttctcatcaacgaatgtgcggggtagttaaaaaccccaaaacgtattttgagttatatccacatttctggattgagataggtgaattcactctggattaccgactcaggatatgggttgagttatattcaggtggaaaactatcagagggtgcccctcacggcatatttgatgcgcgtgggcttgagtatctttacacttctggaagcatttgcccaccacctgccctggactttaatttattaaacttaatcagtgatggttattacgaaaaaattaactttaccgagctaacaacactggcacattctgtagatattagtttaatcagtgatgttaagaatgttacaaacaccggggttgcagagtacaatgataattaa

SEQ ID NO: 185149 - DNA, 480 bp, Klebsiella oxytoca
atgttaagaatgttacaaacaccggggttgcagagtacaatgataattaatcaaaaaatattagaagctgatattacaaatataatcaatacatttgaaaggctaatggatgaaagtaataaaagtattataccagtaaaatccagacacgttgatggcttggccttgttcgaaaacatgtatatacgtgcacgtagcaaacatgcatctttgctgggtaaacctgttctggttgtttcatcagtttctgtatttatcactaatcaaggctgcttcagtacacttctttctcacttaaaagcccattgtaagaacaagagttacctgttaaaaattgagagcgtaatctctcaggaactcaggagatatcttgccaggcaaatgttcgtattcattggagaagaatgggagtgcgggtctggttattgggtgcctgaagatgatccagtatacccatctttaaatagactaccttattga

SEQ ID NO: 185150 - DNA, 657 bp, Klebsiella oxytoca; identical to SEQ ID NO: 95397

SEQ ID NO: 185151 - DNA, 603 bp, Klebsiella oxytoca; identical to SEQ ID NO: 95398

SEQ ID NO: 185152 - DNA, 516 bp, Klebsiella oxytoca
atgttcgaacataacattgcttttaacggcatgatgattgtgattgttatcttatcttatctgctatttaaaagtcttaagtcaaagaaaaggcttcagcataagtatgatgaggtgtttaaggcttttcatattgcgaattcagagtacaccggcggcctaaaagaagtttacaaaaacttatctttaagcaatgctcagttgcagttccttgctgtttacttaaatcaagacactgtccagtttgatggcagaaatattgtgtgcgaaaaagaggatgatgttcagtatattctttcacttatatcagacagccatttttggttggacaaatccatgaaaggaataaatgaagtggtaaataatacggacgtaataaaagatattaaattatctctatcaccgttcgcttcgttgggtgagctgaatgttatagatgatgagtttaaactgaaaaataaagagtttgatgggtttgctaaacttaaagttaagaatgatgtaaaaagggggtga

SEQ ID NO: 185153 - DNA, 957 bp, Klebsiella oxytoca
atgaacaccaatgtacatcatgtccaagaaaatttttttatatcattgcaggattgtataaataaagaagagaaaacaaaaaaaacatgcattgagtactggcgacgtgaagctgagagggcgaaggaagaaagcgcaagacgtagagcactgtctataaagataattaccgaaaaaagcatgattcttgaaacgttatttctaaatatacaaaaaacaaatgcgctcaaagaacagtatgaaagaaacctgatagctaaatggggtggcgttattgatgacgataagacaaaggattatggtatattcctccctagtttggaacatttatctgcttatgtatcatgtgcaaagaacgatgaatatagcagggaagtgctttataacagacccgaattatcaaggggtatcaagtatgacaatagttattactgcccgcaggaaaaaaaattcatctatatgaggaatgacaaatttcgtccagatcttgaacttctgacaaatcctccttatcctgatttttgtaagaatttactttacttttatgtcaggtcattttcgctgcatctcaaaaaaggagagcctgggaaaccattggagataggtattcgcaattcagtgagcaaaaacacttatgaagacttgtgtataggtctggaaatacttatgccatacatgtgcaaaactgaaagcggcaaagtgattattaatgatgaaggatacttatcatgtgatagctattatagaagcatactggttaacccgaaaacagggggtgctgagttagttatatacagaaaggggcgctttgaccatcgacagaaaccgaatacacgagaacctcgtaagtggttgaatgaagatataataattaaagaatttcctaacatacgaattgtttttctatatatcatatcgtgtcggtatcagcagcacttcaaaaacagggatatatag

SEQ ID NO: 185154 - DNA, 957 bp, Klebsiella oxytoca; identical to SEQ ID NO: 95401

SEQ ID NO: 185155 - DNA, 342 bp, Klebsiella oxytoca; identical to SEQ ID NO: 95402

SEQ ID NO: 185156 - DNA, 312 bp, Klebsiella oxytoca; identical to SEQ ID NO: 95403

SEQ ID NO: 185157 - DNA, 729 bp, Klebsiella oxytoca; identical to SEQ ID NO: 95404

SEQ ID NO: 185158 - DNA, 615 bp, Klebsiella oxytoca; identical to SEQ ID NO: 95405

SEQ ID NO: 185159 - DNA, 3342 bp, Klebsiella oxytoca
gtgaatgaatcatcaataaaaaccgaaaatgtgttcctcttctggagagccattgaagccttaacccctcaggatattgataaggaaaatgcccgcgacaaactcaacccggtttacaaagtaggcgcaggatccatgcttccctgggatgacccggaacatacccgtaaggatattgcgcctggcaaagtgtggcgctactccgctcaggcgggggtttatcatctgagcgagatttccaaaatgctggaggataaaatcggtgcccatgaagcggtacctgaagaacgtaaatcagggaaatgcaggctttttgatattggtttcaatgaagaaggcatcccccagccagccacgttcatgttatccctgtcagcatggtcggcggctcagatactcaggcatgatcgcggcgtttatgctcttcatgctcccctttgctccgatgtgtccgacctgcccgcaccaaacgacagcctcccgctggtggatagcggtttttacgattttgataatctgacccttcatctcatgcagtgggtggacaatgaggcttatcgattacaggaggagggacagaaggccgatacaggatggttgaagacgcttgagaaactggtcatcgcaaaactgtatttcccggaagaagccatggatacgacgatcgtcagtgtggttaagtgttccgtgaccaagaaggcgaaagttatccaggaagacagtgcaaagaaagacaataaaaagaaagaagcggtgcccgatgacctcattaacagttttttcattcaggaactgcgaaagctcgacgcggagtggaggcaaggagggggtggggccggttttaaagactttatcatggcgataacccgggataaccaacagcgcctcgatatacgcactgaagaaggcctggattttgcttttgagaaactgttgcccacacagccaccagctggctcctggccttcaaagtacccgctggcattcagccagcagctggccgtcaatgaaatctggaccagaaatcacactgaaccgggtatttttgctgtaaatggtcctccgggaacggggaagacaacactcctgcgtgatgtggtggccgcagtcgtcaccgatcgggcgagtaaactggttaaactcggagactctgcatttaaagccaaagacagcctcaaatacaatgacaggctgataccctattattcgcttcacccgtccctggcggggagtgccatcgtgattgcatcgtccaataacggagccgtggagaatatctcacttgagctccccgggatggaagcggtaccggaggatgtgtcagatcgcagcgattactttggcgggctggctaccgtaatacttaacaggcctgcctggggacttctggcggcaagactgggcaataaaagtaacagagagcagttcgttaacacactgtggtggggaaatctgcagaaaagtgaaaaaggcgatgaagcacctccggagaagttttcacccgaacgtggggaggggctgaaataccatctgaatttactgcgaccgccccggaaagtcagagagcctgcactgacctggactgaggctgtcacacgttttgaacaggcacaggcggtggaggaagccgagcgtcagcaactggtcaccagttcagggctaacgcataaaattgagtggctcgaagaacaacgaagagtgtgggaagaaaggaagcaaaccgcaacatttcagattgaggaatgccggaacgcgctacaggcgctctctgacagactcgccgctatggaaatgaccctgaccctgtccagtggagatcgggacgaactcgatcagcgcatccaccagcatgaaaaaaataaacccggccttctggctaatctcttttcgctggggaggatatcgaaggcatggtgggatcgttatcaacggctgacagacgaatcagattctttgcgggcgacgttgactcagcaacggcaggaactgcagctggcgcaatcagaaaaacataatgcagacaatgaactcaggagccttgagcgtgagctcactcaggtgatcagcaacggtcaggcggtctgtaaagagcaggaacagaataataccttgctgaagcaggctatatccgatctgggagcctcctggccggagcggactgcaacagatgaacgaagggagttgtcagcaccatggcttcatgagcgctggagaaaggcgagggaagatgtgtttatcgcagcattagacgttcaccgggcgtttattgaaaataatcctgtaaaaatggccgctaatatagggcttgcaatggactggttaaaagggcgaaaactgaccgaaaaacaggcgggtctggctctcgactccttatctctggtcgtcccggttatatcaagcacctttgcgtccatgccccggatgttcagggatacaggtcaggaagcgataggctggttgctgattgatgaagccggacaggcacaacctcagcatgcgattggggctatctggagagcaaaacgcacggttctggtaggtgacccaaaacaactggagccggtcagcggtattccgtccactgtagagggggcgctgggaaaacattataagatcccgtcctgctggtggcccggaaaagtctcagcacagatactggcagaccagacgatggacgttggcacctatctgcccgacccggagtcagaacagatttgggtgggctgtccgttacgggttcaccggcgctgtgatgacccaatgttcagtatcagtaaccatattgcctatgacgggctcatggtccacgggaaaaagccgggcctggtggatttccctgaaagcggatggctggatgtgaaagggaggacatgcgagggaaactgggtagtggaggaaggggcggcagtggaaaagttacttttggcgttgcgtcaccagtattcactgacacctgacgacgtgtttctgatctcgccattcaaggactgcgctaagcagcttaaccggatcgcaaagaggctgggattcaggatggacagaacggggaccgtacataaaacacagggcaaggaagctactgtggttatcctcgtgctgggaggcaacataaaaattcagggggcgaaagcctgggcggcggaaaaacccaatcttctgaacgtcgcggtaagcagggcgaaacaacgcatttatgtcatcggcgagcgtgcattatgggagaagcaaccttacttttccacgctgtcccgggcactgggaaggctggatgtgccggtgagcaacagcaacccgcgtgcgatgtcatatatggaagagtacttaaccactgaatggcgctga

SEQ ID NO: 185160 - DNA, 279 bp, Klebsiella oxytoca
atgccacaggcatattcgcttttgctggaactgaatcaaaacacttatctgccggtggttaaagccgagtttgatatctgtatcatcagctgcggcaaggagtggtggcgcttcaggctggtggatgtgaaatctaatgaacgtcagaaaggaatggtaacccggacggcataccggctaaaaccgtcaatggggatcgctgagcaaatggttaacatgatccgcgcctggcagtccgtaccgtaccttaatcctcctgcatctgactactttaggtaa

SEQ ID NO: 185161 - DNA, 141 bp, Klebsiella oxytoca; identical to SEQ ID NO: 102204

SEQ ID NO: 185162 - DNA, 306 bp, Klebsiella oxytoca; identical to SEQ ID NO: 102205

SEQ ID NO: 185163 - DNA, 1989 bp, Klebsiella oxytoca
atgcctggaaaaatcatggctgccttgaaaggtgcgcttcttgggcaaataagcagcgattcaaaattgtcagatgctgctaaaaaagggatgactgacaatattgagaatatgtttaaatcaggtagtgcgttttcaagtgacctttctaagtatgcttcaaatgtaacacaagatggttttagtagctctgacacatatcagaaagccgctcagaaaatggaccaatatagccagtctattagtaataccgaaacaaatgcattcagcaaaactggtggacaagcatctcaactggctatgagtaacagtctgaatattgatggcaatatgatctcagataccatgagaacaccggcaaccgaggattcagtaagagcttgggcgtcagcttcaggtcttaatgcagatgcgatagctggtcagtggaagtcaacacgcgatatgatgaacaggagtaacacgctcggttctgataaaaatggtaatgatgcctttgcaaaggtattacttgaccaggcgcaagctaaaactcaaatggaatccggggaaaccgtcgccaaaaatctggctgatattaaacagacatctgcgatgttcaaaaatgcagtcagcatgatgggagccaatgaacaaattctttcaccagcagcagaaaaattagatcaatttgtggctttgggaagtggtggacagtatgccaactaccaagagcaggcacaaactgcgcccgatacatcaggtgtctcttcagccggagctattaccggtggcatggatagtcagcgaggtctgacatcttctaatctaggacaacaccaggaagccgctagagttcaacctagcacatcaattggtggcatatctgctcaaacactttcaggtaacaatgggcgccagtatgttgaagatgaagctggaaagggggcatcgcgtgttctttcctctggtgatagagacaagctcaattatattagagaaaatatgccggtaggctctccaaaagaaacatacgaaagtgcgaaacaagctggagacgctgctgatgccacaacaggcaaagcgcagtctctcgttctgggagatcctaaatcaagcgattacaaagctagtacacaacagactatgcaaagtttgcagtcagaagaaccccctaaaagcattgatacctttagatcatcaggtgacagaaccagcgatgctgaaagcgcgctggcccaggctgcactgcatgctgccaacgccaataatcaaataggaaccgcaagagagcagagtttagctgagagcaatgcctatagagaaaaatacaatcaaataaccggaagtaatctctccgaggctggagttgaacgcatagttcgacaagccgctgacggaaaaaataatggctttagtggtggtcttaaggatgtaattagtgctgaagttaatggtactggaacaacaggccgaccagttaccggatctgctgactcatcgcttggtaaggagttgcgtgaaaataacggggcaagcgaacatcccatggataaggcgtccgctgcgtttcaaaagacaggagacgctattcctggccatgaagtagcttcagatttagcacaacgtgttgcgggtattatccctggtgggaatgcactggttccagacattggttcgcaaagaaacgtgccgaatgcaatgggtatatcgaacaatagagctccgggctcacttatcagtaatatcagtaataacatacagttaagtcaggctgttgatagtgcttctgttaacgctggtataaatgatgagaaatttaccaggatgtctgatcaaaatcagatgcttaccgaatcagtacaaaaagcattagctaatgattcgcgatatgggcccgatgtagcggcagaatatcctaagtttatagcaagtttacctagtaacatcggtgtaaatgaagggactaaaatgactaaagattttttagataagcatagaaagaattag

SEQ ID NO: 185164 - DNA, 228 bp, Klebsiella oxytoca
atgacaaaatataacgagcttgactcaaaaatactgactaaaattagcgggcatccaacgccattttccagtctgtacgtcaaagatgttgcagaagaatgtatccgacttgcaacggaggagaataaacctgagccctttcgcattctcgatcgccgactccaggcgctacgtaaagctggtgtaatccgcagcacaactaagggatgggtgagggctaaatcatga

SEQ ID NO: 185165 - DNA, 645 bp, Klebsiella oxytoca
atgacaacagaaaccttaagcagagagtggttacagcatcaaatttcagcaattgaaggcgctggcatcactgacagcaacacattggctgctttcaagctggcgctggccgcgatgagtagcaagccggtagtggcggatgaggtcgagcatgttgccgctgtattagagcttatcggtagctttgaggctactgatattgatagcgacacagtagatttacgttttgagatcgctgatatcgacactggctctgacgtatccattactgaatatgccgcacgcggttccgctattatccgcatgctgactggcatctcatcggaattaccagatggttacgttctggaggcgctgaagaacacgcaaaccgagaatgaactggcacgtggccagttattcatagcccagcgaacgctattaaatcagcagcgaaagattgcagagctggagtcccgcaccgtgcagctgccgaaacctaaagattctgacccgggttggaaaattgatccagaatttatcagcaaagttcagaacgcaatagggtacgatgaccaatgcgaatgttgggagggtacaccgtccatggaggtagtagaggccgttttgctggccgccgctggcatcaagatggaggttgaatag

SEQ ID NO: 185166 - DNA, 387 bp, Klebsiella oxytoca; identical to SEQ ID NO: 23295

SEQ ID NO: 185167 - DNA, 483 bp, Klebsiella oxytoca
atgaacaattcatttgagtgcagcaagagaaccgatattaccgaacaaccgcagagccatgatctactcatcgcaaacggaaatgaaacggccaatttgctacgccacctggcaaataacgagatcgactccgactattttgccgttgtctcggaatgcgaaagctacgggcaagaaactgacgcagagctatcaatcacggagtttgcccttcgtgccgctggttacgttgatgcgctggtagagtcactggagaaggccctgcagcgtattgctgagctggataaagactgcagagtatacgaaaataacgtaaaaaatcttcttgaacgtgccggttcagcagagtcctcgtgcgcagaggctgctcggattcttcaaagtggtgagcgcatggcattaactcgcgccatcaccattctgcagggccctggcatctcacattgtgacggcggcattaaaccagatgaagttaacctatga

SEQ ID NO: 185168 - DNA, 690 bp, Klebsiella oxytoca
atgaccaaatcaaccataaccagagagctcgtccactggcttcacgatgctgcaaccgagttcgcttccaccaaactgaaaatgactatgaagcctgatgaggtactggcgctgactggcgctctattggcctcaatggataccgagccggtggggtggactgacgaggccgagctgcgtgacgttgaaaaagatggttgtggctatctgttcaaggccaaccctatctctccgcacgctgatcctcgccgcgtaattaagctatatcgacacgcgcagccagcgcaggtagtgcctgaagaagccactccggacagtatcgaaattcttgccagtggcaggtgtcgtgaccacgtagtataccagtgggatgaagaccaacgaaatgcggccgctgattcttggaacgcctgccgcgccgcaatgctcgaagccgacccccagctacccggcagtgactccgctcccgtgccgggtagctggattccggtaagcgagcggatgccgccacctcgttatgaggtattggtcgggcgttggtggggagagaagccgcggtggtgttgcaaatgggctacgtatatccctggccaccctgattcgcagagtagcggctggttgatccccggcgcgtcatggacgccaactcactggatgccgctgccggttgccccgcaggaggtgttgtga

SEQ ID NO: 185169 - DNA, 186 bp, Klebsiella oxytoca
atgcgcaccatcgaagaacttggcaaacgtgcagcactgttaaaatggaagcgtcagtttggccctttcgaaaaatgtcctgtatgttacggtattctgactggttgtaagttatgtggtggtaacggcagggtgattcaggaagatattgatgcctggaagaacaacattaagaataaattttga

SEQ ID NO: 185170 - DNA, 273 bp, Klebsiella oxytoca
atgaagcttactaacgcacagatctacacactacggcgattatccggcgggagtaaatatcagctccgtggtgacggaaaaaaggcacgggaatgcaggccaggatctgggattttcacagatgatttttctgcgccttctattcctgtcctgtttcgtctcgggctggtggactatgtacataagggggtgagagaacacaccttgttttatgcggtcacgcttaccgacacggggaaactagccgctgccaccatgaatatcaaggattga

SEQ ID NO: 185171 - DNA, 450 bp, Klebsiella oxytoca
atggtaacggaaaaggagttgattgaatttgaccttctcagaaaggtcggcagtcgctggaaataccgttattccatcggcgcaaaatatctctttgccagcagtaaagaaagtgctgtcgaacaagcaacacaagcattcaggaaagcccggccaggtgagcttttaacccgtgacgaacggtatgagaaagcaaatcaggaggaaatcaggttgtcagacgttcgctggaaacacctcagcctcgacgatttgtacgcgctcctgaaccggatgaatggcgataagacaacgctacaggacgcatcctcccgcgagttcacaggaaatggtggacgccgtacatcagctgccgtggctgctcagggagcccgtgatacggccatcatgtgcggatgtcttgaacgttacattgtgtggcggcggcgaaatacacatttcagcgactga

SEQ ID NO: 185172 - DNA, 609 bp, Klebsiella oxytoca; identical to SEQ ID NO: 23282

SEQ ID NO: 185173 - DNA, 456 bp, Klebsiella oxytoca; identical to SEQ ID NO: 95508

SEQ ID NO: 185174 - DNA, 165 bp, Klebsiella oxytoca; identical to SEQ ID NO: 23280

SEQ ID NO: 185175 - DNA, 1242 bp, Klebsiella oxytoca
atgactactgcaactatggcaactccagctaaagccaaaaacgaaaatgtttctctgcgtaccttcttagaaaaaaatggtatcggtggtcgtctgggcaatggtcttgttatggacccgacgcatctgaacatcatccctggctttaacacacgtaccgctggcctgggtgaggcttactgggaactcccggaagttaaggaccacctggcgcgtctggctcagcaatatgccgatagccctctggaaatggcccctatggttgtccaggttcgtgatggtcaggttgtcattcgtcagggacactgccgtcaccgtgcaattccactggctaataaaattcgcgcagaacggggtgagggcccggttgataaaattcgtgttgacgaattccgtggctctgacagtaaagcagaactttttaatcttaaaggaaacgatcaacttccggtctcgatcgttgctcaggctgagtccatgtatcgcatgcacaacagcgcagaagagcctatgagcatcgaagagctggccgcagaccgtaaagtctccgtaacccatgtccgtaaattgctcaaagttcacaccgccccggaggcgttaaaaggtctgatcgttaaaggtgtagtagcatactacgcagcactcgaagtgatggagaaatacccggataactgtgtcgctatcattcaggaagcgtttgataagtttggcaaagctaccgacaaaactattggtcaggtccttcttgctaagcgtacaggtgaaaacggcactaatggtgaatctgatggcaatgtgacaaccattacaacgactgatgcaggtaacggatctaatagtgcctctgacgcggctggtggtgtcattgatagctctgcaggcaatgatgcaggagttgcgggtggcggttcagaagaaggggaaggcggtgaaaaatccgaaccgaaacggacccctgcggcgaaacgcgaacctaaacaaaatatcaaatctcagccgtcggtgttcgacgtgctgccgaaaaaaatctcaaaagagattgtagataactctcttgatgttattaaccgtatcgttaccgaagcgaaagaaattccctttatggaagacggtgcagaggttctcgctaaagcccagtatcaactgacgttaacctatgaagagtttttgttgctgactgctgccaaagacagctacgataaacatctggaaaaaatccagaaaaaaaactcagagcaataa

SEQ ID NO: 185176 - DNA, 183 bp, Klebsiella oxytoca
atggttctttttttaaattatcttacaaatatcatgcgaagattttttgatattgttctgggtaaagacccacatcgctttatcgtggtgttaatcctgagccttacactcggctttgtttttaatttactcctaagatatatttcaccgctggttgcgtcgcagggatttaattgcgcgtaa

SEQ ID NO: 185177 - DNA, 396 bp, Klebsiella oxytoca
atggcatttataaagggttctcttttttttattattatggtgctattggtctacggagccacgggattaaacgccaaagaatcaattgtgtttgctgcatttggttttgggatttcagcgatattatgttcattcgtaggcattatggttgtgttggttgtgactatgtgtttgtttgcattcgaagaacttggcgcgttgcctagattatttggtgcccagataattttaattgctttgtggaaccttatatttaccgtggttttgccggatggaaaagcacgcaccatactcggttttgatctctacaatatttcatcgtatttgctttacggtatgaccgtccttttaggtataggctcggtggcaatgctttttaacaaaaataactcctga

SEQ ID NO: 185178 - DNA, 408 bp, Klebsiella oxytoca
atgaaaggtatcaatcaatccaatggtaaccatttaaagtttctgtatggagtgacctctacagatcgtcttattcagcacgaacatgccgataaattcattgatagctgcattaaaaatattggcagcattcataaaatgtccctggcttgttatcgggctggtggaccattaactgagctggtgcttttttacggttcggacaaaacattctcaatcaccattggcgttggcgatgtagatgtttccatggttaatgaagacgatgtccgaatttctcacaaacaaatcactttgcctgatacgaccgatacattaatactcgttactcgcattgcaagacgtagtgggctgaagccgatgttacctgaagcagaacaattcagcacagttttagactttgtttga

SEQ ID NO: 185179 - DNA, 411 bp, Klebsiella oxytoca
atgacgcagagtgaaattactgttaattctttttgggattggggaacttcattattaacaagtaacgcagctgtaatattttatgccttgcttgtggtattggttcttggcgctgttttgtttaaggacttttctttactgacaacatttgcttccggactggctggtattgcactcctgtgtggagttatgtctgtgctggtggttttggttttggcaagcgaccagaaggaacaggactggcaagactttgcagctgagcattgcaaagttatagaaaaaagagaaggtgctaccacgacgggagtgggtgtttcactaaaaggtcaggctggtgtttttattggaggtgaacctgaccagacagggtatctctgtgacgatggtgtaacgtactggaagaatgaataa

SEQ ID NO: 185180 - DNA, 489 bp, Klebsiella oxytoca
atgaatcttgataaaagcttacctgctttagtaatgaaaaatgttgaggataacatgggggttattaccaaatatctcaagcaaacagaagataacgctcttgtatttattattggagaaacagggtctggtaaatcctgtttggctgaacttgagtttccggatgctctctacccgactgctcaacaatttgaagaatgtgatcacatttcggaaatgttcacaggttttgatgtagtgattgatgacattttccgttttgatgctgacaaagtcctggagtgtattctggctgtgcatgcttctggccataaggttctggtcaccggacaaccgtcagaccatgaattgtgcattggtttaatgtcacgcttgccagtgggttatagtactatgtacgtgactctgatgggccatcaagacctacaagagatgtctggcgatggcaaggacaagggtaattcggaaacaaaaaacctcctgcattag

SEQ ID NO: 185181 - DNA, 414 bp, Klebsiella oxytoca
ttgaaattcaataacaatcaaaatgaaaaatgtctcaataaggtgttgagttatttttcagaaaaagatactaaccttattgtcgttataatagggccttccgggtcaggaaaaacccttctggcgaagcgtgcattatttgatggtttatttatttcaccagatgagccgatagctggtgagaattttattcagagtttatcaaataaagatatcatcgttgatgatgttgtcctttttgatatgcggaatgtgttgaaatacgttcttcattcacttgcctcgggaaggaaagtgattttgaccgggcgtccggaagatgagtctttgtatcagaagcttctgttaaatttgcctaaggaaatttcaccattatttattaagctggcgggtgaaaattccttgtatctgtga

SEQ ID NO: 185182 - DNA, 519 bp, Klebsiella oxytoca
ttgaatcatcctgtagagtcagtatatagcgctctgacgagtattttattgccctatatgggtgagcctgtgcctgtgcaacgaaattgctcatgctgcggcagagcgccctcagagttcgacggggtaggcttcgagctggtcaacgcctacagggaacgtgttgtgcattgccgcccttgccagacattttttgtttctgctccagagctgatgggcgtggagaaccccaaaaaaccaacaaccggccagaaatttggcatgtggtctggtgttggggctgttattaacgttgaagacaattcttctgttcttttagcccctcagggagtggtcaataaactacctgagcattttttcgatcacgtagaagtcatcacggccaagcgaggaaccgggcaatgcggtaacgcgttgctaccctacaaagggaatccccttcctgattcacgtagtgagaagctgggggaggatgtcaaatcttgcaggttgcaatcagaaaaggccttacgtcgataa

SEQ ID NO: 185183 - DNA, 444 bp, Klebsiella oxytoca
atgtcaactatccctcaattagctaagctgggtttttcctcagatgttgttcctgtgatcaataccccagcgcccaatatgactcgcggatttgagcgctttcatatcagctataacagttcatctgccgggtatggctgcgatacaactgctctggttctggatggccgtgtgtttttcgtactgaacggggaccatgcctgtgatatgaccaaagctgccgcagcacgcggtatcgatggctgcattgacgtcttcatagaccgtatcgagtcggctagtcgacacagcgagcataaaatggcaattggtctgacaaacgatgagttcggattgatgccgaccgcgctcgctgtcatcggagaagagaacatcctccgtcttctatctgctgtgacaggaaacgctcaggacttttcagcgtacggtattaatcaggattaa

SEQ ID NO: 185184 - DNA, 204 bp, Klebsiella oxytoca
atgaaacttgaagatttaacaggtgacgaccgtactctggttgtagtcgctctccaggctcttttccgggagcgaactaactcatatcatgcagcctgcaccgcctgccagcttgcaggcgagaaaccaccagctgagaatctttttggcgtggaggaaagtatttcggcaattcgccggatgggagctctcccgcagagatga

SEQ ID NO: 185185 - DNA, 273 bp, Klebsiella oxytoca; identical to SEQ ID NO: 23332

SEQ ID NO: 185186 - DNA, 435 bp, Klebsiella oxytoca
atgacgcaacaattttctcctccgtatgaggtggtggaaatgtcccggcgtatttttgaaaatttaatctccagtactcttaagacatctgataccacaggaacctgcatgtatggttcgattctggtttccatgctactggagaaattttctggggtcaggacgcgtatcgccggtggtgatggtgttggtgatggcggaattgtcacccctgaaggcatgaaagggcattactgggttgtcgctaacgttcatggcatgcactttattgtagatataactgccgatcagttcggtatggacagtatcatatacaaaggtcttaaggatgcctcggagtacgtggaagggcaccaggctgtagtagatgagcatgttgctgatagttttcagaagctttttcaaagctactcttcagaggatacccggctatga

SEQ ID NO: 185187 - DNA, 744 bp, Klebsiella oxytoca; identical to SEQ ID NO: 95370

SEQ ID NO: 185188 - DNA, 1416 bp, Klebsiella oxytoca
atgtctgaatttgattcccttgcggaagagctggtggaagaggcacgtaatgaagaggccagacaacagcaaagggacctgtccctgatagggaaagtcgttgaaatctatgatcagaagtttgttgccgaacttttgcgtaagctgggaaattcagactggaccagggagaccctgaaccgctggattaacgggaaatgtgggccacgttcacttaccgtaactgaggcatcgcttcttgaaagactgctcccgcagccgccagcaaaccatcccaattatgcttttcgcttcatcgatctcttcgccggtatcggcggtatccgtcatgggtttgaagccattggcggccagtgtgttttcacaagtgaatggaacagctattcagtcaaaacttataaagcaaactggtactgcgatcccgaagcgcatatcttcaattcggacatccgcgatgtgacactcagtcataaggaagatgtcagcgaagaagatgcctacgcccatatcgataaatcgatacccgatcatgatgttctgctggctggtttcccgtgtcagccctttagccttgcaggtgtgagcaaaaaaaactcacttggccgtaaacacggttttgaatgtgacacccaggggaccctattctttgatgtggctcgtatcatcatggcaaaaaaaccggccatctttgtactcgagaacgtcaagaacctcaaaagccatgataaagggaaaactttccgtgtcattatggataccctgaatgagctcggttacgacgttgctgatgctgaagctacaggtgcggatgatccaaaagttatagatggtaagcatttcatccctcagcaccgggagcgtattgttctggtgggcttcagacgtgacctgaatttaagtcagggatttagccttgctgacatttcttcgctgtttcctgaaagaaaagtgctgttcagagaactccttgacagtgatgttgatgataaatacacactaacgccaaagctgtgggattatctctataaatacgccaaaaaacaccaagagaaaggtaatggctttggctttggcctggttaaaccagacgatgataaagcgatttccagaacaatatcagcaaggtatcacaaagatggcagtgaatcgcttgttgatcgtggttgggatagcgaactcggtgaaaaaaactttaatgaccctgataacatggccagacgtcctcggcgtctaacaccgcgtgagtgtgcccggctaatgggatttgagcagccagggaaagtaacttttcgaatccccgtatccgatactcaagcttaccgccagttcggaaattccgtcatcgtgccggtctttgatgcagtagcgaaattgctggagtcacggatcatcgaggctgtaaaggcccggaaataa

SEQ ID NO: 185189 - DNA, 1203 bp, Klebsiella oxytoca
atgagccttctggcggagtggttgcaaacaaagtgttctgcgaatgtttgggtatacgttaagcgcttatccgcgaacgataccggtgctacaagatcccaccagtctggtctttacatgccgggagccgtcattgatgagctgtttccttccctccgtgatactcagttaagaaatcctgaagctcttttttctgttcacgtgtcatctcatcctgattgccctgaccttgatgatgtaagggccatttactacaacaataaatttttcgggggcacccgtgatgaaaagcgtctgacgggctttggtagacaaaatcctctccagaatccggagaataccggcgctctggcacttctcgccttcgaccatgtgcctggaacatcatccagttattgtgatatctgggtctgcaaggacctgaccgaggaagatattcttgaaccaattattggtgaagttatcccgggagcaacgatatttggtccgggagataaaataattggagggttcgttacagaaacttctcctggcagaacaaagtataagcttccacccgaatggactcaccacttcccttcaggaagggagattattagttttgccgcatgtcattacgatagaacaactgacgacccggactcacaactgacgcggaggaggaaaattgagtttgaaatttttcttgccgttgaggaactgcacgtgctgggtcagatagccgaaggctttgctacggtgaatgattttattacgcttgctaattcagtgagtaaccggaggaagtctcgtgccgggaaaagtcttgagctccatcttgaatctcttttcaaagaacacggtgcaacgagctttgaaacccaggctatcacggaaggtaagaaaaaacccgatttcatctttccttccggtgctgcctatcacgatcctgattacccagctgaacggttacgcatgttgggggttaaaaccacctgtaaggaccgctggcggcaggtactgaatgaggctgacagaattgatacagtacacctgttcaccgtacagcagggcgtctctgtggcccagttcagggaaatgcagtctgaggggatacggctcgttgtaccggtagggttgcataaggcctttcctgaggaaatcaggggtgagttaatgtcactatctgcgtttattgatgaaatcaaaaaactctattggtga

SEQ ID NO: 185190 - DNA, 249 bp, Klebsiella oxytoca; identical to SEQ ID NO: 95373

SEQ ID NO: 185191 - DNA, 318 bp, Klebsiella oxytoca; identical to SEQ ID NO: 95374

SEQ ID NO: 185192 - DNA, 294 bp, Klebsiella oxytoca; identical to SEQ ID NO: 95375

SEQ ID NO: 185193 - DNA, 663 bp, Klebsiella oxytoca; identical to SEQ ID NO: 95376

SEQ ID NO: 185194 - DNA, 309 bp, Klebsiella oxytoca
atgggcaacttttattgggcaatttgccatcactgtgatggccacggtagcatggacaaccctgcattttcagatggttttaccaactctgaactttacgatattgagccagaggaacggcaaaggatcgttaacggtgcctatgatgtcctttgcactacctgtaaaggcagcgggaaagtgaaagttccaaatatccgcgagatgtctttcggcgaaaaaagagcattagtggaaagacggcgtgagcagcgtgaactcgatgagctgagccaaatggagaaaatggaaaggatgatgggatgctga

SEQ ID NO: 185195 - DNA, 435 bp, Klebsiella oxytoca; identical to SEQ ID NO: 102267

SEQ ID NO: 185196 - DNA, 156 bp, Klebsiella oxytoca; identical to SEQ ID NO: 101624

SEQ ID NO: 185197 - DNA, 621 bp, Klebsiella oxytoca; identical to SEQ ID NO: 95378

SEQ ID NO: 185198 - DNA, 219 bp, Klebsiella oxytoca; identical to SEQ ID NO: 100647

SEQ ID NO: 185199 - DNA, 273 bp, Klebsiella oxytoca
atgtcagctaactttaattgtcagattgtttctaccaaacagagtgaggcagttataactggcgaagatgccgttactactatcttggaacaactggaatcagcaggcatccaggtggaatcacaatgccgttctggttattgcggtgcatgtcgactcaagaaaaaatcgggtgatgtgaagtatgataatgacccgctggcttatgttgggcaggatgaaattttgccttgctgttgtcgaccttgtggcctcctggtactgtatatttaa

SEQ ID NO: 185200 - DNA, 312 bp, Klebsiella oxytoca; identical to SEQ ID NO: 23408

SEQ ID NO: 185201 - DNA, 318 bp, Klebsiella oxytoca; identical to SEQ ID NO: 100650

SEQ ID NO: 185202 - DNA, 390 bp, Klebsiella oxytoca
atgttagagaaaatttattaccttgccctttttctgattgcgatttgcattattcgcggtttcgttttcgcatggagcagacgcagtccattggccctgacgttgaccatcagtgccctggtgatttgtctggctttccatactctgaataactccgtagcaacaagtatggatcagatattgtccggtaccagggactttacacagtgtgacttcattgaccagcaatcagctgaaatcagcggtcgtggctatccggtcattgtcctaatgtgcgatgactgtcaacaggttgttaatgctgacgtttattcacgacagctgatgcagaatcaggattgcaacacgttcaggtcggtgacaagttgtcacttactgccagaaaagtaa

SEQ ID NO: 185203 - DNA, 507 bp, Klebsiella oxytoca; identical to SEQ ID NO: 168577

SEQ ID NO: 185204 - DNA, 228 bp, Klebsiella oxytoca
atgtctcttctgaatctggatttaattgaagccatttactctgatgccgagcgtgaactcaccaatgatgagttatatagggaggtacagtctcgcctttcaatttcagataatgatttcaataaaaaagaaaaattcggtttggccggtgtgccgcataacaaaataaaacaccgtatccgttggttccaacagacgctaaaagctatgaacgtcattgagcgctga

SEQ ID NO: 185205 - DNA, 423 bp, Klebsiella oxytoca; identical to SEQ ID NO: 23267

SEQ ID NO: 185206 - DNA, 123 bp, Klebsiella oxytoca
atgtatgctctggcggatgtgaacagcttttattgcagtgttgagaaatgcttcagacccgatttacgcgataaaccagtggtcgtcctttctaacaacgatctgagtggtgagaaacgttag

SEQ ID NO: 185207 - DNA, 549 bp, Klebsiella oxytoca
atgagtattgagaaagaaatttttgtatcggtagatgtggaagcttcaggccctattccaggaaaatacagcatgctttccattggcgcatgcgtggcttttgatccctcccttcacttctcatgctatctcaagccgatatctgatgaatttattcctgaagcaatggaggtgactggattatctctggaacagcttcagaaggaagggttggaacctatagaggctatgaagcagtttaaaaactgggtcaactcactggttaaaaatgacgagacggtggtttttgttggttttaatgcttcatttgactggagttttatcaattattattttcattcatttctgggggggaatccatttggcattgcggctctggatatcaaatcgatgtacttcggaacagccgaggtttcctggaaagcgacacgttccagtgaaatcgcgaaaattgtcaagccagaaagttttggagaccatgatgcattgcatgatgcgagataccaggcagagctttttcgcctaatttatgagttaaatagaaaatga

SEQ ID NO: 185208 - DNA, 456 bp, Klebsiella oxytoca
atgagtaaaaacgtaagttttcccagtgaacatgtctggcgatattttgaattgcatgcacaacaaagaatgacagtgttcaacttttacattgcgattactggtcttctggctgcaggcatcggatttacccttcagcaaggagggcgatttgctctttttacgacattgatgggggtatttatctcgtttatttcattcattttctggaaactcgatcagcgcgtgtcaatattgataaaaaatgctgagcgggcactccaggatattgaagatcaatttaatagtgccaacatgaaaattattaccggagatagcgagaactatgatttaaataaaggaatgttttctacctggacctatggtagatgctttcggctatcatttttcatcgttggggttgcgggtttaatgttagctatcgccccctttctgatgaaatcctcaggtgtctga

SEQ ID NO: 185209 - DNA, 561 bp, Klebsiella oxytoca
atggagattaatggtaaaaaaataacaaaaaggcaactgaatgaagcgaaaatatcgaatgctagctactataattgtatttttgaacgtattcaactagacaatataaaccttcgcgattgtgagtttgaaaattgcctgtttataaactgctcattaaaaaccttgagtctcgatttttttaaacttattgattgtgagtttaaaaattgtttactacagggtgtgaatgtctctgatattatgttcccctgtacgttttctcttgataattgcgaaatgagatttattgacttagtcggtttgcgattgcagaaatcaagttttttatttacaaagttcagagattgtttatttgaagaaactgatctccgtaaatctgatttcaccgggtcggaattttataataccgaattcaggcattgtgatttatctcgctgtgacttttcatcgactgatggccttgatataaatcatgaaataaataagatttcttctataaaaatccctcaggatgccggttttaaaatccttagaaggatgggggttattatttcataa

SEQ ID NO: 185210 - DNA, 729 bp, Klebsiella oxytoca
atgaccataccacttttagaaataaactcccttagcttttcatacaaaggccatcctcctgtattcaataatctgtcgcttgaaatagagcagggaggactgataggtctgcttggtgaaaatggggccgggaaaactaccctctttaacataataaaaggggggagcgacaattatgaaggttctgtcaaacgttacttcactggtggtgaaatggtaagtctgcctcaagtgataaatctttccgggacgcttagaaatgaggaggtttttgatctaatttgctgttttaataaattgactaaaaaacaggcgtgggcagaacttaacagtaagtggaatgatgatttttttatccggtatgaaaaaataagacataaaagaacctatacggtaagttatggtgaaaaacgatggcttataatatccctgatgttaactctctgtaaggatgcccgtttctttttgctggatgaaccaacggttggtattgacattcaatacagaatgatgttgtgggatcttattagcgaaattgccgctaatgggaaaactatttttttctcaacacatatatttgatgaacttaccagggggtgtattccattctatatgttgtctaggaatggtattaagcactatactgatatggataatttcatgcatgtaaacaacgaaaatacgccagaaaaggcttttatcaaagaaattatgggagcagagggttga

SEQ ID NO: 185211 - DNA, 726 bp, Klebsiella oxytoca
gtggcaacattaagaatgacgattatttttttaatggaacaaatcagagctccttttagcataatatggactattatgtctccaaccgtgttgttcttttttctgcatttcaatgaaattgaacagcatttcggtgatacattatggctgaggcatcagatatcgtggttcgtaggatatatttcattttctgttgttctttttaattactgtctgtatctgacaggcagaagagaaagtggttttattgctacctttgtccacagtatagagggtcgtttgttgtttattcgttctcaattgatggcttctcttatcatgtcagttatgtatgtgttattttttattacagtcgtattcattggattccaggcacggccagactatcagacggttatattaattttaagaactatatgcataaatgtgatgatgatgatttcactgacgtttatggcatcattccgtgtgactttccagacagccagcactatctattccgtgttgataacggtgtgtatggttttagggatcgtatcattaaaatataacgatggactagtttactggattaatatcataaatccgattgccatatactccacacttctccagccaggcattgagttatcgtacatcactattttagtctatggcctcatgtttatcataagtctggtttcagcgctgaccttcaaaacagaaccagtgtggagttctcaatga

SEQ ID NO: 185212 - DNA, 1188 bp, Klebsiella oxytoca
atgattaatgtctacagtcacctgatgtccgcatggccagccacaatggtcatgagcccaaagttgaacagaaaaatgcccaccttttctcaggtatgggactacgagagaattacaccagccagtgcagctggtgaaacactgaagtcaatacagggagccataggtgaatactttgaacgccgccatttttttaatgagatcgtagctggcagtgaaaaaacattatacgaaatgatggatccgccagccgcagatgcttttacagaagcgtttgttcagacttcttcgctgacagaggatgcggtcagaacccacagattcaagactactcgcgccttcaatctgtttagcctggagaaacaagaaatcccagcggtcattattgctctcgacaatataacagctgctgatgacctgaaattttaccctgacagagatacatgcggatgtagctttcatggtaatttaaacgatgctatggacggtgccctgtgcgagtttatggaaagacagtcgttactgctttactggttacagggaaaagcaaacactgaaatttctggagacgttataacagggatcaactatatagatgaaattttagtagccctcagagctgaaggtgagctcagaattttcgatatcaccctccccggagcgccaggacacgcagtactaacgctttatggtacaacaaataaatgtagtcagataaaatatagtaccgggttatcttatgccagtagtctgaaaaaagccctgtgtaaatctgtaacggaactatggcaatcatatatatgtatgcacaatttccttattggtggctataccgatgaggatatcattgacagctatcagcgccattttatgtcatgcaacaaatatgagtccttcactgatttgtgcgaaaacaccaggctgcggcataaggatgtcatattgtctcttgaaaacaatacattagaaggtgatttacttagctacctagaaaaaatatctagtaatatttttgtttactatgcgagagaaagaattagcgaccatcttgtctggtatgcaaaaatagtaagccctgattttttccttcatatgaacggttcaggagcactaaattttaacaataaactatactgtgccggaaacggtattaaacaaagagaatctaaaatggttccatttccataa

SEQ ID NO: 185213 - DNA, 807 bp, Klebsiella oxytoca
atgtcaaaacatgaactctctttggttgaagtaacacattacactgaccctgaagttctggatagtgtaaaggattttcatattagagggaattttgcctcccttcccgaattctctgaacgaacttttgtttcagcagtaccgacggcccatcttgataaatttgaaaataaagaagttcttttcaaaccgggcttcagttcagcagtgaacacctccccctcacttcacttcagcagggaaagatgtccatccggaattggcttttgcgacagaaatagatgttctgttcacactattgaaaagctgctcgttaatgcgttcagttctcctgatccagcctccgtcaggcggccttacccttcaggtggtgctcagtacccaattgaggtttttttatgccgattatctgaaaacacggaaaactggcagaccggaactaacgtttatcactacctgccactaagtcgggcattagaaccggtcgctgcgtgtgatacccaggagctttaccgaagcttgtccggtggagatgcagaacgtctcggtagaccccattttgcacttgtctattgcgtcatttttgaaaaagctttattcaagtaccggtacagaggttacaggatggccttaatggaagcaggttcgatgtatcagaatgcgggattggttgcagatcaaattgggctaagaaaccgcgtatgggcgggatttactgattcatacgtagcaaaaaccatgaatgttgaccagaggactgccgcaccgctgattgttcaattttttggagatgtcatcgatgattaa

SEQ ID NO: 185214 - DNA, 855 bp, Klebsiella oxytoca
atgttgaatattctgccatttgagataatttccagaaatacaaaaaccttgctcatcacctacatttcttcggtggacatttcccatgagggaatgaaaaaaatcctagagagcctgcatacccaacggggtattattcctgaatcctaccttgacgaactactggattatgaggctattgacaaagacaaaggcaaagagtttcttgtaacaactggcgtgataaacaaaactaaagcatcgtctctctgggaacattcggtcataataagcgatgttccgcaccttttcagggacgtagaggaccaatggaaagcggatggaattctagtttctcatgtccaggacgtacgagaactggattttaatttacccgactcgacgttgatctggttgcactttgaaaaatatgacccagagattatccagtcagtgtacactaaattcgagaaaaataatggcgttgcattcatacaaagctactacctcaaagaatcgttcagaatagatggagtatattcgccagtacttggaacaccttgtcatttttgccacattgagagatggctgaacagggaagaaaaaagcttcaggcgcaatgaaatgtcttgggcaaatctgcttaagttaatgaaaaaacaaaaaatgtcgctgccagctctggctttaagtgagtcagaacgagggttcagccagcatttgattaaacggaggcttcaggaactggttggcacctcactcgttaaaagtcatgtagataccttcatgtcatctgtgagtgcagatttaattacctgcgttctgagtaaagagccggtaattcactggcaggcttgtggttgcgtggagagataa

SEQ ID NO: 185215 - DNA, 210 bp, Klebsiella oxytoca
atggaattaaaagctagtgaattcggtgtagttctgtcagttgatgctcttaaactgtcccgacagtctccactaggaattggtatcggcggcggtggcggtggcggtggcggcggaagtagtggtggccagggcggtggttgtggcggttgcagcaacggttgtagtggtggaaacggtggcagtggtggaagtggttcacatatctga

SEQ ID NO: 185216 - DNA, 276 bp, Klebsiella oxytoca
atggatgatgggatcagcaccgatggcgaaatgggaaaaatggtggtcactattctgtctgcggtgtcgcaggccgaacgacagaggatacttgagcgcacgaatgaaggcaggcaggaagcaaaactgaagggcatcaggttcggtcgcaaacgagttgtagacaggaggaaagtcttggaactctacagtgaaggtatgggagcgacagaaatttcacgccaagtaagtgttgcacgatctacggtctataaaattctttctgaagagagatga

SEQ ID NO: 185217 - DNA, 261 bp, Klebsiella oxytoca
atgacactcactgcatattaccagctaaggaatacaaaggccgcaggtcttggtttcgaattgctgaccagtgaaccgggagcctttattgtgctggaagaatgcagttatgagaaaccgtatgaaattgcccgctatgggcataacgggagtgcaggcgatcgttcgaatgcgttcagctgcgcgatgaataaagcccgtagtctgcagaattacagtggagcaaagctggattacaacgtttacgaagaaactgcctga

SEQ ID NO: 185218 - DNA, 2496 bp, Klebsiella oxytoca
atgagtggtggtgtaaaaaatagcaaaaaccctgcaggagacgaagcggctagttgctgtgaaacgttcaatttagggacaggactccgggttaagaatactggtgaatcacataaagcaaatgatcatgcacatgatcagcaggctcataatcacaagaaatgcagtgatgatcattcccatgaaggtcataaccatgaaggccataaccatgaaggccataatcatgatgcccatagccatggcggcgaagggcattcgcatgatgagcataatcataagggatgtaaccatgctcatgccgcgcaagagcattctcatgaaggccacgatcacggccatgagggggattgttgctccgctgctccagaacaattgagtagcctagggggctcgcaggttgtggctggtggattacggacagaaattcgcattatgcagatggattgtcctgttgaagaaaatcttatcaaaaagaaactgggtggaatgagcgctgttaaagagcttgatttcaacctgatgcagcgtgttttgactgtaacccatacaccggattcgcttgaagctatcatggctgcaattcgctcgttgggattcgcgccagaagtctctgataatactagcggcaagaaaaatacccaggagaaaaaaaagccctggtggccattagctcttgctggcgtagctgctcttgcagccgaagtgatgcactgggctgatatgcctgactggctagaagctgggttggctttgatagcagtgctttcttgtggtctgacaacctacaaaaaaggttggatttcgattcgcaatggcaacttgaatatcaatgcactaatgagtattgccgttactggggctttggtccttgggcagtggccagaagcggcgatggttatggtgttattcaccattgccgagctgatagaagccaaatcacttgatagagccagaaatgcaataggttccctgatgaacctgactcctgaaactgcaatggtccaacaagctgatggaacatggcaggaagttgacgccagtagcgtacaaccgggcagtattgtcagggtaaaaccaggtgaacgaattggtctcgacggagaaatcgtcaaaggccaaaccaccattaaccaagctccaattacaggtgaaagtatgcctgtcgataaaattgcgggcgatgctgtatttgctggaacaataaatcagtcaggctcttttgaatataaagtcactgcagctgcaaataatacaacccttgctcgcatcattcatgccgttgagcaggcgcaaggcgccaaagcagctacacaacgttttgttgaccgcttttcccagatttatacccccgtcgttatgggtattgctgttgcggttgctgtattgccaccattgtttggggcaggaacatggcaggagtggatctataaagctttagttatgcttgtcattgcgtgtccatgtgccctggttatttctacgccagtaacgattgttagtggacttactgcagctgctcgcaaagggattctcattaaaggcggtgtttatcttgagcagggacgtaagctaaaagcccttgcgctggataaaacaggaactattacctatgggaaaccagtacaaaccgacgtaatggtattcaatgggtggagcgagcgtgaagttcgtactactgcagctagtctcgctagttactctgatcaccctgtttcactggcaattgtgaatgcttctgctgatttgaaaaagcaggatgttgacagctttgaagcgattgttgggcgaggtgtgcatggcgcgattacaggtaaggatttttaccttggtaacctgcgtttgactgaagaacactttaattgtccatcagagattaaagcaacagtacaaaggctggaaagccagggtaaaacagttattttactcaatgatggtaagcaagtgcttgggttgttcgctgttgctgatactgttaaaaacagcagccgtgaagcgattgaacaacttcatgaacttggcgttaaaactattatgctgactggtgataacccacatacagctaaagcaatcgcatctcaggttggaatcgatgaggctcgagggaatcaattgccagaagataaacatcgtgcagttgaagagcattcacggattggaatcactgggatggttggtgatggtatcaatgatgcaccggctctggctgcagctgatatcggttttgctatgggcgcaatgggtactgatacggcgattgaaactgcagatgtagccttaatggatgatgacctgcgtaaaatcccagcctttgtaaaattatcccgacaaacgtacagcttactcgtgcaaaatatcagcctcgctctaggtattaaagccgtattccttgtactcacgctcatgggaatgggaactatgtggatggctgtatttgctgatgttggtgccagtcttctggttgtggcaaatggcctgaggttattacgaaaataa

SEQ ID NO: 185219 - DNA, 453 bp, Klebsiella oxytoca
atgaaaattggtgaattggcccgtaaggcggattgtccggtggaaactattcggtactatgagaaagaaggattacttcaggctccattaagagatattgaaaataactatcgccgttacaacaatactcatctggaaaagttattatttatccgacgctgccgctctcttgatatgacccatgaggaaatacgtgcattgctactggcaatgaataatcacggtaaagactgtggccccattgatgcaataatcagtgcccatctcactcatgttcagcatcgtattaaagaattaatagccctggaaatacaactcaaagaacttaataactattgcagctcagaccggagcgtggacgaatgcgggatagtacagaaattgactgctgatgaagagaatggtgatcttcctttaaccgtaccaactgaccacttggggggtgtgcattag

SEQ ID NO: 185220 - DNA, 465 bp, Klebsiella oxytoca
atgaacattggtaaagcatcgaacgaatcaggaatctccgcaaagatgattcgctattacgagcaaattggtctgattcctgctactggccgtaccgaagcgggctaccgtgattatgcacccaatgatgtccatcgtctgatttttatccgcagtgcgcgcgatcttggtttttctcttgaagagatagccgatttgctcaagttatggaatgacaaatctcgccagagcgccgatgttaaacgtctggcacaagagcatatggatgatttagagcgacgtatggaaaatatgcgacgaatggcagatacactcagagctctgatcaaaagctgtgctggggatgagcgagttgaatgcccaatactccagacattaatgaccgctgatgctaaaagccatcccggtaagagagaaggggcagtgcaacgtcgttctcgtggtaacgaaatggaaaaagcctga

SEQ ID NO: 185221 - DNA, 2496 bp, Klebsiella oxytoca
atgagcattcaaaaaaaacagcattctaatgatggtgaaactcaagtcagcttgcccattgagggaatgacttgtgcaagctgcgttggacgagttgaagccgctctggctaaggttgaaggcgtacaaaacgtaagcgttaaccttgcaacagagcgtgcagatatccgcctaaatgcattcgttaatcgtatggcgttggttgaagcagttgaaaaggttggttatgaggttcctcaagcttctgtagagttatcagttcagggcatgacatgtgcatcatgcgtagggcgtgtcgaaaaatcgctccgagcggttaaaggtgtaaaagaagccactgttaatttagcgactgaaagagctactgtacgtggaaccgcaggagttgatgacctcataactgctatcgaaaaaatcggttatgaagccagcctggttgataaccaaagccagaataatgatagtgccgcagaaaaaaaagatgctgaaaaggttgcgttgaagaaagatttagttctggcgaccgtacttgcgttaccagtatttattctggaaatggggtcgcatgtgataccgggaatgcatcaatggataatggataccattgggctccaggaaagctggtatctccagtttgtattaacattgctggtgttggctattccggggcggcgcttttacctgaaaggtattcccgcgttattaagacttggcccagacatgaactctctcgtctccgtcgggactctcgctgcattcggttattcaatgattgcgacctttgctccaggtcttttgcctcaaggtaccgtcaatgtgtattacgaagctgctgcggtaatcgtcgctcttattcttttaggacgatttatggaggcgcgagctaaaggtcgaacgtctgaggctatcaagcgtttggttggattgcaggccaaagaggcgcatgtgctgcgtaacggcattgtcatcgatattcccattagtgatgtagcccttgatgacattatcgaagttcgaccaggtgagcggatacctgttgatggtgaggtgagtgaaggaacaagttttgtcgatgaatcgatgataacgggggagcctatccccgtcgagaaagttcccggaagcttaatggttggcgggactgttaaccagaaaggagcattgaggttgcgtgcaacagccgttggtggccagacgatgttgtcacaaataatcagaatggtagagcaagcccagggctctaaactacctatacaagccgtggtcgataaggtgacattatggtttgttcctgtggtgatgctggcagcgttgttaactttccttgcctggttaacatttgggccatcaccggccctgtctttcgcactggttaatgccgtggctgtattgatcattgcctgcccatgtgcaatgggattggctaccccaacctctatcatggtaggtactgggcgtggtgcagaaatggggatcttgttccgtaagggagaagctctgcagttgcttaaagatgccagggttgtcgctgtagacaaaacaggtactttgactgaagggcgcccagtaatgacagacctggagttggccgaagggtttgagcttgacttagtattagcaaaagttgccgctgttgaatcacgttcggaacatcctattgcccgcgctatcgttgaagctgctctaggaaaagagatatcgctgccagcgttgactgagtttgattcaattactgggatgggcgtcagggctaccgtagacggagagcgcgtagaggtcggggccgatcgatttatgcgtgagttaggcttggatatcgagtatttttcaaagactgcgatacgccttggaaacgaaggaaaatcgccactctatgttgctattgatggacgtctggctgccattatcgcagtcgctgaccctattaaatcaagtacgccgattgccataaatgcattgcaccaactggggctcaaagtcgcaatgattaccggtgacaatgccaatacagcaaatgcgattgcgagacagcttggtattgatgaagtggttgccgaagtgttgccagaagggaaagttgaagcagttcgtcggttgaaggagtcttacggtaaggtcgcttatgttggtgatggcattaatgatgccccagctttagccgtggcagatattgggcttgcaattggtacaggtaccgatatagcggtggaatctgctgatgttgtcttaatgtccggcaacctacagggtgtgcctaatgctattggattgtctaaggcaaccataggtaacatcaggcaaaatcttttttgggcgtttggttataatgccgcattgatccctgtagcagcaggcctgctgtaccctgcctatggattgctgctttcaccaatctttgctgcaggcgcgatggcgctatccagtgtatttgtcctgggcaacgcacttcgtttgcgtcggttccagcctccgctggcagaagactctgagcactaa

SEQ ID NO: 185222 - DNA, 1005 bp, Klebsiella oxytoca
atgtcacaatcacatgatcacgagcatgaccatactccagcagtaaccagtgcaaacgagcgtaaagtccttatctccttcctcatgatattcacatttatggtggtcgaagctgttggagggatactttctggctcattagcattgctggcagatgcaggccacatgcttacagatgcagtagctttggcgctggcttatgcggcattccgttttggccgtcgagctgctgatagcaaacgaacctttggatatttgcgatttgaagtcatcgcgggattctttaatgccctgacactcttcgctattgtggcgtggattgcatatgaggcatgggaaaggttacaagctccaccaattatactggcaggcccaatgctgatcgttgccattgcaggattgttggtcaacatattggtattatggatcatgacccgtggtgagaccgatcatgttaatgtcaaaggtgctattttacatgtgatgggtgatctattgggttctgttggcgctattgtcgccgctattgtcatttactacacgggctggacaccgattgacccaatactttccgttcttgtcgcagcactggttttacgtagtgcctggaaattattagcaaaatcgctgcacatcctgttagaaggagcgcctgaagatgcctccccagacaaggtggaacagagactaatcagttctgttaagggcttagcagccgtaagtcatattcatgtctggcaaataacctcaggtcggacgatggcaacactggaagtaagagccaaggaagatgtggacgtaaaagacgttgtgaagcttgtaaaacaagaactttatgagcagttcaaaatagaacatgcaactgtgggaatcgactggaattacgatcaaaacgataatacatgcagcctttcaccgacaaaactgcgtaacgaacacgaacacgaacacgaacacgaacacggaaaaaagcataaccattctagtccaggccacaaacattaa

SEQ ID NO: 185223 - DNA, 363 bp, Klebsiella oxytoca; identical to SEQ ID NO: 128808

SEQ ID NO: 185224 - DNA, 249 bp, Klebsiella oxytoca
atgaaccatcctgaaattcacgtcaaagactggattgatgtgggcaatcgtgagtgtgtggtgaaacgacttcttcctccagtgtctcccgtcggcgtctgtattgttgttctgaataaaaccaaaccgaccacccggatcgctggttggaaaggtgaaaagtggtacttcatgcccagccatgactttggtggctatgcagatgagtatgatccctgtgtacgtgaactgaaacggggccgtcgctga

SEQ ID NO: 185225 - DNA, 2139 bp, Klebsiella oxytoca; identical to SEQ ID NO: 151155

SEQ ID NO: 185226 - DNA, 594 bp, Klebsiella oxytoca
atgaaagataaccagaacgaagtcgctcgcgatatgtgggttgaagcgttgagttcattgtttaaaggtgattccaaggaagaattgtaccggatttcagatgatgagattgatgccctggaggggttgtgtccggacagatggccaacggcaggacagacagaaattaactgggatctgtctgttccggggcgcaaacatacgattgaccttccgggtacatgggtattgcagcctgctgactgtgaacaaattgatctcagttctctggtgctggggaaagcctcttttgctgattttgaacctcttattaattccttctttcgactgacagattccagtctctggacgaggcttgaaccccggaagctggggatggccatacttcatatcgcaaaaggatggcctatctcgcctgtcttgttaagtttgcacgaagatggcggatttcatttcggcggtgggtcccatcgttatcaagtactgaagcggtctggatcccctcatttttactttctggctgagccagatgatgttccggccattaatcagcaacttacggttcagtggatgcgcgactatcaactatcctga

SEQ ID NO: 185227 - DNA, 441 bp, Klebsiella oxytoca
atgggtgcaatttacaaagggttgcagttcaaaactgcgttggaagcacgctgggccgcatttttcgaccttgctggctgggaatggcatgtgaatcctgtatgtgttggtgactggtctcccgatttctgggtcagttttccgtgtagtcactcggaatgtggttcacacacgttacttatttccgttttacctattgataatattgaagattataataatcacccaagcttaaagcatgctttcactatccaggaagatcctcaaaggattcatgaaggcgtagaggcaggcgccgcttttggtagtagcccagaagtaacgacctgggtatcagcccacggctctggcggcggaacgcacaatgtcccattcttcgtacctggtgccggtgaactgtggctaagggctgaaaaacgtgtgcttcgccaatcggtttag

SEQ ID NO: 185228 - DNA, 438 bp, Klebsiella oxytoca
gtgctggaaaagaaatttacccgtatccgtgacttgcctaaccgcctggcgcaccatgaagcagtctggaaattccaggaggaagatccggttaccggtgcgccggattacaaccgcccggtatatggtcttcaggcgtccctgcagctgttgcgtcgggcatggaaagacatgctggaggctctcagctggctcagtcctgcaaggcatgctgcgtttctggcagaaggccatcacctgcgtttcgaggcactggccacgcacgacggtttgctgagtttcaccggacgggcacagctgatgcacgacctgaacgtgcggcgcagtaaagagatcagaaaattattgcgggggctcggacagcaaaaaatcatccgcctgaccagccgtacccggatcattggcattattggtcccgattttatccgtaccctctga

SEQ ID NO: 185229 - DNA, 468 bp, Klebsiella oxytoca
atgcagccgctgatgcactgccttgaggtgacgctgcgtaacgccatcgattacagtattcgccatgcccggttgcccggcgctgccggacactggcgaaccgataccaactggatttttgatttaccccgctatatcggtgaaaagacctggatacgccagaacaagcgctacaaaaccgatgcccgtggccagaagctcatgcatcacgggaaaccggtttatgaccggacagcctgggaggaagactgtatccgtaaggtgtcaaaacgtatccgtgctgcgggcaaggcgccgacggcagagcgggtgatctccggactggactttggtttctggaccaattttctgacgaaaaactacgatgaaccgcggaaccgctcgctcctgtggccccagttgcttccgtcggtgttccccgggtaccccccgtcacgtgctggaaaagaaatttacccgtatccgtga

SEQ ID NO: 185230 - DNA, 345 bp, Klebsiella oxytoca
atgaaaactttatcgtttgatgaaatgaagagggtttcaggcgctggtcacttcggtgatgtgcgggatgccaatatgggaaaaagtaataaaaataccggaagtaataacaaaggtaacaccgggtattacaataatctggggcaagatgttacaaactgcaataatggtattattggcggcatgattgccggtgctcctggcggcgttttgggtctggggacgggtctggttggtggtgcgcttgcaggaggctgtttttctcacggaaatggaaatggcggtggtagcggtaaatcctccggaagtaattgtggttcaggagtgggcggcacctgtaaataa

SEQ ID NO: 185231 - DNA, 636 bp, Klebsiella oxytoca
atgccacgacttttcaatttaaaatataaagaactgtttgtgtgtttaggatttatttttattgcctttgcttatccgtggatatttcagacatacctgattaacacaggtattgttggtattgatatggttatccccttaatgtcttcagcgatattgataacaatcactccagtttattttcaattttataaacacacaaagggttacggtcttggcgaacggcgtattgatttgtttattgtgtttatgtctttgattttatcagttcaatttatgatgtttcgttatcagtcgtcatatatacagtcccctcccttggatatcaatatcattctagttataaatatcattgctgtagtaatattagcacctttgtatgaggaaataatattcagaggtgttgtttatggattttttaaaaatacattgatgtgtagcacaatgacttccgtagttttaacctcactgatatttttatcccttcactggtattatgatatattaagcttgtttatcctgttttttatctcggtgatcctgacatatgcgagagtgctgagttacggaatattacttccttttatacttcactcattaatgaatggctttgttttattcttgcgatttcaatga

SEQ ID NO: 185232 - DNA, 1191 bp, Klebsiella oxytoca
atgttggtactctatggcgggtggcttacctggtttgttatcctttttacctgtctatatgtatttatccgggtactaacctacaacagatatcgtcagttatctgaagagtccttaataaaggatgcaagagctaattccttctttatggagacactttatggtattgccactgtaaaggtacaggggctgaataaacggagagaggaaaactggtttaatcttgaagttgactcgattaataccggaataaaagtatccagattaaacctgttctttggaggcattaatacactgattgcgacgatggagcagatactcatcctctggcttggagccagtttagtgatatcgggaaatatgacaattggcatgtttgttgcttttagttcctatcgaggtcagttttctgatcgaattgcatcatttatagattttttactcagacttcagatcatgagccttcataacgaaagggtttcggatatagcacttactgaagtttccccatttaaagatgatattccggtaaaaaatgacatgtgccctgtctcactgtcggcaaagaatatcagttataaatatgatagttatgcatcatatactctaagacatctaaatatagagatacaacctggtgagcatgtagcaattacaggtgcttccgggacagggaaaacgacgctattgaaggtactgtgcggattattcccggcaagtgaaggaaatatacttgtagatggtattgacataaaagaattgggtattaacaactatcaaaaattaatcgcctgcgttttacaggatgacaggcttttctccggaacattaagggataatatctgttccttttctactcaaattgatgataactggctgattgagtgtgccagatttgcacagatacacgatgatatagaaagaatgccgatgggttatgatacattaatcggagagctgggtgaaggtttatcaggtggacaaaaacagcgtatttttatcgcaagggcaatttataaaaaaccatccattctcttcatggatgaagcaaccagttctctggataatacaaatgaacaatacatcaacgatgcgataaaatcgctgaatatcacacgcattgtgatcgcgcacagaaaatccactattaactcagctgatcgcatcatcactttacaggaaaatttataa

SEQ ID NO: 185233 - DNA, 552 bp, Klebsiella oxytoca
atgaaaattaatttacagactactttaatactaattgccctctccgctttttcactcccctcatatgctcgtgtgtatgaatatgtattcaaggatgtctatggaacggataaatcagtcagtgcggaagcaggtatcctaaatacaaatgaaaaaattcaggtaagaataatatcgggactcgacagaaaaattcaggtaaccgtaaagaaagacaatgttggagtatatagctttactactgagagcgtgacggtcaatgaccgtataaaggcatcaactggtgaagaattttatggtaaaacgctgacattgccaccactgagtgatggaagttatgtaataacgtcagatatcctgaatactcaaaacactgttatcgacagcacgtctcacaattttattattgatactgtagggcctttgtcagataacctgagcgtggaccaaaaccccggatatgatatggtcttaacaggtgagcgttgggaactaggcctcggggctgaagcaaagctgtacctgaatgtgaaaaacggctttgttgaataa

SEQ ID NO: 185234 - DNA, 2406 bp, Klebsiella oxytoca
atgaaattaaaattcaagcttctgacaacgctaatactcggcactctttcattgcccggacattcccgtgtttatgagtacactatcaaagatatctacggcgcggagaaatcagtcagtgcggaaaccggcattcttaacactaacgaaaaaattcagttgagcctgatttccggcctagatcgcaaagtacacgtatctgtccggaagtcaggaacggaggtttacagcacgacaaccgatagcattaaggtaagtgatcgaattaaggcatcaacaggtgaagagttctacgggaaaatcatcacgcttcctcccctgagtgatggactgtatcaggttatctctgaaatacttaacacacagggtgctctggtcgactccaccacacaggatttcaccatagatagtgtgggcccaacagcggacgaattgagcattttacagaaaccggggtatgaaatggtcacccagggagaaaggtgggaactgggccttggagccgaccaaaaactatatgtgaacgttaacaacgttaaagcagtcgctggtttcgataaagctacattacaggttattaatcccgataatagcgtctattccattactgctatggactatgatagcgggtcttcctccctgtctgctgcatggactttagggaaccggaaaaaggcctcctggatgccttcatcaaatgctgatgtagagtatcgtttccgggttacactctttgacaaagcaggctcccgaaaagtattaccggaacagaaatttgtatttgatgaccaactgggcgaatacactcttattgctatacgggaccccgaagcgcaaacaagcgttgttccagggttcacttcgggttatatagcttataaagcgggtatgacagttaatcaaaacccgattaccttaatctatcgtatccccatcaacaatgtaaggaaatacaacaaagctggtttaagttttggctctatcatttcagaagctaacggttacgcctatgtggcggcaacaacagcatataacaacaggtacgatatacataacgggtaccaatggggcggcgctactgcaaactataaccttaaactgggtcccgacacgcctgtcggaccggaaatgcctagtagcgtttggctcacgacggacacaaaaggtgaaattaattcttttaactatttatggaaaacaagtgatctaccggtgaaatttatttcagcgaggatccgtgcttctgcgagaaattatatccagagagcatttacaggtaacctggaaatctgtcaaatccaaccaggtgagactgagtgcagcgggccggtaccatggtcaattgctaaaagtggcaatggaggcgtgacatattcttttaaaatgtataatgaggacaagacactttcatcaattaatcaggaaaggaggaactactggaacacaaaccttctaccgaggataaagggatatgactatcaggaagataagaaaaaagtacttttatttgttacccaacccggtaatggtaccttcagagatcaacttcagcttaagtccgctgaactgattgatgctaattcaggtatgcaggtgctgaatggagccaaaatagcgctttctggtgaagattatacttatgcgtttgacttaagtaagttggctgaaggaagatacgacttaaactttctggcaaaagataccttcgaaaatgaaacatcttctccattcatcacgttagtgcatgatatgactccccctgagatcagctttaactacgacaatgccccgctcacctccggcaacacggtctatggtctggagaatatatccattaaactaaacgatgagctgactaaacctactcttctccgcctggaactacgaggggggcctgcatctgatagcgtagtccttggtttcaaccagaatgttgatggtagctacacacctgattacccacggctgtttcctactctggatacgtcgacggataaatacactctcactgcatatgccacagatgctaaaggtaatacgtcccaaaaaagtattcagttcgcctacttccctaaaaatctcgttaccctggagaaactgaaaacactgggcgtggttaaagcactcaaaaccagtgacaacacacctctggcagtcatgcgtaccggccagttgagaaggaacgatggctctcttgcccagggtatgcagacggcaaatatcacggtcagaagcgacgctgagtatgccatcaacattctgggaacggtgatccatcccggggaaactaaagaaatacagcttgacctcggaactggtgaaaactctacggttccgatttttccggctatcaacgggtctacgggtcaaagcaacttcatcatcgagttcccacaacttaactaa

SEQ ID NO: 185235 - DNA, 420 bp, Klebsiella oxytoca
atgatgagctcgaaacacgtggtcattagcacgaagcatccggttgccggatacctgtacctggaaatgatccccgatagcgaggtcgggttttcagatatctatcagataacagacagtctttttcgtgcagacgttctgccctgtgactggcgagagcataagcggcagtggggtaaggactttttgggccatggctcatgggatgtgtactacatcaaacagcatgtgaaccgaattaactggtttggcaatgacagcattaagaaaattaaggtcagatacagcctgtccattaaagagctgattgactgggtttccgatcccgaccattggatagatattgccgtagaggtagatgataccagcggttccagaccaatggcagtagccatggtgaatcagactctacccttttaa

SEQ ID NO: 185236 - DNA, 354 bp, Klebsiella oxytoca
atgcatgcaactcatctgacgaaaaaatttaatgttttggcggtcgtctatttcacaatcattgcttgtggtcagattgttctgttccctcattctcagcccattttcctgttcctcgtgactatggctatggcggttcgcttatttaccctgcggcctcaatataaaaatttacgatttctggttttgtccatcatctcacaccaccttgtttttaccattctttcactcatccaactctatatcgatgccaggtatagcagggcaagtttcattgagtatcagatggtttatgcgcctttgctcatcgggatgggatatgtgtatttcaacgtatggagagcgcgtacctaa

SEQ ID NO: 185237 - DNA, 465 bp, Klebsiella oxytoca; identical to SEQ ID NO: 100679

SEQ ID NO: 185238 - DNA, 579 bp, Klebsiella oxytoca
atgtctgaaaagatattcaaaagggggggggagctcatagagttgccctctcacaacaacaatgccgtaaaaaccgagatgcagagcaggacagaaaaacccaaaacgaaaatcaccaaagcgcaaagagaagagctcagattaaaatttgcgtgcaggtgtgcctactgcggctgtgaactgaaagaaaagggctggcatgccgatcatgtagagccagttcgtagagatttcgatatagttcgcgcgccccaggggagtagggtgagtcacgtcgcacgaagcaatggacgagtatttcatcctgatcgccatgatttagataatcttttccctgcgtgttcagcatgcaaccttttcaaagcgacatattcgatcgaagggttcagggaacagattgcccaccagcctgagcgtgctcaagcatactcagtcaatttccgcacagcccaacgatttgggctggtaacggttattgagaaacctgtggttttctggtttgaggcgtacgatgcctcaaaagaacttgaaccccagctttcttattttttggcacaccgggaggcttatcaggattga

SEQ ID NO: 185239 - DNA, 315 bp, Klebsiella oxytoca; identical to SEQ ID NO: 23327

SEQ ID NO: 185240 - DNA, 432 bp, Klebsiella oxytoca
atggtaaaaacggataaacgcataccatctcagctcccccttgacccaaaacttccggccaattttgatgacacccctaatagtgaacgaagcaaagaacagctagatgaatggtgggatcatccttatgggatcactaaaccagacggctcatttactgacagatgtcttaacggtggagcgagggaccgctcatcggtgcttggaaaggtaagaacttacgaagaggcttgtgtcctggctcacgacgcccaggcaaaatgggtcaatacccgtctgaaacctatcttcatgtactctaacgaaccgcccttcaggctagtggttcagtcccagcgaccagattacgaagaaagcatcattggggagttcaatactattgatgaaattaatttgttcttgttaaagcagcaccccacccgaactacttga

SEQ ID NO: 185241 - DNA, 360 bp, Klebsiella oxytoca
atgtttaatagcctttctgattatctacagcaacaacgagatcgcgaggaggctctgaaacgaaaactaagccagttgaagccaactgttaggaatggcgaggcaggagagataatcgcagcgctgattgacctcggctcagtggggggcgattttaaaaaaacaacgtacgattatatctatgagtattttgcatccgcccgctgtattgatgtgttggtggtaatgttattcctcaatatgaagcatccactctccgatggagcaataaaaaaagcctatgcaagacagtccgacagtgaagattcgaggtctgcttacataagcttgatagttgacactattgataaacgccggtaa

SEQ ID NO: 185242 - DNA, 372 bp, Klebsiella oxytoca
atgaaaatacctgcaatttttccggtcttagtgatggggctgtcctcattctttgtatcccagcaggcgatggcgcatgctcatcttaagactgctgtccccgccgataaggctgaactaacagagtcccctaaacagctggcattgagctttacagaatctcttgagccctctttttccaaagcggaattaaaaaatgcagacggccatattattccggccggtaaaccagcccttgatccaaaagacaaagcgacgttaatagtgcctgtgagcacaacgctcgataaaggacaatatgaagtcgactggacagctctttcagtagatggtcataaaacacagggaaaatatacctttactgttaagtaa

SEQ ID NO: 185243 - DNA, 2316 bp, Klebsiella oxytoca
ttgggaagaaatgacctgcttattcgcaccttccttagctctccttctgccagtgatgtggctaatcagtttaatagttttggtgggacgcaaatccgggcatcagatgtctcgaatattcgcagtgatggtaatggtgggtatatggcggatattcgggggcagattcacactgtgtcctctgaagaaggctcaacaacttcaacaactgtcggtggcttcgatggtgtccgcagttcttctaccggtaatggcggaagtcagggtgggcaggggccacagggacagtctctcgttatgcataacgggcagatgggatactgggaaaaccgatcatccggggctggtaataacgaacatactacccgcgcttttgtggcagtaggcccatcagaagcagaaaaagctgcacgagcggagaaggtagctcaggaaaaacagcaagcagaagaggctgcaaaagcattcgcagcgaaaacagcagcggcatccgccgctgctgaaaaagaacgtcagaatgcgatttctgctgcggctgctgcaggtcaacatcaaactgttcctgatgcgcgtaataatctgaatcaggcgactgctgaagcatcacgcctgaaaacagtggcagataatgcccttaatacagcgaagaataagcgaaaggaagctatcgatgccgtaccagtagcaactcgggctgagaaaaaatatcaggatctgcagcaaagcattaaaggcctcactctaaataataacggccaatacggtacccaaaaatgggaggttatcagttcgaataaagagcatgaccactggggataccggttctatccatctgggatcacaaaagctcaggttgatgcagcgcagaatgatgcggtgaacaaacgaaatgctgctactagtcttgccagtcaggcaacggccgctgagcaggctagtctgcaggcatcagctgcctataatgctgcagaaacgcgccgtcaggctgcccaggctgcattagcgtccgcagaacaagccgccgctgctgaacgtaaacgccaggaggcggaagcagcagccgccgctgcggcagaaaaaaaacgacaggctgatgcagcagcgaaagccgctgaggaggccagagccattgctgaaaaagcaaaagcgctgcaggcccgtcgtacagccgcagataaactgaaatcttcagagattcaggctgtcaggggtatcccggctacagctgcaccttttgttattcctctgacctggtcaactgcgtcacgtggaagttttactctggcggctgatgctgcggccagcctgggagctttcatcagcgaggctgtggcgacgttacgtgtcgctgtggtggctaacccggtagcattaaccattgccggtcttgtgttatcgaaatcagttggcgtcggtagtgatatggtgcccggtcgggatatcagttcgatgatgcctggcgatgcatttggtctgcctgataccgcggcattgaataaagcagcagatcagaaaacatctgtcagtatgccggttcgtggccgtctggttatgaatgatagcggcattctggatgttcagctggtcaaaaccaatactgccggtgccgtgaaggtcgctcgtgctgtactggataaggaaaccggctactggggctatactcttcccgctgtcgcagatgttccggcgcaaactatttttgtcagcccggctgacgcacctggtgcaaacggaccactgacgctaagcgggccggtaccactaccggagcgtattctgcataccggtgatcagatttcggcgccacaggctacagataaaaccgtgacgccggtagcggatgacctcgattttgacgatattattctggtgtttcctccggaatccggcctaaaaccgctgtatgtgatgtaccgtagccctcgtaacatgcccggtacagtgagcggcaaagggcagaacgttggcaataactggatggggggggccagtaccggggatggtgctcctgttccttcccagattgcggataaattacgcgggaagactttcggtagttttgattctttccgtcgggcgttctggaaagcggttgctgacgattctgcactgagcaagcaatttagtgaagctgatattaatcagatgaaagctggaagggcacctactgcggactttttagaatcagtagggaaacgtgttaaaattgaattacaccacgaaaaagaaatatctcaaagaggggctgttatggatgtcgataacattaaggcgctaacacctaaaaatcatattgagacacataaaggaaaataa

SEQ ID NO: 185244 - DNA, 444 bp, Klebsiella oxytoca
atgggaggcgaccattccattaacaaagcctggctgacggggaaaagtgactttccatatctgaatcgtggtgatggagaaggaacaagcacctggttaattactgatgcacaattgctaaaattcagcagggcgggggagcgaacctggctggcacggtacgcctataattttgctgatgcagggctcaaagggctgaatctaagtatcctctatctgaacgccgataatattgataccgggaatgggcgaaagggggaatgggaacgggatattgccctgagttatactatccccgagggaatacttaacggacttggcatctccgtaaaaaatgccacaatgcgcagcgctctgcctgacacaagtagaaaaggctctgctggacagcgtgaccaggatgaaacccgggttacagtcagttatacccttcctcttctctga

SEQ ID NO: 185245 - DNA, 2451 bp, Klebsiella oxytoca
atgttggctaattatgacccagaaaacgtaagccgtatcaccggggtatctgttgcatcaattgaagccgctgcgagtttgattgccggggccaagaaaatcgcctaccacagttggtctggagtggcacaacacactaatgccacccaaacagaacgtgcgattgcgacactgtatgctttaaccggttgtttcgatcaggaaggatgtaatcgaatctatgccagccacccggtgaatgtggttaattcaccgacactgatgccaaaatcacaatgggataaagcattaggtcttgaagaaaggcctatcgggccgccttcacaaggttgggttcattctcaggatatctggcattcagtattagaaggtacaccctataaaattcgcgggttaattggctttggtgccaacatattactttcacaaagtgatacttctctcggacaacaggcgcttgaggcacttgagttttatgcccatgtagatttgtttgaaacgcctacatcaaagtatgctgatatccttctgccagtaaacactgcctgggagcgcgaaggcctaagaaccgggtttgaaagtagtgctgctgctcaggaccacattcagttgagaaaaaaaatggtctctccgcgcggtgaaagccgttccgaccttgagattgttttcgatcttgcatgccggttaggaatgaatgaagcgttcttcgacggcaatattgaggcagcctggaattatcaactagaaccattaggtttgactgttgagatgctcagaaataagccagaaggttacgatatcccgcttgagcataaagtcagaaaatatgctttcagagacccaaatagtggatatctggcaggtttcaatacagaaacaaaacgtgcagagttttactctgagatccttcatcgctatggttacaatcctttacctgagtatgtacagccgcaagaataccagcgcaacgatcctgattatccactaatgctgacatccgttaaaagcggattcttctgtcatagccaacatcgaagcctgactagcctacgaaaaaaagcaccttatccaacggtagacatttcggcagctctggctgacgaagaaggtatcaagacgggggattgggtagaaattgaaacgagagcaggtcttgctcgatttagagcaaaagtggaagccaaactctctcatgaaactgtaattgctgagtttgggtggtggcaggcttgtcctgattttggcaaaccttcatacccggttaaaggtgagtacagtagcaattacaatagcttaatcagcggtgatagctatgatccagtcagcggtgctttacctttgcgttcattccgctgccgcattcgccgcttgaatgattttgagctgataagacgcccctgggaaggtcgtaaaacattcaaagtcattgaactgaaaaaagaagcagataatgttacgacagttaccttccaatcgaatagtgaaggctacttacctgattatgaaccgggccagcatatcactgttagctgttgtccgatgagcgattctgaagagatcgttacccgggcgtattcgctgacaggccctgcgtttgttcatgaccgtaaaacctattccatttctgtccgtcatcagaaagcgactgatgagaaaggtgaatatgtagaaggaataatgtcatcctacataaacacgcatttgcagataggcaaggatgttgaacttacgcctcctggggggaatttcattgtcccgctcaatgccgtccagcctgtcgtaatatttgctggcggtattggaattactccattcatttcctatctggagtctattaacccccaagcggaaggtccggaaatctggcttttctatgctaatcaaaatagtaggctacatgcgtttaagaaaagaattgcggagctaaatgcgtctattgacaggcttaaagtaattaatatctacaaccagcccctcgactgtgatattccaggattggattatgatagagctggttatgttggtgcgggagatgtcgaggcatatcttattgagaataatgctcgttattacatgtgtggtccgcagcctatgatggatgcgatatcccgagggcttcaggagagaggtgtacctgcatttgctattttctacgagatatttcgttctccgacaaaaataaataatgatccctcattacgtcataaagtaatttttgcaaaatcaggaagagaagagatctggaccacggataaaggtactctgctgaattttggagaaaaacttgggattaaaatgcctagtggttgtcgtgttggacaatgtgaaagctgttcaactaaggtgattgccgggaacgtgcagcatctgaatggtgtggaaccctctgatgagggtgcatgtttgacatgccagtgcattcctgccggtgatatcactattgatgcctga

SEQ ID NO: 185246 - DNA, 360 bp, Klebsiella oxytoca
atgaacattggtgatgctgcccggttatccggagtttccgccaaaatgatccgctattacgaagaggcgggattaataccggaagttgcaagaactgcagccgggtatcggatgtacagcgatattgatgtgtacaaattgcattttatacgtcgatgtcgggagaaagaaacctgtttaatcatgagtttgttcgaaactggactaatggtcctttgttggttcgaaatgataatggttattttcttcgggaaaaagatattaacccacttgccatcagtaatcgctatacagtttgggacgaacacaaccagcaagtcacatttatcgattccgagactcgaactgaagaaacgctga

SEQ ID NO: 185247 - DNA, 948 bp, Klebsiella oxytoca
atgatcaagcaaaaaactatcaagaatattgttgaattaaacggtattggcttgcatagcggtaaaaccgttaacatgaaaatcatgcctgctggtgccgatagtggcatacggttccgtagaacagatgtaactcctgttgttgatattcagctccgtgccgatcagattcatgacactatgctggcaacaagcattatcaaccctcagggagttcgagtttcaacaatcgagcatttcctttctgcggtgtctagcatggggcttgataacctcttggtggagctcgatgctccagaacttcccattctcgatgggagtgccagaggattcatagactcaataatgcacgctggtttgatagagcagtgtgcgctaaaaaaatatcttctgataaaaaaaacggtttccgtaaaagatggcgacaaatgggctcttttgcatccagactcaaagttctcgatcgattttatgattgattttaagcatcccttgatttctgctgagactaatagattaaatattgaagtgtcgaaagaaaactatattagcgagattgctgatgccagaactttcggatttgttcgtgatgtagaacttctacaacaaaaaggtcttgggttaggggcaagtttgaacaatgcgatagggcttgatgaatatagcgttctgaatccggaaggtctgcgatttaataacgaacttgtgcgacataaaacactggatgcgattggagacctctttgtatcaggccataatattattggcgcctaccatgcttataagtcagggcatgcattaaataataagttgatgcttgcactgttgaatgatgtcgaatcatgggaattagtgagtgttggtgaatataaaaatgatgccactagagaaaccatcctttctaaacccaaagaagagtgttttgagtcattaagtatgtggtcataa

SEQ ID NO: 185248 - DNA, 144 bp, Klebsiella oxytoca
atgatgaaccttgtattgatatcgtacggtcggtgtatgagttggagtgtacagttagtgaattcaaaaaaagaattatacttcaacatatttcctattgccattcagatgaatgtgatgaccctgacctgcatgtcgccttaa

SEQ ID NO: 185249 - DNA, 303 bp, Klebsiella oxytoca
atgcgaacagcgcacggcgttaaagttgttctgcttcatcagcaggatatcctgcaccatcgtctgctcatccatgacctgaccatgcagaggatgatgctcgtgacggttaacgccgcgaatcagcaacggcttgccgttcagcagcagcagaccattttcaatccgcacctcgcggaaaccgacatcgcaggcttctgcttcaatcagcgtgccgtcggcggtgtgcagttcaaccaccgcacgatagagattcgggatttcggcgctccacagtttcgggttttcgacgttcagacgtag

SEQ ID NO: 185250 - DNA, 336 bp, Klebsiella oxytoca
gtgatcggcataaccaccacgctcatcgataatttcaccgccgaaaggcgcggtgccgctggcgacctgcgtttcaccctgccacaaagaaaccgtcacccgcagctcatcgcgcagctcgccgtacatctgaacgtctgcctccagtacagcgcggctgaaatcatcattaaagtgagtggctacatggaaatcgctgatttgcgtgctcggtttatgcagcaacgagacgtcacggaaaatgccgctcatccgccacatatcctgatcttccagataactgccgtcactccagcgcagcaccatcaccgcgaggcggttttctccggcgtgtaa

SEQ ID NO: 185251 - DNA, 1248 bp, Klebsiella oxytoca
atgagcatattagatgatattcgtactatcggcctaaagatgaaaaatgaacaagcaagcctcaaggaaataatcttggagtcgagtcgggttgatgtttcggatgaacaagtcgatggcttagatcgtcttatctataaccattgtttaaataaaaaaactctttcggacttctttggtaaatcaagaaacacttttagtagaattcttgctgaactacatgagaaaaaagtgatcggtgaacctatcttccagaataagagtcacctgtatacacgttgggatgttcaaaaaataatggaagcgatgggcactattcaatatcgtgaaatgtatttgccccgagttattgttacggaaaaccataaaggtgggacaggtaaaagtacaacaacagcaacacttgctaccgcggccgctttggatcttaatctgaatgcaaaaatctgcgtaattgatcttgacccccaaggctcgttaggcaataaccttatccactcaactagtgatgatagtgtttacctaaccataaccgatgttctgcttagtgaaattgaagataatgactttacacaatatataaaacagggatatacggaagcacaaattattggtgctatggcattttcaacccatctccctaacatggatgttataactgcattcccgacagatgatagatttactgataaatattggagcctcgataaggaggcaagactcaaacttctgacacgttttcgtgatgtggttatacctgtattaaaggaaaaatatgaccttatatttatagatactccgccacaagattctccaattatttggtcaacaaacgaagcagctgatgcaatacttgttcccattacaccacgagaatatgattttgcatcaaccacaaactatatgattacgatttcagaccgacttgagcagcttccatctaagggaacaaatattaaatggataaatgttcttgcagtaaacgtagatgatagaagtcaacatgagattcgtactttaaataaactagtaagaactgtacgtgatcggttcatgacaacaaatattaaacattcagaggctttcgttgcagcggctgaaaaaggtcgtactgtactcgatattaaaaaatcagaagaactttgttcttcgaaacaatatgatattgctgaaatgtcggttcagtcggtgtatcaacaacttatcaatgaaattaaaagcttctcagttagggaggagggtaaataa

SEQ ID NO: 185252 - DNA, 1011 bp, Klebsiella oxytoca
atgagtgatgttgaacgcggtacaagcaaagacaaatacttaaccggaaacagcaaacgtacatttgtcgatcaaaaaagcggacttccacctttacgtacttctcctacacagaagcgactatttactctagcaaatgggcgtaaagttgaagctcgctacgttgtcgtccctggctcagaagttgctaataaaacgctcgttcatgaactaaacccacgaaatcaagaggcagttgacgatctctctacaagagaaattcttcctttaattaaagagaatggggttacaactgaagctattgccgtctaccgggacggccaattttacctaattgaaggaagtaggcgtcgtttctgctgcataaaatgttcggttgatttacctttatgggccttcgatgtagaggttagccgtgaagatgtcgattgtattgttaatgctgcacaaacggcaaaacgattctcgtatcgtgaagttggaattaaataccttgaaatcatgaagaataagggttttaaaactaatgaggaacttgcttcttatcttaatattggtattgaatcgataagaaagagaattcaggctgcaaaaatcagtaaagaacttattagaatattcccagatagtgaggggatacctaatacttattatagtaaattggctagaattgaaaaaaccgctaatgctaataacattcctctgacagagctaacatctgaagtaggggcggatgacaataaaattactaacattaatgatattgaggaagttcagaagtcaattttagatggtttacattcagttcttagtattctttgtaatgatgtaaataaaccgcaaaactggacagtgactgatattgctgcttttgataataaggatacttacgctagggtaaaaagaagcgccgatggccagaaagtaagctttgaatttaagcgtattggtcaatcaacaataaatgagattgaacgcttaattaaagttagtattagcaaagcaaaataa

SEQ ID NO: 185253 - DNA, 1737 bp, Klebsiella oxytoca
atgagtcggtcatcatggatgcctgtatcaaacgctgatgtggaatatcgtttccgtgtgacgctctatgataaagcgggaaaccataaagttttgccggatcagaagttcatatttgactcagatcttggtgaatatactttatttgctgtttatgacccgacttctaaaacaagcgtagttccgggatttagtgaaggttacatagcatataagccgggaatgaccgttaaccaaaaccctttaacactcgtgtacagggttccatcgaataatcgaagggaatacagtaaagctggtttgaaatttgggacgattatttccgaagcgaatggatacagttatgtatccgcgaaaacggcctataaggtagcttacgtcatccataacggatatcaatggggtggaggctcactctcctataatatcaatttaggaagtgaggctccggccagcccggcagcacctgaagtatggttaacatcagatataaaaggtgaaatgaatgcaggcagctatctttgggattccaaagatctacccgtgaaattcagctctgtaaagatcactgcgtctccgcgaaattatggtcagagagcgatgagtggaaatactgagatttgtcagatacctgctggtgagactgagtgtactggtgcggtatcatggtctattccgaaatcagggaatggtattacaacatacttcttcagattgactgatatggataaaacactttcatcagtcactgtagaaaaaagacatcactggaacactgatctgttacccaagataactggatatagttaccaagaggaaaacaaaactgtactcttatttgtgacgcaaccagggcgcggaaaattccgcgatttgttgcaactcaaatctgctgctctgattgattcagataccggggaccaactactgtcaggtatccaaacagctctatctggcgaggattacacatatagttttgatctcagcaaactggccgaaggtaaatacaatttaggctttctggcaaaggacagctttaacaatgaaacttcatcaccattcataaatctgattaacgacaagacacctcctgttgttaattttaaatatgaaaatgcgccgctatcccccggtgctactgttttcgggcttgagaacatcagtataacgctaaatgatgagttaacagcacccagccttgtcagacttgaacttaaaggaggaccagcgtcggatagtgttatcttggggtttaaccagaatacggacggtagttatacacctgattaccctcgtctcttccccagtctggatgcaaacacggacaaatatacactaaccgcatatgctaccgacgcgaaaggtaacactactcaaaaaagcattcagttcgcctattacccaaaaaacctggtcacccttgagaagctgaaaactttgggtgttgtaaaggcgctaaaaaccagtgacaacacaccgttggccgtcatgcggacgggacagctacgacgtaacgatggctcactggctaagggtatacaaacggcaaacatcacggtcaggaaggacgcagattatgcgataaacatccttgggaacgttattcatcccggggagacaaaagaaattcagatagaccttggaaccggtgaaaactcaactgttcctattttcacagcagaaaacggttctacaggggaaagcaatttcataatcgaatttccgcaaatcaagtaa

SEQ ID NO: 185254 - DNA, 804 bp, Klebsiella oxytoca
atgactattctttcaaatctaagtattgaccttactgatttttcaggacgaattcttatcgtcagtgacctttatggacattttgaactgttactcaagggcctttcaaaactgacccagtccggtgatgaagtggttgttataactactggtaatttgtttgactggggcccttccccctgtcagctgcttgaggcagtggtttacaaaaaatttggtgacaggaaagttcattttttcactgtggtaggttttcatgaattacttatgactgatgctattactcaaaagtaccttaaaaccttcaggtactttccggatacacatactcgtaaacactggagaagtttaggtggaagctggcatgactcttacgaccagattttgcttgaacgtgatatttataaaatcgattacccactggtaataaatctcaaaacaaaactaggaacatacataattggttcgtcagatatcccccacgatggtggtgactggaacactctcatggcaaccttgaacaagttggataaccaaaacttacgcattatggcgagtaatataaccagaactaggtattttctagaatcaggaaagacaatagatgatatatcgcttgtagtattaggagtgcatcaacctgatcaattaaaacgaattctctcagggcaaactgaactagctaaatcaaccttgtgtctgttccctaacaactgggatggactctcaaatgcaccacttgatttcaaaataagatttcttgacatcactgaaagtgaatatgggagttgctatgagttttaa

SEQ ID NO: 185255 - DNA, 717 bp, Klebsiella oxytoca
atgagttttaagaatttagcttgtgttatcttattgttaccaaacgcaagctacgtaatggcaggctctcagctccagctaagttctgatgttatggttgaccagaaaatgaaaaacattgttgtccaaacaagttattttaaaaacaaaattgacaacacaaaatttattcgaattagcaatcacacaagatcattcccattaatcctctccttaccggaaattaaatactctgtcatcataaaaaatggacacagtacgcttctctcagaagatgatggcatgatttgggtagaacctgggagtaacgtcatactaaaaattaaagaagctgaaaaactctacgatttcattccaatagtctacattacagggaaaaagaaaccaaatgtacttactgttttacccggtaaagcaattagtgctgcgaaagagacaaagctaattgaatataaagtttcaccaaatcaaaaaagaatgtcacatgatgacaaggttgttaagctatcaggctttggtaatataaataaactgaagaaaggtttttatgaagtacaggtcgacaaatttacttctgtgagctttgataaggaggctttaataattacccgaaataatatgcttgcgggatcacaatattacactaaaaatcttgttgcctatccacatgaaaaaataataatgaacattagcggagaaactcatgttgaaaaatag

SEQ ID NO: 185256 - DNA, 501 bp, Klebsiella oxytoca; identical to SEQ ID NO: 95462

SEQ ID NO: 185257 - DNA, 2505 bp, Klebsiella oxytoca
atgcaaatgacactggctgctttaccggatgtcaacatatcattgtcccgttggttacgtcgcagaggtaacaggatgggaggtagggataatgaaaaagcggatcttcttaccgtatactcactggattacctgacaaaaagtcaatatgagcctttgaaagaagctgatggcattaagatcacgcaagctgatgatttgaagcttaggaatttcgagttgtgggtaacggttaggatacctattaaaggtttttctcctaatgaatccgaatccatgcgactggatggcctttttaaagatcttctatctaaactagaaggtttaaccttgtcaccaattgttggtaatgctgacacatggttgtacagtgttgataaaatattaaaccccggaaaagactccagatggaaatatggtggacttgaagctagtacattaatgccattaaataatcaggtcaacattccaggaaggaaatatgaggtgggggaggattatttcgcgtcattgtctgctgatgatgatgagacagctcaacgatattttaagcatttgtcgatgacaaaattccctgaatatgtcaactttggtgctgtttacgagttggttgttgactggatgactggaagcaaaaccattttctctccttttattatcaacttctgtatacaattcccacatcaaaagaaaatacagaaagagtatcttcgttataaagcgataacagataatcagtcaaaaatacctattgttttaaaatatcttcctcgccttgccgatatggacaaggattactcggcattgactagagagttggaggataaagctaaactactacaaacttacatgacatttatcgtcatggataatacactggaaaaagtgaaaatagctgcaaaaagtctaattaactattacagcgagaaaaaaatcgttgtggctgatgatagttatatttgtttttcaggtgtcatgtcggctttacctttatgtaatgatccggcgacttttagagatatggatcgtggtgatgtaatgactaatacgggtgcggctcacctagctcctatctttggcccgtggaaaggaaactccacaaatccagtcattccatttgtaacccgcgagggacagttggttatgattgatattttcgaaacttcagccagttacaacgtatgcgttggggctacctcaggggcaggtaaatcatttgcagcaaacaacattattctcaactatctttgttctggcgagcatatcaatccgctttatcattttgatgatattagagatctgcttacggcagataaatacgatccgcctctggacctgaatggcaaatttaatgcgtcaccagatggtgctcaggtgtttgttgttgatatcggacgttcatatcaagggcttgctgagcaatttgaggactctcaatttattgattttggagttgacgctaccttttctcttaaccctttcgctttcctagtgagaaaatatacaggagatgaatcattggagggattaacgggaaattcaggtgaagaaagtaaagaatcagacattattgctcaaacaatcatggttctgaatcaactaaaactaatggcttcaagtaatggtaacattagttctttacaggaagcagtaatgcttcgtcttattgctgaggaatcaaatagccctgaagatggatatcttccttcagttactggcttcgctaaaaaatgcatgaagcatgagaaacaagaaattaaagatataggcattcaacttggaccttggtgtgaaggcggcatttacggtaggaggtttacaacatcattgccacccattaattttaatagccgcttcattgtacttgaacttgaagaactcaaacctacaccacatcttcagtgggttgtgttaatgtcgataatccaggcagcacagcatgctatgtttattaaaaaggatggtcgtcgtcgtttgtttatacttgatgaggcttgggagtatatcggcgaaagtaatggtgatgatgctgctgttaacttttttactaaattccttgaagcagcatggcgtcgtttccgtaaaacaaactgtgcagggatctgtattacacagagcttcgaagacttctacaagtcgccaatcggtgtagcgatagccaacaactcaccatggaaatttattatgaagcagagcccagaggcgattgattcaatggagaaaaataaatatatttcagcatcagcatcagaatatgaacggatgaagatgatcaggactgtaaagtatgttttttcagagattatgattcgttttgagaacgtgcaacaaatcgtccgtctttatgttgatcgtaaaatggaactttgttttactacagacccgtctgaccgacgtaaaatatggaaccttgttaatgacggatatacgtatgccgaagcaattgacagggtttatgaagaagagctagtacagttaggcatgaaaacaaggcaggttgcttaa

SEQ ID NO: 185258 - DNA, 1068 bp, Klebsiella oxytoca
atgcgctgcaaaattagcaaaacctcgatctcacttatttgtctgatgctggtggccacctctgcggaagcagggtataaatccaatcggtcttcctacaaatcatccttccgcccatcgaccattaccaagtcgtacaactcttcaaccagaagccaggcaagccgcacggttaacgatacgccagcaccggctagcaccaaaccactgaccaccagccagaaagcgatgattgcaggttctggagccgcattaacggtcggggcagtttccgcgtcctcagggaataaaccgtcagagagcacctccgggaaggtggagaaccaggctggagggtatgatgttgtcagtagtcgatctcaggccaagggagataacgaaggcgctgctgcaggcactacgccaaagaaatcagtgagcgggtcggagctggtggctaagaaagggactatacctgcatcaagtccaacatccgaaaaatcgtcgtctctcccgtcgtctcagagcattccaggaagttctgagcggggctcttcatctgtaaaattcatccctccttcacagaaccttgtaagtaacatcatagagaaagataaaagtaatcatttcggtttctcgcatcttgcgatgctgtactggataacgagcagcaacaacagccatgcatcctcgcttacatccagcgacaaagagtggattcagcaacagatagaagagcaggaaagtagcggtgcaagccgcgaggcagctatcaatgagctcaaagctgccggggtagatacctcatcgatgacggttgcggataacagccaacacgcgtcgactgtctccttctcctacgatatgccgacagaattaaaggcgggtaaggtctggacgttcgttgtaaatgccacatggaatgataaaaaacaggctccgtcatgcgagttgcaaggcgcaaaatttatggcagacaaagacaagttatacggcatgtggaaagcacctgaaactgttgggcagaaaacgcaaatgaagtgcaaagcgtttggtgtggaagaaattaaaacgctggtgtctgtctga

SEQ ID NO: 185259 - DNA, 297 bp, Klebsiella oxytoca; identical to SEQ ID NO: 23420

SEQ ID NO: 185260 - DNA, 378 bp, Klebsiella oxytoca; identical to SEQ ID NO: 23419

SEQ ID NO: 185261 - DNA, 135 bp, Klebsiella oxytoca
atgcagatcaggatgctggtattgactgatggtcagctggtggccgacgcgaacattatgaaccggaatcgcccggaacaggtgttgctggtcggttggctgtctatggccactactttagcccatttctcctga

SEQ ID NO: 185262 - DNA, 975 bp, Klebsiella oxytoca
atgaaaactcaaaacactccagctgatcacagcgacattctttttacccatatcgtgaatacgctggtggaccttgctaaacatgaaggtactttaatgacgtttgaaggccttctgcggaacggtatcggggtagatgaagagatgatggatagcatgctgggggtgagtcaggacatagctgctcagtgcgtggttcagctaagggattgtggcgccataacgagccctgcggtatatgagatggttacacacgttgaacaactggcgatgcgtttagccccagactggtggaagaaaatcgtgccatgctcggttcagccgctgcggtactaccaggaagaggctagggcaaaacgcgagcgatttattgtctgtcagagggagcgccagtaccccttcaacgtctacgtaacaggtcaggtagaatatccggaagatgacccgatatatggcacgtacgttacagaaggtacgttcctggtaggtaaagcgaaaaccatacatgatgccctggaatgcgcaaaagaagcttttacgcggggtgaatggattgtcctggaagaagaagggcgggatgagttcgttgaccacctgacaggacgtgaccaggggccggtgagtttttccgaaatgactatagagatccgcgatagaggtgacaggctggtgttaacaggcaatgcccgcacactggagtggcaccgccatgtaaccagccctgatgagatcgaaaagataaaagcacagcaaaaagacctctatcagaaagcaagctatgagagtggctgggacaactacgagactgcacgacagctgcggcggcaagctgaacagttatctctcggttttgttgaagaatgctggcgtaaccatccggaagtaattcaggcggtagagaagttcgagtatccggtgtttatagatgaggagatggctctttttaatgcagatcaggatgctggtattgactga

SEQ ID NO: 185263 - DNA, 159 bp, Klebsiella oxytoca; identical to SEQ ID NO: 23262

SEQ ID NO: 185264 - DNA, 2604 bp, Klebsiella oxytoca
atgcccggccacatcgtcggtcacctgcagatcgctgaccggagtcacaactgtatccaccgtcagttcaaacgccggggaacgctcgctgacgtttccggccttgtcggtcacggtggtgctcaggctgtggtcgccctcgttcagggtgtccggcgtgtagctccagcgtccgtcctccccggcaaccaccgtacccagtacggtgtcgccgtcgtagatcgtgactgtggcccccgcctcggcggtaccgctcagggccggcgtggcatcgttggtcagatcgccgctggccagcgggccggtatgcccggccacatcgtcggtcacctgcagatcgctgaccggagtcacaactgtatccaccgtcagttcaaacgccggggaacgctcgctgacgtttccggccttgtcggtcacggtggtgctcaggctgtggtcgccctcgttcagggtgtccggggtgtagctccagcgtccgtcctccccggcaaccaccgtacccagtacggtgtcgccgtcgtagatcgtgactgtggcccccgcctcggcggtaccgctcagggccggcgtggcatcgttggtcagatcgccgctggccagcgggccggtatgcccggccacatcgtcggtcaccagcagatcgctgaccggagtcacgactgtatccaccgtcagctcaaacgccggggaacgctcgctgacgttcccggccttgtcggtcacggtggtgctcaggcggtggtcgccctcgttcagggtatccggcgtgaagctccagcgtccgtcctccccggcaaccaccgtacccagtacggtctcaccgtcatagatggtcaccgtggcacccgcctccgccgtgccgctcagggttggtgtggcgtcgttggtcagatcgccgctggtcagcgggccggtgtgtccggccacatcgtcgatcacctgcagatcgctgaccggagtcacgactgtatccaccgtcagctcaaacgccggagaacgctcgctgacgtttccggccttgtcggtcacggtggtgctcaggctgtggctgccttcgtcaagtgcatcgggggtgtaactccagcgtccgtcctcgccggcaaccaccatacccagcaccgtgtcgccgtcatagatcgtgaccgtggcccccgcctcggcggtaccgctcagggtcggtgtggcgtcgttggtcagatcgccgctggtcagcgggcctgtatgcccggccacgtcgtcggtcacctgcagaccgctgaccggagtcaccgtcgtgtccactgtaatttcaaacgccggagagcgctcgctgacgttcccggccttgtcggttacggtggtgctcaggctgtggctgccttcatccagtgcatcaggggtgtagctccagcgtccgtcctccccggcaaccaccgtacccagtaccgtgtcgccgtcatagatggtcaccgtggcacccgcctctgccgtgccgctcagggccggtgtggcgtcgttggtcagatcgccgctggtcagcgggccggtatgcccggccacgtcgtcggtcacctccggcgcactggcagacggcgcggtggtatcaatcgtcagctcaaacgccggggaacgctcgctgacgttcccggccttgtcggttacggtggtgctcaggctgtggctgccttcgtcaagtgcatcaggggtgtaactccagcgtccgtcctccccggcaaccaccgtacccagtacggtctcaccgtcatagatcgtgaccgtggcacccgcctctgccgtgccgctcagggccggcgtggcatcgttggtcagatcgccgctggtcagcgggccggtatgcccggccacgtcgtcggtcacctgcagatcgctgaccggagtcacgactgtgtccaccgtcagctcaaacgccggggaacgatcgctgatgttcccggccttgtcggtcacggtggtgctcaggctgtggctgccttcgtccagcgcatcaggggtgtagctccagcgtccgtcctcgccggcaaccatggtacccagcaccgtgtcgccgtcgtagatcgtgaccgtggcccccgcctccgccgtgccgctcagggttggtgtggcgtcgttggtcagatcgccgctggtcagcgggccggtgtgtccggccacgtcgtcggtcacctccggcgcactggcagacggcgcggtggtatcaattgtcagctcaaacgccggggagcgctcgctgacgttccccgccttatccgtcaccgtggtgctcaggctgtggctgccttcatccagtgcatcaggggtgtagctccagcgtccgtcctcgccggcaaccacggtacccagcaccgtgtcaccgtcatagatcgtgaccgtggccctcgcctcggcggtaccgctcagggttggtgtggcgtcgttggtcagatcgccgctggccagcgggccggtgtgtccggccacgtcgtcggtcacctccggcgcactggcagacggcgcggtggtatcaattgtcagctcaaacaccggagagcgctcgctgacgttcccggccttgtcggtcaccgtagcgctcaggctatgaggaccttcgctaagctccggtaa

SEQ ID NO: 185265 - DNA, 1866 bp, Klebsiella oxytoca
atggctggccagtatgaaaaagcaataacgataaaacaagcgatagattcgattaatttacgccactaccttctgcctgcaattcagcgaaagtttgtctggagcagcaggcaaatatgtctgctatttgattccatcatgcgagactacccgataaactctttcatgatgtgggatatccgtagtatcagtattaaaaacgattacaaattttatgagttcctgaaagaatactgtcagcgatttaatgaagaaaacccatgtgtaccaacaaatgcgggatttcatgattttaaggcggtgattgatggtcagcagcgtctcacatctttatatattggactgtgtggaacgtatgcgtataaacagccccgggtgtggtggccttcggcacaggatgatcgcatcctgccgcccagaaagctttacgtcgatttaacagcgccacttgactcagacgatgagcccatgatgaagtacaacttcaggttcctcaccgacaagcaatacactgattcacttaccgacaacaaacatcactggttctgccttcacgaaatattcaaatacgagcaaattgattctccggatgatatcttatttaaagttgtcgtaccagaactcgaaaaaagaggactcatttccagtgaattctccagaaaaaccctgcttaaactttataccaagataagaactgagaatcttatccactacttcaatgagagcagccaggacattgatcatgtgttggatgttttcatccgcacgaatagcggggggacaaaacttgagttctccgacttactgatgtcaatagctgtggcacactggcagggtgatttcagaagagaactggatgaactaacaaaaaacatttatcagaataatgaaatggggttttatattgaaagagactggttcttaaaaaccagcctgatgcttattgactctgacgtccggttcaaagtaaaaaatttcacttcagaagaggtcggtaagatacaacaacaatggtctgaaataaaatcctgtatcaaggagacttttgttcttatcaggcgattcggcatcaatccacagtcactgatatctaaaaatgcagtcattcctgtggtctactggctttacaaaaagcaaaccaatggacacccattatatacaacgattaatctcctgaataaaaaccacaatgaacgctcagtaattagccagtggttttacatggtacttctgaaagggatctttggaagccaggcagatgcgctactcacgagcatcagagacgtaatgaagaatagtctttcagatgttcattttcctcttgagaagattattgacaggtacaaaggctcgaataaggacctcagatttgacgacgaatacatcgaaagccttctcaatatcagatatggcgaaggtcgctgccgcgcactattgcatcttctgttccctgaaatgaatccgaccgaggtgtttcatattgatcaccttcatccaagaaatcatttttcaaataaatatcttgaaaaattagattatattgtgaattcaccggagaaactcagcttttacgaaaatccggaacactgggacaccatacctaatcttcatttactgaatcactctcagaatacaagtaaacagaatacatccctgaaacaatggttatctcagtcatcaaacaactatacaccatcaatgctgttagtttcagatgaaaatattgagttcagtcgcttcccggatttctacaatgagcgaagaagcgccctgaagcaaagactgctgaatcgggtatttcttacaacaaaaatagattcatcaccatccacaatagatacggatgaagaaattctcaccgactga

SEQ ID NO: 185266 - DNA, 1569 bp, Klebsiella oxytoca
atgagcctaccgcagacacttatagataaaataaaaagaggaagagttgttctatttctaggttccggtgctttaattggcgcgaaactaaaaaaatatgatgtgcctaaagggaatgatttaggggtatttatatctgatagattccttaacggtgattataaatatgaatctttgactcaaattgctgatttggcaatatcagagcatggaataatagatgtgcaagagtttattagggagatatttgaggaccttgaagttaacgatttccataaaataattcccgattttcaatggaaagctattttttcaactaattatgataggatgatagagttttgttacgaaactaaaaagacaaatcaaactctttctatacatttatctaataatgatggctttaatgagggtgagaagacaactgatatacttaattttataaaattgcatgggtgcataaccagaaccagagacccagagttgccactcattttgactgttgaacaattcaatgattacgaaaaaaatagaaatttactgtttaaatacttatatgagttggctatagaatatagcattgtatttgttgggcatagtttacaggatgcaaacataagacatataatatcaatggttaataataatgtaccccaaggacaaaggcattatttattgaagccaggtataaaagatcccgaaattaatttatgggcttcaaaaaaaataaatgctttaaattttacctttgaggcctttttgagagaggttaatgatgtaataccttggtctgaaagattcaactatcttattacgccagttcagaataatgctatacaaaaaatatttgtaactactgcacctccatccgaagagcttaatagaattctaacagatagcatacaatatgtgcattctgatatgaatactgaacaattcaacccaaaggaattttataaaggttctgatttgggatggtatgcacaaagtgcagaattagctattaaaagatctttattagaccgtttcttagaggaagtaatactaaaacctgaaactgaaagaagtgataccgccgagttgattttgctcaaaggtgaagcagggtcaggaaaaacagtttttctccggcaagttgcttgggaaatgagggttatggattttggatgcccactttgggttaataatggagataatttaactgttgaaatcatcaaagaggtaatagaaaaaaccaatgaaagagtttttctttattgggatgatgcatcattacacgtaaacaagatcgctgcgtttatgaataacgcaataaaagccgagttgaaaataacgataataacagctgaaagatataacgaatggagtcaacgttgcgattcacttaaagagttaataacagaagtatattctttgcataatcttagtgagtctgaagtgacaaacttagtcgagaaactagagtttcatgattgcttaggccctaacctcataaataaaaataaagctgagcgtatacaggagtttattgttaattcagagcggcaattattagttgctttgcactga

SEQ ID NO: 185267 - DNA, 420 bp, Klebsiella oxytoca
atggctgatatggcttcaattacagcagggctaaatgcagtaaagctggctttcaatattgcaaaagaccttaaggatgcaaccgcagcgttcaatgaagcagagtttcgattaaaactcagcgagttatacttaagcctgagcgatgccagaatgaatctcgctgaagctcaacaggagataagttctctgcagggggaaatctcatctctcaaagcccaactcagtacagttgatgaattagaattccgggatggtttttattacagaactacatctgttgatggaaagccaaatggtcctttctgtcctaagtgctacgaaggctctcccaaaaaactttcctcagtgatgcaagccacagggattaatgcccatttcggcagcaaatattgccatgcctgtcagagccatttctaa

SEQ ID NO: 185268 - DNA, 573 bp, Klebsiella oxytoca
atggcattactgggatatgcaagggtatcaaccagccatcagaagctgacagtgcaaattacagagctgaaatcaattggcgttagagatgacagaatttttactgacatgatgtcgggagccacggacgaccgcgcagggttgcagcagctgcttgcccgggcggaaaaagacgacattatcatttgtaccaaaatggaccggctagggcgcaataccgcagatatgatccatatcgttgatgcctgctataaaaaggggattgccatccgttttcttgaaaatggcctgagtaccgaagggacaatggggaaaatggtgattcagattttggctgctgtggctgaggctgaacgggagcgtattctggaacgtaccaacgagggactgttgattgctatggcgtccggtgtgaaattcggacgtaagccccacctgaaatcggactcggccatggcgcttattgatcagaaacaaccagccagagtggttatggaaaaaacaggcatttcgcgggccacttactttcggttaaaaaaatacattaaaaatcagcaatcgaataataactaa

SEQ ID NO: 185269 - DNA, 945 bp, Klebsiella oxytoca
gtggctgccttcatccagtgcatcaggggtgtagctccagcgtccgtcctccccggcaaccaccgtacccagtacggtctcaccgtcatagatggtcaccgtggcacccgcctctgccgtgccgctcagggccggcgtggcatcgttggtcagatcgccgctggtcagcgggccggtatgcccggccacgtcgtcggtcacctgcagatcgctgaccggagtcacgactgtgtccaccgtcagctcaaacgccggggaacgatcgctgatgttcccggccttgtcggtcacggtggtgctcaggctgtggctgccttcgtccagcgcatcaggggtgtagctccagcgtccgtcctcgccggcaaccatggtacccagcaccgtgtcgccgtcgtagatcgtgaccgtggcccccgcctccgccgtgccgctcagggttggtgtggcgtcgttggtcagatcgccgctggtcagcgggccggtgtgtccggccacgtcgtcggtcacctccggcgcactggcagacggcgcggtggtatcaattgtcagctcaaacgccggggagcgctcgctgacgttccccgccttatccgtcaccgtggtgctcaggctgtggctgccttcatccagtgcatcaggggtgtagctccagcgtccgtcctcgccggcaaccacggtacccagcaccgtgtcaccgtcatagatcgtgaccgtggcccccgcctcggcggtaccgctcagggttggtgtggcgtcgttggtcagatcgccgctggccagcgggccggtgtgtccggccacgtcgtcggtcacctccggcgcactggcagacggcgcggtggtatcaattgtcagctcaaacaccggagagcgctcgctgacgttcccggccttgtcggtcaccgtagcgctcaggctatgaggaccttcgctaagctccggtaa

SEQ ID NO: 185270 - DNA, 246 bp, Klebsiella oxytoca
atgatgcactgtccgttctgcaaaaagtcggcgcatacccgtacctcccgctatctgtcggagaacgtcaaacagcgctaccaccagtgcaccaatattgactgctcggcgacgttccgcaccactgaagctatcgacgaggttatccgtcctccggcggagaaaacgccgcctgtcgcggagccggtcacacctccggcaccccgtaaagtgcagggctgctacagctcgccataccgccattaa

SEQ ID NO: 185271 - DNA, 492 bp, Klebsiella oxytoca
gtggcccgccgggagctggcgcaggaatgtggcaacctgaccgacgtgctggcctttgaacgtgaccagctgaaagccacctgcaacagcaccgcacgggcattccgccaggcgcatcatgctgtgctgagtaaatatgctgaggaagagcttaaccgcgcgctgaatgacaccctcgggccactggtccgggcgatggtgctgaaagcagaggtgatggaaaatccgctggccaacaccaccggccatcaggggtacaccgagccggagaaggaggttatgcagcaggtggtcaccttcctgaccgggaaagtgagcgccttctctgtcacgccagccgatgagccagtgctctccctgaccggcttcccggtcgttgcgcttccacatatggaccatgacgccgccagcacacccggcgagcgtaaagtctggcaggagaaaatgcgtcagcgcgaggctgacctgaaagcgcgggggctgctgccatga

SEQ ID NO: 185272 - DNA, 945 bp, Klebsiella oxytoca; identical to SEQ ID NO: 185269

SEQ ID NO: 185273 - DNA, 1026 bp, Klebsiella oxytoca; identical to SEQ ID NO: 129696

SEQ ID NO: 185274 - DNA, 1209 bp, Klebsiella oxytoca; identical to SEQ ID NO: 139615

SEQ ID NO: 185275 - DNA, 321 bp, Klebsiella oxytoca
atgaaaacgccattaccgcccgtattgcgtgccgccctgtatcgccgcgccgtggcctgtgcctggctgaccctgtgcgaacgtcagcaccgctatcctcacctcaccctcgacgcgctggaaagcgccatcgccgccgagctggagggcttctacctgcgccagcacggcgaggaaaaaggccgtctgattgcctgtgcattactggaagatttgatggaggccgggccgctgaaagccgccccgtcgctgtccttcctcggactcgccgtgatggatgagctctgcgcccgccatatcacatcgcctgtactgcactga

SEQ ID NO: 185276 - DNA, 321 bp, Klebsiella oxytoca
atgaaaacgccattaccgcccgtattgcgcgctgccctgtatcgccgcgctgtcgcctgtgcctggctgaccctgtgcgaacgtcagcaccgctatccccacctcaccctcgacgcgctggaaagtgccatcgccgccgagctggagggcttctatctgcgtcagcacggcgaggaaaaaggccgtctgattgcctgtgcattactggaagatttgatggaggccgggccgctgaaagccgccccgtcgctgtccttcctcgggctcgccgtgatggatgagctctgcgcccgccatatcacatcgcctgtactgcactga

SEQ ID NO: 185277 - DNA, 840 bp, Klebsiella oxytoca
atgcacggtaagggccgtggcatagccctccgctatccacagacgtttcccggcctgttttttcccttcgatagtgtggctcgctccttttaccgcgccgcctttcagggtgcgcttgagcccctcagcattaataagctggaggttaaccagcgtgccggactcgtcatacagcggcaccaccacatcaccggcgcggtaggccacgccgccggttttgtgagacgcggtcagcgtcagacactcacgaccggcaaagcccttgcgggtcaggtaagcgttgccggtggccgggcgggttttctccagcagtctgacggccagcgcggctgctgctttgcggtcggcttcagtctcagcctctgcggctgctgtcaccttcggggccaccggtggcaggtggccggtgacggcgttcaccttcccggcagcctcggatgccgacacgccgaataccttctcaaccagtttcaggccgtcaccggcgccgcactggttacagaaccatgtgccgcgcccctctttatcgtcaaagcggaaacggtcagcgccgccacacaccgggcaggcctgatggcggttttttatcactttcattcccagcgccgggagaatgcgcggccagtggccgcacgcctgttttacggtgtccgttacgttcattttcatggttttctccctcagtgcagtacaggcgatgtgatatggcgggcgcagagctcatccatcacggcgagcccgaggaaggacagcgacggggcggctttcagcggcccggcctccatcaaatcttccagtaatgcacaggcaatcagacggcctttttcctcgccgtgctga

SEQ ID NO: 185278 - DNA, 1221 bp, Klebsiella oxytoca
atggacgaaaagtccctctacgctcatattctcaatctgtccgctccgtggcaggtaaagtccctttctctcgatgaaaatgccggttctgttaccgtcactgtcgggatcgctgaaaacacccggttagcctgtccgacctgcggtaaatcctgtcctgttcacgatcaccgtcatcgtaaatggcgccatcttgatacctgccagttcaccacgattgtcgaagccgatgttccccgcattatgtgtccggagcatggctgccagacgttgcctgttccgtgggcagggcctggcagccggtatacgctgctgttcgaatcgttcgtgctctcatggctgaaaatcagcaccgttgatgctgtaaggaaacagctaaagctcagctggaatgcggttgacggcattatgacccgggcagttaagcgagggcttgcccggataaaaaagccattatctgcccgtcatatgaatgtggatgaggtcgcctttaaaaaaggacaccgttacataacggtgatctccgatcgcgatggccgggcgctggccttaacggatgatcgcggcacagagagtcttgccggctatcttcgcacgcttactgacgggcagttgctggctatcaaaacgctctctatggacatgaacgcgggctatataagagccgcacgtatccacttacccagcgcggttgagaaaatcgccttcgaccgcttccatgtagcgaagcaactgggtgaggtggtggataaaacccgccagaatgaacatccacacctccctgttgaaagtcgtcgtcaggcaaagggaacccgcttcctgtggcagtacagcgataagtggatgaccgaatccaggcaggaaaagctgatatggctgcgtgcacagatgaagctgacgagccagtgctgggcgctgaaagagctggcaaaggatatctggaacaggccatggagcgaggaaaggcggaatgactggcagagatggctggcgctggcggccgacagtgacgtccccatgatgaaaaacgccgcgaaaacgataggaaaaaggctgtacgggatcctgaatgccatgcggcacagtgtctcaaacggaaatgcggaagcactgaacagcaagatcaggctgttgaggataaaagcgagggggtaccgcaaccgggagcgctttaagctgggagtgatgttccactacgggaagctgaatatggcgttctga

SEQ ID NO: 185279 - DNA, 267 bp, Klebsiella oxytoca
atgcacaccgctttttcttccccgtcttctgcccctgccgcgccgctgatgccggtttctgatgccgttcaggagcgctttattcgcctgcccgaagtgatgcatctgtgcgggctgtcccgctccacgatttacgacctcatcagccgggaggctttcccgaaacaaatctcgctcggcggaaaaaacgtggcgtgggcgcagtcggaaatcaccgggtggatggctgaccgtatcgctgaacgcaaccggggctatgacgcatga

SEQ ID NO: 185280 - DNA, 924 bp, Klebsiella oxytoca
gtggcaaagcaaaagttcagaatcaccaactggtccacctacaacaaagctctcatcaaccgtggctccctcactttctggctggatgatgaggccattcaggcctggtatgagtcggcaacgccttcatcacgaggaaggccccagcgctattctgatctcgccatcaccaccgttctggtgattaaacgcgtattccggctgaccctgcgggctgcgcagggttttattgattccatttttgccctgatgaacgttccgttgcgctgcccggattacaccagtgtcagtaagcgggcaaagtcggttaatgtcagtttcaaaacgtccacccggggtgaaatcgcacacctggtgattgattccaccgggctgaaggtctttggtgaaggcgaatggaaagtcagaaagcacggcaaagagcgccgtcgtatctggcgaaagttgcatcttgctgttgacagcaacacacatgaagttgtctgtgcagacctgtcgctgaataacgtcacggactcagaagccttcccgggccttatccggcagactcacagaaaaatcagggcagccgcggcagacggggcttacgatacccggctctgtcacgatgaactgcgccgcaaaaaaatcagcgcgcttattcctccccgaaaaggagcaggttactggcccggtgagtacgcagaccgcaaccgtgccgttgctaatcagcggctgagcggaagcaatgcacggtggaaatggacaacggaatataaccgtcgctcgatagcggaaacggcaatgtacagaatgaagcagttgttgggagattcactgacgctgcgtgactacgatggtcaggtatcggaagctatggccatggtgcgtgcgttgaacaggatgacaaaggctgggatgcctgaaagcgtgcgtattgcctga

SEQ ID NO: 185281 - DNA, 228 bp, Klebsiella oxytoca
atgaaacataccaccctcagcattaaagaactcgaatgccttgagcacctgcgcaacgtcggccactttgtcagcgcgatgatgcaggagcaggactgcacctccctgcgccgcgacccggcgcaacagtcgcagcttacctccgtgatttacctgatgaccgcccagctcgacggcgtggtcgagcgctgcaaccagcgctggttcaccggggagggcaacgtatga

SEQ ID NO: 185282 - DNA, 321 bp, Klebsiella oxytoca
atgaaaacgccattaccgcccgtattgcgtgccgccctgtatcgccgcgccgtggcctgtgcctggctgaccctgtgcgaacgtcagcaccgctatcctcacctcaccctcgacgcgctggaaagcgccatcgccgccgagctggagggcttctacctgcgccagcacggcgaagagaaaggccgtctgattgcctgtgcattactggaagatttgatggaggccgggccgctgaaagccgccccgtcgctgtccttcctcggactcgccgtgatggatgagctctgcgcccgccatatcacatcgcctgtactgcactga

SEQ ID NO: 185283 - DNA, 141 bp, Klebsiella oxytoca
atgtgtagccagttaaaccccttgttcgcagacgcatacctgaagccacagcagactcataatgtgcagccggtgaaacaaccccgttgttcgcagtcggatacctccagcctcattagactcccgatgcatagcaagtaa

SEQ ID NO: 185284 - DNA, 474 bp, Klebsiella oxytoca
gtgactcggactctgacagcgattcggattccgacagcgactcggattcggacagcgactccgattcagacagcgactcggattcggacagcgattcggactcagacagcgattcggactctgacagcgactccgattcagacagcgattcggattccgacagtgactcggactctgacagcgattctgactccgacagcgattctgactccgacagtgactcggattccgacagcgattcggattccgacagcgattctgactctgacagcgactcggattcagacagtgactcggattccgacagcgattctgactctgacagcgactcggattcagatagtgactcggattccgacagtgactcggattccgacagcgattctgatactgaagcacccactgcagcacagaacatcacggttaatgacaatgttggttccatcactggtgtgcttcattccggtgatgtga

SEQ ID NO: 185285 - DNA, 531 bp, Klebsiella oxytoca; identical to SEQ ID NO: 176867

SEQ ID NO: 185286 - DNA, 321 bp, Klebsiella oxytoca
atgaaaacgccattaccgcccgtattgcgtgccgccctgtatcgccgcgccgtggcctgtgcctggctgaccctgtgcgaacgtcagcaccgctatccccacctcaccctcgacgcgctggaaagtgccatcgccgccgagctggagggcttctatctgcgtcagcacggcgaggaaaaaggccgtctgattgcctgtgcattactggaagatttgatggaggccgggccgctgaaagccgccccgtcgctgtccttcctcggactcgccgtgatggatgagctctgcgcccgccatatcacatcgcctgtactgcactga

SEQ ID NO: 185287 - DNA, 195 bp, Klebsiella oxytoca
atggctacaaccctcaccccgtcacacccgcagtttgtctttgtgtttgccgccgttcgtcgcgcagaccgccagccccgtatctgtatgctccgcgccgtcgccggggatgaacacgccgcacgcctttccctcgttcgcgattacgtcctctcgtttgccgggcgtctgccggtggcggaggtgcgcgcatga

SEQ ID NO: 185288 - DNA, 1263 bp, Klebsiella oxytoca
atgaattttttacagcaatttaaatgccttgtatgtgacacggtcattgatacaagaataggtatgtctaatcgagacatacaaccgttccaatttgcatgtccaaattgtgagaataatatatcgtttactcttggggagggagagccagtatttaacggtgcggaaactgtagaaagcaatgactttggcacaacaaatccattcatcgatttgcatttagattttcccgtaggctttggaaaatacgaaataggaaaaacagcattcttaaaaataacaagtgcaataggtcatgaaaaatacttaatgctgaacgcacatctaaatggaatgaattatatttataaacatcgcgataagcttcagcgactcattactcaatacaaacaaggaaattacaatactttcagtaacctaatgaaagaattacctactctgaaaaaacctcgttcgctaaaaatacaagatatcctttccgcactttatacagcgacctctgcaatgtcatttccctttacaatacatgcacataatgctgaaattagtgaaaaaatgccacaatttcttcattatattcagaaaaaccatccaaaacagctaaataaatttttagatgatattattggaagtggatttctgaaaagtttgcatttcgattgtttaagcctatatcccaaaatgcttgactttgaactcccttcacgcccagcgctttactatgattatgataaaaacgtagatttatcaatgattcctgctcgagtttcaactgccgaatttgatgactgtaacaatttttacaaagacttatctgaagtattctctcggcaattaataattgtggccggattgaataatttattaaaacgcggagatcataatatttttgacgattcagtaagactaaataaaaaaggcgatttaattaaaggtttttctagtctcaacgaatatgcaaacgttgatttaggcacaaaaataagcggattggatgatagcttttatatagttgatctcaatgctttagacaacaaactgcgaaatggcattgcacattataaatatgaatataaagagtcaattcagatgattacctactatttcgctaaggaaggaatggaacgcactaaatacaacgaacttagtttcatgtcttttatgaggaagctattactattatttcgcgaggtgcacagcattaatcacattatcaaaaccttatatttttactgtatttttatcgctaaaaagaaaatttga

SEQ ID NO: 185289 - DNA, 528 bp, Klebsiella oxytoca
gtgattgataaaacccaaattgaactcggtcaatttttgtccgaactaaataaagaatcagatcgtggctctgttctaatagcagcatccattttcgatgagtggttatccgagatcatccaggctcacctgttaaatgacaaagtagctaaaggtctactgaatggtgcaacagcgccattatcatcttttgctgccaggacaggcttagcatatgcgttaggactgataatggaacacgaatacaaagaactaaacacactacgtagcattagaaatgcttttgggcatagttggaatggtgttagcttcgcaacacccgaaatacaaaatcaactggaacagctaccttggcttggacccaaggatgttcctaatactcccaaaacaaaattcatgttctttgtttcaatactgcttgccgatttgatgcaccgtaaacaactagtggaaagagataaggtgacctctaaagtatggggtcacactgcgcgcggtaatgtggtcggaaagactacaaattgttaa

SEQ ID NO: 185290 - DNA, 678 bp, Klebsiella oxytoca
atgaaaaaatttaaatggattaaactcaacaatcgtttcactactagtgaaacagttgaaaaactcatgcgtgatccttttactgaagagaaagggaaagggtttatatttgataaatcacgaacatctcattttcacgctcgcttcatcgaaaagataattagcgaagatagaataagtaatctatacggcaacagtaccgctgttgaacgcattgaatatagagtaacgtctttcagttttgatgaacaatacaccccagttttacttattgataatccaccgagaacacttaaaccatttgctcaggcactggtaaaaaaccttggtcttggtaccagcttagaagagattgagattgacccgttcatatggttcagttctttaaacacagagttgacacttaatatagtgcaactagatgtatctcaaattcaagttgctgaatttgctcttgccaagatgcaaattaatagtaccagcgatctcaaaaaatatttcaaagatgagcttattcacaaaaaaatgagacttgatcgattgacatgtactattcatgaccaagaatttagcggtaagttaaaactcttccgaaatggtatggctcaaatcgaagcacgagcggaaaaagagttaaccaaaagactatttgacagtttaatgaatatctacatgtaa

SEQ ID NO: 185291 - DNA, 1080 bp, Klebsiella oxytoca
atgaataacatgaatatttatttcgcaactgacaaaaatatatatgatgcacttcatcataaacgaattaccatcgcaagattacgcgagatattattacggaaaggtattattgttgctcaagacttaacaaaggaggaattaattgaagaggtttgcaaactacctcagggatatagtgatctagattctattaaggagcttgtacaaacttatgataagagagagagtataactagcgtcaagcttcaagcatcatcctctcagacggaattaaaaacagcagcagagttagttaagagaaaattagccactggctctggtgaaacagtaaaaatcactgcgaaaaaagatgggtctttagcaatagaggtaaactaccaagaagtagacttgtccagaacagcattgcgtcagatagacaaccgaaacatcaagattgatcttactgtaaataacgataatgttgatattcgtatgcctcagaaccaaaaggctaaagatataataacactattacaaaaagagttgtcaaagattaaatccgttgatgttgaaaagtttgaaatttctttagaggcaattcctacaccagcgctaagaagtcagttttttcaagaggttatgggcggcttgagtggatatgaaattgacgacgttactaatgtagagcttaaccgttcaacaagcaaaggtgatgacgaggaagaagaagaaatcgagacaggattcgtaaaaaaagcggttctaaaaggtgattctgttaatagttctgctattttcacccaattacacaacaaaggatactatatcggaagaattgcttggtctgctaaacctaaaaacggaataggagacagaattttggttgaagctttctttaaggattcagaaaattgctctgatttttcctatcaaattaaaggaatcaataaccaaaaaggtagtggatacaatgttactattcgtgcagcaaatgaagttgaaaagaagaaaatcagcctactaattgaacagtcagcagcagacgcctataatatcgtgacgggtaaaaaggtggaagagcatgaaaaaatttaa

SEQ ID NO: 185292 - DNA, 1002 bp, Klebsiella oxytoca
atgggcggagagacctcttcaatacagcatgttgcaaataagataacccaagatatttttaaaattttcaaatggcaacgagctactagtcaagatatgaactgggattgcggcctagaggctcatgacaaaaaaacacatcctagcgatgtggtgttttactataccgatccctatgaagaagagattgtgtacttgaacacagacctcaaaagctatgctcaaagtagtatcggcaaagggatggtagaaggtgctctttcttctttagctctcgctacagaatgcgccaatattagccaacagtggtgtaaacgatatgtgcgggatgaatcattaggttacaaagttcgaggtttattatttctctataatcatgacaacctttatgacaaggatttttattcatccgtgatgaaaaaagtcgatcctgaaataataaaatgccccccaaacataaaattacaccttttagatccattcaaaatatccgatatgataaatatagcatcagatattaaaatgcttattggtaccggggctttacctcaaccagatttgtactatttctattacccagacttagcactaactaggataaaacatcctatcaacaataagactgcagctactgttgaggtcttaacatcaccattcataataataaagcatgaagaattcgattggatgggtgaaaaagaagatagtggttacgtaatttattataatcaaccagggaatagtgaagatgagttcatctatttccttgacatgctttctaattatcaaatactgactgatgcaaaaagaataaaaattagacattgtcatataaatccgcatgaagactccattcatcactttgaaagagcaaagcaaaaatatagtgcccattggctatcaggcgaaaatgaacgtttgttttcaaaagttgcattcgaaaaaacagctacaatggtaattcaatacagtcttgaagctataggcatggggcaacgttaa

SEQ ID NO: 185293 - DNA, 438 bp, Klebsiella oxytoca
atggaatataacaacggcgccgttggctcactgtggaccagcgcggtcaacagcggcgcgatgcactcgcaaaaagtccgcgttattggcgaaaaagccagcatcgaatggtgggatgagcgtccaaatcagctcagctatgaggtacagggcgaaccggcccgcgtcctcgagcgcgggatgccctatctcagccagcaggcgctggcggacgaccgcattggcggcggtcaccctgaagggctgttcgaggcgtgggccaacctctatcgccgctacgctatcgccatcgacgcgatggatcgcggggaccaggcgttcctggagaccttctggtatccggacgtcgaagccggtcttcacggcgtttactgggttgagcagtgcgtcaaatccgccgacgcaggcggccagtgggttgactttaactgccaataa

SEQ ID NO: 185294 - DNA, 1365 bp, Klebsiella oxytoca
atgacacagactcaacgcctggacgtcagggagttaatcaacgccaatccgctaagccgctttcagaagctggtggtgtttttaggcttctgcgttatcgcgctggacggctttgatatcgccatcatgggatttatcgccccgacgctgaagcaggaatggggagtaagcaatcaccaactcggttttgtcatcagcgccgcgctgataggcctggcgctgggggccattttctccgggccgctcgccgactggctgggacggaaaaaaattatcattaatagcgtcttcttcttcggcttctggaccatcgccaccgccctttcacaaaatattgagcagatgatggttttccgcttcctgaccgggctgggattaggcgccgccatgccgaatatcggcaccctggtgtcagagtatgcgccggagcgccagcgctcgttcctgattacgattattttttgcggcttcacctttggcgcggcggcgggcggtttctccgcatcctggctaatcccgcagtttggctggcactcgctgatgctgcttggcgggctcctcccgctgctgttcgctccggtcctgatctggctgttaccggaatcggtgcgttttctggtcgttaagcgcgcgcctgccgaacgtattcggcggattatgcaacgcctctatccgggacaaatccccgatgaggccgagttcagcctcccggcccagcccgtccaggcaaatgccatgcgcatcgttctctcccgccagtatcgcttcggttcgatgatgctctggctggtttactttatggggctttttttggtttacctcctcggcagctggctaccgacgatggtaaaagaggtgggcttaacggtcggccaggcggcggtaatgaccgcaatgtaccaggctgggggaacccttggctcgctgtttgcgggctggctaatggaccggatcaacccacatcgggcgctcgggttgatttacgcggttggcggcctgtttacgatggcgatgggctatgccgcggcaagctttgcgctcatctgcctgctggcgtttatcagcggagcctgcttaaacggcgccaataccggcatgaacgcgctctccgcccgctactatcctaccgaagcacgggctaccggctccagctggatgcacggcgttggccgcatgggcgcgatcctgagcgcctttgccggggcggagatgctggcgctgaatatcagcttcgaaagcgttttcctgatccttggcattcccgccgcgataaccgtcgccgggctggcggccaaaggtattttcgcggctggcccgtcggcaagggccaccgcgtcaacctcgcccgtcagaagtacattttaa

SEQ ID NO: 185295 - DNA, 300 bp, Klebsiella oxytoca
atgaaagaattaactattggcgaaatggaatctatttctggtggttttaatctgttcggttttgctaacagcattaccagccttattactaatagtgggaaccatctgagcgattttattacctccgcaggtgctaccatcgccaatgccgtcgttaacggtaccgttgagttcggtaaattcctgaccggcgcatctgactgggagagctacgttgccgcaagcaacgaaaactggagcaatgctgtgcacgacctgtcgggcgagtggaacactttcactaacagcatcaccgcctaa

SEQ ID NO: 185296 - DNA, 192 bp, Klebsiella oxytoca
atgcagcggccgatccgcgaagcgacgccggaagagctggcgtcttttgcccgcgatgacggcgcgatggggccgaaaatcgcggcggtaagcggctatgtgcgccgtcggggcaagcgggcgtggattggggcgctgtcgcgtatcgatgacaccctcgccgggctggcgggaacctgcattaagccctga

SEQ ID NO: 185297 - DNA, 2976 bp, Klebsiella oxytoca
atgcgggaatatggttatagctccagccaggtgcttgatattactgaggctatatctactggtttaaaactttctggcgcgaatgctcaagagtccagttcggtcatcactcagtttagccaggctctggcgcagggcgtgctgagaggcgaagaattcaatgccgtcaacgagagtggcgacagggttatacgggcgcttgcagcaggtatgggggttgcgcgtaaagaccttaaatctatggcggatcaggggcagctaaccattgataaagtagtgccagccctcattagccagcttggtaagctccggaatgaatatggtgaattaccgcagaccgtttcatcgtcggcaaccaaagttgaaaacgcttttatgcaatgggtcgggggagctaatgaagcgagtggagccacaaacaccctgaccggcttacttgatggcgtagccagaaatattgatcaggtcgccactgcagccggagcgcttgttgccgttggcgcagcccgttatttgggaaatctggctcttggtgccagctctgctacggctgggattattagcgcagcaaaaagcgaaatagctttagctgaagcccaggtaagagggacgcaggtttcgacggctcgtgcgcgtgctgcagtttatcgtgcccagcaggcactggcagctgctcggggtacagacctgcaggccgccgcagaaaaacggctctcactagcgcaggagtcgcttaaccgtaatattcaggccagagtatccgctcagactgcactgaactcggttactgctgtgggttcccggctcatggggggggcattgggcctcgttggcggtattcctgggctggttttgcttggtgccggcgcctggtacacgatgtaccagaatcaggagcaggccagattatccgctcaggaatatgcaaaaaccattgatgcagtccgtgaaaagacaaaatcaatgtccctgcctgaagtttctgataatgagaacaaaacccgtcaggcgctggaggagcaaaaccgtcttgttgatgcccaagcatcaaaagtaaaaagcctgaaggaagagatcgcgggctatcagtatgtcctgtccaatcctggaccgacaaccagtggcggtttcatgataaaccacctgacttcggtcgaaacggtcactcgtggtctggaggaagcgacttccgctctggccgttgaacaggagagattagctcagatgcaggctaagtctgagtcgatccagtcggtactggaggggatagagaacaggcgaatagcattaatccggcagcaggccgcagaacagaattcagcttatcaatcgttaataatgatgaatggtcagcatactgaatttaaccgtctccttgggcttggtaataatttactgatggcacgacaagggttggttaatgctccgatgcggattccgcaggctgacttaacatcacaacaaacaaatgctcttgagaaaagtcgccgagatttagcattatcgaaacttaagggcgaggcaaaagagttagccagacttggttttgccgccgacgatttgggattgactagtgatcctcaacaccagacaggaaggcaggaattaattaataatggaattgctgagtggagaaataatgaatccaataaacccgcccggaaagcgcctaaaagcgaagaattaaaagccgctgagaagacagaagatgtttacaagcgtcttattaaacagcaggaagaacaaattgctttgggaagccagaataccgaactggctaaagtaaaataccaggtcacgcagggtgagttagcctctcttgagcaagctaaaaaagaaacccttctgcacaatgctgcgcttatcgatcagaaaaacattgctgaacagttaaaaacgttccgtgaggggctggctgacagcaacgctgctgcacgcgacagggggaatattgattttcttggtgccgggatgggggataaggcccgtgaccgcatgaaggaaatggcggatattcgtactgattttctcaaacagcagcgggacctgcagcgggatttcagcaaaggtcagatttctgaggacctgtacaaacagcaaacggaagcgctacaggcggcgcttactgaacggctccagattcaggaggactactacaagaaaaccgatgaacagcagtcagactggcgggcggggatcagcgattcactgatgaactacgccgatcaggctgctgacctcagttcaatggcagcatcagcgaccagcgagattctcaataacaccacgaactctatctccaacaacctgaccagtgtcctgactggtgcgacttcgttcaaagatgggatgtcaaatatcttcagctctctgggtgaaacggtgattaagacgctgatccagatggcaacacaggcgttaatcaccaaagcgattatggcgtcgtttggcggtggtgctggtgggatgttcggtagtctttttggtggagcaagtggagcagcaagtagtggaactgcgctgcaaagcttcggatcgtcttttgcctttaatgccctcggtggtgtctacgattcgccttcactttccgcatacagcggcggcgtttacagcactccgcagtattttgcctttgcgaaaggtgcgggcgtgtttggtgaagctggtccggaagcaattatgccgctgacccgtggcgctgatggttcgctgggggttcgtgcggttggacgtgagtcaccggcagtccaggatgctgcaaggcagattgaggcgcaaccacgaatcgcggtcagtgttgatgcccgtagcacgtttagcgggcaacctgacgacgcaacaatgctggcagtagatcgaaggaatgctgcactggaacgacgcatcatcaacacactcactgctgaagtaaacaacccccagaagaaattcggacgcgccatctactccaatctacagcccaaaaaaccaagatag

SEQ ID NO: 185298 - DNA, 2232 bp, Klebsiella oxytoca
atggccgacaacgaaaagcttggctcgacatcaccacaggtgttgctgaagaacgcaattaacctggataaattagtcaatgaccgagaatcggagtcattacccgatcgtttcgatgtactccgccgcacctggttcggcatggagaaggcccatgatcgtcagatgcaaagccaggaaaatcgttttgatacattcattgcgagctctggctatgatgtgataggtgactacacttcaggccccctgaagattgaagaatataaccagctcattcgctataacaacgagttgtataaactcaccgcagcgacagatatcccgtttaccacggctggtaatactgacgaaacatggaccagtactgacgctgcgcattttgtatctgtcggtgatgcagcgcttcgccaaaacctggattcaggcgaagagggtatggggacctggttaagcttccatgttcagaaaggtatggttaagcagaccctgaatgattttctgaacaattctgtaaaatttgtcactccttttatgttcaaaagcctcgcaactgatggtaactggagtgcagctatagctgcagctgatgccaaagctgcagaacttggcctccccctgatgggtttcggccaggtattttctgtcagctctttggctctgatttcagaccacatcgaaggagtaggatttattcccgcggacggatattccggcgcgggaccgacttttaaaatcaaccaggttacgggaaatctttatttcaaaggcagttgcaagggctttacgtccgtgggggctaaattcattcgtggtaactattctggtattccgcaattaaccctcgatgcgtgcgaattttcgaataatggaagcctgctacgcaccacctgcgttaacgccgtgaataccgcgtctgattttgttattccggtcgtggacgcaacgggttttgttgtcggaaattacatctggattggtgattccaaatgtgtgattgcatcgatctcaggcaacaccattacgcttgtcaataatggcagcgcgccaacactgtattcaggcggaacaggaacaggcagttataaagcggggcagttttttacccgtgatggtgacggaaagaacggtgcaacgattggcgaaggtggcacagaggctggctggggcctcaccatacaaaatggtataaaactgatgaataatggctggttcggcctgtttcattacgtcagggccaaaggcgggactgtatctattaaaggaaaggtcgagggcgggaataatggttactgcgccatggggctggcttatgtccaggggggtgaaatctccgggtttaagttttacggtaatgggaataatggattggatattttcgagacaaccggggacctgtctgtttcggacggtctggtctatgagaatggtgtggacgggatgtttatctgcggcaatggaaccagccccaaaatatcaagaattaaaacccgcaataacctccgtataggcatcctcgcgtacgggagaacctcagcaccggtggggttcaatatcactgactgcgaatgtattaacgacgggctatataatatttgcatgacgggtgttcgttctggcgacgtccggggtaacacgctgggcggtgcgaaagaagcgattaaagttgaaggcagaaacgggttacttaatccatcaggaatcactatagattcgaacgtgttcacccttgagtcaactgataacgacattaacgccaacattggcggctacaccgatggcggcgaaagtggcgctatctctgtcctgaacaatcgctacaacggtcgaaacccgaagcataccatcagcaactttaaccgctcacagagtcgctttttgcctgtaggtcgcatgagcttcacttccagctataccgcagcagtcggagcaacaatcagcgtcccgctggtattctacaagccaaatgcgacgagcaatatcgatgtgcttggcggtcaggtggaaatccagatttgttctaatccttcactgctgaccatcgggacggtgagcagtgcattgcgtacagccggaatagagctgagcaatggggcaacaacaaacggcaaaatcctggcaatggcagcgttcggtacgctctcgtacaacttcacactgacaacggcagggacagtttaccttaacatccgttcgccatacggcgacggcgtcattcagttaacctggacataa

SEQ ID NO: 185299 - DNA, 267 bp, Klebsiella oxytoca
atgagtttcacgattaaaaagaatgtcactccgatcaaggtttaccactccctgcagggggcggctatttcaggtgagagcgaagagatcagcgtgacctacgaggtgacgtcaatcctttcgctctctgacctggtgggtgtggctgaatacacggtaacacctgaaggtgcagcaatgagcgggaggggtgagctcccgttcgtttattccggaacgggaaatccgctggaagaggctgaagaggaactcagggagggcttatag

SEQ ID NO: 185300 - DNA, 342 bp, Klebsiella oxytoca
atgatcagtatttccggaatgtcatctcacgttcttgaccaggacatcacgactgacggctcgaccacgacctatcagttttccattaacacatttcctgatggcgcgattgcgttgctggctgtttcactgaccacatcagggacggcgaactgctcttatctgctgtccattcacaagcacaataacgtcggcgcaaaggtggcgacattaagcttttatacctacaacagcctgagcatttcattttcagcgacgtacacaaccatcacactgaccctaagttctgccgtggtgggtaatctgaaaatatcgcctgtattacttaacgcagatcagtga

SEQ ID NO: 185301 - DNA, 1371 bp, Klebsiella oxytoca
atgggcgacaatattattacccacgtgcctacagaattagacgaccaaatcacgacggtaaatcaggctttaagcgcccaggctcccaccatctggcaatatgccagatatgtcacgaacaagccgactacgtttccttccacgtgggactgggggcctgcatttcaggccgcgcacgataacgataatgtcggaccgctgctaattaacggcgaaacttacaccgtccgaacacctgtcgtttatgaatataccgatgatgattacaccaaatattcaagactcccacgatgtttatcaggaagcgcgagtattgattattcagaactgggaaacggaggggcgggttttaatgactcccttgaagttgacgatacagcgcaacctgcatatgtcacggcgtttaccgtaaagggagcaagcgggtatgttgtcctgcaggaattcgaggggattgtatttcggggaaataaaaacactgcagcgattaaattaattggctgtgatggcgttcggccaaaacgctgcacatttgcctccaaccgatacggcattgtgtttaataatggcaattctgccggaacctacgcggaacttaattcacctgtattcagccgctggcgcggttcgtgccttaccgctatagcgtacgagaagggtaatggcgacacgtcgttccacggctgtggatttggcgagggatgcttcgtcactgttcccgctggccggtcccctgttcttattggcgcgggttgccagccgtacaatgcgccgatgaatgcttacttctggacaacgggcaccgcagcgccagtcatcagaaacaaaagcagtttgcctgctcattttcacggcgagatgaaatgggaaggctcgtatgggacggtgatggcatcaggcgggttagtctatttctacggcgccctgccgcgctgggctggcattgacatggggacaatgcgacaggcgttaaatggcggacctactggctcagcaggcggtaacctggcattctccggtattctggtgccgacgacctctcagtggacggttgcaaacctgggtacgcaggtcgtttttatggattacaacgaagaggcgacagtttcggttgttggtgagtcctattttgcgacattcaaaatacagaccgcccgcaggctgaccaataactgcacaactttgccatttcagttgatcagtggaaacgtaaaccccctgactaagttcagcattacccgtaccagccagggattacgcctgacgacgattgagaacaatacaaaaatcgtagtatggcgtcagcgcggcatgccggatcaatcatccggaattaactacaacgtaacagaccgctggacctcaatatga

SEQ ID NO: 185302 - DNA, 1266 bp, Klebsiella oxytoca
atgtttgcgctttgcgatgtgaactccttttacgcatcgtgtgagacggtgtttcgtcctgacctgaaagggcggccagtagtcgtcctttccaataacgacgggtgtgtgattgctcgttccgctgaggcgaagcccttcgtcaaaatgggggagccgtacttcaaacaaaaggacatgtttcgccggcacggcattatcgcgtttagtagcaactatgagctctatgcggatatgtcgaaccgggtcatgactacgcttgaagagctctctccacgatgcgaaatttacagtatcgatgaggcattttgcgatctgacaggagttcgcaactgtcgcgaccttaccgactttggcagggaaattcgcgagacggttctgcgccggacgcacctcactgtaggtgtcggcatagctcagactaaaaccctggcgaagctggctaatcacgccgcgaaacagtggcagcggcagaccggaggcgtggttgatttgtcgaatctggaacggcagaggaagttaatggctctattgccggtagatgaagtatggggtgttgggcggcgcatcagtaaaaaactggagtccatggggatagacacggtgcttaagttagccgatacggatatctgtttcatcaggaaaaattttaacgtcgtgctggaaagaacagtgcgtgagctgcgtggcgagccatgccttggtcttgaggaattcgcgccggttaagcaggaaattgtgtgcagccgttctttcggtggccgcatcactgaatatcatgaaatgcgacaggcgatatgcagctatgcatcgcgcgcagccgagaaacttcgcggcgagcatcagtattgccggtttatctctgcgttcgttaaaaccagtccctttgcgctcaatgagccatattacggaaacagcgcatcagtaaagctgctgaccccgacccaggacagccgggacataatcaccgcggcgactaaatgcctcgatgctatctggcgagacgggcaccgttaccagaaggccggcgtgatgctgggcgacttctacagccagggcgtagcccagttaaacctgttcgacgataacgccccgcgcaaaaacagcgaagcgttgatggaggtcctggatcatctcaatgcgaaaaatgggagaggggcgttatactttgccggccagggtatacaggcagcctggcagatgaagcgtgaaatgttgtcaccgcggtataccacgaggtatagcgaccttttaaaggtaaggtag

SEQ ID NO: 185303 - DNA, 444 bp, Klebsiella oxytoca
atggcagataatgatgaaccaaacgtttttcaggttggtgttaatacaataactgagtatccggatgggaaaagagttattgagcaaaatgggcataaaatgactcagtatccagacgggacaatggtagctgagatgaatggaggccataaggccgtcattagcagcagtgggacggcgcttactttacactatgcttcaatcaaatacgtctaccctcaaaatatagcaaacgtggtttctgttgacacgattaccaacgcatccggtatgacaaaggtgattacatttatcaacggcggaactgcgtcttgtacatatggacctttgggtgatctagtgtccataacgacaaatagtattaatgcttttcgcttgaataaagatggggatgagatatcttttgacatctcagatagctcgccaaacctgaccgtgcactaa

SEQ ID NO: 185304 - DNA, 798 bp, Klebsiella oxytoca
atggactataatttcaaagaacatttggaaaaagcgcgagagctgtatcagcagggaagtgaggcggctttaagatattgcgcattggaattaagatttgctattgaatgccatgtttataatcaattgcgagcagggctgggtaaaatacccgaatctgtcataaatacatggcaacctcctcaagctataaagtctttatgtatgtttgaagaaacagctgataaggatttaagagtgataattagtggggatgaggggggggatatagaaattgaatataaaaatataaagtataaagacttaagtaaatggtataatactttggggagttatcttcatcaaccgactataaaaaataaaaactttgtaattgataatggtaagttggaagtgattatatcaaagctttcgcacatagctgaatacaatctcataactttccaccgtggttacgaaagaataaaatgtgaaaagtgcggtaaggatattttatttacaaagaattatattgaaaagcataataagttacattgccaaaatcaagggtgtcgtaattatgtgattattagagtggctcaggataaccgctttgagtcatttcagacagctaacataccatgtttcaaatgtgataataaaatagccatgcatttgtgtgatatagaggatggaagccatatcatttgtaaaaagtgcaaaaatgagcatatagtaaggaaatttatttactcaggagatacagtgattcctgtaccagagtatacttttgagcatgcaaatggtattagtgaataa

SEQ ID NO: 185305 - DNA, 153 bp, Klebsiella oxytoca
atgcagtggttcgaagcggcagacctgatcgttaaaggcaccgaaggcgctatcgccgccaagaccgtgacctatgactttgaacgtctaatggaaggcgctaaactgctgaaatgttcagagtttggcgacgcgattatcgcgaatatgtaa

SEQ ID NO: 185306 - DNA, 828 bp, Klebsiella oxytoca
atgaatgaaaagaaaaacaaccttgccaatgtaaataataatttcattggctcaaggactattcctaatacaggtctgctatatcgatttcattttcccagcgacgcggcgcgagagattggccagggatatgcgcttcgccaaaataccattggtatgattgaaccaatgagtttagaaaatactgaaactcataaaattccaccgggagtagcaatagcgggggtttcagggattttagatttgatcggtggggtcatcgatatagctgactcagctttgtcttttgcgactgcagtacctgggcgcgttaaacataatattatgttcaaaaatgacgcggatatgatagttgtacctgggcaggtaaacgttccaaacggttacaattataatgaagtgccaaagatcatgtttcccggagagtccagctcatttagcgaaagtcatttaccgaatgcaaatagtacacaaagactgagcttttcctttagcgcaatctctactgatgaaaatattctgccagtaaccacaaacgcttcacaggctggggtctttaacttcgaagtgtttgttggcagaaatgctaacaccgttttcctggaaagagttcatggttttatctcaacgaatcatgaggttttcgaactgaacgttggcgtcaataacgtgtcaggacgttcattgaattacgttggttttcgcgcggcagcgggaaccaatctaccatcatttggtatcgcactaatggaaacgcagattgcaacggcggcatccacaacgatgagtacaaaaatagtttttacgccgttaaatgtccgctcatga

SEQ ID NO: 185307 - DNA, 654 bp, Klebsiella oxytoca
atgaaacctgaaactttttttgctgcaaataacaggaatagaacggctgaggtcgctcgctctgcatggcgatttttgaataaatccagagtttctgcagaaaaaaatccgatgattattgggccgctagtttcacttgtttctgccgcaatggggattgtaagtagcactttgtctcttgccggaacaatagcagatagagctccggctccacactctcttcgcctgaatattcgttttcaaaatctgaccaatcgggtagcagtggtagacgttgctcaaaattcaaactcaagaacatggaactctcaagccattttaagtggccagactgttgtatttcctttcactattggaggaaggcaggctggtgagcatttattctcaataatggtaacggatgcgacgggtaatcaatctcatagctatggtttcagcataacggataatactaacgatgtgcgagtaacacgtgccattgtcggtactggcggatgggtatcgggacctgcaacgacaaatttacgggaaaacattcccatgatttactcaggtgctgaaagttcaggtttgcctgtgactttatattgtacgtcagtcatggggggagttatgaatcaagccgtgaatattgatgtttcactattaaattaa

SEQ ID NO: 185308 - DNA, 930 bp, Klebsiella oxytoca
atgctggagcaacaaagcatcctggcgctgctgcaaacatttgaggtgacggcaaggcacctgagcttcaccctcgcggcgcatgaaatgaatctgacccaaggggcggtcagccatcggatccgcaaactggagatgcacatcggttttcgtctgtttattcggctgacgcgtaagctggcgctgactgaagaaggcaaacgcctgctgaccacgctaagccactcgctgcgcgcgattaatgatgaaatcgaagacattcgcgagcaggatctgcgcggcacattgcatgtcggcattgctccgacgctggcgcatctgtggctaatgccccgcctgccgcgctttcaggcgcagtggccggggctaaatttacagttccgcgtgcgcgccggggtgatggactttaacgaagagcgcgtggatttggcgatttactacggggcgacactgtaccccgatctgtatcaggagcggttgatgaatgaaagcctgctgccggtatgttcgccggaatatcagcgccagcaccagccgctgagcgcggggaaagcgtcgggcgtggtttggatccatgcttccgaatcgacggatattcaggatctttttgccgaatggcggctatggtgtcaacaaactcaggctgaattacctttcgaaggacgttattacgccgtgaataaccactccatcgcgatccaaatggccgaaaatggcttaggggtgatgatgggccgccagacgctgattcaacctcttctggatgtgggtaagctggtggcgttaagtccgcatcgggtgccatcgccgtttggctacaacctgatttgtccgcaagagaaccgctcgcgtccgcgttttctcgcctttagcgaatggttaaaacaggagtgtggtcaggataaatccccggtccgaggcggcgcttga

SEQ ID NO: 185309 - DNA, 1314 bp, Klebsiella oxytoca
atgtccggacttaaaattgtggtgataggcggcggttccagctataccccggaactgatcgaaggtttacttaagcggcatgctgagatgccggttaagtcgctgtggctggtggatattgaagacggcaaagagaaggtagacattattgccgggctggcgcggcgcatgattgctaaagccggtttatctattgaggtggtggcgacgcttgaccgggaaagcgcgttgcagggggctgattttgtgtgctcgcagtttcgcgccgggtgcctggatgcgcgcatcagcgacgagcgcatctcgttaaaatatggcctgattggccaggaaactaacggactgggcggtttcgccaacgcttgtcggacgatccccatcgctcttgaaattacggcggatatggaacgcctgtgcccggatgcctggctgctcaacttcaccaacccatcgggcatggtgacggaagcggtgctgcgccatagcaagattaaggccgtgggcctgtgtaatgtgccggtaattatgcaaaagggcgtggcgcagttgcttaattgctcaaatgaaaatgatttcatcatgcaggtcgcgggtctgaaccactttatcttcgtgcggcagatcctgcacaaagggaaagagtggctaccggaggcgatagcgcagattgccgcgggcaacgacccgctggtaccgcgcaatattccgccattccgctggccgcagcatctgctgcaaggactggggatgatcccctgcgcctacctgcgttattactatatgaaggacgacatgctgcgtcaggaactggcggaggctgatggcgaggggacgcgcggcgaggtggtgaagctgctggaaaaagagctgttcgcccagtacagcgacccgaatctggcggtaaaaccgaaggccctggaggggcgcggcgggcaatattattctgaagccgcctgtgaactgatgaacagtatctacaacgataaacgaattattatgcacgttaacacccgcaacaatggcgcgattaacggcctgcctgacgactgcgcggtcgaggtcagttcactgattaccgcatccggcccgcagccgctgaacgtggcgtcattcccggaagatacgctgcgcctgctgcaactgatgaagtctttcgagcgtctgaccattgaagcggcgataaccggcaatcggcataccgcgtggcgcgcgctggtgctcaacccgctgatcgtcagcggcgagaggcttgaacaggcgctggatgaggtcatcgagcataaccggaaactactgcccgcgtttcatcaatag

SEQ ID NO: 185310 - DNA, 1536 bp, Klebsiella oxytoca
atgtctgtaaatactgaaaccgcccccgcgcaggggcagaccgctgtactggaaaaagagagcgtttacgcttccctgtttgacaaaatcaacctgaccccggcgtcccgcctgggcgatattaacgactttctggatgatgccgcgctgtccgacgccccggcgggcgaacgactgacggcggcgatgcaggtgtttatggactgcatccgtcagtccggaaagaccgtggagaagctcgacaagaccctgattgaccaccatatcgctgaactggactatcaaatcagccgccagctggacgcggtgatgcaccatcctgagttccagaaggtggaatccctgtggcgcggcctgaagcagctggtggacagcaccgactaccgccagaacgtcaaaaccgaaattctggacgtctccaaagacgatctgcgccaggacttcgaagacgcgccggagctgattcagagcggcctctactggcacacctacaccgccgagtacgacaccccgggcggcgagccgattggctcggtgatctccgcgtatgagttcgacgccagcccgcaggacgtggcgctgctgcgcaacatctccggcgtctccgctgcggcccatatgccgtttatcggcgccgtcggcccggccttctttctgaaagagtccatggaagaggtcgccgccatcaaggatatcggcaactacttcgaccgcgccgagtacatcaaatggaaatccttccgcgacaccgacgacgcgcgctatatcggcctggtgatgccgcgcgtgctgggccgcctgccgtatggaccggacaccgtgccggtgcgcagcttcaactacgtcgagcaggtgaaaggcccggaccacgagaaatacctgtggaccagcgcctcgttctccttcgcgtccaacatggtgaaaagctttattaataacggctggtgcgtgcagatccgtggcccgcaggcgggcggagcggtgaaagatctgccgatccacctctacgatctgggcaccggcaaccaggtgaagatcccgtcggaggtgatgatcccggaaacccgcgagtttgagttcgccagcctcggctttatcccgctgtcgtactacaaaaaccgcgactacgcctgcttcttctcggccaactcggcccagaagccggcgctgtacgacaccgccgacgccaccgccaacagccgcatcaacgcgcgcctgccgtatatcttcctgctgtcgcgtattgcgcactacctgaagctcgttcagcgtgaaaacatcggcaccaccaaggatcgccgcctgctggagctggagctcaacacctgggtacgcggtctggtgacggagatgaccgacccgggcgacgagctgcaggcctcgcacccgctgcgcgacgcgaaggtggtggtggaagatatcgaggacaatccgggcttcttccgggtgaagctgtacgcggtgccgcacttccaggtggaagggatggacgtgaacctgtctctggtttctcagatgccgaaagcgaaagcgtaa

SEQ ID NO: 185311 - DNA, 1032 bp, Klebsiella oxytoca
atggattacgaaggattaatgattaaatacaagtaccgggcctcacctgtactgactgaagatgaacgggctaatcaattacatcagaatgaaaaaatagacctgggtgacaagaaaatcatggatgatgcggcggtgattcatctcagctcaggttatatagaggtggtggataagtggtatgcgataaaaggatttttaaccgtaccgtcactggcattacttgtgctttttgacgcaggtgtaatttatataccctgtaatatgtttgttcatttttttttgcagcaggattatgacggatggttttataccatcggttttattgctctttttgtgtcaattctggcctctttgttctgttatttaatgctcagagttgaatgtttccgctggacgcattatccggtcaggtttgaccggaaaaacagactggtgcatgtattcagcgtggacggggaggtttacagcgccccctgggatgacattttctttacgactggatgttatacaaaaacaagatttaagcggaagaattacgatattcgcggacatgtgctggcggaagatcgcaaaacggtgctgaaaacgttcacgctgtcggtttctgccttgcggcgtgaagacctgtaccgcaactgggaatttgtgcgccgctatatggaggaagggccggaagcggtcgccggcgtgctgaaactgatgccgccggtggagggacgccgggaagggatattttttggctactggtatctgatgttcagcgccacctacggggcgccgttttttgtggtgccctttctgatggcgctgtatctgacggcctggccgttccgggtctttgcgatgtacacctgccggatcccgcgctggagtgaggaagtcgaggccagttgtgtgattgcgccggacgatccctgggatatcagtgccgcgcagaatccccgttcgctctggcgctggatgctgggaatggacaagtcgcacagcatggtggataaaaaacgcgccatgatagaggtgaagaaatga

SEQ ID NO: 185312 - DNA, 225 bp, Klebsiella oxytoca
atggcggtgatgattatcacttgctgtgctggcattcgctggatgttgcagccgttggctattggatggtgcagcataatatccatggcattaatgattatcttaacaaactggggcttcatcatagaattcaggcggcacaattttttgcatggctattatgctggcatgatattggaaagtttgcccactcttttcagcagctttatcgtcatgaagagctaa

SEQ ID NO: 185313 - DNA, 399 bp, Klebsiella oxytoca
atggaggtcgatgaatactggcaacagcatgcgctggttaaagcgaaagtagccgtaaccgttttcccaccttcctctgatgttgcctcttttagcggaataacggcgttatttccctttattcaacagccaaccccattgcagcaaaaaacgcttgagctggatattgataaacaaggtccgcaattatttattcttgaagatgtgactggtgctggaaaaacagaggctgcgcttattttgacacatcgcctgatggctacgggaaaggcgcaggggctctattttggtctgccgacgatggcgacggcgaatgccatgttcgatcgtatgtcggagagctggctggcgttgtatcgtgttccccgcgccagcggggataaaccggagttagaataa

SEQ ID NO: 185314 - DNA, 489 bp, Klebsiella oxytoca
atgcgtaaatacgctttaatcgttctgtcctgtactctggcgctggcattagcatctatcctgtacatttgtttcaacagccatgacgccttctcctgtaaatcacggtacgatcttactgaagatattaatgagaatattctccgctcacagggtttgctttccgctgaactttctaacgatcgtcttttaatcaaccttgagggattactctccagcaatggtgataaatacgttgtctcacgcaccatcgccatcacgttaaaaaaagccaccgctaccggtcatcttttttatatttccgatacgcaaatcactcgccacagtggtgataatacgcctgagaacatcgcgcaaaaaatcctctttggcaaccaaactaatgatagaatcatctatatcaatcgcgttaatgatgatactattttattcggtaaccaaacgttcccacaatatggttgccagcgtcaaaaaataatcattgattga

SEQ ID NO: 185315 - DNA, 492 bp, Klebsiella oxytoca
ttggctctttctcctggagcccaaaaaggcaccacaaggccgcggtcctcagtcattcccgccagtccgacacgttttgaaaatgagaaagacctttgtcttagtgaatgtgaaagcttaataaaacaagatggagatgatatttggcgtagagccgcatggcacggagagtttgacaaatatctttatttatcatttcgttattatcattttgctatacttgagcaatttaaccatcgattgagcgaagcatgtctgcatctccagaatgcgcagtattattgcgggatatggaaaggtgctcgggatcggctggattggattacccatagcgaaaaaaaacaaatagaaagaactgaaaaggtaagaaaggcgggtttaaaacgcggtgagaaactctttggcgtagttaaaaccgaagcaatccggcttctcaaagccaacatgcctaaaaatgggtggattgatccaactgtgatctctgatctctga

SEQ ID NO: 185316 - DNA, 279 bp, Klebsiella oxytoca
atggcgatgtgggaaaagatattacaaaaaaatctttattcagaatgggttatccgaaacaccctatactggatgactcctgtaagtccatggaaacttgaagaaaacacattctcatggattatcttttttgagataggtggtcctgaatgtgagtttgaattcggaaggctgttaaacgattttaccctccgtgagaaacttcaccatcaaactggtcagttgcgtgatgccattatcagcaaggttctccgaagcatagatgacaggcttgcataa

SEQ ID NO: 185317 - DNA, 1389 bp, Klebsiella oxytoca
atgaaactcatgccttttaacttcgacaggatgcctgacggtcgggtattcatcagtaacctcgctggctttcatcattttgtaggtgagcaggaatttctcgatctggtaaacggtcatatcagtcaagaacagtcctcatcgcttgaaagcaaacttttcatttgcggagatgaatcctcctccgttaccccttatgcactaagttcggcttttgccaaacgactcatgaatgaactggcggtcaggccaatcttcatgattgtaccttctcttcgttgcgatcatacttgtaaatattgccaagtcagcagggcatcggtcactgctgatggatatgatctcaaccctaaactgataccgcaaattgtcagcaccataaagaaactaggtacacctccctacaagatagaagtacagggcggtgaaccacttcttaggttcgatcttgttcagtcaatctatcacgagtgtgatatttcattgggtagtgatgctttcgaaatggtgattgctacaagtctgtcattgctcgatgaaaacatcctctcatgggttaaagagcggaatatcaccttctcggtctcgcttgatgggaatgaagctgtccataacaagaatcgcatccttgctgactttcaagctcataacaaagcagtaactggtattcggaaaatcacagaagaacttggcgcaaaccgggtagctacggttaccacagttactaaggagctgactaaagagccagcttccatagtagatgctcatttgtctctgggtcttacagacatgtttatcaggcctgttagtccttatgggtttgctcagaatcagagcttcactttttcaatgccagagtattttgctttttataaagagttgatgcaggaagtgttgattcagaatgaaaagggaatacctgtcattgagcactcggctgctatccatctcaaaagaattttcaatccgggattcagtggttatgcagatctaaaatcgccaagcggagtcgtgctgaactgcatcctgttcaattatgacggtaaagtctacggtagtgatgaaagtcgtatgcttcagaaagtaaacccggaagcagatttcagtgcaggagagtttgcctcactctcattcagtagcaacgaatactaccgttccgctctttcatcctcattcaattttgctatgccgggatgcgatacctgtgcttatcagcctttctgtggggcagatccttgccaaaacattagtgttcatggcgaacctgttggtgacaagagtcggtctactttctgcctgtatcacaaaggcatgttccgcttccttctgaatgaaatttctcaggatgggccgatggcaaagatgcttaaagggtggacttatgtctga

SEQ ID NO: 185318 - DNA, 714 bp, Klebsiella oxytoca
atgtctgaggtgctgagaaacgacattttcaggtttacggcagatctgccagttcagcaaggtttctatcgcctgtgcaaatttaagcccgaaaatcctcaattctatctgccaaatttactggtcagtgaaactcaacttgattccagacttcctgcatattttgcagacttcgttgtgagcactgatcttttcaattccatagaagatggtgatatagggattgttaacaatggcaacatgattagggtgattttgtcacggagagcaaaccataacactgttctggtaactgaaaggtgcaacaaccgttgccttttttgttctcagcctcctaagacaggaaacgatgactggcttcttaaccagtcagcacttgccatcgcctctttctccctgaatggtgtagtaggagtgagtgggggagaacctttactgtatggcgaagatttcttgcaatttctggacttcataatcgaaaactcacctgagacagctttgcatgttttgaccaatggacgaaagtttgcagatgtcagttttactcaacagatgaaagagcgaagcgaaaagctcaaaataactttcggtattccgctttattcttcaaggtcgtcagttcatgactatctggttagaagcgaaggggcatttgatgagacagttatggggcttatcaatgccggtaactcagggatcaacaggctttgttga

SEQ ID NO: 185319 - DNA, 447 bp, Klebsiella oxytoca
atgaaagctctctctatacaccagccgtgggcgtggctcatcatcaacggctacaaagatattgagaaccgaaattgggatacgaaataccgtggcccggtgctcattcacgcctccagcaaacggcctactgtggccgaggtgataaaagctcgtagcattctggagaggacgaacggccgagaagtggcgcttatgatgccttccgccaaaaacttccagctgggcggcatcgttggggttgtccgcatcgacggaaccacccgattcagtgactcgccgtggtttttcggcccggtcggaattcagttgaactacgcgaagccgctgcgattcgtacccatgaaggggcggttgcgctttttccatactggcctgcggccacacggtgttttcaatttccttgttcctgaaggttatcaggatgcgacggagggaactttatga

SEQ ID NO: 185320 - DNA, 294 bp, Klebsiella oxytoca
atggcaagatttatggttcgcatcgaactcagagattcaaagccagcagattacgaagaactgcatacaaaaatggctgagaaacatttctataagtttgccaaattccccggcaacgacagcttcctgcgccttcctgatgccgaatatcatttctatagctctgaaggtctggaaaacgctatctctataggttttctcgccaggtcaactgcagaacaagtaagagcaaacccaaaagttgttgtaattgagatacaagacctatttcagctgggtctcgacaaactttaa

SEQ ID NO: 185321 - DNA, 324 bp, Klebsiella oxytoca
atggaattcaaagatctccccctgaaggtgcaggaaatcgcagcgcagtgcctggcagataaaatcagttacgtgtcaggtttcgcggaaggagcagtgaaaaacgagcctgcgaaagaccaggcccgtcaggtaaaagaagctttcgttgagcttaattgcgaagaacatcgagaagaggaagaggctaaacaagccaaaccctatgccctcttcccacatatacgcaaagttatggatgaactggaacgctcaccgaaaactaaagatacaaatgatcgctttcttgctgaattaaagtttgtcgagacccagctgaaatag

SEQ ID NO: 185322 - DNA, 597 bp, Klebsiella oxytoca
atgaaaacactcaaagaaagattggcttacgccatgagttcgactggtaaaaccaaccagaccgaactaggaaagcaggctggggtgccgcaatcctcaatatcaaaaattcttaggggcgacagtgaaacatctcgtcactcaggaaagattgcagctgctctcggcgttagtgctgactggcttataaatggcactggctcaatttacgggaaagctgatcaaccaatacaggctattgacgtttcaaaaaacgtaaaagtgtttgattacaatggatttactggcgaatatatgtcttggtttaatgaactccctgagcactatcgagcatatataatcaagggcagaacagggatagctcaagcgccagcaggtgcaattgtgatagtagatcccgattcaccagcctctgctgacgacttagttttagtcaaaatcaacgaaactatttctgtgttcaagtttcacattggtggagatggaagtgggtacttatcagtcgacgacactcgcgttccactggctccggtatccgggtcttcttctgttgttggacctattgtccaagtgtttattccagaattaaaaaggtaa

SEQ ID NO: 185323 - DNA, 213 bp, Klebsiella oxytoca
atgggcgacacaacaaacgacgctattaagcgcgctatcagcattgcagggtctcaagctgaactagccagaaaaacaggcgtaaaccaatcaactgtcagcaaatggcttaacggtgcggaaattggctcccgttttatcaaatccattgttgtggcgactgacggaaaggttagcgccgccgagatccttaactccatttctcatcgttaa

SEQ ID NO: 185324 - DNA, 204 bp, Klebsiella oxytoca
atgctaaagccaaatcacgtttatatcgaggtctgtcataaccagagcggcggactttctctatgcgtcagcaatgacagcggcggctaccgcatatcaggctctaaggttggcggatgcgaaaccctggagtgctttgaggtcgacgccagcgagcttatcgagcaaattcgagagcatgcgaacacagaggtggccaaatga

SEQ ID NO: 185325 - DNA, 210 bp, Klebsiella oxytoca
atgagcaaacctaccgacgaagaaatcatccaggtgctttctgagcacggtaagtgcatgacttacgtcgtgacctactggctacgcaggaagcacaaaaacatcaatgcggcctatacgctgcgccgcctgaagaagctcgaagccatcggcgcggtgaagcgcatggaaagctcgtacaaaactcaaatttgctggggtgcagcatga

SEQ ID NO: 185326 - DNA, 381 bp, Klebsiella oxytoca
atggcactgaccaaaaaacagcgcgcagagctgcgcatgaagtttggcggccgctgcgcttactgcggctgtgagcttagcgacaaatggcacgctgaccacgtcgaagcggtgcgaagaaatatcagtaacggctacgcaatggacagacctgaaaacgacaccatcaacaatatggttccggcatgtataccctgcaacctgttcaaaatgtgcagcacggttgaggattttcgcaatcgcattgcaactcaagttgatgtgactcgccgggcgtcgagaagttaccgcactgcggaatcgttcggactagtccagccgactaatgcgcctgtgattttctggttcgaaaaatatcaggaagaaggagccaaccaatga

SEQ ID NO: 185327 - DNA, 276 bp, Klebsiella oxytoca
atgaccagcaaattaacagacgcgcaggtttacacgcttcgcagaatgaaaaacggcacccgttactttctgcaaggcgatggaaagcgtggcgatgaggacaacggaaggcgcagagttaactgcccatcgctgcctgtgctttttaggcggggtttcgttgttttttgcagcgattgcgaaaagcagggttacacatggtacagcgtgaaattgacgccagaaggaaataacgccgctatttttgcgcagacaagagaggagcgcgggctatga

SEQ ID NO: 185328 - DNA, 558 bp, Klebsiella oxytoca
atgaccagcaaatttaccagagagcagttaatcgaaaagctaaagcacaggattgcaatcactgaaaaatatccacacctggaagaggcgcagattgactcgcaaattttcaaaatagcgctggccgcaatggacagcgagccggtggcgtgggttgtaggtagcgatgagattgccgagtttaaccgggggcgtgaggttatggtcatgcgtgactgcgatgacgaggaactggaaaacctcccgctctatcgccacgcgcagcagccggtagtgccaccaatgcagcactgggaggagttgtgccgtgagtatccggacatgagcattggagatgcgattattcgtgccgcttggtggaatcactgccgcgccgccatgctccagactggtaccctcaccaatgaggacaccaggcaagtggacgaattaacgatgtgggttaagcgattagtccgctcactgaaaaaggcaagcccagacagtaagttgcacagtgaagcaatggactacttgaccactaagggtcttattagtgtgggggacgcattgagatga

SEQ ID NO: 185329 - DNA, 198 bp, Klebsiella oxytoca
gtgagtaaccagatccctgaagctgtagccgtagcgatgattaatgcggccagagatatcaccgtggcaaaaattaatgccaaaggcgcaaagttcgatggttatgtaaacccggtaaactggtttgatcgttcaatgaaagaggtccgcgaagccgttaaagcagtgcttcctgacgttgagcgggaggcaaggtga

SEQ ID NO: 185330 - DNA, 189 bp, Klebsiella oxytoca
atgccgtacttcttcctgattttcgtcatcagcagccagtcatcgaatatgcaggtggtccccatgcagagcatggagcagtgcaaggcagctattcgggcgatgaaagttgcagatgatagacggtcgtggagcgatgtttcgccacacgtagacaatattcagtgcgtggaggtgaaacatggctga

SEQ ID NO: 185331 - DNA, 318 bp, Klebsiella oxytoca
atggctgagttacgcgcaggaggtatggcgttaatcgttgatagcgccagcccagaagagattggccggtgtgtcagcctgatcgaactaattcccgtgcgtgggtcattcacctcgccacaggggcgcccctctaataacgccggagaaattccagcctggtttgtcactggcgatgtaaaggcgaagctgggggatgattcacccatatgggctggaaagggctgggcgctttatccgccgcagtacctgatgcccatcgacggcgacgacttcagcaatgaaggcgagcaccagaaggaacgggaacatgcctaa

SEQ ID NO: 185332 - DNA, 645 bp, Klebsiella oxytoca
atgacataccaacttatatatgtcgatccgccctggcaatatggcaacaaaatcagtaacggcgcagccgttaaccactatgacacgatgagccttgctgagcttaagcgtacccctgtatggagcttggctgcagaaaatgccgttctggcgatgtggtacacctggacgcataccgaagaagcgatcgagctggctgaagcctggggttttcgtattcgcaccatgaagggttttacatgggtaaagctcaaccagcatgccgaaaggcgattcaataaggcgctaactgaaggtgaattggtggatttcaatgatctgctgtcgatgttgaatagcgaaacccgtatgaatggaggcaaccacacgcgggccaatactgaagatctgctaattgccacctgtggcgccgggttggaaagagctagcgcgtcaattaaacaggttgtttactcctgtctcggtgagcacagcgagaaaccctgggaggttcgccgtcggcttgaactgctttacggcgatgtcagccgggtggagcttttcgcgcgcgaatcatggcctggctgggaccgctggggaaatcagtgcagtaattccttcgaaattattcccggacatatcatcaaaaatgaggtgaataaatga

SEQ ID NO: 185333 - DNA, 225 bp, Klebsiella oxytoca
atgtatcgcatggaaaagataaccactggtgctgcctatggcgcttcagccgggagcatccttaacggcatgctaaatgcctacagccccgagcagtggaatgccatcggcgtactggtgggcattgtcatcgccgtacttacgtatctgacgaatttgtatttcaagattcgcgaagacaaccgacgtagcaggagccgagatgaacccgacgctgaggaataa

SEQ ID NO: 185334 - DNA, 495 bp, Klebsiella oxytoca
atgaacccgacgctgaggaataagctgattggtgcgatcgccggcggttcgggcgcaatcgccattgcttctgtcatgcttggtaatgccgacggcctggaaggaaggcgttattacgcctatcaggatgttgttggcgtctggactgtttgtgatggtcacactggcgccgatattcgccgcggtcaccgctacactgacagggaatgcgacaacctgctgaaggcagatctgcggaaggtggaaagcgccattgacccgctcatcaaagtccgcattcctgatcctacccgcgccgcgctttactcattcacttataacgttggctctggcgccttcgccagctccacgctactgaagaaactgaatgctggagacgtccctggcgcgtgcaaggaactgcagcgctggacgtatgccggtggcaagcagtggaaggggctgatcaccaggcgcgagattgagcgtgaagtctgcgagtgggggcagaaatga

SEQ ID NO: 185335 - DNA, 183 bp, Klebsiella oxytoca
atgcaagtcctgtttgatgacgttaaaatggggcagattttggggcaaaatggcttttggggcacgatttggggcattcaaatgtctgtatttggccgcatttgtccaaaagctgagagcgctatgatattgaaaataatgcagaacgttgaatttgctaaactatttttttgcatgccataa

SEQ ID NO: 185336 - DNA, 1485 bp, Klebsiella oxytoca
atgcccagcttactggaagtcaaaaacgtcagtaaaagcttccccggggtcaaggcgctggataatgtcaatgtcacccttggccgaggggaggtgcatgctttattaggtgaaaacggtgcgggtaaatcgacgttaatgaaaatcctttgcgggatatatcaacctgacgccggtaatatttttattgacggtaagcagcagcattttcataactatcgtgacgcgattgcctgcggcgtagggattatctttcaggagttttctcttattccctatctgaacgcttatgagaatattttccttaatcgcgaaaaggtaaatcgttttggcctgctagatcgtaaagcgatgcgccgcgaggcgttacgcatttttaaagatcttggcgtgaccctcgatcccgatgagcaaatttgccatctcagcgtcgccgaacagcagttcgtggaaattgccaaagcgctgtcgctggatgcgcgaattctcattctggatgaacccaccgcgaccttaaccccgagcgaggcggagcatcttttccgcgtgatgcgcgatttaaaggccaaaggcgtcgggatgttctttatctcacaccatcttgaggagatatatgagatctgcgacagcctgagcattctccgcgacggcaaatatatcgggtcggcaaaggtcgacaatatcgacatcgccgagatgatccagatgatggtcggccgtgaggtggagaatatctatcccgagcggcggacgctggcgcatgatgagatactgctggaggccgaaattcagcttaccgagagtagccagctcaatcggctgacgctgcgcaaaggggagatcctgggcctcgccgggctggtggggtcggggcgttccgaagcgatcctggccctgaccggcgcggataaatgcttcaaaaagcgcgtccgcctggccggaaaagaggtgacgataaaatccaccgaccgggctctgcgtttgggcattggtctgttgccggaaagccgcaaaacgcagggactggtgctgcctttttcggtcaaagacaatatctggcttaacaaacacgcctgccagttctcgcttatccgcgataacgaagagcgcctgaccgccgagcgcttaattagtcacgttggcgtgaaaacgccggatgccgggaccgcggtggggacgttgagcggcggtaaccagcagaaagtcgttatttcccgttggttgaatcatgatgtcaatattcttatttttgacgaaccgactcgcggtattgatgtcggagcgaaatcagaaatctatcagattatgcgcgacctcactgcccagggtatttcaataattatgatttcatctgagctaccagaggtgattggcgttagcgaccgggtaatggtttttcgcgacgggaatattgttgccgaactcgagaacgaccaaatcaattccactgtgattatgctgcacgctgccggtaatattatttag

SEQ ID NO: 185337 - DNA, 723 bp, Klebsiella oxytoca
atgtgcgaaacccatgacatttacggctttcagaaagatgttgccgatggcggtatggctgaatatatgcgtttctccgaacgggcgattattcacaaaattcctgaatcattaagcgaagaagatgccgcgctgatcgaacctatggcctgcgcaatccacacggtacgccgcggagatatcgaactggatgatgtggttgttatcgccggcgccgggccgctggggctgtgtatggtgcaggtcgctcatctgaaaacgccgaagaaactggtggtcatcgacacgatggacgaccgcctggcgctggcgaaagcgtttggcgccgacgtggtcatcaatgcggcgcaagaggacgccatcgctatcgtaaaatccatgaccgatggctacggctgcgatgtgtatatcgaagcgacgggggcccctatcggcgtgacccagggtctggagatgattcgtaagctgggacgcttcgttgagttcagcgtgtttggtaaagaaacgaccgccgactggtcgattattggcgaccgtaaagagctggatattcgcggcgcgcatctggggccttacagctatgaaatcgccatcgatctctttgcgcgcggtctgctgaccgccaaaggcgtggtgacgcatttctattctattgatgagtggaaagccgcttttgagatggctaaatcgctcgattcgattaaggtcgtcattaagccataa

SEQ ID NO: 185338 - DNA, 1932 bp, Klebsiella oxytoca
atgacagaccagtcagccgatctcgtaacgaaaattgacgttattcccgaccttgacgggctcaacagctttgatgctgcgattgataaggctatcgcaaaggttaatcagcttgacgccgctatcaagcgtgtcaacaacctgaagcctgcaagcccctatgcgcccagcagtgcatcaacagcgccgacagccgccgctacagcagcaatagccacagtagccgctacaggctctaatttgattgtccatacgccgctggctaatacggttaaaagggaatcacaaaaaattgcacgtgcggcagtagaaggcatggggagtggtgttggtttaccattgatgggaggctcaggagggggaaggcttttcattccataccacgggggtagctctccttcagggaatggtggtggattgtttgatccttcaacgataaatccgctttctaggtatgacttttcagcagggagtttttcaggaaacccactcaacccaaaaggaaatgatgaatctgctggtggagggggcgacgggaaaggcttaggtgctgaaaatctcttggcgggagccggtctaacggcaggcattattgctattgggaaatcactggctgatgacctagattctattcagcagcaacaagcgcaaattgcaagacttgcacaaacaacaggtgatgcgaaagatgcattctttgctttaaatgaggcagcaagcgcagtaagaagcgatagcggagcgtttatctcaacctataccaatatggcgaccgccacgcagaaacttgggaagtctcaggaggaaacaatccgagcgactcaggggctggtgggcgcattacagttaggtggtggcagtgctgaagcagtaaacgcagcgctttaccagatgggccaggcattttcttctgaccggttcggcggggatgaatttagatccttcatggaggccattggcacaatggccccggaagtcgcgaaggctttcggcacagatgtaaaagggctgcgggcaatgtcagaggccgggaagctgacagcggaaacgatgctaaaggcctttgaaaaaatggccgcaaataatgctgaccttcttaaaaagcaaggatggacgtggggacaaacattaacggtgatgcgaaatgactggcaaaactttcttgccaaagcaacgataggtggagattggcaaaaattcacagattgggcatccaatactttgattcctgttcttagaagtgcggaaaaagaggttgccgcgttctggtcaacgctcgcagacgaaagtaaatcggcggttctgataggtattcttggcgctgttggggcggcttttaccgcgttggctattccagttattgcagctgtatggcctttccttgcgattggtgccgctgtatgggtagtttatgaagcgtttgtagaatggaaagcatggttagatggcaagggaggtaccatttttgatagtgtttttggcagttttgacgaatttgaacggcgttacccaaatcttatagcagccctcagaacgattattgatttggctggaaaagctgcttcgggtatagacaacgcaactaagcaaaatggaagcaacgggattatatccgatgctattgaaaatccgtggatgacggcttttcaggggctttataaccttacgccgctgccgaatacattcaggtcattgggtgggttaagtgatatgtttgacctcaatcccttaccgggcatagaaagcgctcttggtatccttccttcaacggctacaggtacaccaaacattagcaatagtggaaataaaacaactaccattattgttaatagtccaaaagaggcagctgatacggtaaataatattgatgagccgggtactctatctggtgatattggtggtaatatcgcggagtcaacaggggcaagataa

SEQ ID NO: 185339 - DNA, 1977 bp, Klebsiella oxytoca
atgtccgaaaataattatggtgcgctgatgatgaaatcgacactgagcgccagtgttgatatcgacagcgtgctgttacccggctgttatcccgtttcttccgggaacagcactgctccagacccttccggcggaattcttactgtatattctggcccaataaaacgccgaacctttgcgtctgactcgctcattcttgttacgtccacctacaaccctgccacactacgctggggagaatggttttatcctgtaaccagagtaaatctatcgtctaacggagatttgcccggaatatccctttcaggccttcagggtagcggatctctgttcgatttgttgggcggctggacttgcccggaagcgtggggagtcgttgctaatagctcaagtgacgcacatgataattcacttaattttttcaggatgtttgaatatcttcgtgccaaaggcggaggggttatttacatggactctcgcgccacctactacgttgattatcttaatttcgtgccaagcaacgtaactatttatgcgtgtggagccacgataaaacacatcaacccaaggtctatttatggtcgcgggggactggtcgtaggaagttcctacgagtggaattatgaaacggtcaaggcggcttatacttctggtaattaccccgcatctacatccaacccagctttcacagaccccgttctgcaacagtatctggagttcaatccatcctttgtgcaagctgagaatgtccacattcatgatttaagaatggaggccgtgtttacagattctacttattggggaggttactctttaaactttgcaaatgcgcgtcactgccgcgtgcataatctcagggcaaaaggctggactcaggctctgaatgtcggctctgatacaaacctttccaccccttcttgctttgatgttcgggcatacaacaccattgttgaagagcctgaccttgtccgaacttactattccattggctttatttcgaactccactgaatgcgaatttgatggatgggcacaaatgaagccaatgacggacggaactaaaaacggctcagctgttgcaacaaatgttgtagaccgctgttatatccgagatggccacgtgccaaacctcggaaaaaccgtttcatccgaaggggtattactcaacaacgcaacaaattgcgttgttgagggcatagatataaggaactgcaccagtgttatatcaactttctatactcttaacgctttctcaacagaaaatgggagaaatacaatcagaaacattaccggggaaggtacgtacataatatctctacgcgctaaaaacgcagtggttgagtcattcaatggcgtgggctcatttactgccgaattaatgctagcaaacaataatgcatcaggaaacattgtaaacaaagagcctgtttcattttattttggcggaactaaccttcaatcatggttccttgccaacaacaaaatcaaaggatggaaacgcacgtataaatacatcaggcctgctacaattcttctgaatgacaaatcagacacaatatcatgggattataataaaaaagttgccacaaaatccggggtagaccttgattttttatgggaagttcccagtaatttcaaagcgattgatgatgtaaggtgttttatgagattcaatacatctattgataacaatgccgctaacgctggttcttcagtaaaggtttcgttaattcaaatgcgctcttttgacgggaacattaatactaccccctatccagccatagaaaacaccagaatcgcagcgtcagggatagaagatactgaccttgtagctcaggttggctctaaccctcccggcttaatttatatgaacaacacagataatgggcttgaaaatagctggtacatttcattgaaaatgaccaagaatgtagccaataactatatgaaagaaacacgaatagcggggtatatgtaa

SEQ ID NO: 185340 - DNA, 219 bp, Klebsiella oxytoca
atgaacatcacaacaactcagtatcgacagggggtaaagggctgctttctttccacagagcggccgcaggttggcgaggatttaaagctagtcatgctgacgtccagagggcgacgcattatccccgttggtgaggttcagcgggtagagtctgtaggttctagccgttgccttgtatgggtttcaaagctggcatttgttgaggggatgaattactga

SEQ ID NO: 185341 - DNA, 309 bp, Klebsiella oxytoca
atgactgagttaagcaaaccagccagtaagggaagaaacgatggggaatgcaagtctctgacctcagatgacgctcgcttcctagtgattcgtggtgactatagcgaatccgatatcatccgggcggcagttaaccagaacgttattgatacagaaggcgcacaggattttgcttctagcgcacgctattaccagtgctggtataaagtcagcccaatcggcggtcaggatggctattcaggctggcatcatccgcgcaacacaccgtgtcgcggcgcgtactttgcgtcagttttgcaatgggattag

SEQ ID NO: 185342 - DNA, 345 bp, Klebsiella oxytoca
atgagcaaatcactaaatgcacgctgtatccgtcgctgggaagttgagtttaaaggccgctgcgactcgaaatttagcactgtctggcgcaagcgtgacctgcgcggatatattcgcgagtctgggctggttactgctttctgcatggttgagcagatggctgagaataatgcaaaggtggattatgacggctctgctgttggctggtcgcctgagttcgcagcatggtacgacgaacgccgggggcagtacctcaaagaagctcgtgactttctgaacgaagaagccacaaccgaagaaatcgacgaagagattcagagcgagctggaggcttggaatgactga

SEQ ID NO: 185343 - DNA, 927 bp, Klebsiella oxytoca
atgaaagacgacattaatcaggacatcactttccgcaagctgtcggtatttatgatgtttatggcgaaagggaacatcgccagaaccgctgaggccatgcagctgagcggcgtcagcgtccaccgggcgctgcatacgctggaagagggcgtcggctgcccgctgtttattcataaagggcgcaacctgctgccgctcccggcggcgtggacgctgctggagtactgccaggacgtcatgagcctgatgacccgcggcctggaagcgacgcgtaaagtagccggcgtcgggcagggccggctgcgcatcggcacgctttattccctgacccttgaaaccgtgccgcgcattattatgggcatgaagctgcgtcggccggaactggagctggatctcaccatgggctccaatcagatgctgctggatatgctggaagatgacgcgcttaatgcgatcctgatcgccactaacgaaggtgaatttaataattcggcttttgatgttgtcccgctgtttgaggacgatatcttccttgccgccccggcgacggaacagctggataccaccgctcccgccgagctgcgcgattacgccaggcgcaagtttgtttcgctggcggaagggtttgccacctatgccggatttcaggacgccttccaggtggccggattcgagcctgaaatcgtcacccgggttaacgatatcttttcgatgattagcctggtgcaggcgggcgtaggctttgcgctgctgccgggacgaatgaaaaaggtgtatgaaaacgacgtacagctgctgaagctggcggagccgtatcagatgcgccagctgatctccattgtctactcacaccatcgcgagcgcgacgccgacctgctggcgctggcggcagaagggcggatgtacgcccgcagcctcagccgttaa

SEQ ID NO: 185344 - DNA, 1377 bp, Klebsiella oxytoca
atgactaccgtaaaaaatgagagaaccacttccgatctcattcgtgcagccgtatctggttggttaggcacggcactggagtttatggatttccaactctattcccttggcgcagcgctggttttccatgagatttttttcccggagcaatccgccgccatggcgctgattctggcaatgggaacctacggcgcgggctatattgcgcggatcgtcggcgcctttatttttggtaaaatgggcgacagtattgggcgcaagaaggttctgtttattaccatcaccatgatggggatctgtaccacgcttattggcgtgctgccaacctatgcccaggtcggtattttagcgccggtgttgcttgtgactttacgtattattcaggggttgggtgccggggccgaaatatcaggtgcgggtaccatgctggcggaatatgcgccgaaaggtaagcgtggaattatctcttcgctggtggctatgggcaccaactgcggtacgttaagcgccacggctatctgggcggtgatgttcttcgtgctggaccgtgaacagctcgtcgcgtggggatggcgtgtgccgttcctggcaagcgtagtggtgatgatctttgccatctggctgcgtctcaatctgaaagagagcccggtttttgagaaagtgagcgaagacagcgtcctgcagaaagagatagcgacccaggaaggaacctttagcgccatgctgaaaagtaagtccttctggctggcgacgggtctgcgcttcggacaggcgggaaattcaggattgttgcaaactttcctcgcgggctatctggttcaaacattactgtttgataaagctatccctaccgatgcgttaatgattagctctgttatcggctttattaccatcccattccttggatggctgtcagataaagtggggcgtcgcttaccctatattatcattaatatttcagccattattctggcgtatcccatgctgtcgattattgtggataagagctatagcgcgagcaccatcatggcgtcactgatcgtcattcataatatcgcggtattgggtctgtttgcgctggaaaatatcaccatggcggaaatgttcggctcacgtaaccgctttacccgcatggcaatttcaaaagaggcggggggattagtcgccgtaggctttggcccggtgctggccggtattttctgcaatatgaccggttcctggatgcccattgttgtgatgctggtgtgctactccatcattggcttaatttccgccattctgatgcctgaagtgcgtgaccgcgatctgagcttgctgaatgacgccgcagactgcgcgccgcataataaagcggtgggtaacgggcaatatatttaa

SEQ ID NO: 185345 - DNA, 474 bp, Klebsiella oxytoca
atgcgccagcatcgcctccgggaaattccccctctctgcgctctgctcccgggggcggcgcttatcacgccttgcccgggctacgggttcaccgccgtctgccaaacagtagcccggacagatgcgccagcatcgcctccgggaaattccccctctctgcgctctgctcccggggcggcgcttgacgcgccttgcccgggctacgggttcaccgccgtctgccaaacggtagcccggacagatgcgccagcatcgcctccgggaaattccccctctctgcgcccggctcccgggggcggcgcttaccgcgccttgcccgggctacgggttcaccgccgtctgccaaacggtagcccggacagatgcgccagcatcgcctccgggaaattccccctctctgcgcccggctcccgggggcggcgcttaccgcgccttgcccgggctacgggttcaccgccgtctgccaaacggtag

SEQ ID NO: 185346 - DNA, 630 bp, Klebsiella oxytoca
atgaatattaagcctcccgtcaggccacaggcccatatcgatcgtttaatggccatgctggaaccgcatgcaactccgctgaatgttgtcgctcgcaaaaggctaagctgggaacatagaggaaaaatccagctctatcttttcaagaaaggcggcctttccatttttcgttcatcggacaggttactgatggtcacggtatatgaaccgcacttgtttggcgtggctgaaatgctacaaccgagtcgtagccatggtctacgcgccgaaattgactcagagatattgcggattgacagcgacatcgcgatgcagctattcggtcagcacaacatgtgggaagaggtcaccagactgctggcctatcatacctcttatttggtgtatcgtgacgatttagtcttacagcagcgtacttactccgtgattcgcaatcatttaatggaaatgatcctgttaccagaggaaacccggctgcgggtatcgattctggaatacattcaggaccgaacgcacctctcccgtagcagcattctcaatgtgctatcggccttgaaaaaaggggcctatatcgagtatgcccgcggcggttatttacaaagcatcgcctccctgcctgagaaattttaa

SEQ ID NO: 185347 - DNA, 552 bp, Klebsiella oxytoca
atgcgcatatttacagcaaagcctgtactgctaatcgcggctctttgtgccagcagtaccaccttcgcctccctcaacctccacggcgaagccggttcagagtttaccaatctatcggcaagctttggcgcggagcaccccggcatgaccgttagcggtaactgggcacacagcgataatgatggtgatacggcgggattagggctgggttacaattttaacctcggcccgtttctgttaacggctggcggaaaaacgctatacctgaatccgaaagatggggatgagggctacgcgatcgcgctcggaggaggcgcgcagctaccgcttggcgacttcgttactctgttcggcgagtcttattattcccctgattccatgtccagcggcgtaaatgattacctggaagcgaatgccggtgtcagggtgaatatcattaagtctatgaacattgaagcaggttatcgctacatcaatatgacaggcaagcataaccatcgcgataataaacttgcggatggcgcctatgcaggtttcaatttccgcttctaa

SEQ ID NO: 185348 - DNA, 396 bp, Klebsiella oxytoca
atgcgtacttttcaaatagtaatcattgtcagcgtattaggcctggctggatgtagccgtcattcatctcctgaaacggttgataccctgaatactatggttgtaccggtgatcgtgaattcggaacccgcgcaggcgtcggcaaagatagtcagctgttttcaggataacagcatgctaatcggcaagctcagccagtcgcttaaagacaactatttacaggatgcggataatcgagatgtctttaataaagacggtgaagcgtaccaggtctacgctgcgttaaccaaactggagcaaatatcttcaatgaatgatgtctaccgtaaagagaacaatatcgcgggcttgcaggagattaataaattgctgaagtctgtcccttcggttgcatga

SEQ ID NO: 185349 - DNA, 2604 bp, Klebsiella oxytoca
atggaatacacgtttgaaaagtctacactctggcagtcaactttgggaaaaaccaatgacaagggcattgaaaaattaagaagcagcttccttgactttagaaataaagttgaagcgttagtcaaaaatatcgaaacagaattaccaggactaactattcatgacatcacccacattgattctttgtgggaggtttccgatcaaataattggcgaaagaacatatttaaatccgatggaagcttatgtactaggaggtgcgttcctgttacatgatgctgctcatgtaagtgtcgcttatgaaggtggatttgaagcacttaaagaaaaagatgagtggaaggatctaatatcattaaagtttaataacatcgagccggagcaaggttcttctgaagaaaaaaaagccatatttgaaattgtgagacaattacacgcacatcaagctcgaacacttataaaacgctcatggaaatctgaggcttcaaatagttattattttttaatatctgatgaagaaataagaaactattacagtgagttaatcggtgaaatagcagagagtcatcactggagttcaaaaaaagtctatgatacttttttagagagaagagttaatgcccctgcattttttgataataaaacatgggaagtagatgctttaaaagtagcatttatattaagaacagctgatgcagcgcatatagattctcgcagggcaccaatatactcatacagccttctttcccctgaaggaatatctagggaacattggcactttcaaaataagttgggtcgtgcaaccttaacaaacaataattttttaagaatatcttcaggctcatctttcactgaaagtgaaagaaattcttggtggcttgcttttgacactgcaaaaatgataaatatcgagttgcatgatgcttataattacttatctgaggcggggcgagaaccattcgaagcaagaaaagttttagcagcagatactcctagtaaattttctaaatatgttaaggctgaaggttgggagcctgaggatatatctattcatgtaagtaacttaccaaaattgattactaccttaggtggtaaagctttgtatggggaaaagaaacatgtagggataagggagctaattcagaacggactggatgcgatttttgctgcaagaaaacttggatatctagaagacaatgaaggtgcaataaatattaatttgcaaaaagttgaaaatggaaactggtcaataacaatttccgacaatggcttaggcatgagcagatatgtcttatcggatattcttcttgattttggtaaatccttatggagttgcgatgacgtaaggtacgaacatccaaaattaccccaaactggattcagctcaataggacaatttggcatagggttctattctgtatttatgttatcgaacaaagtaagtgttataactaatcgttacagatcaaaaacagatgaaagtggaactcactggaagcttactttcctcaatggacttaatgaaagaccatttatttctaaaccaactgaagatgaaagcctcaagaggcatggcacaaacgtatcttttacaatagataatgaaaatttccaaaaattattaattgtgaaaaaaaagcacaaatataattttttagatgatgtattcgaaactcctccaagcccattagacgaggatggcggatcaaatgaagaatatatacacaaggggttctcaaatcttataaaatggctcttcccttcatgcgaaataaatattagcctaagttatagtgggattaaagaaaccatcttaacagcggatgactggaaaataatatcagatgaagagctactttcccggatacataatagtaatgaaacaaagagactttaccccttaaagtataatggagatattgttggccgattaagaatcatagagacaccatactattatgtgacagaaagaccttcggcagtagtctcatttaaaggggcccgtgcgggccaaatttacggcctccagggaatatgcagatctctttcaaataatgaaaaagctgaaagaaatgatgctttaccggattaccctatggaatgttggcaagattgggcatatcaaatagtaaaatctgaacctctgttgctgacaacatatttagtacgtttacatacacttattccagatgaggacttgagagtatggtatattggccatgagcgctgtaatcttttcgacataaaatctcttttacgggaacaagatgaaataatcgttgtaaatggttcaattaactatgaagatgatgacgatatcaaaccatcagagtttgaaggaagcttaattttaaatgacaatgttattttagcgccagtaaagcagtcacattactcacaaagcaataacattaccctagatgatataatatcaaaattcagcatacctgaaataaaatactataaacttttagaagacacaatgcgagatgtttggggtgagttcacggaagatgatgaggattatagagttgtcggttatgtcaatgaaacagcgataacacgacacactagcatatataaaaaaatgaaaaaaatggattag

SEQ ID NO: 185350 - DNA, 378 bp, Klebsiella oxytoca
atgcagcggaacggcgcagagctggccgcagcactggcaccggaactgatggggattaagagccagcctgcgatgataaaaaaccgtgcgttcgaccgtacgatggcttacctgcgtgaagtcctttccgtctggctgaccgcaggaaatgaaattaattattctgcccaggataacgacattttaacggccatcggatacagaccttcgcgccttcgcgccttcgcgccttcgcgccttcgcgccttcgcgccttcgcaggatgataatcgtgaaaaattcccccccctgcacagaacattgtttaccccggtcgacgcgccgaactggccgcacagtagcctgtctaaaaaaccccgtaaatcccactgtttttaa

SEQ ID NO: 185351 - DNA, 1419 bp, Klebsiella oxytoca
atgtctgaatcactaattgcgcatgatctctttcagaaatcggcgggtgaaaccaaaagtaagaaaaacagagatcggcaactagttgaaaaaattctggaagtttatagtcaaaagcatgttgctgaatcacttaggaaagttggtgataatgattggagcagggaaacacttaatcgctggattaatgacaaatgtgaagcgaagcttttaacggcaggtgaagtatttttactcacaaaaatgcttcctgaaccgccagaaaaccatcctaattatgctttccggttcattgatctctttgcaggaattggcgggattcgtaaaggttttgaggcaattggagggcagtgcgtatttacaagcgagtggaataaagaagctgtgcgtacatacaaagctaattggtataacgatgaaaaatcacaccagtttaattccgatattcgtgaagttacattgagtaatagggatgacatttccgaaagtgaagcctatgaatatataaatgaaaacatccctgaccatgatgtgcttttggctggtttcccttgtcagcctttcagtcttgctggtgtgagtaaaaagaactcattaggaagagctcatggctttgaatgtgatgcccagggaactctattttttgatgttgcacgaattataaagtcaaaaaaaccatcaatatttgttcttgaaaatgtaaaaaatcttaagagtcatgataaaggtaaaacttttcgagtaatcatgaacacccttgacgagcttgggtatgaggttgctgattctgcgatctctggttcttcagatcctaagattattgatggtaaaaatttccttcctcaacatagagaacgaattgtattggtcggatttcgtcgtgatttaaaaatagataaaggatttacattacgaaatataagtaatttctttccgtccaaaagaccttcttttaaagagcttcttgatcacgataacgatgttgatagtaaatacatcctttctcctaggctgtgggattatctttataaatatgctaaaaagcatgcggcgaaaggtaatggttttggcttcggcttggtgaatcctaataacgttgatacggtcacacgtactttatctgcaagatattataaagatggttctgagatcttgattgaccgtggctgggatcatgaattaggtgagatagatttctataatgcggaaaacatgtcaaatcggccaagaaggttaactccgcatgagtgtgcccgcctaatgggatttgagacgcctgatggcaagcccttcaacattccggtttcagatatgcagtcttacaagcagtttggaaactcagtggtcgttcctgtatttgaagctgttgcaaaattgcttgaaccctatattcataaagctgtatctaaaaaaacgtga

SEQ ID NO: 185352 - DNA, 390 bp, Klebsiella oxytoca
atggctacatccccgatttaccttaagcaatcctgtattaaaactttaaccgcagttgaagccaatagagatgcctcaaatcaacacgagtttaacggtgttgctcagctaaaacaaatttttggcaacgccagagttaccaaagacgtagtattttctattagaggaacggatatattctgcgatgatactgtcacttggtatgatgccagagaaaactcgcctgatagaagcgagtttcgtctttatttccgcgataactatgtcatggagcgggcagaggaaggagacaatattattgtaggcatcgacaaaagtgataaaattcatatcattttaattaagcagagcaactccgactatgagggtaatatacctaactggcgttaa

SEQ ID NO: 185353 - DNA, 2601 bp, Klebsiella oxytoca
atgtctcaaccatccatagacgtagcgggcaaaagcagcgcttttttattacaaccgcttgcctgcattattattttagcgctgtatggaacgcagggcgcgctggctcaggatgagttcgatatggcggcgctggagaccagtggacccaaacttaacgttgatctcagccagttttcccaacccggttcacagctaccgggtcgctaccacgtagacgtttatgtgaaccatgagcaggttgacacgcaaacgctggactttgtgcaggataaacatgggcagcttacgcctgtggtgacccccgcgctgttggcgcagtggggtattaagattggtgatatcgatgcgctgcggaacaagaacagtatcaacgatctggctgcaaccgtcccggatagccagatcagactcgattacagccagatgcgtctggatctcaccataccgcaggctgacgtcaacagcgcggcgcaggattccgtcagcccgacgctgtgggatgaaggagtgccggcgctgctgctgggctatgactttaacggttcaaacacctggcgcgacgagaacgattctggaagggaagatagctattttctgaacctgcacagcggcattaacctgggcgcgtggcggctgcgaaactacagcacctggacctacagcaaatcgccggaatatcacgacaccacaagcggcgaagacgttagcagcggcgggagcagcgaaagcgactggagctccatcaacacctttttacaacgcgacgtgcaggccgtacaggggctgttaacgctgggcgatgcgaccactccttccgatgtttacgacggttttacgttccgcggcgtccagctttcttcagacgatgacatgctgcctgacagtctgcgcaactttgcgccaacggtacatggcattgcaaccagcaacgcgacggtcaccattcgccagaataatagcgtgatttaccagaagcaggtaccgccggggccgtttaagatcgacgatctctacccaaactccacaaacggcgacctgctggtaacgattaaagagtcagacggcagcgaacgcagcttcgtccagccgttctccagcgtggcaatcatgcagcgcgaagggcatcttaagtatgacttcaccggcggtaaataccgcagcaacagcgatggtcaggagccgaagttcgcccagatgacgctgatctacggcctaccgtacgatatgacgatatacggcggtacgcagctggcggatagctaccagaacgggctgttggggatgggattcaccctcggtgaactgggctccatctcctttgacggggcctattcctcggccgatttgagcaatgacgagcacaaagaggggcagtccatacgcgcccagtactcaaaaagtatgctcagcaccggctcaacgatcacgctggcggcataccgttattccactaagggctactacagctttcaggatgcggcggatctaatcgtcaatgattctcacgatgacgatctgaacgaccaggatgaatttgacttaagccataacaaacgttcccgctggcagctgtcactcagtcagtcgctaccagagggctggggatcgctttatgcgagcggctaccagcaggattactgggacgaaggtggatatgagcgaaacctgtccctcggctacgacaccagctgggatggcatgacgttgggcctgaactacaccttcagcagcatgccgggaacagaggacgaccatcagggcgcgttgaatatcagtatcccgctgagtaaatggctgccgaaagcctatgccggatacagcctcaacactaaccgccacggagacaccacccagcaggtcagcttgtacggtacggctttgaaggattcgaaccttagctatagcgtgatggaaggctacagcaaccatgaaaattccggcaataacggcacgctatccgtcgattataccggtcgcgcgggcgaagcgaacatgggttacaactacgatccggacagcaggcaggtgaactatggcgtgcagggcggagtggtggtgcacccttacggcgtcaccttttcgcagtcgctgagtgaggatatccagtcgctggcgctggtgcgctcgccgggggtcagcgatgtgaccgtggaaaacggcaccggggtcagcaccgactggcgcggttatgccatcgtaccttatctgacgccgtatcgccgcacgacggtaaggcttgataccagcaccctggccgacaatgcggaagtcgatagctccacggcgcaggtggtgccgacggaaggggcgattgtactggcggggtttaaaacgcatatcggtgcgagggtgttgatgcatctgcatcacgcgagtacggacgttcctttcggcgccaccgtcacgctggcagaggacgacagcgtcaatagcatcgttagcgacggcggttcagtgtatctgaccgggatgccgcagcagggcgacatcctggcacagtggggcaaaggaaaaaatgcgcagtgccatgcccattatcagctgccgcaagagggtgaaaaaactggcgtaattaatcttgatgcgcaatgtcagtag

SEQ ID NO: 185354 - DNA, 1428 bp, Klebsiella oxytoca
atgacgacagtaaagatggcgatcccccgcgactttatcctcggcgccgccgcttcggcgtggcaaaccgagggctggagcggtaagaaagcgggccaggattcctggccggatctctggtacaagaacgaccgccgcgtctggcataacggctacggcccggcggtggcgaccgattttatcaaccgcttccgcgaagacgtgcagttgatgaagctggcggggctgacccactaccgcacgtcgattaactggtcgcgctttctcaccgattatgaaaacgtcacggtcgatgaagactatgcggcgtactacgatcagttgttcgatgaactgctggccaacggcatcgagccgatgatctgtcttgaacactatgaactccccggctatctgctggagcagtacggcggctgggcgtcaaaaaaggtggttgagctgtttgtgcagtacgcggagaaagtgttcgcccgctatcaccacaaagtcacgcgctggtttaccttcaatgaaccgatcgtggtgcagacccgcgtttatctggatgcgctgcgctggccttacgagcagaacaccggcacctggatgcagtggaatcaccacaaggtgctggcgacggcaaaagtggtccggctgtttcgcgagaaaggctatcgcggcacggtaggctgcattcttaacccggaggtcacctacccgcgctcaaaagcgtcgcacgatgtacgcgccgccgaacgctacgatctgttttataaccgggttttcctcgatccgctggtccacggcctctacccgcctgagctactggccctgctcgaacagcacggggtctcctgggattatgacgtggaggagctggcgataatccgcgacaacaccgttgatgagctggggattaatctctactacccgcatcgggttaaggctccatcgcgcgcctggcatccgcagacgccgttccatccggcttactactatgagccctttgagctaccggggcggcggatgaaccactcccgcggctgggaaatttatccgcacatcgtttttgatatggcaatgcggatcaagcaggactaccgcaatattccgtggttcgtggcggaaagcggcatgggcgtggaaaacgaagggcagtttcgcaatggtgaaggcaccatcgccgacgactaccggatccgttttatcagcgagcatctgtggcaaacgctgcgcgcgcgggaagcaggggccaactgtcacggctacatgctgtgggcgtttaccgacaacgtttcgccgatgaacgcgtttaaaaatcgctacgggctgattgaaatcgatctgcaaaataatcgtgcgcggcggcccaaggcgtccgccagctggttccgtaagctaggcgagagccgggaattgacgctggatattgacgatgagtggcgctag

SEQ ID NO: 185355 - DNA, 279 bp, Klebsiella oxytoca
atgggtgatgcattaggtctgattgaaaccaaagggctggtggcctgtatcgaagcggcggatgcgatgtgtaaagccgccaacgtggaactgattggctatgaaaacgtcggctccggcctcgtcaccgcgatggtgaaaggcgacgtcggcgcagtgaaagcggcggtggattccggcgtcgaatccgcgcagcgcatcggtgaagtggtgacctcgctggttatcgctcgtccgcataacgacatcaacaaaatcgtcattaaacacaaggcctga

SEQ ID NO: 185356 - DNA, 1770 bp, Klebsiella oxytoca
atggcagtggaaaaactgattgtcgaccatatcgacacctggaccacggcgctgcaaacccgctccacggcggggcgcggcagctcgggtaagatcgacctgtacggcattaagaagctgcgcgagctgattctggagctggcggtgcgcggcaagctggtgccgcaggatccgaacgatgaaccggcttcggctctgctggagcgtattacggcggaaaaagccgagctggtgaagcaggggaaaattaaaaagcaaaagccgctgccggagattagcgaggaggagaaaccgtttgatttaccggtggggtgggagtgggcgcgactgggcgttttatgtaagaaattgactgatgggtctcacaatccccccaaagacgcaggcaatggttatcctatgctcagcagtcaaaatattcaggatggttatatagatatagagaacccatctcgatatgtaagtgaagatgattttgaaaaagaaaacgctaggacactcgtccaaaaaaatgatgttttattaacaatcgtggggtcaatcggaagatccgcagttgttttagatgataaatcctttgtattgcaacgcagtgttgcggttatagccacatctctatattcacattttttatctaatttcttcaaggctattaccgcacaaaactattttatagaaaatggtaaaggaaccgctcaaaaaggaatttatttaggccaactgtctttgatgttaatacctgtaccttcattagttgaacagaagcgtattagtgacagattgaatgaattaatgatcctctgtgaccaactggagcagcactccctgaccaacctggacgcccatcagcagctggttgaaaccctgctgaccacgctaaccgacagccagaacgccaatgaactggccgaaaactgggcgcgtatcagcgaacatttcgacacgctgtttaccaccgaagccagcattgacgccttaaaacagaccattctgcaactggcggtaatgggcaaactggtgccgcaggacccgaatgattcttcagcagaagttttattaaaacaattaagcacatcaagaaatgaaaagctaaaacaacaacaatctgataataaagaagctgaaacaatgcttcgtaaattaaataaattaaaaaaggcaaaaccaccattcagattaccgtataattggacggcagttcatcttattgaactttgcgaatacttagttgattgtcacaataaaacggccccatacacaaatacaggtataccaatcattcggacaactaatatccgtgagcgaaggtttctggagcaaggcttaaaattcattagccaagaaacatatgatttttggtccaaacgttgtccgccatcaccgggagatattatatttacccgagaggctcctatgggcgaagcattgatcataccaccaaatgttaaatggtgtttgggacaacgaacaatgcttattcgagttatgcatgaatttgtttctaatgaatttatcttgcttgcacttacagagcctcatttacttgaaagggcatcggaaaatgctgttggtttgacagttaaacatctacgcgtaggagatgttgaaaatctaaacatccctcttccaccgctaaatgaacagtatagaataattgataaagttaatattttatttgaatattgcaacaagcttaaatccaacataaaaaaatcccaacaaactcagctccacctggccgacgccctcaccgacgccgccataaattaa

SEQ ID NO: 185357 - DNA, 552 bp, Klebsiella oxytoca
atgctctatctcgagctaagctggtgctggcggcagctggcaaacgatgcgcatcacgagcggctgataacctcccagccggtgattcgcgatgccgggctctttgcccggtatctgcagatcgtggcgttgatgactcagcaaaacaccgccgcgctacccgccagcgtcgcccggttcctgcgcgacctgccgctgcgcccgctcgcgcctgtggcgcttagtcagaccagcgcgcgtttgttcagtcgtctggcaaccaatctgcaggcgccgccgacgctggatagcctcgccgatgagtttgcgctgcgcaaagagacgctgatccgcgccttcaagcaggataccggcctgacgcccgccagctttatcaatatcgcgcggattgagttcgccaaaacgcgcctgcgggccggggataatatcgccgatgtgggctaccaggccgggtttgccgaccagagccactttcataaaacctttgtcagctataccgccgccacgccgcgccagtatgcgcagtcccgatcaataacagacaataattag

SEQ ID NO: 185358 - DNA, 981 bp, Klebsiella oxytoca
atgaaaaataaccgaatctgccagatcctgaatatagaaaaacctgttattcaggggccgttatcgtggttgaccgatgcccgtttagtcgccgctgtcagcaatgccggcgggcttggtgtgctggggccgaatgccggtttaaccgctgagaccgcggtgtccacgccggaagaaaccgccgaaaaaatgcgtgaagagatccgcaaaaccaaacggctgaccgaaaaacctttcggcgtgaacctgatccccgcggctgaaaacgatatctggaccccgcctattttgcaggtgataaaagaagagggcgtcagggccgcggtgtataccggctacggtgaaggggtgctcataccggcgctgttcaacgaattaaaagaggcgggcattgctatcatctatcgcgatattaacccgacgcctgaaaatacccgccttgcggaagaagcgggtgccgatatcatcgtcgcgaccggctttgatgagggaggaacattgccggggaccgcgctgggaaccttttctatcgtgccgctgatcgccgatgcggtgaggcgtgttccggtgatggccgcgggcggtattaccgacaagcgcaccgccagagcggcgcacgcgctcggcgctgaagggatatttgccggttcggtttttatcgcgacggaagaaagcagagtgccgcggtcggtcaaaaataaaattattgccgccagtggcctggatttactgcttttccgcacgctgccccattactatcgctctctgccgggcagactggccgaaaaactggtggcgatggataaagccggcgccagcaacgaggcgctcggtgaagcaatggggggattacgcggcctgcgcgtcggcatgctggaaggcaatgccgatgagggctatatcgcgctcggcacgggtatcggcagcatccgcagcgtcaaaagcgtagcggaagtggtcgacgcgttaaccgtgagttag

SEQ ID NO: 185359 - DNA, 1284 bp, Klebsiella oxytoca
atgcttactgaaaataaaaacacatcacccgcctttggcgtttattcagaggtcggtaacttaaaaaaagttatggtatgttcaccggggatggcgcatgaacgccttactccggggaactgtgaccgtatgttgtttgacgatgttctgtgggtagcgaacgccaaacgcgatcacttcgattttatgaataaaatgcgtgagcgcgaagttgaggttgttgagttccatcaattgctggaagaaacggtaaaaaatcctctggcgcgaaaatggattctggatttacaagtggtacctgatgaagtccccttgagtctgatagacgaaacgcgagactttctcgataatatttccgcccgcgaactcgcgcagactctacttggcggcctttcaacgctggaactgctacacgcctcaggcggaaaatacgataaagaagaatgcagacttgtccacgccgctatcgcacagagtcagtacctgcttcctcctttacctaacgcgctttacacccgcgataccacctgctggatcaatggcggcgttactcttaatcccctctactggccagcccgccatgaagagacggtgcttgcgactgccgtttaccggttccatcctgatttcgctggcaaggttaacgtgtggtacggcgatccaacggtccaccacggtacggctacccttgaaggtggtgacgtaatgccgattggtaataaaacagtgttaattggcatgagcgagcgcacctcttaccaggcgatagcacagcttgcgcaagcgctttttgcgaatccgcattcggggatagagagggtgatgattgccgccatgccgaagctacgagccgcgatgcatcttgataccgtttttaccttctgcgaccgggacctcgtcacgctttatccacctattgttaatcaaatcaaaacattttcattgcgacctgatgaaagatcgccccacggaatatgcttaaccagggatgaagataattttgtagacgcggtagcccacgcgctaaatctgaaacaattaagagttgtggaaacagccggtaatgactacgacatggaacgtcagcagtgggatagcggcgcgaatatggttgcgcttgagcctggcgtggtcgtggcctatgaccgaaatactaagactaatgcacaactgcggaaaagcggcgttgaggtgatcaccattgttggcagcgaactaggccgcggtcgcggcggcggtcactgcatgacctgccccattattcgcgagcccattgattattaa

SEQ ID NO: 185360 - DNA, 1500 bp, Klebsiella oxytoca
atgaataaatcagatgcaaagctgtctttgcctgcgctgaccgcgttggtggtcggttcgatgattggtgcaggaatattttcacttcccgccactttcgggcgcgcagcgggcgggcttgctgccatcatcgcgtggtgtatcgctggcgggggaatgttaaccctcgccctggtctttcagactctggcgataagaaaaccgcatctggattcgggtatatttatttacgctaaagaaggctttggaaattaccttgggtttacttccgcgctcggtttttgggcagggacctgtatcggcaacgtatcttattttgtgctgataaaatcaaccctcggcacattctcccccatcttcggcgatggcaatactttatacgcgattctcactgcctctgttgtcctgtggtgttttcatatcctggtattaaggggcgtaaaagaagctgcaattattaatacggtggtcacctgggccaagattattcccataggtgtctttattgtcgttcttatgttcgcgttcaacgctgacattttcaccgttaacttctggggggtacccgacatcagggatattcactcctataccctgtctgaagggtaccatgaccttgtgcactatatcgccgcgcctgacaatgagcacgagtccttattttcgcaggtccgcaataccatgctggtgacggtattcgtctttctcgggatagagggagcgagcgtgtattcccgtctggcgaaaaaacgtagccatatcggtaccgccacggtgttcggttttatcggtgtcctgtgcattctgtgtctggtcactctcctctcatatggggtacttttacgaccggagcttgccgcgctacgtcaaccctcgatggccggcgtactggagacaattgtcggtcgtccggggatgatttttatcagtattggcctggtcatatcggttttaggcgcctatctctcctggtcattactggcagcagaagtgttatacagcgcagcaaaatccggattgatgccaaaagtattggctaaagagaacgctaaccgggtcccctataaggctgtctggctgaccaacatatttattcaggtctttttaatcatcacgctgttcaccgactacgccttccagctggcactggagttaaccagctcgctgacgttaattccttatttcctcgtcagcacatatgctttaaagcttgcgttaaccggggaatcctactccggctcggcaacagagataaggaaggggctgatactttccgccattgccctgatttattcgctgatgatgatttacgctggtggcgtaaaatatcttttactttctaccattatttacggtccgggaaccattctttactatttcgcgagaaaagagaatttggcgaaagttttcaccaggcatgagcttcttctgtttgccatgctgatgtcaggagccatcatcggtatctatgcaatcgcaacgggactcatgcaaatttaa

SEQ ID NO: 185361 - DNA, 279 bp, Klebsiella oxytoca
atgttgtttattatagcctggcttatcgccatgggcaccagtgaactgttattatggtcttacggctaccttcaccttatttcccccgtactttatatctcgctatgcattatgtttatctatcaacgcagaaaaattcataaaaataaagacctcaacttctatgagaaaaaaatagagtctatgcgaatgggcataatgtttgttctgtctatgctggtgatgctggccatcactgtcaatatccgttttttcacgctgatttataccggactttag

SEQ ID NO: 185362 - DNA, 1140 bp, Klebsiella oxytoca
atgctcaggatatacttataccttattctcgccgcatcggtttccgcgatggcgacagatatgatcgtgcccgcgctgcccctattacaaaaagcgtttactaccgattattcggctattcagttaaccattagtggttttctggtgatatacgcggcgagccagttattatcaggatttcttggcgaaaagttgggtaaattacgcgtactgacggccagctttttacttttcctcgcgggcagcctcctctgttttatgtccgatagtttaatgatgctgttggccggcagggcattacaggccctgggcgccggcgccgggccggtcctgtctaaagctatcgctaaagagacgttctccccgctaacgctcaagcgcgcgctttccgatatttcttccgccagcgcggtggttcctcttattgcgccgctggccggcgccgcactcctcggctatctgagctggaattcgatattcctggttatggccctgtttagcgtcgtcacccttgtgctctctccgcgtcgccttaagcagcatgatgcggccgcggcgccctcctcttccgggtttatcaccccggcatttattcagggtacgctgctggtttcgctgattctgagttcgctgttttgctatatctcgctgtcgccggccatttttatgcagcagctggggctaagcaccatgcactactcgctgctcttttctgcttccgtattattttttattattggcaatcagatcgccaaattcgagcgaataattaacccgtggactttatttatcctgaatgcgctggcggttaccccatttattatcggcagccactcattactattatgcatcgccggctcgatgatttttaacctcacccttggcgcctattacccgagcgcgaattttatcgcgctgcaaatcaaaggcagcaaaacaggtattgcggcgtccgtcaccggatttattcaaacggtgagcgccggcgccatcagctatttcgccgtaaaactaacggataccggtatggggtttgacagaaccctcggtgcaagcacgttaacgctggcaattctgtctgttctggtagtcacgacaatgaaggtaacgcaatggaaaactggcaaaaaaggaaaatag

SEQ ID NO: 185363 - DNA, 570 bp, Klebsiella oxytoca
gtggctatacatgacaccgggatgttcaccgtgaaagaaatcaaccgcctcaaaatccttcaggatgtcatcgaccgcaaccgtcagtccgggccactgggcatgaataaccagagtcgtggtcgcaccggaaatcgcctgcttcccgcatcattgactgatcaggccctgaatatcatccgtgaacgctatgccgattttggtcccacactggcgcgggaaaagctcgctgaaaatcacggtattgttcttggtaaggaaacactcagacggcttatgataaaaaccgggctctgggttccccgcaagcaacgtgcgccaaaaattcagcagccacgctatcgccgggcttgctgcggcgaactgatccagattgatggttgcgaccatcactggttcgagaaccgtgcgcctgcctgtactgcccaggtctacgttgatgatgcgacgagccgcctgatgcaactccgtttcgtgaaatcggaatcgactttcacctattttaaagccacgcggggctatctggagaagcatggcaaccccctggcgctgtacagcgataaccagtga

SEQ ID NO: 185364 - DNA, 519 bp, Klebsiella oxytoca
atgggaactcaagaaattattataccgacatctactatcattaatgcaatcttaatttttgtaggtgtctatattgtatctcctgctgcaatgattgtgagggatttccttatacttcggatgaccaaaacctttatattgaataaatatttttgggctaaaatggaaataatgcaaatggacaaggcatacctagacattaaatataataagaactggtcatgtagagacgtacctgaaagcggtgatggtggcatgtatgagattgattgcaaaaaagtttcaaaagaagagttcgatgaatataaacgccaatttgattttcataagcggcggtatcgacagaattataatgcactaattatcagaaataatctaataaatagaatctttaaatattataaattagaagattacctcgatgccataaggaaagatgctgattcaaagtatgataaatgggttaaccaccttacaaaagatgagttctgggagtcacataagcatacaagagtgtaa

SEQ ID NO: 185365 - DNA, 1254 bp, Klebsiella oxytoca
atgatgttgagtaatgagtgttcgattctgctgattgatgatgatcgcgacgtgctggatgcctatacgcagctgcttgagcaagcgggttatcacgtccacgcctgcgataacccctttgatgcgcgggcgtgggtgcagaaggactggcccggcattgtgctgagcgatgtctgcatgcccggctgctccggcatcgatttgatgacgctgtttcatcaggatgacgagcagctgccgattctgcttatcaccggtcatggcgacgtaccgatggcggtggatgcggtgaaaaagggggcctgggattttctgcaaaagccggtcgatccgggaaagctgctctcgctggtggacgccgcgttgcgccagcggcaagcggtgatcgcgcgtcgccagtacggccagcaaaaattacgggttgagctgatcgggcgcagccaatggacggaacagtatcgccagcgtttacagcagctggcagagacggatattgcggtctggctttacggcgaagcgggaaccgggcgtatgaccggcgcacgttacctgcaccagctggggcgtaacgccgaaggcccttttgtctactgcgaactgactgcggccaacgcccataagctgaatgacgcgatcgcgcaggcgcagggcggaacgctggtattaagccacccggagcacctgactcatgagcaacaacatctgctggtacaggcgcagagccatgagaaacggccttttcgcctgattggtatcggcagcacgtcgctagtggcgctggcgggcagtagccagatcgtggcggaactctattactgcttcgcgatgacgcaaattgcctgcctgccgctgtcaaggcggcctgatgatatcgagccgctgttccaccactatttgcaaaaaacctgtcagcggctgaatcatcccgtcccggaggtggatagccatctgttaaaagggatgatacgtcgggcgtggccgaacaacgtccgcgaactggcgaacgctgccgaactgtatgcggtgggggtattaccgctcgcggatacggtgaatccgctgatgcacgtcggcgagccgacgccgctcgatcgacgggttgaggacgtagagcggcagatcatcaccgaagcgctgaatctccatcaggggcgcattaatgaagtagcggagtatctgcttattccgcgtaaaaaactctatctcagaatgaagaaatatggcctgagtaaagagcactacaagggcttttag

SEQ ID NO: 185366 - DNA, 1392 bp, Klebsiella oxytoca
atgttatcaatattaaaaaaagggccgtcggcaaataaagtgccggttgagaaaattcaggcaacttatggccgctaccgcatgcaggcgctgctaagcgtatttttgggttatctggcgtactatattgtgcgcaacaatttcaccttatccacgccttatctgaaagagcagttagatctgagcgccacccagatcggtttgctcagcagctgtatgctcattgcgtacgggatcagcaaaggcgttatgagcagcctggcggataaagccagcccgaaagtctttatggcctgcggcctggtgctgtgcgcgatcgtcaacgtcgggttggggttcagcaccgcattctggatcttcgctgcgctggtcgttctgaacggtctgtttcaggggatgggcgtcggcccctcttttatcaccatcgctaactggttccctcgccgggagcgcggtcgcgtgggggctttctggaacatatcccataacgtcggcggcgggattgtcgccccgatcgtcggcgccgcgtttgcgattctcggtaccgagcactggcagagcgccagctacattgtcccggcctgcgtggcggtggtgttcgccatcagcgtactggcgctgggtaaaggttcgccgcgcgaggaaggcctgcctgcgctggaagagatgatgccggaagaaaaggtcgttcttaacgctaaacacgcggtaaaagcgccggagaatatgagcgcattccagatcttctgcacctacgttctgcgcaacaaaaacgcctggtacgtctcccttgtggacgtgtttgtctatatggtgcgtttcggcatgatcagctggctgcctatctatctgctgacggtgaaacatttttccaaagagcagatgagcgtcgcgttcctgttctttgaatgggcggcgattccgtcgaccctgctggcgggctggctctccgacaagctgttcaaaggacggcgcatgccgcttgccatgatctgtatggcgctgatttttgtctgcctgatcggctactggaaaagcgaatccctgctgatggtgacggtgttcgcggcgatcgtgggctgcctgatttacgtgccgcagtttctggcctccgtgcagaccatggaaattgttcccagctttgccgtcggctccgccgtgggactgcgcggatttatgagctacatctttggcgcatcgttaggcaccagcctgtttggcgtgatggtggataaaatgggctggcacggcgggttctatctgctgatgggcgggatcgtctgctgcattctgttctgctacctctctcatcgcggcgcgctggagcttgagcaacagcgtaagaacacgcagcagcaagaagccgagctggcgctggccgacgcacaataa

SEQ ID NO: 185367 - DNA, 1263 bp, Klebsiella oxytoca
atggatattatcaacagcattattagtctgggggcatcagtgatgatgccagtaatattctttattatcgccctgtgcttcggcgttaaaattggcaccgcatttaaagccgggatgctggtcggtatcggttttgaaggggtgggtctggtgatcggcctgctgttgaccaacctcggcccggcgtcgcaggccatggttgaacgcatcggtctgcacctgacggtggtcgataccggctggccgaccgcctccactatcggctggggctcgccgctgatgctgccggtggtcgtgggatttattgttatcaatatcgccatgctgctgcttaaattaaccaagacggtaaatatcgatatattcaactactggattttcctgattatggggtcggtcgtgtatgccggcaccggtaactactggctctccgttggcattaccttcggcatatttatcttaaccctgctggcggcggatttaaccgcaccgtatttgcaaaaaaactataatcttaaagggatatcattcccccatcttacctgtataacctacgtgccgtttggtattgcctgtaactatattattgataagatcccgctgattaataaaattaatttcgacccggaaagtattaataaaaaattcggcgtcttcggtgaaccgctgaccctgggcttcgtgctggggctgctgctggccttccttgccggatacgatgttgcagccgcggtgtcgctggcgattaaagtttccgccgccatgctgctgctgccgaaaatgatcgaaattttagtgcagggtctgcttatcgtgcgcgatgccgcggaagcgaagctgaaagcgaaatttcccaaccgcgacttctatatcggcatggataccgcgctgcttattggcgaaccctcggtgctggcgaccgggctgctgctgatccctatggcggtggtgctggcgattattttgccgggcaaccgcgtgctgccgtttgtcgatctggcctcgctgatgttcctgctggcgatggtgacgccgttctgcaaacgcaatatgttccgcatgtttatcaccggcacgctggtggtcacctgtattttatacgtcgggacggatatttcgcgggaatacacccaggcggcggtcaactctaacattccggtgccggaagggatggcggaaatcactaatatcgtgggcggagccaccaccccggtgggctggctggcggtgaaattcggcgagtttttcagtaccgcgccgtaa

SEQ ID NO: 185368 - DNA, 1248 bp, Klebsiella oxytoca
atgattacattagtgaccaggcatattgtgagtaagacgggagagaggctaaagcttcttgtcgatgcttcttcaggtatcccgttgttttaccctaacttatactgcacgtcccaaatacgtggggcctctaaatctgtagctaccattcaaagttacataacttcaatgaaagtgctttattcttgggctgctgaatattcggtcgatattgaagatcgatggaagaaagcagaatggtttaagatttgggaaattgattctttaagggattattgttctttgccattgagacctccttcggaacggaaagaaaaagttgtaaatataagacaaggtcgcccagttatttctgcaggtgttaattcatcaactaaatacactcgtattactttcattgcggattatctgagatggcttgctaaaattttgaatagaacttccagcaagagcataaatattgaaatagaggcaatgtatcaaaatattaagtctcatcgtcccaagatgaaagggagatcagtaacccctcgagaagataaggggcttgattctgacttaattaagaaagtaattgaagtatctaaaccagggcatgatagtaacccttatcaaggttatgctttacaagtgcgcaatgctgcaatcatagccctgctacattatttaggcattcgtagaggtgagctactcaatctgagagttgatgatataaactttgtcaccaatgagctgaggattgttagacgtgctgataactctatagattatcgtgtttatcagccattagtaaaaactgaagagcgaatcttacctataaatagcagattggctgagataataagtgaatacattataaagtatcgttcaacttttccacacgctcgtaaacatccttatttatttgttacacataaaaaaggaggctatcaaggtgagcctctttcaaatagtggatttgggaagttgatgtcagctttacagggtatagctgaaaatttttcaccgattcacgcgcatgcctttaggcatagttggaactataatttttcaaaagtcttagatcaggtggaaaacaagcatagccctgagaaagaagaacaaatgagatcttaccttatgggttggaaagaagcctcgggtacagcggctacatataatagacggcatataaaagaaaaagccaaagaagcaattttggactttcagcgtagtattagaggttcaggagtaagctctgatgattaa

SEQ ID NO: 185369 - DNA, 1545 bp, Klebsiella oxytoca
atgattaactctgaaaaaattgatgtcagctacggggaaacagcgcttatttcctgggatggaagagcatttaatataaatgatgattcgtggaaattaaataaaaatgtcgtagttgttgttaaatggatatcaaagttgaagccaatagtagcgtcttcacttaaaattgtgctggcgcgctttgctgaagaatacgcagcggaaacagtaagaggactgaatgaccaggcgagacagtattttaatctcacaggagattgtgagtttttggttgactcactaatttcgtatcgctcatctctatcacgcgatgaggaacaaaaactatctaaaataagaatgctggtgcgaaattggactaaatggggatacccaggagtatcacaagaagcttttgaatttctcgatagtctgcgtttaaaaggactggaaaaaggaaaagcaataaagaggttagatcctgaggaagggccattaactgaaattgaaatgagtgctttgattgatgcaatgctacaggcgtatacttctaataagataactatttctgattatacactatcggcaattcttgtttataccggtaggagaccaatacaaattactagtctaaagataaaagatatctgctcgcatagggttggtgaacttgatgaatactggataaatttcccaagagctaaacagagattttcaaaatggcgtacggagtttaactcttaccctattacccaagatctttggagcctcttaagtcagcatataactaaagtctcaaacaaaattcttaaattaataaatttccaattaacacctgaagtaatgcaggaatttccattattcccagacttttccgaaatacgtaaatgcaggggttataaatcatttattgctgcattggatagcgatgctctacatattgaacgggatttctgtaatgaagtaatgaaaaagttgaagggcgttcttaatgtttattctgagcgaacaggaaaaaggttaaatctttctactcggagatttagatacacgctcggaagtaatattgcacgcgagggtaaaggagagctaattatcgctgaagctctggatcattctgatacacagaatgtcggtgtatatgtgaagaatctaccagatgtagtggagcgtatagataaggcagttgctttacagttagcaccactcgcgcaggcatttcagggaactttggtagattcagaagctgatgctgaacgtggaggggataagaatagtcgaatagggaatgcagacgtaaatataggtaattgtggaagctacggtttctgtggggctatggcaccaatagcctgttatacatgtaaatatttccagccttgggtcgatgggccgcatgaaataattctggatggattgatcgaaaaacgtgacgaagtattgcgcaatacaaaagatataaaaattgcctcttctaatgacagattaatacttgccgtcgcacaagttattcgaagatgtaatgctaaaaaacttgagcgttcgcgtgtggaggggggctaa

SEQ ID NO: 185370 - DNA, 2025 bp, Klebsiella oxytoca
atgggcgagatatttcattttgtgcctaagactggatgggatgctgaggcgaatgttaatgaatttataaggcgatgccgtgatgatttaactgtattcgggaaaaatatcaattgggatagttggaactggaaaggggttgtcaactatacgaaagttggtgcaccaagtcgtggtataagttctgaacacctgctggatgataaaattcaggattttgcgaaggcttatattcgctaccagcaaggacataatccgacaaagaatattcaagaaattaaagctatccgctgtatcgaacctgcattgctcaaagttaaaggtattacagatattacccaaatagatgtgttagtgcttgatgaggcagcagtggtcgccagagagcagtatggtagttctggttatcatgctggagcgcatttggagaggttggcgaaatttatttctgacaaaggaatggttgtatctccaatcaattggaaaaacccaatccagaggtatatggaccgaaatctaactggtgaaaagggtcaagctcttagggaaaagaaacttccgaaggaccatcagctggactatatggctgaaatgtttgcaaatgattttcttgatccgcgtgaccgtttcacgacctctatgtttgcattaagtatgtgcgctcctgggagagtttcagaatttcaggacttatcaattgattgtattcatgaagaaaatgatagaaaaggagtgccgaggctagggctacgtttctacgcggggaagggttatggtgcggatataaaatgggtcagtacaccgtttgtttcgattgctaaagaagcaattaggcgacttaaggatctttccatagaaggcctgaagatcgccaaatggttggagactaatcctgatgaattttatcgacatccgcaatgcccaaatgtcggtgaagatgatccattaacggctgttcaaatatgtcaggctatgggatgggtggtccaggaaggtaggtccgctatgtctgtagcgttcaatccgagtaaaaatgaaatattatcaattcggcagagtaagggagaagttactcttagagaccttaaccagattgtgcattccaatctacctgctggttggccttggaaaaataaagaacgtggtgtgaagtattctgaggcattgatttgtttaagaaaggatgagcttcatggcaacagaggtgtttcacctgtaatgctttggacaccagacaatgctacttttacttatgacctaggccccagaaaaggcacagatcagagaagtatttgggagcgtcatggctacaaaaatccagatagttcagagataaaactaacttcgcatcaactgaggcatttgttaaacacagtagcccagcgtggggacctcggacaattcgatatagcgatgtggtctggacgtaccaatatccatcagaaccgcacctataaccatatttctgaatatgaagtattggataaggtgaaagctattccaagtgttgtggctatgatgggcccactcgataaggtgaaaagccatataccagtgaccctcaaggatctggatgctattggagagggcattgcccatgtcacggaatatgggttttgtgttcatgatttttcaatgattccttgccagaagcatcttgactgtatcaattgcactgagcaagtatgtgtaaaaggcgatagagaaaaactgaatcgtctcataatacaaagagataaaaccataacacagttagcgaaagcatccacaggaatggcaaaaggtttttatggcgctggacgatggtttgagcatcaaaagcgaactctagaacgaacggtagaattgattagacttcttgagtcagatgatatcgaggacggttccgtgattcgtttacgcaataagaaagagtttagctcgttaaagcgcgagttggatgcacaaattgcgcagcagaaattagagtctgaagtgcagattaaaaatgaaatgagagctcttttgggaggggattttggctaa

SEQ ID NO: 185371 - DNA, 2325 bp, Klebsiella oxytoca
atgcgggcactgaagcgcattaaacgccgctggcgctggctggcggcgtttatttttttgctgtggctgctgctgctggccgccgatcgcctgtggccgctgccgctgcgcgaggtgacgcctgcccgagtggtggtggcggaagacgggacgccgctgtggcgtttcgccgacgcgcagggcgtctggcgctatccggtgaccctggctgacgtttcgccgcgctatttacaggcgctgatccggtatgaagatcgctggttctgggatcaccccggcgttaatccgttctcgatcgttcgcgccgcctggcaggatctcacttccgggcgggtgatctccgggggcagcaccctgaccatgcaggtggcgcgcctgctcgatccgcatccccgaaccttcggcggcaagctgcgtcagctatggcgcgcgctgcagctggagtggcatctgtcaaaaagcgagatcctcacgctctacctcaaccgggcgccgttcggcggtacgctgcaggggatcggcgcagccagctggacctatctcggtaaaccgcccgcgcagctcagctatggcgaagcggcgctgctggcggtactgccgcaggcgccgagcaggctgcgtccggatcgctggccggagcgagcgcaggcggcgcgcgataaggtgctgctgcggatggaaaatcagggcgtgtggccatcgcagccggtacgagaagctatcgaggagcccgtctggctctttccgcggcagatgccgcagctggcgccgctttttgcccgccgcgcgctggcgagcagccgcgcagagaaggtggtaacgacgctggatgccggactgcagcggcagctggaagacctggcgctgaactggaaatcgcgcctgccgccgcgcagctctttagcgatgatcgtggtcgaccataccaatatgaaggtgcgcggttgggtagggtcggtggatatcaacgatgatagccgctttggtcatattgatatggtctcggcggtccgctccccgggctcggttctgaagccgtttgtttatggtatggcgctggatgaggggctgatccatccggcttcgttgttacaggatgtgccgcgacggtttagcgactaccggccggggaattttgacagcggttttcacgggccggtgagcgccagcgacgcgctggttcgctcgctgaaccttccggcagtgcaggtgctggaggcctacgggccgaagcgttttgccgccaggctacgcaatgccggattgccgctgatgctgcccgccggcgcggagccgaatctgtcgctgatcctcggcggcggcggcgcgcgtctggcggatatcgtggcggcgtacagcgcgttcgcccgccatggtaaggcgggacaattgcgcatcacgccagactcaccgctggttgagaggccgctgctgtcgccgggcgccgcgtggatcgtgcggcgcatactggccggcgaagcgcagccggtgcccgatgcgtcgctggtgcaggtggtgccgctggcgtggaaaaccggaaccagctacggctaccgcgatgcctgggcgatcggcgtgaacgcccgctatctgataggtatctggaccggacgacccgacggcacgccggtcgtcgggcagtttggcttcgccagcgcggtgccgctgctgaaccaggtgaataatatgctgctggcacgcccggcgatgagccgcggcggattgccggccgaccctcgcccgtcgtcggtcagcgccgggacggtttgctggcccggcgggcagaatttacccgcgggcgacgcgaactgccgccgacggctggccacctggctgctcgatgagagccagccgccgaccctgctgctgcccggccaggaaggtattcgcgggattcgcttcccggtgtggctgaatgagaaagggctgcgggtggcagcagattgccccggcgcggtagagaaaagcctcgacgtctggccgctgccgcttgaaccctggctacccgcaggcgaacggcgtcgcgtcaggctgcctgcggtttcggcggcgtgtccgccggtgcaaaccgcggatgccgctccgctggtgctctccggtcttcgtgaaggcgcggtggttaaacggctgcccggcgagcaaaaggtgatgctgccgctgcaaacgaccggcggggaggggcgccgctggtggtttcttaacggtgagcctctgccggcggaaggcgccggcgcgacccttaacatcgatcgccctgaccgttatcagctggtagtgatggacgaggcggggcaaattgttgccgcgaacttcaccgtgcaataa

SEQ ID NO: 185372 - DNA, 531 bp, Klebsiella oxytoca
atgatgattacgaacaaactacttattgaggaagtggaggagctgaaaaatctactttcacaagggaaggctgaaattccatctttttgggagtgcctttggcctggcgtagtgttagttgcatggaatatgctttgcgctgtaattagtgtggatgctgtttatttgaccggaaagtatatatttcatgttttggtttttcctgtcggggtcagtatcattatgctcctaggtattgccagttcacgctctctctttttgtcagtccctaaaaactttagagaaaaatcgaatatatatcgctttttttctaagaaggtttcgatttatgctgttgtgtacatggcagtgattatgttattagctatttgtaatagagtggtttatgacacgccattttcttttgcatttatggttattttaacgtctgttttttttggttttgtcatgaatctggattttggacgctatcagctatcattgctcacctctgcaataaactctttccgagcggaaaagttgggggggtaa

SEQ ID NO: 185373 - DNA, 249 bp, Klebsiella oxytoca
atgaatcgatatatcacgattgagaaatttatagacattctgaatgaagagaatttaccccaggagcatcatgttatggtgctggctgttcttgcggatatctctctgcatacagacaggttcctgattaactcgtccgaactggttcagatggccgctcagtactcacctgctttccagaaactgccagcggaccggcaggcttttatatcttcagtactgagcatgccgctattccttattatgtga

SEQ ID NO: 185374 - DNA, 255 bp, Klebsiella oxytoca
atgaaaattaattttcacaaacagcctgccattgattttgtcctgagattaacactgacagtaatcattatttctccggtgatttatttctcctgggatgcagtcaaagggacgtcgggaagtgattatgtcgaaagtgtggtctttattcttatggctgggtttgccatgtctgtgtgttatttgtttttctcagccctggagaaagttataaatgcaaggaaaagcaaagatgaatcgatatatcacgattga

SEQ ID NO: 185375 - DNA, 1956 bp, Klebsiella oxytoca
atgaagacggttatttccgtgctgaccgcgcattttttagtcctgagcgcctttatctggctggcatctcccgcctgcgctgacagtggaagtgactataaagctggttcggattttgcgaaacaggtgcagggcaatggtctgaactcactgaaaaatttcagtggtgagcaaaacctgccggggtataccgccaacccgaatcagacaaaatactacggcggcgtcactgccagcggagacagctctctgaaaagcgattcagccctggagttcagccagggggacacaggcaaagcggttacggagtcgttcacaaaccggccaccggatcagatatctcaggatgcgccgtttattcaggccgcaaaggatacagaatcccgtgccgacagcattgtcggcgataccggacagtcctgtaccgcccaggttgtgaaccgcagcgagttcacaaaccatacctgcgaacgtgatctgcaggtggaaaatttttgcacacgggaagcgaccctgaaggataacgccaccacgcagaaagttaaccgaacctatcagcaggtggtgacgctgaattatgcccggagtacccggcaatggagtggcaacctgacgatcccgaccaatggtcgtctgctgaatgcctcggtggatggtgagcctctggtgatcccctggattgaagaatgcgattccgaagggaaggtgcgggatagctgcaagagtgcagtgagtgaaagcctgaccctctttgaacgaacgttccccattgatgtgatcagctggccacgttcagaatcgatgtgttcaggcggtcagaacacgcattgtacgaaatatacctatgacgggaaggggaagattcatcagtcgtttggtgtggacaaagcggccactgctgggcagaacttttcagtaagcaaaacatcacggaccgtatcatcggccagccagaaacccgtacaggtcacggtcaccctggtgatggaagaaaccgaaaccgtctatgcacctgaagtcgtctgggttgaaagctgtccgttcagtaaggatgaaggaaaaaaaacgggcgaggaatgtatcagcccgggaggaacgcgaaccatcaccctcggaggcagggattactcgttcacggaggcctgctggaaatataaggatacctggctcacgcaaccggcggacaacggctcctgtgaaagcctgatgaaaaatacggcttgtactctgtcatcccgccagtgcgccttctccagcgaggaaggcacgtgcctgcatgaatatgcaacgtattcctgcgaaaccaggacgagtggcaaacaaatgatctgcggcggtgatgtcttctgccttgatggtgaatgtgacaaagccacgtccgggaagagcaacgactttgggcaggcggtgtctgagctggcggcactggctgccgcggggaaggacatcgcggcactgaacggggtggatgtccgggccttcaccggaaaagcgaagttctgtaagaagtttgctgcgggcttcagtaactgctgcaaagacagcggctggggccaggatgtggggctggcacgctgcagcagcgaggaaaaggcgctggcaaaagcgaaaaaagacaagctgacggtcagtatcggggaattctgctctaaaaaggttctggggatttgcctggagaaaaaaaggagctattgccagttcgactcaaaactggcgcagatcgttcagcagcagggaagaaacggtcagctgcatatcggttttggcggagccagcagtcctgactgtcgggggattacggttgaagagctccagaggatcgactttaacatgcttgatttcaccaactttatggacgacctgatgaaaaatcaaaaaataccggaaaacgatgttctcaccaataagaccaaagaacgaattaaggaaatcatgagtcagcaatccgcgcaataa

SEQ ID NO: 185376 - DNA, 177 bp, Klebsiella oxytoca; identical to SEQ ID NO: 104043

SEQ ID NO: 185377 - DNA, 402 bp, Klebsiella oxytoca
atgccgatgatactggccttaataatcctgctcacgatgctcttgctgacgctaatgtggtccaccatccgtaagcaggagaatgtcatacgggaactcagtacaagagaaagctggctggagagagaggttgagcgtctcaggaccgataacgagaagctgtaccgctggctgagatacaacagtgaaaaggttatcgatgaaatgacttgtgaactcgatgcactgtccgccgttcgccagacgaacagggattcataccgtcgccagctttacctcttcgactgcctgtccctgatggtgtgggccgggatggagggcgccgaagactctacacgggaaaaggtccgcaataaaatcgatgccctccgtcttgttctcagggagaaaactgacgaatga

SEQ ID NO: 185378 - DNA, 564 bp, Klebsiella oxytoca
atgcatcatgaccttaaacaccgtattcaggcgatgcgggtcaaactggaagggcgcgcccctgtcgctgaaattcggggtagctcgcaactttttgtcaccccctccccggaatgtcgccggttagttgagctggctgatgtccgggaaaccgatcgcattctggaacccagtgccggaacgggcgccatactgcaggcgatcagggatgcagtcccccgggcgaagtgtgacgccgtggagctgcacgccgggttagcccgtcacctgcaggctcatttcccggaggtccggatctggtgcggagattttctcgaatatcatccggagcgccggtatacacgaattatcatgaatccgccgtttaatcgcggtgatgatatccggcatatccggcgggcattaactctgcttgagcctggcgggattctgacgggcatatgtctggacgggccgcgtcagcaaaaggcgctggagtccctggcggacgtctgggagccgttgccacggggaacattcacgtatacccaggtagcgaccgccattctcagaataaccgtctga

SEQ ID NO: 185379 - DNA, 1356 bp, Klebsiella oxytoca
atgacaccgactaccgcacagatcatgacggaaaataccgtcagccagacttaccgggcaacctattcacccgatgataataaattgcgactttacgcatcattacggctcgatgaagaaacgtattccctgatcaacaaagcaggctttcgctgggcgcccaaacagaaactctttgtggcgccagcctggacgccggggcgggaggatgtcctgctttcgctcgccggtgatatcgaggacgaggacagcaccctgtttgatcgccaggagcagcgcgccgggcggttcagtgactacagtgaccggcgggcggttgaatcggagcaggcgcttgcgcatgttgattcgctggcatcggctgtcccgctgggacagccgatcctggtaggccaccacagcgagcgccgcgcgcgccggcatgcgcagaaaattgagagcggcatgaaacgtgccgtgatgctgttcgagcgtgcggaatactgggaacagcgcgcgcaggcctctctgcggcacgcaaaatacaaggagcgtccggatgtgcgttaccgccgtatcaaaaaaatcgaggcggaattacgcaagtcccaaaagcacattgcccggtctgaaaagtatatgacgatgtggcgtgcgcagacgctcgatctgaaaatggcgttactggtcagtaattatgatcatattcatgcctgcttcacgctcgacaaatacccccgcccggcagagaaaagccagtatgagggctcgatgtctctccattctgccctgtcggaggagatcattacttttgaacaggcgcgtgatattgcgatccgctgtcatgagcgcacgattaaccaccaacagcgctgggttaatcattaccagaaccgcctggcctacgaacgcgcgatgctcaatgaaaacggtggcgttgtcacccgaacacaggaatttgaaccaggcgggcaggtactgagccggggagaatggttaaccattctccgggttaaccggagtaagggggaggtgagttcagtcgaaacgcccggttatcgctttctgggctacagcggcacgatgaaactcacgcccgaccgtatcacggactacaaagccccgacagcggaggaagccagcgacgcgaagaaagcggcgaagcgcccaccgatcgtcaattatccgggggaagggttccgggaaatgacaaaagccgagtgggcgaaattacccgctgattataaaggcgtgcggggtgctgcagaaaccgaaacacacggcgcctaccgcttccgccggtgcatgacgcacggttgtacgctcgtgaatgtgtatatcacagacatgaaaaccgttgaaattccgaaaaaatag

SEQ ID NO: 185380 - DNA, 231 bp, Klebsiella oxytoca
atgatcgtttctattttttcaccttccgcaggcgctgtaaagccccgtcgtcattcgcgcattctgcgcgcagatatcaccgcaccggagattgatcccgctctcagagctttcgggcgtcatatcgccagaagtcaccgcaaagggcgcggtgtccacatccccgcgatgaaaaataccgccctcgggcaggtactccgcacgctggaactgaaacgcgcatttaactga

SEQ ID NO: 185381 - DNA, 228 bp, Klebsiella oxytoca
atgcaggatccttcattgcgaacgtatcggatcgcatttctgggaagcaatgccagcggcaatctgccgatgtttacccgggtgcaggccacgaccggaaaacgggcgataaaagcgtttattgaacgctgtgaacccgtcaaaggctggtttctgggcgcaccggaagacattaccgatcaggttcagaaggaggaagaagaggcgggaagcaaaccgcaggtatga

SEQ ID NO: 185382 - DNA, 318 bp, Klebsiella oxytoca
gtgcgtatgtctctgatgtttgctgccgtgacgcttttaaccggtattaacctgttttttattccgtttcagcctgttccggctctgtggggggctatcctggccgttgcttttgttctgattaatgtcgtggcggataagctgcgcctctggagtggtattgcgtggattatcgttgccggcatcatcataacgctgatgctgaaggggaaagagccgggtgacgaatttcgtgtcctgatcaccgttttcgctttcctggcttcaatctggtatagcgttgcgcagttcaggaaggaaaataagctccgttcctga

SEQ ID NO: 185383 - DNA, 255 bp, Klebsiella oxytoca
atgtcgcagtggaatattgcctctttttcaaaggaggagcaggacaaagttgccgtcgatagggtggctgctgatgttgcctggcaggagcgcatgaacaagcccgtcatgccggaacttgttgaacgggaacagcctgaacacctgcgcgaatatttccatgaacggttccgcgtacatcgactgaacagtcagcagctgccgcgcgcaaatgcacccgaatataataaaccgggcgatgatcagcagaattga

SEQ ID NO: 185384 - DNA, 426 bp, Klebsiella oxytoca; identical to SEQ ID NO: 104046

SEQ ID NO: 185385 - DNA, 1074 bp, Klebsiella oxytoca
atgagccaacctattaccttaacgctggcgcgcaaagcgccgcgcccgctgcgctggttcggcgtgctgctactgctgggcctgctgagtatgccgtttctggcgctgctgcccgccacgcatccgctggcggtctccacctggctgctgacgctgaccggcaagatcctctgctacgccattgtcgccgtggcgctggatttggtctggggctatgccgggatgctctcgcttggccatgggatcttttttgccctcggcggctacgccatgggcatgtacctgatgcgccaggcggcgggcgacggattgccggcctttatgtcgtttttgtcgtggagcgagctgccgtggttctggtggggcacccagcatttcgcctgggctatgctactggtggtgctggtgcccggcctgctggcgctggttttcggctggtttgccttccgctcgaaaatcaaaggcgtctatttttcgattatgacccaggcgctcacctacgccgggatgctgctgtttttccgtaacgaaaccggctttggcggtaacaacggttttaccggctttaccacgctgctcggtttctccgtcaccgccatcagcacgcgggcggcgctgtttatggccacggtactgctgctgttgctcaccctgtggattggctatttgctggcgcaaagcaaatttggccgcgtgctgacggcggtgcgcgatgctgaaaaccgcctgatgttctgcggctacgacccgcgcggctttaagctgctggtatggaccctttcagccgtactgtgcggcctggcgggggcgctgtacgtgccgcaggtcgggatcatcaaccccagcgaaatgtcgccgaccaactctatcgaagcggccatctgggtggcgctcggcggtcgcggaaccttaatcggcccggtgctcggcgcggggctggtcaacggcgcgaaaagctactttaccgtggcgatgccggagtactggcagctctttctggggctgatttttattatcgtgacgctgtttttaccgcgtggcgttatcggcctgctgcgtaaaggagatcgctga

SEQ ID NO: 185386 - DNA, 726 bp, Klebsiella oxytoca
atgaattacttacttgagaattcggttcattacaatgaagagtcgcgagctttagagaacgataataccgagataatacttcctgtatcggccgcgaggttattgtctttattgttacaaaaaaataacgagcagttaagcaggaatgaaattcttgagaaagtttgggagcagtatggtttagtggcatctaaccacaatcttaacagaaatgtctctatattacggaaaacattacaagaattaggtctttcagatatcattgaaacgatacctaaacaaggattcaggttacactgtgattttaagttaatatccccagctcaagaaaataacacaaaaaaaataaaacaaaaggtgttgcgtaacactggcttaaaactaaatttcttcatttttatatgttttagcatactcctcatatgtctttacatcaaatacgatgaaaaaaacagtgtgttatataaatataaaacgatagggaaatgtgatgtatatgttgataaaagcttaacaaacattaataatgtatccgttttcttcggtactatgcttggtaagaaaatcattgaaacttgtaagaacatgacccaaacgttattttttgatgataataaaacatcgctaaacgataaaacgtactctacgcacgtagccgtttgcaaagcaaataaattgaataaaggtaatcaatgtgaaaactatctcaatattaaaaatatttag

SEQ ID NO: 185387 - DNA, 483 bp, Klebsiella oxytoca
gtgaaaactatctcaatattaaaaatatttagcatagctgttaatattgtattgttgctggtaattgcctttattggttataagttgtttgcgatagataaatatttaccaatgaactgtatgtccagtttttacataaatcagggagaaaaaaatgccatctcaggtaatgttaaaattgtttttcatataacagagaaaggacatgtggttgtcaatgaatatggtactctcgagaatgagggaaaggagtatattgttgaccgttcaggtgatatgactattaccaaaaatacggaaaatggttttcataaagtggttaaagggaattttacagccaacaagcaggatacaactccaccagaattgactgagaaactcacttcaagtcagtctgtatttttttataaaattcagaaaatagatgacgtcacgtggcgtattagcgatctgcaacgtactattttcatgtgtcgcaaataa

SEQ ID NO: 185388 - DNA, 684 bp, Klebsiella oxytoca
gtgcgtgccttgatattagatccaaatgtcatcagtcaaaattacttacgttctcagacggaaaacgctgggtttgttgtggatgtttgttcgagcttaaaagaagcatggctgttcatgatatcgaataaaccagatgttatggtaatgactacgactcctcgtgattccgaaagtgtccaggctattcggcgttggcgaaaaatgggagaaaatattaggatcttaataatcagcaatgaagagaatctgcagcataaagtgcgtgctttaaatggaggcgctgatgattatattgtcaaacctttcaggattgaagaactcattgttcgcttacaaacacttattcgtagatcttgtctggagccgacgaaaaaaatggccgcaggtaaaattgaacttaacattggaagtagagcattgtttattgcagatgaaaaaataaaactcaccaactatgagttcgagataatgagactgcttattaaaaaaagtggcaagctcatcagtaaatatgaaatcatgaagcatttgcatgatgatatatttaatcaaaataataatactgtcgaagtgctcattggacggttgcggaagaaaatcgccccctataaatgtgccagaatcgaaaataaaagaggggatggatattatctggatgcgaaaaactttattgaccattaa

SEQ ID NO: 185389 - DNA, 477 bp, Klebsiella oxytoca
atgtttttgaaattatttttagtgtttgttggctccttatttttagtgagttgtagtggaaatcctgtggggtcggctgataatattaatatggctttgacggggcaacccatggctgttacccaggggaccgtcaccagagtaagaaatattactatccagaatgacagtgataataatattgccggtgcggcagcaggtggggtattaggtggcgttgcaggtaatgctataggcggtggaagtggccgacgtatcgctacggcgggcggtgccgttgccggcgctctgacagggcaagcgattcagcgcaatagatctcaaataaacggtgtggagcttttcatccgaccagtgaatggtaatgaatttgtcattgtccagccgattggagaaacgcctttttttgtagggcagcaggttaatattacgtcactaagaggtcaggttaccattactcctgtcgctcaattgtag

SEQ ID NO: 185390 - DNA, 378 bp, Klebsiella oxytoca
atgaatttacaatcaatgacattctcggatattgttatgtcattttttacgattttgttcttttttgcttatttaatgttaatttttcagattctaacggatattttccgtgatgatgatttacatattgtttttaaagtagtctggatcgttttattactctttattcctgttgtttgctcaattgtttatctattgattagggggaagggaatggcggaaagacaacgatattatcaccataaatattcttaccccggataccacggtgcaaggaagagtattaccgaacaaataattgaagctcatgagctaaaggtcgcaggcattatcactgaccgtgagtatactgaaataaaggaaaagcttctgcggtag

SEQ ID NO: 185391 - DNA, 597 bp, Klebsiella oxytoca
atgaagcatggaaatgtactgtgccagagttgtagtattaaatgccaaatccttcctgaacaagagtttagcgcctctcagtgccttaatcctaaggtttgtatctggccgggagtaaatgttttttttgaggcgggggtgaggtctcttattaattcaataagtgttatcacctcttctgaagggtttgtttttgtggatttttcctggcggaatattcatttctttatgaatgacgagtgggttgaatacctcgccagtaccaatatgaagataatactgctggcagatgtaaaaatggcagcactggccaattattacaaacaaaatgaaaagaatgtaacagaggtactctacctctctgaaggtttaggtgcgaccttaattaacttcagaaaagtgttcattggattacctttgttttgtcgatctggcagatcattaacaaaaaaagaaaggcaagttctctatttaacgctaaagcataaaggcgtggctgatatttctacggaaatgtcactagatgtcaagtctgtttataatatcaggcaaagaattgagagtaagataggaatgaaaataaggaggtttgcataa

SEQ ID NO: 185392 - DNA, 531 bp, Klebsiella oxytoca
atgaataaaaagatcatagccctgagtgtttttgttggtttgtcatccgctgtttcagcttttgctgcatctgataacactattactttccagggtgaagtcactgaccagacctgcgcggtgaccgttaacggaaatgcggtatcaccggtggttttattaccaacagtgagtatttctgatttcgcaagctcgacaactgctggtgccacaaattttgaagtaggtgtcagtggctgcgcggttgaaacgaccgatcgggaaatttctaccgtttttgtaggtaatcaggtgactacctctggcaatctgggaaataccggtagtgcaggtgatgtggaaatccagatcctcgacactgcgggaacggttattgattttaccagctatttcactggtgatgctgacctgacgttaaccgcaggtgaaacatcggcaagtgctaattacaccgctcagtactattcagctggtacgccaacagcgggtgatgttaccgcttcattacagtatgccgtgacctacctgtaa

SEQ ID NO: 185393 - DNA, 735 bp, Klebsiella oxytoca
atgaagtttctatataaatccttttcgtttttttgttttacttttttagcgttattttctcttcagcttaatgccagcgttattatgacgggaactcgtattatatataatgagggaagtcgttcagttgatgttaaccttaaaaatcagagcgatttcccctatgttgtacagacgtggtttgatgacgggaagatgtctagtgggccggatgcctctgtccgggttccctttatcgcctcaccccctgtttttcgaattcagcctggcgcaggtcaggttgttaaagtgacattcacaggtggtttgaaccttccagatgatagagagtctgttttttattttaattttttgcaggttcctccggcaaatattaacaaaaatgacgtgaaaaataaaatgctcgtcatgctgcgtaacagagttaaagttttctatcgccctgcatctctggtgtctggtccaggcaggggggtacccaatatatcggtaacgcctgttgcggataatgcctcagcagtgatgataaaaaaccacacgcctttctatgtcactgtcagcagcgttgcgttaacagagaggcaacggagattgtcttctgggtcgggaatgattgagccttcaggatctcagattttcaatatttctcgagcaggttcagttaagggtaaaaaaatcactgttacagtggtaaacgatcagggagcacgactgaatgcggaattcaatttataa

SEQ ID NO: 185394 - DNA, 2589 bp, Klebsiella oxytoca
atgcggaattcaatttataacaatatctgcattagtaatatctggtggcgatttaacaaagtcttattaacaatatcgtttgttgttacatatcttccttccgccagtgcccaggattattacttcgacccggcactgctgaaaggttctgctcttgggcaggatatggaacgattcaataaaaaaatcacgcctgttcaatccgggaaatatgttctcgatgtctatgttaacaacacgctaatttcgatcagcgaaaccatcaatataatggagcgtgaagatggaaaaacagaaccttgcctgactcgggaactgatcgctaaattggccatcagaataaatgctgtagtggctgcagagagtcatcagtgtgtacctgtatccgacgccggggcgaccattcaggctgaggtggatttatcacagtcccgcctcaatctgtcagtaccccaatcgaatatgtttcaaaacccccgtggttttattcctgtcgaaagctgggatagcggggtgatggcgctttttctgcgccataacactaattttacacgcaccgagaatacaggaacgaattttaaatataattatctctggagcaatattaatgcagggacgaacctgggattgtggcagctcaggcatacaggaaatttaagatatgctgacagtaaccttggcggtagtgaatataaatataatgcggccaggacatgggggcaacgtgctattcctgcattagaaagcgtattcactgtcggtgatagctacaccagcaacagcctgttcgggagtctgtcttttaatggcgtaaagatggctaccgataaacgaatgtggcctcagggaaagcggggatacgcaccagaagtcagaggcgtggcagcgacaacagctcgggttgtcatccgtcagcagggaacggtggtgtatgagactaccgtttcgccggggagttttgttattaatgacctttataacacgaaaagcaagggagacctgcatgtagaggttattgaggctggtggcaacatttcaacgtttaccgtcccctactcttctgtacctgattctgtacgaccaggtaactgggagtattctgtatcgttaggacgggtaagaaattattacagtgttaacaatcgttttattgaaggaacactgcagcggggcatgtcgaacatgctcaccgctaacagcggtattcgtcttgctgaagattatcaggccgctttgctgggaggcgttattgctactggagcaggggcattcggattaaacacgactttttctcatgcccgagtcgaaaatgagcagaccaccagcggctggcgtgcagaagccagctacagcagaacctttgacacaggaaccaatcttgttcttgctgcgtatcgctattcaaccagtggcttcagggatttacaggatgtccttggcgtcaggcgtcagtatcataatggcactgaatactggtcagaaacgttaaggcaaaaaaataagttttcagcaaccgtcagtcagcctatggatgaatgggggatgcttaacctctcaggcagtacagccgattattatgatgggagaggcagaattaaacaattgcaattgggatacagtaataactggggacagatcagttataacctgagtattgctcgtcagcaaaccattatgacgaacggcagatacttttatagtcttagggatagcgattacgacacgggaaaccggcaaaggtatacagaaaataccatctcattgggtttttctgtaccacttgattttggcaaaaatcgatccaacctgacttttggcttaaataaaaatagagatacccgaagtgcgcaggtagggatcaatggctctgccggggaacagagtaattttacttattccctatatggcggtgctgaaaattatcataacagcggtaatgccaccagttggggagggagcggtcagcagaacacgtccgtgggcgcttttcgcgcaaacctctctgcaggtaaaaactatcggcagttcggcgcaggatattctggcacgctggttgctcaccgcggcgggctcacggtaggaccctatgcaagcgatacgtttgcaattatccatgcgccgggtgccagtggggcaattgtcaagaacggccagggggcaacaatagatcgctttggctacgctatacatccgtcgctaaccccttaccagtataacaatgttggacttgactcgagattcattaattctgacgttgagctgcagggaggcagtaagaaagtggttccatacgcaggagccatgccaatggtttctttcgaaactctgcatggtagagccattttaatcaccgcgagctttgatggtgaaatgcctccgatgggcgctgatgtttttgattctgctggtaacgaaataggaatggtaggtcagggcggtcaaatttatgcccgcgttgaagataatacaggaaaactgacggttaaatggggaaagcaggatggccagcgttgtgaaatcaaatatcgcctaccgaaagcagataatcagccggtaacacaaattcatctgccctgcgagaggagataa

SEQ ID NO: 185395 - DNA, 1389 bp, Klebsiella oxytoca
atgatgaccttcctgagaaaaaaagagaagcagcggctttttattttgctgctagttccggttatttttttcggctggagccagatgagctttgccgcaggtacctgcacaaaagtaacgtcgacaagtcaactatccactgacgcgctgaatgcgggttatactgccgcatcgtggaccggtgcctctgatgctaatacggtcacaagtcttgggttgcccggtattataacgatcagtggttccagcagttttcagccgtctggaacccttcttggcagttcagcggcctcctttctgacgtctggtcacaaggagacatacccagcaaatcagattttatttcgctgcaatcagactgcggtggatgcgggattatatgagttttatgcaactaatggcgatgaaaactacagtggtaaaaatgctgccagcgaagtagacggctcttattttacgtatgtaaaaaatgttgctatcagattaacgaatatgaagacaggggaatattattcacgatactggaaatcccgtcagcttaccgctgacgactggtattcagatgatacctatacatatatacccgcgagtgcattcgctgatgtatttgttgagctgtttaaggttgacggaacctacgggagccagaatagctcaaacttctacacctataactggtggagtacagggagcgctcagcctgccggttatgttgcatttcagggggggagcttaagctctggactttataacggcgctgattctgccagtaactactcgggatggtatggatactggcctgccggttttggtctgacgaactatgtcacgttcgtcagaggggcgacatgccttgttaaggatttcccttcggttgtactgttgccaactatttcagttagcgaacttaatgcgggaaataccagccgcgccggattctccatcagtctggaatgtgaatcgggggctgtttccagtacatcgaattcaacaagttcttcggcaaatgttgctatgggctttatggtgaatcaggcaaatgcggtcagtaaagcgcaaagtctggggctggtgacttccggcggtggtctcacctggctgctggatacaaattatgggaacggtgccggggaagcctcaggggtcggtatccaaattcttaacaatggtggcagcgcgcttaatcttttacccgctaaatcatcatttggctcaggaaacagctacggatggtatggttttaaagatttattgtcgttaactggggcgggaagcggcaccgatatttatacgggtgatttcactgcagagttgagtgcaattgctggtcagacagttaccgcggggtccgtgaatgcgcagttacaggttgttgttagctttcagtaa

SEQ ID NO: 185396 - DNA, 741 bp, Klebsiella oxytoca
atgcgcagttacaggttgttgttagctttcagtaaaaaaattatcaaggtgaaatggttatgctgcgtactattcgtgctggcgcagcctggtttcgccgtggtgaatgtggaaggtacccgggtaatatttaatgccggagaaatggtttcatcggtgaatctgataaattcagggggggagccctcccttgttcaactctggtttgatgagggggatctatttatatctccagaaaacgccagaacaccgattattgccgtccccccggtgtttcgattgcagccgggtgaactgcgcgatgtaaagctgcagctgatctcccgcaataatattccgcaagataaggaatctctttactggctgaatatttatcaggttccgccaaatacgatcggtccggctaatgagaagcgcgttattctgcccctgcgattacgcctgaaagtttttgtacgacccgttaatgtcccgcggcctcagcagactgacggagagcgactgcagttccagattaaaaatagcaatcaacaggttgtcattatgagtaatccaacgccatggtatatgacgatagcggcattcgagtctggtgatgtgaaagttgatagcatcatgttagcgccaggagagaaaaaggaaatcaccctgaataaaacggtgaaagcgggggaggtgcagtatgaaattatcaatgatgatggaaccaaatggcgttatcgttcaattttgagacagtaa

SEQ ID NO: 185397 - DNA, 525 bp, Klebsiella oxytoca
atgtcacgtatagatactgttgtctgtactgacgccagaaaaacaaaatatcgtttcgtggttttgacgatgattttcctggtgtatgccataaattacgccgacagaacgaatatcggtgcggtactgccgttcattattgacgagtttcatatcaacaactttgaggccggggccatcgccagcatgtttttcctcggctatgcggtaagccagatcccggccggtttttttattgccagacgcggtacccggggactggtctcgctgtctattttcggcttttccgcttttacctggctgatgggcaccgtgagctcggtatttggcctgaagatggtgcgactggggctggggcttagcgaagggccgtgcccggtggggctggcttcaaccattaataactggttcccgccgaaagagaaggccacggcaacgggcgtctacatcgccgccaccatgtttgcgccgataatcgtaccgccgctggcggtgtggatcgcggttacctggggctggcgatag

SEQ ID NO: 185398 - DNA, 678 bp, Klebsiella oxytoca
atgacaaccactcccacgaccagtaagggcgagcaggcgaaaagccagcttatcgccgccgcaatcgcccagtttggcgaatacggcctgcacgccacaacccgcgatattgccgcccaggccgggcagaatatcgccgccattacctactattttggttccaaggacgatctctatctcgcctgcgcccagtggattgccgattttatcgagcacaatttccgcccccacgcgcaggcggcggaagcgctgttcgctgagcctgttccggataaagccgccatgcgcaccctgatactgggcgcctgccagaatatgattttgctgctgacccaggacgacaccgtcaatttgagcaaatttatctcccgcgagcagctgtcgccaacgccggcctaccggctcatccacgatcaggtgattgctccgctacactgctacctgacccgcttaatcgccgcctataccggccttaacgctgacagcacggaaatggtcctccacacccacgcgctgctgggcgaagttctcgcttttcgccttggtcgggaaacggtgctgcgccgcgcgggctgggctgaattcgatcgggacaaaaccgcgcaaattattgaggttatcacctgccatattgatttcgttctggaaggattatcgcaaaggagtctggagtcatga

SEQ ID NO: 185399 - DNA, 543 bp, Klebsiella oxytoca
atgatgaagggaacaatgtctttattgaacaaaaaagctccggcattattgctgtgtctggcaactgctgtactgtctcagtcagcgagcgctgctgacgctcaactgaatataactggtaatattaaagcttccccatgtaaagttaacgtgccgaccggtggcgtcaatgtggacctggggcagagcattatggcttcaacattatcggatgcaggttcagctactgattggaagcctatcgctattgaagtaattagttgcccatcgacgacgacatcggccactatgaccctgaacggcacgccggataccactgaaagtgccatgtactcaaacgctggaacggcaactggggttcaaatcgaactgcaaaatacggcgggtgccgcgttgggtaatgcgtcaacgatgattcaggatattaatgccgctacccaggggacgaccttcaatatgcaggcgcgggcatacagctcaaagggtaaagcgacgcctggcactatcgtcggtgccgtgcagttaaccttcgtataccagtaa

SEQ ID NO: 185400 - DNA, 1092 bp, Klebsiella oxytoca
atggaaatgaccgagcgcacaaataaatttttcaccggtatggtacaacgccgaaacccattatgccgtttcgtcagtggaaaaaatgccgcactgctttgcctggcgctggccggagggatgttaagtactaccgcaaaagcggcagcgtgttatgcgactgctggacagaaaacctataacttcaatatgagttatttgttagccgatccgacgcaaaactcggcaggaagggtgatcaacaacgcctatcagtggaaccttagcggtaactacaacgtgacctgttcttgctcgggtacctataccggggcttatatcactgcaaaagtgccggataccggtcaggtgtacagcgacggtaaccttaactattacgcgattaacgagtatctggctgtggccagtgaggtctttattggcgggaactatcagggtttgaaggcaacgccgttcaccagcgtgagcaaccggaacatcgcgaccaattgcgacaaatatccttacgctaccggcgcgcgtggaacgatttccctgtacttccgccggccattcgtaggtgtacagacgattcctctgaccaaagtcgtcgatgtgtatatcgcttccgatgcaacgactcaggccagcacgccggtttcaaccgtctggatgagcggaacggttaccgttccgcaatcatgcacgattaatggtggcggagttattagcgtgcctttaggcagcatcatgtctggcgatattgttaccaaaggtgaaatggctaaaaacttcacgccgaaaaacgtcaactttagcgtggcctgtaccaatatctccgaaggcgtgaaggtcagtctctccttccagggaacaccggatgcgaacgatccgaccgcgttctcgacgaccaacaatgacgtgggcgtcagaatccagaacccatcaggaagcactatcgttccgcagggaggagagttaccgctgacgatggactatggctctcaagtgggaaaatcgtcgattagtctatttccaattaacacgacgggtaatgcgcctgatacaggcgacttcaccgcaacggccactattcgtgctgaaatacaataa

SEQ ID NO: 185401 - DNA, 2556 bp, Klebsiella oxytoca
atggacaatataacgaagagtcatatttccgggggtttttcacgttcccgccttgccttgctggtgacatgtcagatagccatgttgatgagcggagcagaactggctcacgcggcggggtatttcaacccggcgttacttgaaattgataatcctgaccagggtaatgcggatttatccattttcgaagagggcgcattacagccgccgggaatttatcgcgtcgatatctatcttaacggttcagaggtcgatacccgggaggtgaaatttgccctgacgacggacgcttctggtaagcaaagccttcagccttgcctgagcggtgagcaactgcgtgatatgggggtaaaaattggcatgtaccccggtatagcggctacagacgaatgtgccaatttcaccggcgagatagctcagtcctcagccaatttccgctttgatcaacaacgtctggacctgagtatcccgcaggcagcgctgaattctcaggcgcgcgggtacgtttctccggaaaaatgggacccaggtattccggcgttactgatgaactacagcttcagcggggcaaatgctgaagcacggaataatgacaccaaagactccgatacctattacctgaatctgcgctccggaataaacctgggagcatggcgtttccgtaactactccacctggaaccgtgacagcagaggcaatgagcactgggattccatcaatacctatttgcaacgtgatattcatacgctgagaagccagctgacgctgggtgacagtaactcgccggcggatatttttgactctgtaccgtttcgtggggctcagctctcttccgacgatgacatgctaccggacagcctgaaaggttattctcccgtggtacgtggtattgcgcgtagcaatgcgcaggtcactatccgccagaacggatacgttatctatcaaagttatgtaccggccggatcgtttgccatttctgacctctacccgaccgcgggcagcggtgaccttaatgtgaccgttaaggaggctgatgggagtgaacgcacgatggtcgtgccatttgcctccgtaccggttcttcagcgcgaaggtcgcctgaaatacagcgtcacgagcggtcagtatcgttcgtataacaatgacgttgaaaaaacgctgtttagccagggaaccgcgatttttggtttgccacatggtgcaacgatatatggcgggctacaggcggcgagcaaatatcagtcgctggccatcggcctgggtcagaaccttggcgcgatcggtgcgctgtctgccgacgtcacccaggcgtggtccaggcaggaacatatggataaagataacggccagtcgtacaggctgcgctacggtaaaagttttgtccaaaccggtactaacttcagtctggccagctaccgctattccacctcaggcttttatacattgcaggaggcgctggaaagctatgccggagacaacggatattataacgatcataagaaaagtcgtgctgaactgacgctgagccagaacttgtgggaaaaggctggttcgctgtcggtaagcctggtgaaagaagagtactggaataacaaccgttctaccgaatcggccagcgtgggctacaacaacacctggaacgggatttcttatgggctcaactatacctataaccgcaatggtgtagacagttaccaaaatcgaacctattacaccgatcggattgtggccgcgaacatcagcgtcccattaagcaaatggctgccgggtagttacgccacctacaacctgaatagcagtaaaaacggtaatacctcgcaaagcgttggccttagcggtaccgcgctgcctgacgacaacctgaattacagcatcagccagggatatacctctcagggtgagggggcgaacggttacgccagcgctgactacaaaggtggctacggtgaagtgaatgttggttatggctatgaccatagccagagccgcgtagattacggcttgcagggcggtatcttagtgcatgaaaacggggtaacactttcccagccactgagtgaaaccatggcgctggttaaagcgccaggtgcggccgacgtgaacattgccaacaacaccggcgtgaaaacagactggcgcggctatgcagtcgtgccttacgtcacggcataccgacgcaaccagattgcactcgacacgtctaccttaccagacaacgtggatatgacgctgaccagtacctcggtgatcccaacccggggggccgtggtacgtgcagattttgatccgaacgtcggccagcgtgtacttatgacgctgacccgcgtcaacggcgagcctgtaccatttggcgccaccgcgggtagcgacggcaaaaatagcggcgccagtatcgttggcgacggtgggcaggtttatctgtcgggcatggacgattctggaacgctcacggtgaaatgggggtcgacagcggatcagacctgtcgggtgaattaccgtctgcctgaacaaacggctacatcgggtattcaacttatgaacggagactgccgataa

SEQ ID NO: 185402 - DNA, 729 bp, Klebsiella oxytoca
atgcctctggtctttttgaatatccagacaggcagggacagcatgaaaacatggcgcgccggagtggcggcagcattattaatgacccttagtgcaacatcgcaggctggggttgtggtcggtggtacacgcctgatctacgaaggtgggaagaaagaggcatctattaacctcagtaaccctgataaaaatatctatctcatccagtcatgggtggatagtgaaggtcggggaaaagggacgcaggctgaaaaagctccgttcatcgtcacgcctccactattccgactggacagcaatcagcagaacatattgcgcatagtgcgcgcaggcggcaatctgtcagaagacaaagagtctttgttctggctgaatatcaaatcgataccttctgcagagaagaaagaaaacacgctgcaaattgcagtgaaaacacgtatcaagctgattttccgtccttcaggggttaagagcacgcttgaagaggcgtcaaaaacattgacctggaagcggacgggtaaccgggttcaggtgaccaatccctcctcgcattacatcacttttttcaacgtcaaaatcaacggcacggtgatgaaaaacatcactatggttgcaccgcgatcggaggcaagtttcgatttgccagctaatgccgccggtggttcgctgagctggcagtttatcaatgattatggcggtgccagcaacgcactgactgtcagcctttaa

SEQ ID NO: 185403 - DNA, 522 bp, Klebsiella oxytoca
atgaaaaagaatcttcttgctgttgctctgatggccacttctgcatttgcttcttctgctttcgcttctgacggcgcggttaacttcactggtagcatcactgatgcggcatgtactgtcgacactgcatctcaaaaccaggacgtattcctgggcaacatcgcgcgtacagcattcccggtagcaggttcactggctgcagctaagaaattcactctggtcctgaaaaattgcccagacaccgtgaccggtgcaaccgtacgttttgacggtacccaggtttctggcgacaactctgttctggcattgaccgcgggtagcagcactgctaaaggcgtgggcgttcagatttctgacgaccagaacaaagtggttccgctgtacgaagactcttctgtttatcctctggttagcactgctgataacaacctgaacttcagcgcacgttacatctctctgactgatgccgtgaccgtaggtgatgcaaacgcagtaactcagtttaccgttgtttatcagtaa

SEQ ID NO: 185404 - DNA, 735 bp, Klebsiella oxytoca
atgcaggataaatggattttagtgaccggtgggagccggggtatcgggcgcgctacggtgcttcgtctggcgaaagaatggaacgtggtgtttacctggtgtcagaatgagtcggcggcacgggaagtggaacgcgcatgtgaggggctaccgggaagagtcgagagctatcaatgcgatggacgcgatgagccggaagtaaaacgtgtggccagcgaactgctggcacgctacggcgctccttacgcactggttcataatgcgggcatcacactggatgcactgcacattcaccaaagcccggataactggcgacaagtgatggataccaacgttaacgccatcttctactggaatcagatcctgatcgaaccaatgatgatgcagggtagtggttctgtggtgttgatgtcgtcagtcaccggagtgaagggcaacactgggcagagcgcttatggcgcgagtaaagcggcgatgattggcctggcacggactctggcgatagagctagggcgtttcggcgtgcgggtcaattgtctgctgcccggctatattgataccgatattatggccgaaatatcgaaagagaagcgcggggcgctgcgtcaaaccattccgatgaagcgcttcgggaaagcagaagagatatcaggcgcagtggcatggctggttagcggtgatagtacctacatgacaggacaaacgcttgttctggatggaggcctttcagcctaa

SEQ ID NO: 185405 - DNA, 249 bp, Klebsiella oxytoca
atgacgcaatttgatgaagtttacagcaaggtttgcgagatgctgtgtgatgcgaaagatctggagttggatgatctggatccagatatgccgctacataagctgaagcttgatagcctggactacgtggagctgatggtactggcaaagaaagagtttgctgtcaccgttggagccgatctgttcattgatcgtccgaacatgacgcttcgtgaattatgccaatacctcagcgaaaaaagtcactaa

SEQ ID NO: 185406 - DNA, 813 bp, Klebsiella oxytoca
atgacgctgtgctatagcctgcgtgatgcagaacgctgggcggcattttccggcgacgataatccgattcactttgacgcaaccgaagcgaagcgttttggcctggacggcttatgtgtacacggtatgcgcgcgatgctggatgtaaagtctgcgcttagcgctgctctggaaagagaggctttgccatctggcgacttgatgttcagctgccgcctgcgcgaaccggtagcatgtgagatgccctatcaactgtcgatccgtgaaacgctccgtcaggaacaggtgctgatcggggggagtttgctgaatgttcagacgcaacggatcggcatcagtagcaagctggccagcgccaaagcgttaacgatattgccggtcatgcagccctatacgcttggcgaagaggcgttgacagcgttatatgatcaattccttgcagtagaaagcccggcggcacctctgtggagttttcttgatgcggtgttatttcgtgaattagtcaatgcaccagaaacgcttgaaaccgtgcatagcatttttcctgggcatgaggttgccagtctgcgtgacgtttttcgtctggcgcaggtcgtgcaaacccatcatgaggcccatttttctcctcagctgctgagtctgcggggagaaaaccagcgaattaaatcgttttattattccatccagccgacgctggtgatgggagagaagcattccgggttgattttagtggctggcattcaggcgtggcgcctcaatgagccgctgatttccgttacggtgacgttgaaaaccgggccgctggcagcgtag

SEQ ID NO: 185407 - DNA, 1278 bp, Klebsiella oxytoca
atggacgttttacagacgatgaacacgccgcgtcgtgtcgtggttaccggttatggcgcggtgacaccgttgggtatgaataccagcgaaagctgggctgctatcatggattacaagctcggctatcgctactgcgataaatcggctgccgggataaagtcccgcttttacgggctaatcgatgaggaaccttcgctcaaaggcgtacccgccgcgattcgccgtcgcctgcctcgctacgcgcggctgacgctcgccgcagcgcgggaagcgatgcagatggcgtttggcgatgacacgccggaacagcactacgatctgcgtgactgcggcgtcatcatgggtaccggctgggcgggtcaggacgaaactcaactctattacgatgattatcagcgcaccggcgtgggttccccttttggctgtttcttctctatgccaaacgcgtctaccgcggcggttagcctgctgtggggtttgcgtggttatcagaattcgccagtagcggcctgtgcgaccggaacgatcgcgattggggacgcattcgagctgatccgtcatagccgcgccaatatggtgctggcgggggcgggagaatctctacgctctgattgcgccgtgtggaatatcgacgtgctgggcgcactggccagcgaacaggaagacatcactcgcgcctgctgtccgtttagtcctcatcgtaacggctttgtgctgagtgaaggcgcggcggtactgtgcctggaagagcgggaggccgccattgcgcgcggggctaacattcttggcgagatcctcggatacgggaacttctctgatgcctatgattttaccgcgccggccgaggataaaatcgcgcgggtgcaaactatccgtcatgcgctcgaccaggcggggatttctgccagcgatctggactatatcaatacgcacggtacctccactccgcttaacgatcttaacgaaaccgaagcgataaaaattgcgttgggcgaggcggcatataccacaccgtgctcaagcaccaaatcctacagcggtcatctgatcgccgccgccggcagttttgaatcgattctttgccttcaggcgatggagcatcagatcgtgcctgccacctgtcatcttgattcgcccgatcccgcgtgcgatctggattacgtacccaatacgcatcgcccggcagtcctgagaacgacgctcaatctgagcttcggttttggtggcgctaacgcggcgttagttatcgggcggggggaaaatgacgctgtgctatag

SEQ ID NO: 185408 - DNA, 1389 bp, Klebsiella oxytoca
atgaaaaaactgaacctacttttaacgatcgctttggcgctggcgctggccggctgtggtcaggcgctgaaaagcgactatcaaagacccatgctgtcaatacccgatacctggcgcgtgcaggataccggtgagggcgtggcgcaattttccccgcactggtgggataactttggcgatccgcagctatcgcggctgattgtttcaacgctgcaaagcaataacgatctggctctggcgggaataaggctccggcaggcgcgcctggctgcggggctatcggaccttaatctaacgcctgatttcgccactggcgcaacggccagcaacacgaagaatctgcatcacaatacaacgtcaacagaaggctatagccactcgctttcggcttcttatgaacttgacctgtggggtaaattagcgcgcactcgagagcagtctgactggctggcgctggcgtcggagcaggatttacgcgcgaccgcgctaacgcttatcggcacaacctctcagctttattggcagatagccagcctgaaccagcggatagcaaatttgcagcaaagcctggatattgccaaagaaacgctggcgatggtgacttctcgatggaaatccggcgacctgggtcagcttgattatctacaggcgcagcaaacggtgctgagccgtgaaaacaatctccgtgacttacgccagcagcgtgacgagagccgcaacgcgctggtcattttactcagtcgcccgccgggacaacatcctgcggaacgagcgttcctggatattcagcagagcgtaccggtggcgcagcgtttgccgctggacgttattgccagacggccggatgtacagtcggcagagatgaacttacgcgctgcgctggcaggctctgacgttgccagattgagtttttatccgtcactgacgctgaatgcatcactaaacgcgggcgcggcggtgttccagcagtggttcagtaatccggccagaacgctcggttccgcgctcgatctgccttttatccagtggaacaaagtgcgcttgaccattgagaagtccgatttggatgtacaaactgcggcgattcaattccgacgcgccgcttacagcgcgctgcaggatattgataacgccatggcacagcgtcttacgtatcagcaggaaaaacagctgcagctgaaagatctggcgttgagccagcaacgtttaacgctggtggaaagccagtatcgccacggttctgtggcgtatcaaacgttgcttgatgcgcagaacacgctgttgaacagtgaaaacacattggtgcagagccaatacaattatctgtattccacgatgaaactctggttggcgctagggggcggggaaaatagttcgatgaatcactaa

SEQ ID NO: 185409 - DNA, 1947 bp, Klebsiella oxytoca
atggctgattccccgatcgttgaactttcgcacatctcccgccattttggttcaggtaccgctgccgttactgtactgaaggatgtttctctgtgcgttcatgccggagaaatggtggcgattatcggtgcgtcaggttccggtaaatccacgctgatgaacattatcgggtgcctggataaaccgtcggaaggcgaaatgcgcattatggatgtgcctgcgcaggtggccagcagcgaacagctggcgcagctacgcagccagtatctgggctttatctttcagcggtatcatctgatgccgtatctgaccgccctcgaaaatgtcaccattccggctctatacacagatatgccagcctctgagcgccagacgcgggcggaatatttgctcagtcgcttaggtcttgatgagcgcatgaattaccgtcctgcacagttgtccggcggccagcagcaacgtgtgagtatcgcgcgcgccctgatgaacggggcgccggtgatcctggcggatgaaccaaccggagctctcgacagcagcagcggtcaggagctgatggccattttacatggcctgcaccaggccgggcatacgctcattatcgtgacccatgaccgcagcatcgcggaacagtgccagcgtattgtcgaaatccacgacggtcagattattgcagaccgggtcaatccggtcatctcgcaggtggtatcccggggactaccggccattgccgctaccgggcgaacgcctgtgtggcagagcatcaaagaggcggtacgcatggcgtggcgctccttgctcgggcatcggatccgcgcttttctctccatgttgggcattatcatcggcatctcctccgtggtctcttccatggcggtgggcgaaggtgcgcggcaaaatattctgagccagataagccagctgggcaccagtactatcgaaatacagcccggtctgggctgggataggccgcgtccagattttgaacgttcactgaccctggaagatgtggaattactcagcaagcaaccgtatatcgacagcatttcgcccgttgtgagtaaaaccgtgataacggtccgcggtggcaagcaggttcttgcatcgctgtcgggcgtcagtagcggcttcttccgcgtacaggggctgaattttattgttggaaatcgatttacagcgcgcgatttggacgagcgtgaaccggtggtcatcatcgatcagaacgtgcagcgctcgctgtttcctggcgggcaggatccgttgggcgaaattattcagctttccggcgcaccctatcgggtgatcggcgtggccgcgaaaaaaggtccgaagtctatcggtgaacagcctggcgcgtggatcccgtacacctcattgctggagcgtatgtcaggtgattcgccgttacagtccattactctgcgcatcgccgacggctatctgatagaggccgcccagcgaaatgtggagcagctgctggattccgtgcacggtaagcgtgatttcttcactatgaccaacgatcagctaacgaagaccatgcgtaaaacgtcggaatcgatgacgctgctgatcacggcaatcgcagggatttctctgctggtgggcggagtgggggtaatgaatatcatgctggtgtcggtgacggagaggacgcatgagattggtattcgcctctcggtcggcgcccgtcccgcagacatcatgcgtcagttcctgatcgaagccacggtgatttgtacgctcggcggtctcatcggcattatcggttccggcgtggccgggatgattttctctctggtcactcaggaattcaccatggtgttcacctggccgccaatccttctggcctgcggattttccgcactgatcggtcttggatttggtttttttccggcgcgcaatgctgcccgcctgcatccgacagaggcattggcccgcgaatga

SEQ ID NO: 185410 - DNA, 1191 bp, Klebsiella oxytoca
atgagtttcgcaatcaggcgattgtccgccatgacggccagacgccgcaaggcattctatggactggcggcgctattagcgatcctgctgatggggggggcgcagggcgtgtacaacgcgttttcagagagtgctgagccggcggcaacctatatcatcgaccgcggcgatatcgaaaaaaccgtgctggccaccgggatcctcaaaccgtctgtccaggtcaatgtcggggcacaggtcaacggtcagttaaaaaaactgtacgtccgcgtcggtgaacgggtgacccaggggcagctgctagccgaaatcgacccaacgctgcagcagagcgaactgcgtaagtctgaagcggcgctggagagtgcggtatcgcagaaacaggcatcacagttcacgcttacccagtatgagctcgagctgaaacgccagctgcggatggatcgcgacggatcgggaacgaaaagcaatctcgaggaagcgcaggccagggttgatacccagaaggcgcaggtgagagtcaacatggctcagattgtgcaggcacagatggcgctggaaacggcgaaagccaatctgggctatacgcggatcctcgcgccggtggacgggcaggtactcggtattgtcaccaaagagggacagaccgtggtctcttcacagactgcgccaaccatcctggtcctggcgaatgtcgataccatgacggtgcaaacccgtatttcagaaacggacatcttgaaagtccatcctggtcagccgctgtggttttatgtggtcgccgaacccaagcgccgctaccggagcgtgatgggggtactccaggacgcgccgaacgacgccttacaggatgatagtgctcgtcctcaggggcaacaggcttctgccgtttattataacggtgtcttcagcgtgccgaaccccgagcatcggttgagaacctcaatgacggcgcaggtatttatcatcaccgatcgggctaaaaatgtgctgcgtctaccggtagtggcgttggggcagccgcagggggccaatagctatcatgtacaggtgctcaatggcgataaggctgaacaacgtctgatccaggtgggtatcaacgaccgtcagtttgttgaggtaaaagcgggtctgaacgagggcgatcgcgtggtgattgcgcacaatgacacagggacgacgaatggctga

SEQ ID NO: 185411 - DNA, 2139 bp, Klebsiella oxytoca
atggataatattattcctcaaatggtttatcaggcagaaacgaacgagtgtgcgctggcatgtctctccatgctggcagaaacacagggactcaatgcgccgcttgaagagctacgcgagcgctttccggcatccgctcatggtacagcgctttcaaccatgtgcgacatcctttctgagctggcgatccccgcctatccggtggcttttgagctggatgagatcgccgaactccctttgccggccattttgcactacggcgcgagccactatgtactgctggcctatcgtcagggcagctacgtgtgcgtgatgaatccggccataggcgaacaactcttgcctgttgctgcgttaaaatctgaaattagcggttatgcgctggtgcttgatcgggaagcggaaaaaaacgtgcagcctgtggatcagcataaacgcacgcgacgttttcgcgcgctggcgtgtatgagcctgaagcagacggccgcgatccccggaatctatcgtttgatggtgttggcgtttttggtctctctgaccttgttcattatgccggtgatggtcagctctgcgatcaacaacgttttctcttccggcggacaaactgaatttccctatttctactacctgcttgccttcatggtctcgaccctgctggctttcctcgtgcgcagcgtgacggaacggtttatcaaacgttttgttgttatgcaaagcctcagtggctttgcccgtcttttaacccactcgctctctttctttgaaaagcgtagtccaggcgaaatctatagccgcttctccaactggcagctggcggcggcgcaaaaaattgaactggataacggtctgcgcgtggattgggtggttggcgtcatcgcgctgggcgtgatgtgttacatcagccccatgctggcctccatctccgccgtcggcgtgacgctaatggggctggtgagcgtctgggcgattttccgcgatcgctatttcacccagcaaattcaggcgaagagcgccgatcaaagcgattttctgctggaaaccattcaagggtttgccacgctgaaatctgccggattgcaggggcagcgccaggcggcgttcgcccgatatgcgttatccctctttgactgtcgtcagaagcagagagtgtatgaacaggtgaagaccagcctgtaccagctgattggcagccttgagatggtctttttcatgctgctggcgctgccgctgctgaaagacaatcgcatctcgctgggcgagttctttgcctatagcttcgtgcgtcagatttttactgcctacattacgcagattttcttctcagtgctgcgtaagaaccagctgcacgtgattgatactcgtgctgccgacctattcccgcaggccaaaaaagagaccctcaatgagctactgccgcctgcgcggttcagccaacagctccactatcgtgaacttcagtatgcttacgagccgggaaaaccggtgctcgatcgggtgtcactgctgctgaaacagggagagacgctggcgattgtcggtgaatcgggctcaggaaaaagtaccttgctgaaagtgattgccgggcttatcgaacctcaggcgggagaaattcttgccgacgggcagcctgtcagcagccgccaggcgcagaagctgttcttcctgcaaagccaggaagatatccttttcaataccagcgtgttgcaaaacattaccctattcgatcgggaatatgatgagaaaaaacagctgcgcatcgataaatcactgcgtgggctgaacctgactgaggtggttaatagtctgccggggaaacaaaacgcgctgatccgcgaaagccaccccgcgctatcgcttgggcaacgtcagcgtctgatgctggcgcgtgcgatgtatagcgattgtccggtgatggtgctggatgagccaaccgccaatcttgacgaacagaccgcgcagcaggtgatgcgcacgctgattgatcattgtcgcgaatacggaaaaacgctgattaccgtgacccacagtgagacaacgctaccgctgtttgaccgtcactgttcgatgaaaaacggccgcatggaagcgctgccgggtgctaatacattcgcgcttatccctgaaggagcgcccgcatga

SEQ ID NO: 185412 - DNA, 948 bp, Klebsiella oxytoca
atgaaattctttgccctgtggtgtgcgctgttttggaaaaacctgactgttaaatatcagtggtttttatataaactccagcttattgcctaccgggcgcattgcttactcttccggcgcctgcactatcgcgttgtttttgctttttctcatgtcagccgttttttggggctgacacgacgcgatctaaagctacgggcagccgttgcagaagcaaaccgccggtgtctgcttaacgataagaagaaatttgattacatctggctgacccagcgtcggcagctgttggttcaggcggtcacctacgggcaaaatcgccgggtaatgcaggaactcgctgactgttcagcacaactcaatgccgttgttgaaccgctgcaacgtgcgcaccagtcagtgattcttgcgcctatgcacatggtttcagacgtactgagcacgatggtcggcgcagcggtatttccagggaaagcgacggtcatcacctcccgtagcgcgaatgctcattctgaagccgagcgtcagctcggtggcgtggatctcacgtattgctcaattcatgaagataacaaaaacatcgccggcaacctgatgacgtcggtgatggaggcggctgaaaataaacgtaatattattcttttccctgatattactcctgactttacgcagtttgccagcaaggacaaaaccgagaaactgcactgtcagttattcggtcgtcaggccaatctgcacagcggcattatccgcatggccagaatgatgtccgcgaaggtggttttttatcatctttattacgatcgggggctgaaaattattattcaagagcccgttccggcaaaaaagctaaagcaggaaatgcctcttattattgaacaaagtattcgtgagcattctaccgactggatgttgtggcattctcactcgctgtttttcatcaatgattaa

SEQ ID NO: 185413 - DNA, 675 bp, Klebsiella oxytoca
gtgaaaaaaagaattcttcccctttttgcttataccgtttttgttgcggtagtttcggcgttgattaccaccgcgtggttccacacctttgtattcaatcaaaagggcgatgttgagcagcaggcgctggtatcgctggcggcggaaaaagtcacaaacagtccgatcgtcggcggggaagatattattgaaatattctcatacggttgccattactgcgaggtgaacgaagagaacgtggatgcgctggaaaagcgtatgccagcaggcaagaagctggtgcgtattcatttcaatctggatggtcagggcggactggcgcgctacgcaccggtatttgctaccctgcaggtcatgggcattgaagaggcgcatcgcaaaagcgcttacgacgcggttataaagcataaaattgatttaggcgatgcagtccaacgcgaggcgtggctcgcagagaataaaattagcattgcgcaatacaataaagtcagccagtccgtgaaagtcaaagaactgctggaatatatgacccaggtgacccgccattataatattaatgccacgccggcctttattgtcgctaaaaagtgggtggcattccaggacagtgaattcccggtgttctctgataaattaatctcgcttttagaaaccgatcgggtgccggagaaataa

SEQ ID NO: 185414 - DNA, 195 bp, Klebsiella oxytoca
atgaaaaagatgaccatgactgaagcaagcgtaattgttggcggtacttgcaccacctgcgttaacagcttcgaactgactctggtgggtgatgaaactgcatgtaatgcagtaaaaacctgcactgacaagcatggcgtagtaactaagtcgtataccccggcagccctgtcaaactgcggtaatgcaggctga

SEQ ID NO: 185415 - DNA, 582 bp, Klebsiella oxytoca
atgcatcagcgcagctgcttcccggctcgcgctgcgcttagtcgggctacaggtttccagccgtctgcacgccgtagcccggacaaggcgcgtcaagcgccgcctccggggaaggtgccaaacctgatgcatcagcgctgctgcttcccggctcgcgctgcgcttagtcgggctacaggtttccagcagtctgcacgccgtagcccggacaaggcgcgtcaagcgccgcctccggggaaggtgccaaacctgatgcatcagcgctgctgcttcccggctcgcgctgcgcttagtcgggctacaggtttccagccgtctgcacgccgtagcccggacaaggcgcgtcaagcgccgcctccggggaaggtgccaaacctgatgcatcagcgctgctgcttcccggctcgcgctgcgcttagtcgggctacaggtttccagcagtctgcacgccgtagcccggacaaggcgcgtcaagcgccgcctccggggaaggtgccgaacctgctgcatcagcgctgctgcttcccggctcgcgctgcgcttagccgggctacaggtttccagccgtctgcacgccggtag

SEQ ID NO: 185416 - DNA, 291 bp, Klebsiella oxytoca
atgcacattctgcgcgatatcgccgggcgtctgtcgattccgctggtgctgcacggcggctcggctaatccggatgcggaaattgcggaatccgttacgcttggcgtcggcaaaatcaatatttccagcgatatgaaatatgcctatttccagaaagtgcgcgaaattctgacaaaagagacatggtgggatccgaatgtcatttatccggaaccgattaacgccgcgcggaaggtgattcgccacaaaatgaagctctttggctctaccggcaaggccagcctgtactaa

SEQ ID NO: 185417 - DNA, 1206 bp, Klebsiella oxytoca; identical to SEQ ID NO: 111852

SEQ ID NO: 185418 - DNA, 570 bp, Klebsiella oxytoca
atgctgattggttacgccagggtgtcaaccggggatcaaaacctcgatttacagaaaaatgcgctgatccgcgcagaatgtgagctgattttcgaagatacggccagcggaaagaatgccagacgaccagggttaaagcgtgcgctgcggcggctgcgaccgggtgatgtgctggtggtctggaaactggatcggctggggcgaagcgtgcgtgacctgatcactctggtatcagagctgcaggcgcgcggggtgaatttccgaagcttgactgacagcatcgataccagtacgccagcaggacgttttttcttccacgtcatgagtgcactggcggaaatggaaagagagctgatcgtcgagcgtacccgcgccggtttagcagcggcaagggagcaggggcgcatcggtggccgccgccggataatgaccacagaagttgtggatcgttgccgacggatgttggagaaaggggctactcggcagcaggtcgcggatgtgatagggatcagtgagaagactgtatataaatatttcccatcagaaagtggcgtacctgagaagtcatga

SEQ ID NO: 185419 - DNA, 1419 bp, Klebsiella oxytoca
atggcgactatcgtacaaagtaatatgaagcttaaaggtaatgtgaaattaccgtcagtaaacgctcctctcccggatggggctaacttattcgcggatttctccaccggtcgctatgtcattaaacatgccagcggtaacgttattcgttcggcatcactgacagatattctgtcattcactcgtgccggcattgccacaagagtaggcaaaaccgggctgattgaatatcttgctacagatgagccagcgattgattatcaccctgtgacgcatgaatgcctcgggttacgcgtagagctgtcatccattaaccgtattgcctggtctcaggatttcacaaaaatggcaagctggacgccaaccgggattacgctgacagccaatgatgctgtctcccctgatggtaacaccacagcaaccaaaattatcgaaacggctggctcctccgtatcacccagaacgctcctggcactgacgaccagcgacgccacagttgccccgtatacgttcagcatctttgccaaagccaatacggcagatgttattcaacttgcggcgcaaggtgcggtttcgcctgtggccttcgccaacttcaacctgcgtaatggaaagattggtaagatttcagcggggtcatcaacccttggaatgttgcagacaacaatggaggaatacagtaacggatggtatcgctgcgccattacgataaccccatcatctgcaacctctcctcagtttacggttgcgctggtgaacaatgacagtagcgcacaggcagttccgtcttacactgccgtcataccaagatcggtctggatttggggggctcagccagagcgtaaagatggtgcgacgtcgtatattcccacggcaggtgcagaagttacccgcaacagcgacatgtgcacaacgccatccacaacgcagtttatttctgcagccgcaggaacagttctggccagcgttgtacatccgcacagcctgcagcttatcagtggctcgtatggttcattatcgtgtgttgtcgtactcgataatgtggctgaaggacccaacatccggttttcgtatcgcccgccgtctaaaggtgccgctgagggggctgctcttggcgtagcgcctgactcaacagggatcgcacagaaccttgaaattcccagcatggcatcggtaagggacagtgagcagtcatgcatatttgcctttgacggcgccgcgctgacaaccaaactgtttgatggctataactggtattccaggtccgttaccgcattccctccggcgctttctcgcctgtgcattggccgctcttatatgggggcaacgaattactttaacgggcatataaggaaaatcatctactggcctgctgcgctgggtgatgaagaaatggaggagattatttcttatcagtaa

SEQ ID NO: 185420 - DNA, 1401 bp, Klebsiella oxytoca
atggcaactcaaatcaagagcaataaaacttatcagggcgatgctgccgcacttccttccccacaggccccgatgccgaaactggccagtctttacctggactttgagaaagagctttatattgccctcggcagaacaacgggtaatgcaattcgctcccgccgtctggctgacgtggtaacctttactcgcgcatcagaaaccacgcgggtaaacaaaagcggccttatagagtatctggcgtccggtgaagctgcgatcgaatatgatccgattactggtgagtgcctggggcttcgcgttgctgcaggggtaactaaccttgcggccaacagtgaaaacttttctggcacgacctggacaaaatcgggcgtgtccaccacggccgccaaaacaatcgcacctgatggtaacgtctctgcatcacccttcaatgaaagcactgacagcgctgatactgtgcactttatgcaggaaaattccactccggccgccaccgtgggaagtcctgtcacattcagtatttttgcgaaagcgaataccgcgagtgttatccagctggtcgctcagggtgcagtaacaacgacgcagtttgctaacttcgatctggtcaacggcttaagaacccgtagctcgtccggcatcctgcagacaagtatgcggaaatataaaaatggctggtaccgtctgagtatcaccattacccctgcgggcacagcctccccgcagttcacgctggcgcttgtgaatgatgtgacatcagccgctgcgttgccagcctatacaggttcagggaagggtgtttacatctggggggcgcagattgaaaactgggatggagtgacgccatacattccgacagctggcgcaactgtgacccgacctgatgaggtctgcaccgttcgtaccgatcttgattttctggctgctgaccgcggggcaatttttgctgattacaatatgcccgccagcctgcaggcgatgagtggtgtctataacgccgggcaggcaattgtctgtcttgataatgacagtgtcgctgaatatgtcagttttctgaaccgcagaatcagtaacagtatcaccaaccagaatctggcggccgccgcgaaaattgtcggcagttctgaagttacggttgaggtaaaacgtctcggccaggtacgaaacggccatcagtcctttatcagttcatttatcaacggcgatatgcgtgtatttgacggcattaacagatacagcggaacgccactggtatcaacacaactgaaccgactgatgatcgggcgagcaagaacgacaccgtcagcggtttccaatacatatctcaaacgcctggtgtattacccggtcacgttagtggaagctgaattagtatctcagtttaattcactctcctag

SEQ ID NO: 185421 - DNA, 348 bp, Klebsiella oxytoca; identical to SEQ ID NO: 6026

SEQ ID NO: 185422 - DNA, 840 bp, Klebsiella oxytoca; identical to SEQ ID NO: 6027

SEQ ID NO: 185423 - DNA, 327 bp, Klebsiella oxytoca
atggacagcgaggagcctccgaacgttcgggtcgcctgctcgggtgatatcgacgaggttgtgcggctgatgcacgacgctgcggcgtggatgtccgccaagggaacgcccgcctgggacgtcgcgcggatcgaccggacattcgcggagaccttcgtcctgagatccgagctcctagtcgcgagttgcagcgacggcatcgtcggctgttgcaccttgtcggccgaggatcccgatgtcactttcagaaggcgacagcacgaaatatcaaaagtcgaccgcacggtcttttctgacgttggagtcgcctcagaaaacggaaaataa

SEQ ID NO: 185424 - DNA, 1218 bp, Klebsiella oxytoca; identical to SEQ ID NO: 108025

SEQ ID NO: 185425 - DNA, 909 bp, Klebsiella oxytoca; identical to SEQ ID NO: 121646

SEQ ID NO: 185426 - DNA, 1683 bp, Klebsiella oxytoca; identical to SEQ ID NO: 121645

SEQ ID NO: 185427 - DNA, 2967 bp, Klebsiella oxytoca
atgccccgccgttcgatcctctccgccgccgagcgcgaaagcctgctggcgttgccggacaccaaggatgagttgatccgtcactacacgttcagcgaaagcgacctctccatcatccggcagcggcgcggcccggccaatcggctgggcttcgcggtgcagctctgctacctgcgctttcccggcgtcatccttggcgctgatgagccaccgttcccgccattgctgagactggtcgccaaccagctcaaggtcggcatcgaaagctgggacgagtacgggcagcgtgagcagacccgacgcgagcacctggtcgagctgcaaacggtgttcggcttccagccgttcacgattggccactaccggcaggctgtccagttgctgaccgagctggccatgcaaaccgacaagggcatcgtgctggccagagccttgatcgagcacctgcggcggcagtcggtcattgtgcccgccctcaacgccgtcgagcgggcgagcgccgaagcgattacccgcgccaaccggcgtctctacgacgccttggctgagccgctgacggacgtgcatcgccgtcgcctcgacgatctgctcaagcgccgcgacaacggcaagacgacgtggctggcctggctgcggcaatccccggtcaaaccgaactcgcggcacatgctggaacacatcgaacgcctcaaggcgtggcaggcgctcgacctgccctccggcatcgagcggctggttcaccagaaccggctgctcaagatcgcccgcgagggcggccagatgacgcccgccgacctggcgaagttcgagccgcagcggcgttacgcgaccctggtggcgctcgccatcgagggcatggccaccgtcaccgacgaaatcatcgacctgcatgaccgcatcctgggcaagctgttcaatgccgccaagaacaagcatcagcagcagttccaggcatccggcaaggcgatcaatgccaaggtgcggctgttcgggcgcatcggccaggcgctgatcgaggccaagcaagcgggccgcgatccgttcgccgccatcgaggccgtcatgtcctgggatgctttcgccgagagcgtcaccgaagcgcagcggctcgcgcaacccgaggacttcgatttcctgcaccgcatcggcgagagctacgccacgctgcgccgctacgcgccggaatttctcgacgtgctcaagttgcgggccgcgcccgccgccaaggacgtactcgacgccatcgaggtgctgcgcagcatgaacagcgacaacgcccgcaaggtgcccaccgacgcgccgaccgagttcatcaagccgcgctggcagaagctggtgatgaccgacaccggcatcgaccggcgctactacgaactgtgcgcgctgtcggagctgaagaacgcgctgcgctccggcgacatctgggtgcaaggctcgcgccagttcaaggacttcgaggactacctggtgccgcccgcgaaattcgccagcctcaagcaggccagcgaattgccgctggccgtggccaccgattgcgaccagtacctgcatgaccggctgacgctgctggaaacgcagctcgccaccgtcaaccgcatggcgctggccaacgagctgccggacgccatcatcacggagtcgggcctgaagatcacgccgctcgatgcggcggtgcccgataccgcacaggccctgatcgaccagacggcgatgatcctaccgcacgtcaagatcaccgaattgctgctggaggtagacgaatggacgggcttcacccggcacttcgcccacctgaagtcaggcgacctggccaaggacaaaaacctgttgctgaccacgatcctcgccgacgcgatcaacctgggcctgaccaagatggcggaatcgtgccccggcacgacctacgccaagctggcctggctgcaagcctggcacatccgcgacgaaacctacggggcggcactggccgagctggtcaacgcgcagttccgacatcccttcgccgggcattggggcgacggcaccacgtcatcgtcggacggccagaacttccgcaccggcagcaaggccgagagcaccggccacatcaatccgaaatacggcagcagcccagggcggacgttctacacccatatctccgaccagtacgcgccgttccacaccaaggtcgtgaacgtcggcgtgcgcgactcgacctacgtgctcgacggcctgctgtatcacgaatccgacctgcggatcgaggagcactacaccgacacggcagggttcacggaccacgtcttcgcgttgatgcacctgctgggcttccgcttcgccccgcgcattcgtgacctgggcgacaccaagctctacatcccgaagggcgatgccacctacgaggcgttgaaaccgatgatcggcggcacgctcaacatcaagcacgtccgcgcccattgggatgaaatcctgcggatggccacctcgatcaagcagggcacggcgacggcctcgctgatgctcaggaagcttggcagctacccgcgccagaacggcctggccgtcgccctgcgtgagctgggacgcatcgagcgcacactgttcatcctggactggctgcaaagcgtcgagctgcgccgccgcgtgcatgccgggctgaacaaaggcgaggcgcgcaacgcgctggcccgcgccgtgttcttcaaccgcctgggggaaatccgcgaccgcagcttcgagcagcagcgctaccgggccagcggcctcaacctggtgacggcggccatcgtgctatggaacacggtctatctggagcgggccgcgaacgccttgcgtggccacggtcaagccgtcgatgacggcctgttgcagtacctgtcgccgctcggctgggagcacatcaacctgaccggcgattacctctggcgcagcagcgccaagatcggcgcgggcaagttcaggccgctacggccgctgcaaccggcttag

SEQ ID NO: 185428 - DNA, 585 bp, Klebsiella oxytoca
atgatgcctggcgatgcgtttagtctgcctgataccgcggcattgaataaagcagcagatcagaaaacatctgtcagtatgccggttcgtggccgtctggttatgaatgatagcggcattctggatgttcagctggtcaaaaccaatactgccggtgccgtgaaggtcgctcgtgctgtactggataaggaaaccggctactggggctatactcttcccgttgtcgcagatgttccggcgcaaactatttttgtcagcccggctgacgcacctggtgcaaacggaccactgacgctaagcgggccggtaccactaccggagcgtattctgcataccggtgatcagatttcggcgccacaggctacagataaaaccgtgacgccggtagcggatgacctcgattttgaagatattattctggtgtttccaccggagtccggcctaaaaccgctgtatatgatgtaccgtagccctcgtaacatgcccggtacagtaagcggcaaagggcagaacgttggcaataactggatgggggggggccagtaccggggatggtgctcctgttccttcccagattgcggataa

SEQ ID NO: 185429 - DNA, 561 bp, Klebsiella oxytoca; identical to SEQ ID NO: 104073

SEQ ID NO: 185430 - DNA, 1218 bp, Klebsiella oxytoca
atgcaaaatcataaaagttcggtagaggaatatattcaacaaaacatcttttcaaggactggcgaaaatttttttgacttctcatttgaagaagactacctgtaccagcaattagatttcattgggaagaacttgtgccttaaatatgtaggcatttattcgtgtttttacttaattgatagttttcaagctcaggcaggtgctattcataaacatcagtgcgtattagtttacaaaggtatgttggaactaatctttcgtacttcagccatgatgttaggagcagagcgtcgccagaatgaacctaatgaaatgttttacgaaccttggcgcgacaatgtgcatctatgggtaaatgggggtgaattcgagtgggcgaatgatcaatattggtggattcatgatcaaacacatagaaaagcatttgatatgttagtggaagcaatgtttgtatttcttgttttgcatgaaataggacatattcataatttacatggggataggcgaaatgatgatgctaaagaaaatccctcattcatcgatcacatcattttcattcataaggctgttggagatactgaagcagtagaagcagtagaagcagtagaagcagtagaagcagtagaagcagtagatgaagcggatgaagcggatgaagcggatgaagcaaaaaaacttgatgcacacgctcgtgaaattatcgcagattcttatgcatttcaattcatgcttttagaattacaggaatgcttttttcccgattcagaatatgaaggcgttgatgctggcacgctgagcagtataaatctcggtatatgcatatatgtcgtggcttcatttttttgggcgttgagttttaaacgccctatgatgaatgatagtcaaaatgctaattactcatcacatgcttttagattggcgagcattgagtctgcatgccttgagcacaagatatgtatgagagataatacactaacacgttcaggactggaaatgggtatgaagagctatattaaaaaactaacatgcgcctctaataataacgagtttatcgagtggcgtcttacgatgaatatacctgccaatcaagaacactatgagaagatttgcgccattaccggagattggtctaatttaatgtttggtgtgcgcgacgaagacttagttgaaaaattaaagctaaaagttcatgattttggattgaataaaaattcttag

SEQ ID NO: 185431 - DNA, 651 bp, Klebsiella oxytoca
atgttacccagtctctctcagccttttttctcgtgttataatgccttcttccattgtgttgcttcgtggtgcgacatgaacaagcttgagtttaatagtatactttcaaaaattggccctttggcttttgcagcttactctcaagagatgacaggacttctacccggtatttctttgccatctattgattttgatgtgtgtgctgtgcagcatttaggcggcgctgagtcctggcctgatacctctgaacaaaaggatggatatggtggctggtcttgggaagaaatctatcataagtccaaatattcccctgaaaagtttgttattgctgtttccagcaatggtatatttggcgggctattttctggaaaattacaagccactgaggttgagctacagtttgtacagcgtgatattcgttgcgcatcactcaaaggtttcatgattccagcatctattacgtacagtgccattttagggctggttatggggcgcgatgttctaactgtgtgtgagccagccccggatatcattgaacggtacaggaaaagtatgaaaggtaatgtgtcgtttacttttgggcagaaaggggaagttacgaagatgagcgtaccggttgatgaggttgtatccccaccaaccgatcaatag

SEQ ID NO: 185432 - DNA, 372 bp, Klebsiella oxytoca
atgaagaatcaaatttataaccaccgtggtatatatgaaataatcagaaatcactatataaaaaactttccttatacggttcaatttgaagctcttaatgcaataaatgagcacattagtcttattattgatgatgcatcaatacaaaaagatgaagataacaaatacatatttataaatgataacgctaataaagaaactgatgacccatttgaaagtacagaaagaaaccttgctgcttacctgtcaaaatcaagtggtatcgaagcactgttccaagatgtgaatgcattacaaaaatggttgctccaatctggttttatcagtggcggtatcgcgacagaaaaaatgctgattacaaataaattgtaa

SEQ ID NO: 185433 - DNA, 468 bp, Klebsiella oxytoca
atgacagtatctctgggtgatgtgtttggtggtttagcatttcttctctcaatatatgcaacaataaaaaccatcaagttcaatgaaagacaaaaggcattaattgaagcgcaagaaaagttaacaaaccttcagcttactaaagaagcaaatgagctggaaagctctaaaaaagctgatgtaagtgcaaatatagtcaacattggaaataataaatataaacttaaagtatttaataaaggtaaaagcccagcgaaaaacgtaagaatcgaattcccagacaataactcaccagtttcaatgagtgacgttgaaagtaaattcccatttgaatatcttgttacacatcaatcagttgacctgattgcatcaggggagttaggtagagcaagtaagtttactgtaaggctaatatgggatgacgactttcaagatgggaatgaatgcgttgttcatgtaacatattga

SEQ ID NO: 185434 - DNA, 147 bp, Klebsiella oxytoca
atgaaccgtctaatagaagagaatggcgaaaatattcattctcatgttaatgagatacaaaaagatctagagaaaaaattaataaaagatctttctgataaattaaaaaaaaccttcaaaggtaataagaatataaggattaaataa

SEQ ID NO: 185435 - DNA, 174 bp, Klebsiella oxytoca
atggacaaattgttaaatatgctgcgttataagagtgaggggtctgatattgacttcaaatctacccagtaccgctttaacaatggttctgagggtaatgactccaacttattgatagtgttttatgttcagataatgcccgatgactttgtcatgcagctccaccgattttga

SEQ ID NO: 185436 - DNA, 972 bp, Klebsiella oxytoca
atgaagcgtgctcctgtcattccaagacataccacacatactcaatcgactgaagatacttcatcaccggcgccagccgcacctatggtggattcattaattgcgcgcgtgggtgctatggcccgaggtaatgctatctctcttccggtatgtggacgggaagtaaaatttacccttgaggtgctccggggagactctgttgagagcgcttcacgcgtatggtcaggcaatgagcgcgatcaggaactacttaccgaagatgctctggatgatctcattccttcatttttactgaccggtcagcagactccagctttcggccgccgggtttctgatgtcatagaaattgcagacggcagccgtcgccgtaaagccgcaatcctgacggaaagtgattatcgcgttctggttggtgaactggacgatgagcagatggctgcattgtcccgactgggtaacgattatcggccgacgagtgcttatgaacgtggcctgcgttatacaagccggctgcagaatgagtttgcaggaaatatttctgcgcttgccgatgcggaaaacatctctcgtaagatcattacccgctgtattaatacggccaaactgcctaaatccgttgttgccctgtttgcacatcctggagaactgtctgcccggtcaggtgaagcccttcagaaggcttttgcagataaagaagaattactgaagcagcaggctgagactctccacgatcagaagaaagcgggactaatctttgaagctgaagaggtcattagtcttttaacatccgtactgaaacaatctccctctccaagggttaatctgagctcacgtcatcagtttgctccaggggcaacagcattgtataagggcgataaaatggtgcttaatctggataggtcccgcattcctgtggagtgtatagagaaaatagaagccattcttaaggagcttgagaaaccaggagtctga

SEQ ID NO: 185437 - DNA, 1167 bp, Klebsiella oxytoca
atgggactcatggatacactcaaccagtgcataagtgctggtcatgaaatgacgaaagcaatcgccattgcgcagtttaatgatgacagtccggaagcccggaaaataacccggcgctggaggattggtgaagcagctgatttagttggcgtgtcatctcaggctatcagggatgccgagaaagctggccggctgccgcaccctgatatggaaacccgtgggagagttgagcaacgcgttggttataccatcgagcaaatcaatcacatgcgggatgtatttggtacacgactgcgccgtgctgaagatgcgtttccgccggtgattggtgttgctgctcacaaaggtggtgtttacaaaacctcagtatccgttcacctggctcaggatcttgctctgaaaggactccgtgttctgcttgttgaaggcaatgacccacagggaactgcttctatgtatcacggatgggtgcccgatcttcatattcatgctgaggacactctcctgcccttttatcttggggaaaaggatgacgccagctacgctataaagcccacctgctggcctggccttgatatcatcccgtcctgtctggcactgcaccgcattgaaaccgagctgatggggaaatttgacgaaggcaaattacctgctgacccgcacctgatgctccgtctggccattgaaactatcgctcatgattatgacgtgatagttatcgacagtgcacccaaccttggtatcggtacgataaatgttgtatgcgctgctgatgtactgattgtccctactccggcagagcttttcgactacacctccgcactgcagtttttcgatatgctgcgtgacctgcttaagaacgtggatcttaaaggctttgagccagatgtccgtattctgcttactaaatacagtaataataacggctcgcagtccccgtggatggaagaacaaattcgggatgcctggggaagcatggtccttaaaaatgttgtgcgcgaaacggatgaagtcggtaaaggtcagatccgtatgagaaccgtttttgaacaggctattgatcaacgttcttcaactggcgcctggcgtaatgccctctctatatgggaacctgtttgcaatgagatttttgatcgtctgattaaaccacgctgggagattagataa

SEQ ID NO: 185438 - DNA, 651 bp, Klebsiella oxytoca; identical to SEQ ID NO: 102213

SEQ ID NO: 185439 - DNA, 1260 bp, Klebsiella oxytoca
atgtctccagttacgattacgttgtcgctattggttttttctattgtcatgtttgtttgggaaaaaatacctttagcggtaacggccatgattgtttgtattactctggtggtgaccggggtttttgatgtcaaaacggcttttgccggttttattaatcaaaatgtgattttgtttgtggctatgtttgtggttggcggcgccttattcgaaaccggggtgacggataaaattggtagtatggttacacgctacgccaggacagaaaagcagctgatagtcgtcattatgctggtctgcggaacgctttccgggctgctatccaataccggcacggcggcggtcctcattcctgtggtgattggcgcagcgatgaaatcaggatatgcccggtcgcgcttgcttatgccgctggcttttgcctcggcgctggggggaaatttatcgctgatcggctcacccggcaatctgatcgcgcagtcggcgctggagcaggttggtcaacgcttcgggttttttgaatatgctaagttaggcattccgatgctggcctgcggcatactctattttgtgacgatcggctatcgcatattgccaaaaacgaatgcggcccagcctcaaagtgttaataatattaaagcgcaggcatgcccgaaatataagcaggtgattgcgctatcggtattaatcctgaccgtactgggcatgatttttgaaaaacagctgggtttgccgattgcgatcgtcggttcaattggcgcattgtcgttgattgtgacccgggtcattacggaaaaacaggcttaccaggctatcgactcgcagacgattttcctcttcggcggcactctggcattagcaaaagcgctggaaaccaccggcgctggcgccattatggcgcgctcaattatcgcgttattaggccagcaggcgtcgcctttcttacttctgagcgccgtattgataatctcctgcgcgttaaccaatttcatgtcgaatacggcaaccgccgctttattaatgccgattggcctgtctattgctcattctatgggcgccgatccccgggcggtgttaatggcgattgttatcggctgttcatgtgcttacgcaacgccggtgggcaccccggctaatatgatgattttttccgcgggtgggtacaaatttgtcgattacgttaaggttggattgccgcttattttgatatcggtcattgtcagctttattttgctgcctgttttcttcccattttattaa

SEQ ID NO: 185440 - DNA, 363 bp, Klebsiella oxytoca
atgacgaatggacaagcgtattttaacggatggaaaaagggcctcgattttagcggagtggccagcaggcaggagttttggtcttttttgctcatcaacctgttgattcttgccctgccgctggcgacctggtttttggcagtgcagcataactctgagtacggcgtgttcatttttttcgctgtgccgctcagcggtattctgttgctgccgatgattgtcccgctgctggccgttggctgccgcaggatgcacgatatcggtcgttcaggatggtggttcgccctgtgccttattattccatggtttttgatcgtcgcgctatggctgtgttgcctgaagccggcttcatcttctcgctaa

SEQ ID NO: 185441 - DNA, 1644 bp, Klebsiella oxytoca
atgtcaattcgcccaatgtttgcccgaaaaatcacgcactggtttgcccgacgttcgtttcagaaccgcatcttcctgttgatcctgtttacctcgacaatcgtgatgctggccatgtcatggtatctcaccagcattacggaggaacgcctgcattaccaggtgggacagcgcgcgctgattcaggccatgcagatctccgccatgcccgaactggttgacgcggtagaaaagcacgatttaccgcgcattaaagaacttatcgacccgatgcgatcgttttccgacgccacctatatcaccgtcggtgacgcgaaaggccggcgcctgtatcacgtgaatccagaggaaatcggtaaatcgatggaaggcggagacagcgacgaggcgctgtataacgccaaaagctacgtgtcggtgcgtaaaggatcgctcggttcgtcattacgcggcaagtcgccgatccaggacagcaccgggaaggtgatcggtattgtatcggtgggctacaccatcgaacagttagaaaactggctgagtctgcaaatcggatcgctgatgatcccgatggcgatcatgctgcttctgctgctctactgcgcccggcgcttctcgctgcatatcaaaaaacagatgctgaatatggaaccacagcagctctcacagctgcttatccagcagagcgtcctgtttgaatcggtctttgaggggctgatagctattgactcccactaccgaattaccgccatcaatcaaaccgcaaggaggctattaaacctgagccagccggaaaccattctgattggcaaaagcatcagcagcgtgatctctcaggaggcattcttctatgacgcgccgcagacaaataaaaaagacgaaatcgtcacttttaatcagattaaagtgatcgccagccgtatggccgtcacgcttaataacgagccccagggctgggtcattagctttcgcagtaaagacgatatcaacactctgagcctgcagctcagccaggtccagcagtacgcggataacctgcgcgccgtacagcacgagcatcgcaatctgatctccaccattgccgggctgctgtttttaaaacgctacgataacgcgctggatcttattcagcagcagtctgagagccaccagaaagtgctcgattttattgcccgcaattttaaagtgaaccaccttgccgggctgctgatcggcaaatattaccgcgccaaagagctcggattagagctggtcttcgatcccgcctgtcacgttgaaaccctcccctcttcgctgtcgcataatgaatggatctcgatcgtcggcaatttgctggataacgcctacaacgccgccctacgtcagccggcaggttcaaagcagatcgaatgcctgatcaacagcgagggcggcgaagcgatcgtcgagatcgccgaccagggctgcgggattgaggaatcgctgcgcgatcgtatttttgagcgcggcgtgaccagcagcgacagcggcgatcacggcatcggactctggctggttcgcagctacgttgagcaggcgggcggcaatatcgtcgtcgatgacaacatcccttttggcactatttttaccctttatatccccctgacccgagatgaacaccatggatag

SEQ ID NO: 185442 - DNA, 789 bp, Klebsiella oxytoca
atggctaaaaactcgatcgatgcttatggcgcctgcggcaagacaaacgttctgatgttcgagccggaaaatctgcatattgtcactgacaaggctcacccgctttacgatgagcgtatccacctgcctattagcgaggctatggtgctgaacatcatggaccagggcgttcttgagccgattatcgtatggaaagatccggagacagggctgtcttgtgtggttgatggtcgccagcgtgtgcgccatacactggaagccaacaagcgtctgtcgaaagatggcaaagaaccgttactggtaccggcagtcgctaaacgtggttccgccattcgcatggcgcaggcgatggtcagtgctaacgaaatccgccaagcagatacgccgctgggccgagcaaagaaaatggctgatgcgcttgagcgcgggcacgatgaggacgatttagcactgatgtttggcgtgagtgtccagacagtacgcgcaacgctgtcgctactggatgccacccaggcagttcgcgatgcagttgagtctggaattgtcaccgttacccaagcccgtcagctggcatcacttaaacctgaagagcagcgggagaaggtctctgaaatcgaagcggcaactgctggcacaaccggccatgaaaaagcgcggcgtcagcgtcagatcctcggtgatgcaaagccgcgcctgaaaacccgcaaagaaatcacaaaagccctggaatctgccgagggtgagtatgcaagcgcactccgttgggtgcttggggaggaatcattatga

SEQ ID NO: 185443 - DNA, 1080 bp, Klebsiella oxytoca
atgagcaaaataggcgatcatttctttgaatttccggcgtcgcgtggaactcagggtggttcaattgtcctgatgctgacagtacctgcacggacactaacgagagtcctcgccagcgataactatggggacacccttgatcgatctcagcgggaactgaacccagctagggcgaaaaagttttatcagtatctcgttgaagcatacgaaaacaaggaaccattcattattccgccgcttgtaggtaactgcgactcgtatgttgaattcgaagagttcggaaacactaatgtcggggtggcccgtttcccgctggatgcagagattaaattgtttgatggtcagcatcgtgcagccggtattgcggagtattgccgcaccattgatgaaccgatccatgtcccgatgatgcttactctccagttgccactgaagacgcgccagcagttcttctccgacattaacaataatgtttcgaaaccttctgcggctatcaacatggcctataacgggcgcgataagaacgcgcaggagatggtcagctttatcagttcacatgacgtcttttctgaagtcaccgattttgagcacaacatcgttccagcgaaaagtgataagtgggtgagcttcaaggcccttagtgatgccactgcaaaattttcaggttcatgttcgcaagatgatctggaggggttgtggaatgcctggctgatgctgactggtttagatgatattcgccgcggtacgaatcaggccgagtacaaacgcgagtatatccagttccatgctgtgatgatcaacgccttcggctacgcagtgcagaggttaagcgaaggtcggggagttcgcggggtcacgctgatgattgaggacctggtaatgaataccggcattgccgatcgtgaagattttttcctcatttcatcttgggatggtatttgcgccagctgcgagaaaacaaggccaacggtaattgcgaatgtctcatctcagaaagctgcagcatcacgcctgatggatgccatcgtgaataaaaacatgtctgtcagtagcggtaaggaatcagccaatgaccaataa

SEQ ID NO: 185444 - DNA, 669 bp, Klebsiella oxytoca
atgaccaataaccagttaaccagagaacgtctggaaaaaattaaatcatggcgtgacacctacggtgccggaagcaacgtaatgctgccagctgaagaggctgaggagctggctcgaatcgcgctggccgtaataggcagcgagccggtccgcaaccctgtgctggcgtatgccgacagttatcgtgatatggcgaaacaaggcgtcgagtcagtcccaatatggagcgtcattaccgacctagagcgaaacatagcgccgctctatatccacgcgcagcagccggtagtgccggaggaaaagccaatgcctaatccgctgagcatgtacgccgttgatgctgtagcggctatagcagaggtgaaaggctggaacgcctgccgcgccgacatgctccaggctggcaactctccggtaattccggatggttacatgatggtgccgatgaggctaaccgctgagaacggtgcgaaagcagcgcttctcggggaattcaatcttgaatatacgctgacatgccatgagtgttttggtgaagggtgcgacgactgcagcggcgagggaacctggacgagcaccatgccgattgactggacaaccatcaaagaaatctgggataaggccattaatcacttcgcagccgcccagcgggaggtgaaaggtgagtaa

SEQ ID NO: 185445 - DNA, 1143 bp, Klebsiella oxytoca
atggcagctagaccgcgcactcataaaatctctatcccaaacctgtattgcaagcttgataaacgcaccggtaaagtttactggcaatacaaacaccctatttcgggacgttttcatagcctcggcacagatgaagctgaggcaaagcaggtggcaagtgaagcaaacacgatcatcgcagagcagcgaactaggcagatccttagtattaacgagcgtctgtcgcgtttgaaaggaaaccgtgcggacattacagtgacagcatggcttgataaatatgaatccgtgcaggaggaaaggttgaaacacaacgaacttcgaccaaattcttttaggcaaaaagctaaacctatccggctttttcgtgagcattgcggcatgcaatatctgaaagacatatcagcactagatatttctgatataacagatgcggttaaggcagagggtcataatagaatggctcaaattgttcgcatggtattaattgatgtatttaaagaggcacagcatgctggacatgttccgccaggttataaccctgcccaggccactaagcaacctcgaaacaaaattactagacaacgtttatcactggaggaatggaagactatttatgaatgcgctgagcatcaacagccatatttgcagtgcggaatgttactcgcaatagtaaccggccagcgcataggtgatatttgtaatatgaaattcacagatatttgggatgatatgttacatattgtgcaggaaaaaacaggtactcgtcttgccattccgctctcactaagaaatgaagtactagatatttcgctacgcgatgttgtttcaaaatgtagagatgcggtggttagtaaatatctggtccacttcagacataccacctctcaggctaaccgtggtgatcaagtatccacgaaaactctgacttcaacatttaaaaaagctcgggacaaaagttgtcttgcatgggatgaaggaagcgccccaaccttccacgaacagagatctctttcagaacggttataccgggagcagggcctagatactcagaagttactgggccacaaatcgaaaaaaatgacggataaatacaacgatgaccggggtaaagactggctcgttgtaggtcaaaaagcagtatga

SEQ ID NO: 185446 - DNA, 786 bp, Klebsiella oxytoca
gtgcccgccgagatttcggtgcaactatcacaagcactcaacgtcatcgggcgccacttggagtcgacgttgctggccgtgcatttgtacggctccgcactggatggcggattgaaaccgtacagtgatattgatttgctggtggctgtagctgcaccgctcaatgatgccgtgcggcaagccctgctcgtcgatctcttggaggtttcagcttcccctggccaaaacaaggcactccgcgccttggaagtgaccatcgtcgtgcacagtgacatcgtaccttggcgttatccggccaggcgggaactgcagttcggagagtggcagcgcaaagacatccttgcgggcatcttcgagcccgccacaaccgattctgacttggcgattctgctaacaaaggcaaagcaacatagcatcgtcttggcaggttcagcagcgaaggatctcttcagctcagtcccagaaagcgatctattcaaggcactggccgatactctgaagctatggaactcgccgccagattgggcgggcgatgagcggaatgtagtgcttactttgtctcgtatctggtacaccgcagcaaccggcaagatcgcgccaaaggatgttgctgccacttgggcaatggcacgcttgccagctcaacatcagcccatcctgttgaatgccaagcgggcttatcttgggcaagaagaagattatttgcccgctcgtgcggatcaggtggcggcgctcattaaattcgtgaagtatgaagcagttaaactgcttggtgccagccaatga

SEQ ID NO: 185447 - DNA, 639 bp, Klebsiella oxytoca
gtgacgggtgaaaaggtgctgatcggctacatgcgggtatcgaaggcggacggatcccagtccaccaatttgcaacgcgatgcgctcatcgccgctggtgtgagccttgcgcacctttacgaggatctggcctcgggcaggcgcgatgatcgcccagggttggctgcttgcctgaaggcgcttcgtgaaggggacacgctgatcgtgtggaagctcgatcggcttggccgtgatctgcgccacctgatcaacaccgtgcacgacctaactgcgcgtagcgtgggcctgaaggtcctgaccggtcacggtgcggcggtcgacacgacgactgccgccggcaagcttgtgttcggtatttttgccgcgctggccgagttcgagcgtgagttgatttccgagcgaacagtcgctggacttatctcggcgcgcgctcgcggcaggaaaggggggcgccccttcaagatgaccgccgccaagctacgcctggcgatggccagcatggggcaaccggaaaccaaggtgggcgatctctgcgaagaactcgggattacccggcagacgctctaccggcacgtgtcgcccaagggcgaactgcggccagacggcgtaaagctgctctccctcggttcagccgcataa

SEQ ID NO: 185448 - DNA, 1218 bp, Klebsiella oxytoca
gtgaagcctgcgccgcgctggccgctgcatcccgccccgaaagaaggcgaggcgctgtcctcatggctcaaccgcgtggccctttgctatcacatggaggagcccgacctgctggagcacgatcttggtcacggccaggtcgatgacctggacaccgcgccaccactctcgctgctggcgttgctttcccagcggagcggcatcgagctggaccggctgcgctgtatgagtttcgccggatgggtgccttggctactggacagccttgatgaccagattccagacgccttggaaacctatgcgtttcagctctcggtgttgctgccaagactccgccgtaagacgcgatccatcacgagctggcgtgcctggctgcccagccagccgataaaccgcgcctgtccgctctgcctgagcgatccggagaaccaagccgtactgctcgcgtggaagctgcccctgatgctgagctgcccgctgcatggctgctggctggaatcctattggggcgtgccagggcggtttctcggctgggagaacgccgacgccgaaccgcgcaccgccagcgacgcgattgcggcgatggaccagcgtacctggcaggcactgacaaccggtcacgtggagctgccgcgccgacgcatccacgccggattgtggtttcgacttcttcgcacgctgctcgatgagctgaacaccccgctttccgcgtgcggaacctgcgcggggtatccccgccaagtctgggaaggctgcgggcatccgctgcgtgctgggcaaagtctgtggcgaccgtatgaaaccctgaatccgatagtacggttacagatgctggaggcggcggcaacggcaatcagcttgattgaggtgagggacatcagcccgccaggcgagcaggcaaagctattctggtccgagccccaaaccgggttcaccagtggcctgccgacgaaagcgccgaagcccgagcccatcaatcactggcagcgtgcagtccaggccatcgacgaggccatcattgaagcgcgacacaaccccgagacggcacgctcgctgttcgcgttggcttcctatggtcggcgcgatcccgcttccttggaacggttgcgcgccaccttcgtgaaggaaggcatcccgccggaatttctgtcacattacctgcctgatgcaccctttgcatgtcttaaacaaaatgacgggttaagtgacaaattttga

SEQ ID NO: 185449 - DNA, 909 bp, Klebsiella oxytoca
gtggacgaatatcccatcatcgacctgtcccacctgctgccggcggcccagggcttggcccgtcttccggcggacgagcgcatccagcgccttcgcgccgaccgctggatcggctatccgcgcgcagtcgaggcgctgaaccggctggaagccctttatgcgtggccaaacaagcaacgcatgcccaacctgctgctggttggcccgaccaacaatggcaagtcgatgatcgtcgagaagttccgccgcacccacccggccagctccgacgccgaccaggagcacatcccggtgttggtcgtgcagatgccgtccgagccgtccgtgatccgcttctacgtcgcgctgctcgccgcgatgggcgcgccgctgcgcccacgcccacggttgccggaaatggagcaactggctctggcactgctgcgcaaggtcggcgtgcgcatgctggtgatcgacgagctgcacaacgtgctggccggcaacagcgtcaaccgccgggaattcctcaacctgctgcgcttcctcggcaacgaactgcgcatcccgttggttggggtaggcacgcgcgacgcctacctagccatccgctccgatgaccagttggaaaatcgcttcgagccgatgatgctgccggtatgggaggccaacgacgattgctgctcactgctggccagcttcgccgcttcgctcccgctgcgccggccttccccaattgccacgctggacatggctcgctacctgctcacacgcagcgagggcaccataggggaactggcgcacttgctgatggcggcggccatcgtcgccgtggagagcggcgaggaagcgatcaaccatcgcacactcagcatggccgtttacaccggacccagcgagcggcggcggcaattcgagcgggaactgatgtga

SEQ ID NO: 185450 - DNA, 1680 bp, Klebsiella oxytoca; identical to SEQ ID NO: 10332

SEQ ID NO: 185451 - DNA, 243 bp, Klebsiella oxytoca
atgacaacacaacatcttatcgaagccgggcaagtagtgcaccaggcggccagcattcttgcttccctggagttcatcgaccaggccgccgcgcagcagatcgggccgatggccgaggcggtggccaatgttttcatggtggtctactaccaggcagaaaccggacgcgctacgccggcagattttcaggaagccatgaatacgttgcagcaggtgttgcccagggctatgagggaggggtaa

SEQ ID NO: 185452 - DNA, 1407 bp, Klebsiella oxytoca
atgaaaaacttatttgttcgattaggtattttattggcgcttgttatgctttctcaaacggcatcggcggcacttgaaacgagtggtgttttaaatgacgtaggaactcgttttttgaacgaaagctcgacttggggagccaaaataacagagtatgcaacctggctgttctggacgctggttgtgatttcgatggtctggacgttcggcatgatggccttgcgtaaggccgacattggcgagttcttcgcggagttcgtccggttcacaatcttcaccggcttcttctggtggctgctcatcaacggcccaaatttcgcaatggatattatcaactcattgcggacgattggcgcggaagccgctgggcttccaagggagttaaacccgtcaacgccgatctctattgcttttgacattattgctaaagcagctaagtcgtatagcgtaaccagtccaatcgacaacctatctatatttttgactactttggccattttggcgtgtatggccgtggttgcggctaacgtgttgctggccctcgttaccgcctgggtgcttgcttatgctggtgtttttgtcttgggctttggtgggtcgcgttggacttccgacattgccattaactacttccgaagtgttgccggaattgcactcaagttaatgactatgaccctgctggttggtatcgctgtatccatcattgacggttatcacgctgaccttgccgataaagcgccaatgaaagagttgctaatcatctttgttgtgtcgcttgtcctggtcatcttggtaaacaccataccgaacgtcattgcaggcttgattcctggcggtggcgcagccgcaagtgccggtagttcttttggtgctggtgccatcatgggtgcgggtatggctgcggctggcatggccactggcggcgcagcccttgcagcaaaagcaacgatgggcgcggcggccggcgctgcgggcggcgcatccgctatccaggcagcattccagaaagcatcagcggctatggaggccggcggtgacatgcccagcatggggtcaatcgtcaacggcagcagcggtggtggtgaagcgggtacggctggcagttcgccgtttgcccaggccgcaggctttagtgacagcggcagcagctcaagcggtggcgggtttgccagggcggcgaagctggccgctggtactgcatccgagctggccaagggggtcggttctcaaatgcagcaagggttccaggagagggtagcagagacaaccggcggaaaactggccgctggcatccgtgccagcatggagccagaaggcagcacagagcagagcgccggcggccagcaatttgagggcaacagccttggcggtgatgccggcacttccgacaaatacgataggggttaa

SEQ ID NO: 185453 - DNA, 150 bp, Klebsiella oxytoca
atgaaagctctatttaaaaatctcttgttcgttgtctttgtcagttgcacggtggctggttgcgatcaaccagagccgaaggatgaagtgccagaaatctataaaagtttgcaggagcctaccgaccgctcgaaggataaggagttctaa

SEQ ID NO: 185454 - DNA, 789 bp, Klebsiella oxytoca
atgaaacgtgtccgtcttttagcggctaaatcagccctggccgttgcgctcgcaaccggctttatcaccactaccatcacccctgttcaggccggtatccccgttatcgacggtggcaacctggtgcagaacatcatgtctgcgatggaagccgtcgcgcagaccgccaagcaaatcgagcaataccagacccaattgcagcagtacgaaaaccagctacagaacacgatggccccggccgcctatatctgggatcaggcacaggccacgatcggcaaactgatcgaggcgcaaaataccctggcgtactaccagaaccagcttggcagcctggattcctacctgggcaagttccaggacgtggcctattaccgcagctcgccgtgcttcaacggttcgggcggttgcacgccggccgaaaaggcagcgatggaagaaaaccgccgcctagccagtgaaagccagaaggtggccaatgatgccctgttcaaaacgctggaaaatcaagagaaagccttgcgtaacgatgcccgtaacctggagcggttgcagggtgcggcccagggcgcacaaggccagctccaagctatcggctatgcaaaccagctcgccagccagcaggctaaccagctcttgcagattcgtagccttctcatggcacagcaaacagccgtaggagccaagatgcaggctgatgctgatcggcaagcgatagaacaagcctctcatgagtatcttttcaaaggtttggaagaatccactaaccgttcaaacgacaaggggttttga

SEQ ID NO: 185455 - DNA, 183 bp, Klebsiella oxytoca
atggcaaatttgaacattcgcaatttacccgatgaggtgcaccaggcgctgaaagttagagcggcgctgaacaaccggagcaccgaagcggaaatacgcgagatattgaccgcagcagtccagccgctggatctggaaaaaatgggccgagctgtcggcctggaaaaaccagcaaagaagtaa

SEQ ID NO: 185456 - DNA, 1794 bp, Klebsiella oxytoca
atgattgccaagcatgttgccatgcgttcgctgggcaaatccgactttgccgacctggccaaatacatcaccgacgcacagagcaaagaccaccggctgggccatgtccaggtcacgaactgcgaggcgcattcagtgcgcgatgccatcaccgaagtgctggccacccagcacatgaacaccagggccaagggcgataagacctatcatctgattgtcagttttcgcgccggcgagaatcccgatgccgacaccttgaaggcgatagaggaacggatttgccaagggctagggtttgatgagcatcagcgtatcagcgccgtgcataacgacaccgacaacctgcacatccacattgccatcaacaagattcacccgaccaggcacacgatgcacgaaccgtactatccgcacctggcgctggccgacttgtgcgagacgctggaacgggactatggcctggaggcagacaatcaccggccgcagcagcgcggggcggcatcgagggccgccgacatggagcaccatgccggcgtggaaagtctggtgggctggatcaagcgcgaatgcctggacgacattaaagccgcgcagtcctggacggagctgcaccaggtcatgcgtgataacggcctggagattacgccaaggggtaacgggttggtgatccgggccgatgacggcacgatggtcaagcccagcaccctgtcccgcgatctgtccaagcctgccctggaaaagcggctgggagcctttgaggcgtcaccggatcagcaggagaagccgcccaggcggcagtatcaaaagaagccggtacggtcacgcgctgacaccaccgagctttatgccaggtacaaggatgagcagaagaatttgaccgccgccagggccgaggcattggccgcggcgaagcggcgcaaggatcgggccgtggtcgatgccaaacagaaggccgccaccaagcgagcagcaatcaagctggccggtggcggtcgggtggccaaaaaactgctgtactcacaaaccagtgcgacgctacgcgccgagctggacgggatatacaaggaatacaccaaagagcgtgaacggctgcaccagggccaccagcgccgccagtgggccgattggctcaagcaagaggctacccagggtaacagcgaggcgctggctgccttgcgggccagagaggccgcccagggattgaagggcaacacggtcaaagggcaaggtcaggcgaagcccggccatgcgccggtgatcgacaacatcaccaagacgggcacgatcatttaccgggccggtgccactgccgtgagggatgacggtgaccggctgcaagtctcgaccggcaccgaccgcgccggcgttcaggaagccttgaggctggccgcagagcggtacggcagccgtatcaccgttaacggtacaaccgagttcaaggcccaggcgatccgggccgccgtggatggcaagctgcccattacgtttgctgatccagccttggaaaagcgccgcctggcactgctgcaagacaatttcagcgtgaccagcaagcccggtgttccaggtgtcggcaaggtgccgccgccggtggccagggcgggccgtttgcgttccttgtctcaagccgaagcgttgcagatcgagggcgcagcggcagcggttacaccgcagaaacccgcgcctaccccagcacccgcgccgggcgagctggaacgccgtaaagccaagctgcaagcggaattgaacgccaagaaggaaaaagcaaggcagcgcaaggggcggggccgttag

SEQ ID NO: 185457 - DNA, 375 bp, Klebsiella oxytoca
atggaggcgacagagaagaaggtaacgagaaaaagcagcacaccgatcaaggtgtattgcctgccggaagagcgggccgccatcgaggccaacgcgcaagcggctggcttgagtacgtccgcttttttgctggccgtggggcagggttacgccgtccagggcgtgaccgattacgagaacgtgcgcgagctggtgcgggtcaatggcgatctgggccgcctcggtggtctgctgaaattgtggctgaccgacgatgcccgaacggcccggttcagcgctgaaactgtcttgggcctgctggcccggatcgaggccaatcaggacgaaatgagccgattgatggaatctattgtgcgacccagggcagcatcatga

SEQ ID NO: 185458 - DNA, 393 bp, Klebsiella oxytoca
atggctaaacggcttacagagcgcattgcagcgcaaatgcaaacccaaaagcccacccgttcaggacagaatcgggcggctttcctggcccagcgcgacgacataaaagaggctttgaccgatggctggccggtaaaagccatctggaaaacgctgcacgatgaagggaaaatcagcttcggatatgatgcttttatcagctatgtgaacagtctgattcggtcgccaggcgaacctgaaaaggccaccgcaagaccgccggcatcctcccaaccggcccccaagaaagccaccccagcgacacccaaaccagcaccctcagccagccataagccgggggagattcccggcttcaacttcaaccccagcccgaacaaagcggacttgatttga

SEQ ID NO: 185459 - DNA, 303 bp, Klebsiella oxytoca; identical to SEQ ID NO: 24284

SEQ ID NO: 185460 - DNA, 138 bp, Klebsiella oxytoca
atggtcaacatcccgagcggctgcccactctattgtaaacaagacatttttatcttttatattcaatggcttattttcctgctaattggtaataccatgaaaaataccatgctcagaaaaggcttaacaatattttga

SEQ ID NO: 185461 - DNA, 897 bp, Klebsiella oxytoca
atgagccagatacccgccgaaatccgcgaccgcatcaccaccgttgcaaatgagctgttcgaggacgccgggcgcgaggcgttcccgactgttgacgccgtgcgcagggcagcgcgggcagacatgaataccaccagcgcggtaatgcgcgagtggcgacgggcgcagaccgcccaggcggccccggtggctgtcgccgtgccggaaacgattacccaggcaaacgctgttgccttggccgcgttgtggcagcaggcgcaggagctggcaaacgaatcgctacaggctgcacaggcggcatgggaagccgagctggatgccatgcgggcggagttggccgacgcttacgagtcgcaggcaaccgagcttgacgaggtgcgggctgatcttgagcgggcaaacgccgctaccgaccaggttcatgccgagctggccacgaccaggtcagaactgtcccaggctgttatgcgggccgagagggccgaagctaaggcggacgaaatcgaacgccgggccagcgatctgcgggccgaacttgaccgggcacatgctgatgcagaccaggcgcgggcgacgctggccgagcagcagaaaacgtcagacaagtattttgccgagctgggcaaggcgcgtgatgaggcgacccaggtcagtgcgaagaatcgacaactggacgccgacctggccggtgcggtggcgcgtcaaaaggacgtgaccagagagcttgaagcgggccgggccgagctgttggaatcgaagcagcaggcgtcagagctgcgcgaagaagtggcccggctcaatggggcgacggcgacctataaggaaatgctggagcggttcgaggtggcggcgaaagcagcgaccagggcgagaaagcagcccaaggccgagggctga

SEQ ID NO: 185462 - DNA, 324 bp, Klebsiella oxytoca
atggccagaacaaaaaaatcatttccgcctgaattgctggaagagttgcgcgtgatgccggtggtgactgcgctcgatgccttggggctgtattggaagcatgaccccgactttgtgccggtgaaggataaattgaccgtccggctgaatgtagccctgggcggtggtggtgtagagctgctggccaccgggccgaagtggtacgacaccagggcagagaagggcggcggcggtgcggtcgatctggccatgtacctgttgcgcctggactttgtggcggcggtgaagcggttccagtcgaattgttcaaaatttagccgctaa

SEQ ID NO: 185463 - DNA, 1458 bp, Klebsiella oxytoca
atggcggctgtagcacaactatcactatttgaccgggccgaagaggccagggcataccacgatcccggccgttccggctttttctccattctggtcgatgtacacggcgacaagcggcagtcatcacaccgcctggtcgagatgccgaccgtcctggagctgatcgacaagacccgcgacacctggctaacgcaggccgagttcatccggcctaaccggcgcgtggtgaaccttgcccgtatcggcctgatgtttgccgacctggatacctaccggcagccgtgggccaccggcaggacgccggagcaactggcggcatcggtgctgtatcactgcgcccaggaaggcatcccgacgccctcgatgctgattttcagcgggcgagggctacaggccaagtggctcctagaccgacctgtaccgcgtcaggcgctgccgaggtggaatgcttgccagaagtacctgatagaccgcctgatggccataggggccgacgtggcggccaaggacgcaagtcgggtactgcgcctggttgatacggtcaacaccaaaagcggtgaaatatgccgcgttgtacacgtcgaaaccggggccgatggccagccggtgcggtatggcttcgagtacctggccgaaatgctcttgccggtggcccgctgggagatcgagcagcagcgcgaggcccgcgccgagcgccggcagcagctcaagctgttgccgggtaccaagaccgacaacctacgcggattcagcggtcggcaattggcctggcaccgcctggaggatctacgcaagctggccaccctgcgcggcggcgtccaggaaggcgagcgtatgcagcaccttttctggcgtctgaacttcctgctgttgtccggtgcgacccacagcgggcagatgtaccacgaagcaaaagccctggcccgtgagctggcccccgactggcagcagaacagcaaagagctgatgacgttgtactccaaggcgaaagcctacgaggccggcgagaaaatcacgttcggcggcaaggaatacgccccgctgtacaccccgcgcaatgacaccctcatcaacctgtttcagatcaccgaccaggagcagcgcgagctgcgaaccatcatcagccgagatatggccgccgagcggcgcagggagcgcgacagagagcgcgacacggcccgtaggcgggccgctggggcggtggatagggaaacgtacctggaagctgccaacactaagcaggctcaagcacaggcgctcagggcgcaaggcttgagcgtaagggctattgctcaacaaatgggcatcagcaaaacggccgccggccgctacgttgcggcaaccagtgacgtgtcccaagtggctcccctattacagcggccggcgggtgtcccaagtccctcccctattactaatggcgaagcctacgcccggcccgtagggcctgcttttgagtag

SEQ ID NO: 185464 - DNA, 225 bp, Klebsiella oxytoca
atgagtaaaccaactacaacacttagcgccggccgaccgagcgcccgcagcgacaaagcaaaggctgcaacgcttgccagcctggccgatgacgcgggcggcatgaagcgggtcaattttgagttgtcagccgaccttcactctaagctgaaaattcatgctgcaaagcaaggtatgagcatcaaggagctgttgacggattacgtcgctagcctgccagagtga

SEQ ID NO: 185465 - DNA, 633 bp, Klebsiella oxytoca
atgaaagtcattgccgtgctgaaccagaagggcgggagtgggaaaaccactatcgccacccaccttgcccgcgccctgcaactggatggtgccgacgtgctgctggttgattcagacccccagggaagcgcccgagactgggccgccgttcgggaggatcagccgctaactgttgtcggcatcgaccgcccgacgattgaccgggacgtgaagaacgtagcccgcaaggttgattttgtcgtgatcgacggtgcgccccaggcggccgacctggccgtgtcagccatcaaggcggccgacttcgtgctgattcccgtacagccgtcgccctatgacatttgggccacgtccgaccttgtggagctggttaagcagcgcatcgaggtgacagacggaaaactacaagcagctttcgtggtgtccagggctatcaagggcacgcggattggtggcgaggttgccgaagctcttgccggctatgggctgcccatccttgaggcccgcatcactcaacgagtgagctaccccggcaccgcagcggttggcaccaccgttctggaagcggagccggagggcgatgcagcggccgagattcgcaacctggccagcgaaatcaagcaaaaactcatttga

SEQ ID NO: 185466 - DNA, 882 bp, Klebsiella oxytoca
atgagacaccagaacgaccccggcacctttgacctgatgacaggccgcttgctgctgggctatgcccgcgtcagtacagacgaccaggacttaaccaaccagcgggccgagctgcacgccgccggctgcacccgtatctatgccgagaaagttaccggggcgcggcgcgaccggcccgagctggcccggttactcgatcacttgcggcctggcgatgttgtcaccgtgaccaggcttgaccgcctggcccgcagtacacgcgacctgctggatattgccgcccgcatccaggaggccggcgcagggcttcgcagcttggccgagccgtgggccgacacgacgaccccagcgggccgcatggtgttgaccatctttgccggtattgcggagttcgagcggtgcttgatactggatcgaaccagggaaggccgggaggcggccaaggccagaggcgtgaagttcggcccgcgccctacccttaccccggcgcagatcgcgcacgcccgcgacctgatcgagcaggaaggccgacaggtcaaggaggtggccgagctgttcggtgtgcatcgctcgacgatataccgcgccctggaacgcagcgaggaagtcacggcagccgaagccaagcagcgcggcgctttcctggaggacgctttgacagagactgatgccctggccgccggcggcgaccaggcggatgaacgccaagaggaaatgccgttttttgataatgagagcggcccgtcagacgatcttccgccgccgccgtatcgaacgcagagcctgccgcaaatcctggcgggcctcaccgatgacgagctggcgagctggcccggtgactttgccgacgaagaacgagcgcggcggcaatcactcaaatga

SEQ ID NO: 185467 - DNA, 504 bp, Klebsiella oxytoca
atggacgacttaaccctgcgttattacgacgccgaaatgcgctacctgctggaagccggcgaagagtttgcccgcgctcaccccgagcaggcggcaatgctcaatctcgataaagcgggtgcgcgcgacccgtacgtggagcgcctgtttgagggctttgccttcctgatgggtcgtcttcgcgagaaactcgatgacgacctgccggaactgaccgaagggctggtcagcctgctgtggccgcaatacctgcgcaccattccgtcgatgtcggtggtggagttcacgcccgactggcgcgagatgaaagagaagatgcgtatcgtcaaaggtttcgaggtcaattcgcagccgatcggcgagaagggcacgcgctgccggtacaccaccaccaaagaaatcacccttcagccgctgtcgctggagcatgcccgtctgtcgactgaccctgacgggcgttcggtcatcaacctgcgctttaactgcagccatctcgccgactag

SEQ ID NO: 185468 - DNA, 648 bp, Klebsiella oxytoca
atggaacgaaatagactggcccggcagattattgatacctgcctggaaatgacccgcctggggttaaatcagggaaccgccggtaacgtgagcgtgcgttatcagggggggatgctgatcacgccaaccggtataccttatgaaaagctgacggaagcgcacattgtgtatatcgatgccgaaggtcagcatgaacagggcaaattgccgtccagcgagtggcgttttcatatggcggcttatcagacgcggcctgatgctcacgcggtggtacataatcatgcggttcactctacggcggtgtcgatcctcaatcgtcccattcccgccattcactatatgattgcggcggcggggggcaactctattccctgcgcaccctatgccacttttggtacccgcgagctgtctgaacacgtggccgtggcgctgaaaaaccgcaaagcgacgctgctgcagcaccatggcctgatcgcttgtgaagagaatctggagaaggccctgtggctggcgcatgaagttgaggtgctggcgcagctttatctcagcactctggccatcaccgacccggtgccggttcttggcgacgaggccattgctatcgtgctggagaaattcaaaacctacggattgcgtatcgaagagtga

SEQ ID NO: 185469 - DNA, 339 bp, Klebsiella oxytoca
atggaacttgtcgatcaccagtttggcgttgggcagatactgagcaaaggaacgcttgaagggtcgccacatatccgtacagacccattccaccttgtcagcatccggcaaatccttgaagaagggcttcaaatgctcttgagtacgatgctccaacatatcaaagacgttgttggttgccagattggtgattacacagcgataccctccggccaggttcacttcgtcaatacccatgatgaccggggtttcgtaacgaacggtttgggagagttcctcaatgagatcgtgagcgatgttcttgacggtgttcactgccacaccggtttgctcggctaa

SEQ ID NO: 185470 - DNA, 3258 bp, Klebsiella oxytoca
atgcaatcagcagcacatcaggaaaaacacttccagcaatacatcatcgaccggttggtagagcagggctggaagctgggtgattccaagttctacgacaccgagcgggcggtgtaccccgaagacctggaaagctggattaaaaccagcggccagcaggaaaaatgggacaagctggaacggctcaacggggccaaaacccttgaagtgctgatggatcgcctggataaagcactggagaaacaaggcaccatgcaggtgttgcgccagggtttttccattgccggttgcggcctgatcgagatgaccgaggccgcaccggaagacaagcgcaatgcagcagtcattgagcgttaccaggccaatatcctgcgcgtggtgccggaactgaagtatcacccggcccgtgaatttgccattgatctggtgctgtttatcaacggtctgccggtggcaaccgtcgaactgaagaccgacttcacccagtcctgcgaagcggccatggatcagtaccgcaatgatcgtctgccgtatgacgccaagaccaaacgccgggagccattgctgaccttcaagcgcggggcggtggtgcatttcgccatgtccgactctgaaatcatgatggcgactaagctggatggagaaaacacctttttcctgccgttcaataaggggcgaaaggacgaaagcggcacggtacatgcgggtaacccgccaggtgaaattaaggccgatggtacccaggaatacccggtagcctacttctgggaggcggtctgccagccggatgcctggctgcggattttccatagctttgtctacgtcgagaaaaaggacgtggtggatattcagggcaactggtcgaagaaagaaactctgattttcccgcgcttccaccaatggacggcagtgaaccagatgctggccgatgcccgcgaaaacggcgcaggcatgacctacctgtgtgaccacagcgccggttccggcaagaccagcaccatttcctggacggctcatgacttggtgaaactgcgcgaagataacggcgacgcggtatttaacagcgtgatcattgtaaccgaccgtaatgtgctggacggccagcttcaggacgcggtgaaacagattgaccatcagtttggggtgatcgccgccattgaccggcaaaagtcatccaagtccaagagcaagcagctctcggaagccttgttgtctggcacgccgattgtggtagtcacgatccagaccttcccctacgcgatggaagccatcatcactgacaaggccctgaaagggaaaaactttgctgtgatcattgatgaggcgcataactcgcagacaggctctaccgccgctaagctgcaagccgcgctggggatgagcggacaaggcaagatgtccaccatgacggtggatgaactgctggagcaactgcaaaagtcccgcgcccgcccggacaatatcagctacttcgcctttaccggcacgcccaaacactccactttgatgctgttcggtcgcccgacagatccaagccaaccgatctcggacgataacccgccgcaagccttccacctgtacaccatgcgccaggccattgaggagaaattcattctcgatgtgttgaacggctatgtaccctacaaaacagccttcaacctttccaagcagcttgaagacagcaagcgggtaagcggcaaggccgccaaacgcgccctggcacagtggatgtcattgcaccccaccaatgtgacccagaaggtacagtttatcgttgagcacttcaccaagaacgtcgcccaccggctggatggcaaggccaaggcgatggtcgtgaccagctcccgtgccgctgccattcgctacaagaaggcgtttgaccgctatatcgagcagcacagcgagtacggctttattcattcactggtggccttctccggcaagatgaccggtaagcaggtgatgcaccaggatgacagcgagtttaaggacgatgtgtttatcgtcgatgagaacgaggagttcaccgagcagagcatgaacccggatgttcacgggcaggatttgcgctttgcctttgaccgcccagaataccgggtaatgttggtggccgacaagttccagaccggctttgaccagcccaaactggtcgccatgtatgtggacaagaaaatcgccaaccatgtggagattgtgcagaccttcgcccgcctgaaccggacggcacctgggaaagatgaagtctttatcatcgacttcgtgaacgacccagagaacgtgcgcaaggcctttgccacctatgacaagggcgctcacatcagcgaagtgcaagacctcaatgtggtctacgagatcaaggagcgactggacgagcacggcctgtacgacgagaaggacttggccgcgttcaaggaagcccgcttcaagaccatacgtgacatcacccatactaaatcgccacagcacaaggcgctgtataccgctacagctggagcgacggccttgtataacgacaagatgaaaatgttgcgcgatggcatggcaacctgggaagcagcgtttgagaaggcccgcgccaggggtgatgaggcggacatgaagtctgccgatcaccaccaggatgagtatgccgagcaaatcaaggcgctgatgggcttcaagtcggacctggggcgcttctgccgtacctattcctatatcgcccaactgattgattttggtgacccggagttggagaactttgccgctttcgccaagctgctgcaaaagcgccttcagcacgaagcaccggaaaccgtggacttgacaggcctggtgcttactggctttgacatcaatgctcgacccgatgacgtagaagacgaaggcaaaaccccggtattgcaaccagcaggtgcaggcggtggtggcgcggcaggcgacaagccgaaattcgtcaaagagattatcgagaggctcaacagcctgtttggtgaggcgacgccgatccaggatcaggcggctttcgttaatcagatttcagcgattaccggtgaaagcgatgtcgtcatggctcaggtggaaagcaacacccgtgagcaggctatgaaaggcaacctccccggtgctgtgcagcaagcggttgttcgtgctttgtccagtcatcagaagctggcaacccaggtgctcaagtctgaccgtcagggcatgaccgcattggttgatatggtgtatgacctgctgcgcgaaggcaaagacatcgatctgggtatggattaa

SEQ ID NO: 185471 - DNA, 1335 bp, Klebsiella oxytoca
atgagccagtacagagcatatcccacgtataaggattccggtattgagtggattgggcaggtgccagaggagtggttaaataggaaggtttttcatgctttccaagccattgggagtggaacaacgccaccggcaaaggagcatgaatggtatcagggaggaaccattccgtggataacaacaagtgagcttagagaaaacaccgtcgttaaaacaaagaagtgtgttacctcagatgccatgcagaaattctcagccttgaaaatttttcccgctggttcattagctattgccatgtatggtgcaacaattggtcgcctagggtttcttggaatcccagcaacaaccaaccaagcttgctgtgtgctgtctggtgaacgcgatttgaatatccagtttttgtattactggttgatggcattcagagccgatatcgtggctttcttctctgagggcgggggccagccgaatatcaaccaagaggtgatagccagccttagggtgccatccccagcccctgatgaacaagccaccattgtcgccaccctcgaccgcgaaaccgcccgtattgatgcgcttgtcgagaagaaaacccgctttatcgagctactgaaggaaaagcggcaggcgctgattacccatgctgtcaccaagggactagaccgcaacgccaagatgaaggattccggcattgagtggattgggcaggtgccggagcactgggaggcgacaaaactaaagcatgttgctgcattctctggtggtggtacgccatcaaaagaaaatccagactattggaacggctgcatcccttgggtctctccaaaggatatgaaacatgaggtgattaccgattctatagatcatataactaccaaaggactggaaaatagtgccacgaaactgattgactcgggagcggtgttgctggttgctcgatcaggtattcttcgtcacacgataccggttgggatcaataatgttcctgttagcttaaatcaggacatgaaagcattgagccttgatgaaactagggttagaccccggtttatacttcggtgggtacagggtcttaaccgctcgttgcttgggatatgggcaaaagaaggagctactgttgaaagcttagagcatgaatatgtagcgaacactcgtctacctcttccagatctgaaggagcaagatgccattctagccaccctcgaccttgaaaccgcccgcattgatgctctgattagcaagtcggaacaaagtatcatcctgctcaaagaacgccgcgccgcctttatcaccgccgctgtcacaggccagattgatttgcgaggaaaacaataa

SEQ ID NO: 185472 - DNA, 2601 bp, Klebsiella oxytoca
atggcatttactaaaagaccaaaaaaacaaaatgtgacagaaagtcccgatttactttttagagagcttcctagacgaacggttcccgacgttcttcctcatcaacgagatatgatgagacgatatgcagaagacggtcaaaataaagcagatgttgctttgcagcttccaacagggagcggtaagactttagttggccttttaattgctgagtggcgaagaagaaaaaataatgagaaaatcgtatttctctgccctaccaagcagttggtgaatcaagttgttgaacaagctgagaataaatatggtttgagtgtgctgggttttactgggagtaaaaatgattatgatcctgtatcagtagcaaaatataaacaaggacaatctatagctataaccacctatagtagtgtattcaatgtaaatcctttctttttagacccggatgttattattgttgatgatgcccatgcggcagagaactatatatctaaactatggtctttcgaagtttctaggtttgatgatgagcataaatctttatggagtgtattatctgagttaataaagccttatcttgatggtgctagttattcgaaattgaatggaaattgggatagcccagatgcttctgtatgggtagataaattaccaacacctacttttttagctatccaaaatgacttggttgaaataatagatgaatatactcaaggaacttcattacgattctcttggtcaatgattagagaatatttacatgcgtgtcatttttattattcatcaaagggaatgttgattagaccgctattacctcctacgtggactcataaaaatttttctgacgcaactcagcggatatttatgtccgctacattgggtgaaggtggagatttagaacgcttaactgggagaaagaaaatttatagactatcaacccccgatggctgggatacccagggagttggtcgtcgtttctttatttttccaactctatcattgacagagtccgatgcggatatattaactacgaaattgatagatgaaagtgaacgttctgttgtattggttcctaatgataaacatgcggataaaataaagaaattattatctggaaataaaaaaatagatatttttgatgctaaagatattgaaaattcgaaagatttatttataaaaagtaataatgccgctgcggtgatcgcaaatcgatatgatggtatagatttccctaaagatgaatgtcgtttattaattatagaaggattaccaaaaacagttaatttgcaagaacaatttttgatgtcaagaattggagcaaatgcattattcaatgagcgagttcaaactagggttattcaagctattggtcgttgcacaagatctcttgaggactattctgcggttgttgtgaaaggtaccgagcttgtggattttttatcaaataggaagagaagagaatactttcaccctgaactacaagctgaattagaatttggtgttgaacagtcagttaatgccggtgaacttgacgaattcttggaaaattatgatatatttattgataacggcgaagactgggaggatattaataaagatattatcgagataagatctgagaagaaacagaaaaaattggcaggtatcgttgagcttgaaatggtggttgagcttgagattgattatgtaagagctctttggaactcagattttgagacggctgttggtaaaactgaagatattttagctcatctaacatcacctgatttaaaaggatatagagctctatgggaatatctggcaggttcaagtgcttaccaatcaacaaaattaacaggttttgatctgacaatcaaggcacaagagcattttcttcgagccaaaaaagctgctagcggtatcccatggctatcaaatttatatcgatttgcatctgataaaacggtaactcctgaagaggagaatgatcgcgttattatgaagcaaatagaaggtatagagatggttttttcgagtattggtattgcctcctctcggaaattcctacaagaagagcggtttattattgatggtttgaattcagaaaatcattttgaggaagctcatcgtaggatcggtcgattactaggatttgaaacaggaaaagtggaaactgatgcatcccctgatccttggtggcaactagaaaatctatgttttgtttttgaagatcatgcaaatgctaggaataatgtactggatgcaacaaaagctcgacaggcaagttctcaccctaattggatgcgagaacacattataagttgcaaaggagaacatattaaaattattcctgtattattatctccagtccgttctatgacagagggagctgctgctcaggttaattcattgatgtactggaatctcaatgattttaaagtatgggtacaaaaggcgttatctgctctaaaggatattagacaaacattccaagaacctggggatattgtatggcgtgcggaagcagcagcaaaactatctgaggctaaagttgatatagctagtttggataagttaataaaatcctcatcttgtaaagataatctggagataagtaggtga

SEQ ID NO: 185473 - DNA, 885 bp, Klebsiella oxytoca
atgagtgacaatttagttgttggccacgaggagttgattacgctgatcaatatacctctttctattctagatcctaatcattctgcaattagccctgaaattcgtaaaaaaattctaagagaacgttataagaaccaattaatagcagatggattagaaactggtcatcttaaagaaattagaggtaatatttattttgtctctaaattatcacttgaatcgtttgctgggtttgtttttgaagcctatttggttagcctttttaatcgtaataaaaatattggtagagctgctcttacgtggtgctcatgtcggcaacggcaggttatgactaatatttatgaaaaatataaagctataggtacagggtttattaccactaaagcgctctaccctcatttgtatgctcctcaaagtagatctgatattatttttatccgtaacaatcttatatcaggtcaacctgagcctgcaacagaaaaccctacgactaatattgctggtattcaggtaaaagcaattcgttcaaatttcaaatctgaaataattgatcctattgtatcaggtaaatattcacatgtaataactctgctgaatgatcaatatgggacaccttccagaactacatgtcttcgtgagttagatattttggctaataatggaagtattgatccatcaatgagagaatttgtttcagagagaattaaaggacctgaattcttaggcataagtcaaagagatgtcgaagattattatgattatattagggatttttattctggaagtcctatttcgagcgatgagaatattaatgatgcaatggatgctgaaattaaacgttataaatataagaatgggctattagttcctgagaattttgattaa

SEQ ID NO: 185474 - DNA, 1734 bp, Klebsiella oxytoca; identical to SEQ ID NO: 111810

SEQ ID NO: 185475 - DNA, 912 bp, Klebsiella oxytoca
atgcggttcaataccccacttcgctatcccggcggtaaaggaaaattatcaaacttcatgctaaatgttattgaggagaataatctttcgcctatacattatgctgagccttatgctggaggcgcgggtcttgcattgaaactgctagatctaaatattgctgaaagaattatccttaacgatataaacgtttccgtttatgcattctggcattctgttcttaacaatgctgatactttatgctctatgatctacgatacaccggtcactatggatgagtggtataaacaaaaggaaataataaataacacaaatagttatgacctgctaacaattggtttctctacatttttccttaatagaaccaatcgctccggaatattaaagggcggggttattggtggaaaaaatcaagatggcgaatggaaattagatgctagatataataaaaacgacctaatttctcgcataagaatcattcatgccgaaaaggatcgaattgagctttttaatctagatgctatcgagtttatcaataatataattacagaattaccagaaaattcaataacttatttagaccctccgtactatgtcaaaggaaaagggttatatatcaatcattacaaccacgaagatcatgtgaatgtagcaaaggttgttcaatctgacataaaaacgccgtggattgtatcgtacgacaatacacctgaaattagagatatgtataaaaaaacacagtctttaatgtacggtataaattatagtgctcaagatcggtacaaaggttctgaggctatgttcttcagcgatctgcttaaaattccagtaacggataatccaacgaagattaaagcgccaaagaagattaggactttagccggccatgccggtacttcaaaggatacgtaa

SEQ ID NO: 185476 - DNA, 1470 bp, Klebsiella oxytoca
atggacccaaaacctcctgaatggaccaccttttttatgggccaaaatcctggcatagaacctgatttcttcggtatgaatagtagcacaggagcagtattagttattgaagctaacaattccagatatcttattccctttggaaccggtcatcacttaatcaatgatggcagcattgtcaaaggatttgggcttaaaacaactcttaatagtatagaacataaaaaaattcgcagtttagataaaggcagtcacaacgaaacgaacctgttaactcgcagtcagagcagtaaagaagtcgatatatacaacctaaaaatagattctgagatggatattctcacaactctcacaggcacttcgacagaagatattttaggaagtaaaattactggcaaagatgcgtttgtgatcatgccggatattgaattgaaggctattccagcactgttgaccaaaatagactctatttacttattacctcttcctgaagaattcgagtgggttaacaatatcaaggaggctgatgaacaagaagttgagatattggattcgcttttgattgatcggataaaagaaaaagacttcaatgatttatggcttggagagccagaaatagtagactgggaaaatcaaataggctattgctttgataagagacaaaggttcattcatgaaaccttatcaatataccatgtttgtgattattttgatggtaagaaaactgaagtaactgttgatgaactcaaaaaaagttacctgcatgttttgaatgccgattttgaatcgataaaaaaatggtctttatataggtgcctctatgccgagataaaagaaggtgatcagaactatattcttcgagactctatatggtatgttgcagataggaattttgtatcgactattgatgatgaaatgaaaaaaataattcattatgaggagtcggataaatttcctgtatattcatataaacgagaggaggattataataaaaaactttgccacgatgataattcctttacacacatggatcagaaattcattcatcatggtggtggtaaaagtaagattgaattttgtgatcttatcagaggtcaatcagattttatccatgtaaaatattatactggttcgcaaagtatgagccatcttttttcacaaggatttataggttctgaactttttataagtgactctgaatttcgaggcaaacttaatgagaaactacctgctcatataaaattagccgatcatataaatagaccagatgctaaaaaatataaactagttttcgccatagcttctaataaaaatcttcccgaagatttacctttgttttctaaaataaacttgaaaaatttccacaagagtattaccaattttgggtatgaggtcaggatctgcaaaattgctgtggacccagatatttataaaaagaagctatgtaaaccacaaaagaacaagctttaa

SEQ ID NO: 185477 - DNA, 636 bp, Klebsiella oxytoca
atgaaaaaatttaatttcgctgctctgcttccggggtttttagcactcaataattctgtatgggcaaatgattcctccactggtgcaagtgatttgcccggtatgactcttaatgagcatgatttagttatagctccacttaacacggaagtacctttctacattgcagggcatcgtagtcatagctcccatcgaagccatagttctcatagatcttcgtctggtggtgggtactatggtggaagcactccttattatcctaaaacatacagttcaccaagctcatcaggctcatccacttcaggtacaaattcgtcatcgtcttcttcatctgttcgttcgcttcgctctaatgacaccgatgcctctacgaccacaaactctgctggaatgaatggaactactcgtgcaagtagtgggctggcttctgatactgagaagcgtaagcgtttgatcatgcgagtgcagttcgcattactggataaagggttttataacggcaatatagacggaagtatggggcctgcgacacgaactgctatcaaaaattacagagttgcatatgggcttcctactccagtaagagaaacattagatgctcagttattgaactctttgaatatactggctcgttaa

SEQ ID NO: 185478 - DNA, 516 bp, Klebsiella oxytoca; identical to SEQ ID NO: 111846

SEQ ID NO: 185479 - DNA, 699 bp, Klebsiella oxytoca
atgaacagtattaatagctcggactcatcttgcgtttcttttgtcgattcagcagatagcggcgtgctgataatggatgcatgccccatcaccgcgctgggtatcaagcgtgtgttaacccagacttgcgggattaccgagcccataaactatgtaagaaatcttgccagtatttcgccgatcgttgccagcgcaccacccgcgctgcttgtcatggacatctgcggtgaaaaagaattaatgcttgatgggctgcgtttactggcacacctgtatgaatcacatccggcgttaaaaattatcatctgtaccgattttcgcgatccccgtgttcttgcgctgttggccttgtcaaatgcccgcggcatcttattgaaacacgagccggtgctggcgttggcacaatgtgtttctgaagtcgtgtcagggggaaggcagtggctgagcccgaaaacaaaacagctgctctccaagacgactcagacaaatagcccactgactgcccgggaactggatgtgctggtgcatcttttttcaggtcagaacgtttctcgtgtagcgcagacgttgcatcgtaatatccgtacggtgagtacgcataagcgcaatgcgatggtaaaactgggatttcacaatgatagtgaactcttttctcagggtacctggatggcaaaagttggccccgttgcctgtctttaa

SEQ ID NO: 185480 - DNA, 705 bp, Klebsiella oxytoca
atgaatttatcgtatccgccgtctcgaacgatcgccttgatggatagccatcccctgacgctttccggactttcgacactcattaaatccgttgacgcaacatgcgatattcggatcaccgagccgagtctgggcaaaatctcagaagcactgatgtaccagtcagtcgatatccttgttaccgatctgcaaagtgcagaggaaaatccgcacgaagggctggatattttactgcgtctggggacccagttccccgacctgaatgtggtggtgtatacgttttgccatgacagcaatgcgctgcggaagctactgaatcagcataacttcagcgtgatcgcgcgtggggagtcgatgaccgatactgaagacttctttaaaagagcgtttgtgcaaaaacgcgtgcttagcccgaaaatttgcagcaacctcacacggattaatcagaacaatgagagcgtcacttcccgattaacgcgtagtgaaattgatgtgctgaagcatctgtttaacggtatggacttacaacaaattgcgggtatgaagcagctaagtatcaaaacgatcagcgcgcataaatgcaatgcgatgcgtaagctcggggtgcaatcggattctgaactatttgttttattgaagaatacattcgatgagcgtccggtgcgccatgatgaatgcggcgatcgcgaagctgcaccgatttaa

SEQ ID NO: 185481 - DNA, 801 bp, Klebsiella oxytoca; identical to SEQ ID NO: 111813

SEQ ID NO: 185482 - DNA, 372 bp, Klebsiella oxytoca
atgagtaatgatcgcatgacagacgtgcccgatttcctgggcgagctcgatgccggcgtgttcatgaataagattgcggcggcgctcaataccaccgcgctcggcgttctgaacaatggcaataaaggcaaggtagtcctcacctttgattttgagcgtatgggtaactctgttgaagagaagcgcgtcaagattaagcaccgcctcaattacagcacccctaccccacgcggcaaagcgtccgaagaggacaccaccgaaacaccaatgtgggtcaacaaaggtgggaagctcacgatcctgcaggaagatcagggcaacctgtttaacctcgctggcgatcctgatggaaagctacgggcggctaaataa

SEQ ID NO: 185483 - DNA, 447 bp, Klebsiella oxytoca; identical to SEQ ID NO: 111814

SEQ ID NO: 185484 - DNA, 195 bp, Klebsiella oxytoca; identical to SEQ ID NO: 111815

SEQ ID NO: 185485 - DNA, 336 bp, Klebsiella oxytoca
atgctcctggaactttgccatcacctgatagctgttctgctcaatctgagccttttcatcggcatcaataacaccatcagcagttgctttacgaatgaagctggagtgttttccaatccactcaatcgactccataaggcgttgattaatgtcgccattgtccacgtcttcgacttcagcgagcggaacaaagacgccgttggagtggcgtgcgatagcattagctatatgatttgtgctcgctgcacgttggagtaccattgcccaaccgagcgggaatatctgatccccttctgcgcgaaggcggttaaagagcgcgttttctgtaacgcctaa

SEQ ID NO: 185486 - DNA, 828 bp, Klebsiella oxytoca
atgtctcagttagacagcggtacttttcagcaggttaaagatctggtgctttctggttatcacctgaacgatatccacggcttggcctgtccgaccgccctgctaccgcagaataccagcgttgaaagcctggagcgttttactcttgagcgtttccgtttccgcggtgccatggacacgaccagcattgatgatttcgttcgctattctgtcgcttatgcccaggaagaagaaaaagcacgttgctttattgatgccgataacatgctggctcgttctatcttcaatatcggcacgttggacaacccaggccacgctgataacgtcgcctcgatcaagcttaagaagacagcgcccttccgcgcgttactggcgatcaacggcgatcaccttaatcagaagcaaatcgccgaatggctcgaagactggagtgactatctcactgcgttcgattccgacggacagacaatgaaaattgcacaggcagcgcaggcggttcgtcgtgtcactatccagcaaactaatgccgccgatcatgaagacggtgatttcagcggcaaaaaatcgctgatgcaaagtatcgaagccagcagtaaagatgttatgccggtcgcgtttgagtttaagtgtgtaccctatgaaggcctgggcgaacgtcgtttcagtcttcgcaatagcctgctcaaaagtagcgatccggtattcgtcctgcgtatcgtccaactggaagccctggaagaagcgatcgccaatgagttccgtgatctgctggttggcaagttcgacggcaagccggtagaaacctttatcggcaacttcaaggcctga

SEQ ID NO: 185487 - DNA, 504 bp, Klebsiella oxytoca
gtggtgcctccacctgccgggttaagccataaccggcgacgtacactgcccggaaacgcattccatgaacgggttggctcgccacgtgcgcatagccgcaattaccacaacgaagagagcactgccggtgcccgaatcgaacggaccttttccctgcccatcaccagatatagaactatcctggcgtctggaatcgaaccagactctgtgccttgctcgtcaatgccctcatcgttgtgtcccggactcttcccgggcgtcacaccttttcgccgcgctggtggggcgcacgtcgtgcctgaaacacttagcttgcacatttccggttgttctgagagcgcatggatcaagggaactctcaggccgctaacgctgcatgtgccatacaacggtcgtgaatattgccgttcacaactggaagcgcactccttcagttacaaaccagtccccacgacggatgaagatggaatgcgctttcagttgtgttgtggtggccggtactga

SEQ ID NO: 185488 - DNA, 633 bp, Klebsiella oxytoca
atgagccttgcagaacgcgtaaaacaaaaaagaatcgaacttggtcttactcaagagcaagcagctgaaaaggcaggaataaggcaacaatcatgggccagcattgaggatggaaaaactaaaaagcctcgcaacatagtaggaataagcaaagcacttaagtgcgacccaacatggttgatgaacggtgggcctttcatggctctggacgatgtgaattcaaggaaagtacctttgatcagttacgtccaggctggggcgttagcagaaaaacaccctattgatgcatttgatggtagcttcgaatacatcatgactgaccttgatatttctgagtttacttttgcactaaggatagaaggtgattcaatggagcctgactttaaagaaggcgacattatcattgttgatccagagttagagcccgttccgggcgagtttgttgttgctaaaaatggtgaaaatgaggctacttttaaaaagtaccgtcctacatttaccgatatttcaggccgccagcaatatgaactggtcccccttaatgacgactaccccaccattaatagctctgaacgcccgttgaaaattatcggcgtaatggtcgaacatagaatttataggcgaaaaaggtaa

SEQ ID NO: 185489 - DNA, 231 bp, Klebsiella oxytoca
atggaatcaatttctcaaagattaaagaataaacgtgaagagatgaatctctcacaagcgcaattggctgaattggtcggaatgacccagcagtcattacaagcgatcgaggcgggtttaacaaagagaccccgttacatcattgaattgtcttcagccctgcattgcgatcctcattggttgctctatggcgagggtgctaatcagaacgatagcgcttcaggggtgtaa

SEQ ID NO: 185490 - DNA, 144 bp, Klebsiella oxytoca
atgcagaagcagctgaatggcttggcgttactgaaaacgcattgtttaaccgcttacgtgccgatggtgatcaaattttccctctcggctgggcaatggttctacagcgtgctggtgggacgaatcatatcgccaatgcgatag

SEQ ID NO: 185491 - DNA, 747 bp, Klebsiella oxytoca
atggatttatctaatcatggatatattgataatataatttataatttttcgacaagaatattggcgaactctgattatgttaaaaacacatttagccgtgtatcatcagatctgaataaagttatctctttatataatcccttggatatgaaatttcaaaaggagatcaatccagatgcttttaattttaaacatgaagtccaagaaagttatgtaatagcagttgttggagcgattactgaagttaaaaatcaaatggaagtacttaaagccctcgctaagcttaatgatacatcaattaaactaagatttattggtgagccaaggagtactgataaggacagaaactattatagtgatctattaaattatgcaaaggaaaaaaatctattgcctcaagtcgaatttactggttttgtttcagatgttagagataagttaggtgatgttaatttagtttgtgttccatcagatagagaaccgcttggtcgtgtaatctttgaaagtcagctatttggaattccagtgttagcatctgattcaggaggtaactctgaactcattgaagatggttcaactggttatttatacgcattgggtaacgtgaacgaactggcaactaagcttttaaaagtaaaagataacaaccatcagcttgctctagatgctcaacaattcgtattaaaaagattttccccagagaggacatatctcgaagagcttaatctttatcatgcaataaaataa

SEQ ID NO: 185492 - DNA, 381 bp, Klebsiella oxytoca
atggaatatagaggattagattttgaagaacaagaatttcacgactgtttaaatatattacacaaagagatagtgtcttttttaaatgaaaataatatggctatggatttttttcaatatccagttgaggatatatgcagaataatttttcgagataaaatagatctgagaactgctgttattttagattttggaattacaacctatgatttaagccctttggcagatcacgatccttttgtttggcgtttgcttgaatggccattatatgattatgagaatttccagtttgtgattgttcaaaaactggcttcttatgaattagataaattaaatgaaataatccaagtagaagataataaagataaaaggaggttgtaa

SEQ ID NO: 185493 - DNA, 165 bp, Klebsiella oxytoca
atggaaaaagaaactctcggtcctgatatacaagtcaattggtgtgatcattgtaaaaaaaacactcgccatatatttagatttactgaggagtattcaaaagaagagggaccaattacagaggttgagtgtactaaatgtggtaatacattcactatcttatag

SEQ ID NO: 185494 - DNA, 1194 bp, Klebsiella oxytoca
atggcgacatttcatatcagctttaaaaaattacgaagatcagaaggtaaatcttcggtttatttatctgcatatcaaaaccgagaaaagacaaaagataatcgaaccggggcaacctgggattattcaaaaaaagagggatttttcggctctgctatcctctcccctgccggcacacctgccgaacttgtgaaggactcaggcaccctctggaatgccgtagaggctggcgagaagcgaaaggatgccgaactatgccgttatctggacatagccattcccaaggagctggacgacggccagaagaagcagatcgtcctcgattactgccaagaaaatttcgtggattatggaatgattgcagacatagcatttcatgatcttgatagtcataaccctcatgctcatgtaatgctaactttaagaactgttagcccaaatggatttgggaacaaacaaagagaatggaataatagagaaaacattgaagcctggcgagttaactgggaaataatagcaaatgaccgattaaaaaaatatggtcataaatctcgtattgactcccgttcattaaaagaccaaaaagaagaggcagaaagaaaggctgtttttgctaaaactccgaaagagaaagccaagtggatttcaaaaaccattgaactggacagaacgccaatgaccaggatacacaggcaccaatggcgaaaaggtcaaaaattaagagctatggagcaaaaagaaaaagcattattattaaaaatagctaatgtaacctacttgcagcaaaccaaaccacctcagccagaggaaactatgaaaatagagaaaaagcctcttgcaaggtcaatcattgataatttaaaggcattatacaaaaagacccagcatatatttaaatcaaaacctaatgtaaataaaaagaaaaaagaagaaaaagaagatcctcaaaatttcgttagtagttatgtaataaatgaatttggcgaacatatattaaaaacagagttagaaacaaaacctaaaacaggcacaggaaccggagccggtggaaataatggaggcggaaaaatgggttcaggctctggaatgtctcctatgaaccaaccacaaccaaaaattgaagagcctgagccggaaccaatgccggaatttgaagatcagcaacctaagaggaagaagaaatttggaatgtag

SEQ ID NO: 185495 - DNA, 855 bp, Klebsiella oxytoca
atgataatacaagaagaacataacatcgatttttttaaaaatcaaatgcctaacaagccttattgtacaaataacctcgatcaggggttgagcataaggaacaaggcaaaagccttagaaatgctgtatttacaggcaaatcagccagccattcaaacttgcttactctttgatttagataagaaaaactcattctatacctttgagaaagaggggttacctatacctcactttattacaaaaacaccaaagacaggtcgctgtcactatggctatatgcttaaagccggtgtttgtaagacacaacaagcaaggttgaagccgttgaagtatgccgctgccgttgaaatggctatggcgaaaaaactcaaagcagatctggggtttgctggattaattacaaaaaacccactcaatgatcactggtcgccgttctggtcaggtgctgacctttacgacctggattatttagctgattttgtggacttagaaaaacctcaaatacaagagaaaaaaagcgaggcttatggtttaggtcgcaatgttaatttgtttgaagatttacgccaatatgcttatagaacggttttaaatttcaaaaaaatatctactttcgagaaattcgaaaacgaactaatattaaaagcacagggtttaaatactttctgcaatccacaaaacccgttacaatacaaagagttaaaagcaacagcaagaagcatagcccgttggacctggaaaaattttgatagccatacattttcacaaatccaatcaaacagagcaaagaaacctcgaaaaacaagtgttaagaatgagatgcttaatatattaatgaccaagggggcattatga

SEQ ID NO: 185496 - DNA, 264 bp, Klebsiella oxytoca
atgatcattaatggtaaaaaaataaaagcaaaagaaataatggaaatgacgggtcgttgtgaaagaacagtaagaaaatatttttcacaacctcgcgaacaatacgaacaaacagcaatggatcgccgccgtcaggcttacgaactacgaagccaggggctgaaatggcaacaggtagccgacaaaatgggctgttcgtatcacggagccgttgccctgtatcgtcgttatgttgccttagatatgcctcaaaacagcctgtaa

SEQ ID NO: 185497 - DNA, 129 bp, Klebsiella oxytoca; identical to SEQ ID NO: 111832

SEQ ID NO: 185498 - DNA, 222 bp, Klebsiella oxytoca; identical to SEQ ID NO: 111831

SEQ ID NO: 185499 - DNA, 246 bp, Klebsiella oxytoca; identical to SEQ ID NO: 111830

SEQ ID NO: 185500 - DNA, 492 bp, Klebsiella oxytoca; identical to SEQ ID NO: 111829

SEQ ID NO: 185501 - DNA, 549 bp, Klebsiella oxytoca; identical to SEQ ID NO: 111828

SEQ ID NO: 185502 - DNA, 276 bp, Klebsiella oxytoca; identical to SEQ ID NO: 111827

SEQ ID NO: 185503 - DNA, 627 bp, Klebsiella oxytoca; identical to SEQ ID NO: 111826

SEQ ID NO: 185504 - DNA, 294 bp, Klebsiella oxytoca
atgagtgaagcaaaaccgcaggacggcagcactgtaaaaggctaccgcacattaaccgcgggcgagattgagcgcatgaaccgcctcaaaggcgtcagccgccacttatgtagtttgcttgataccgagcaaggtgacttgttggctgtccgtaatggcccggcaatgttaagtgctgagcaggctcgggagattgatgaagctttgcgctgtctggcaatcgctcgcaccaaaatgcaggaagcctgtatgtgggcatgccgcgcggtggctcgccctgacgctgattgctaa

SEQ ID NO: 185505 - DNA, 276 bp, Klebsiella oxytoca
atgggcattgaaatgattattggtctggcaactgcgttactggccgttatcgctggcgcatttgggttaggccattcacgcggaaccagcaaggcagaagccaaagctgaacagctgcgaaccaaagagatcgccgcagctaccgtcgccgcggcaaaacgccgggctgatgcaacgaaagaggccagcgatgtacaggaagacgttaagcgtatgggcgatgacgatgttgatcgcgagctgcgcgaaagatttacccgccccggtagtcgttga

SEQ ID NO: 185506 - DNA, 783 bp, Klebsiella oxytoca
atgtttggcccgctggttcttgacctgtttgcagacgagagcaatgcaaaatgccccgcatggtataccgctgaagataacgcattaacacaggactggtccgctcaccttgaagaacttggtggcgcaggatttggtaatccaccgtatagccgttctcagtaccacgaaaaacaggcagtcaccggcatgactcacatcatgagttatgcatctgagcagcgagaaaagggcgggcgctatgttttcctgctgaagtcagcgacaagcgagacatggtggccagaagatgccgatcatgtgtgttttatccgtggtcgtattggtttcgatctcccgacctggtttgtgccggcggatgataaacagaaacccaccagcgccttctttgctggcgctatcgtgatatttgataagacatggtgtggggagcgctttagctatatcgatcgtatagagcttgaggcgaaagggcgcgcaagtatggctttggctgagtttgctgcgggaaaattcctgtcaccagcttcgccagttcagtctcctgaagtgatcatccccgatgctgttgcatcactagctgaggctgaatcccggatctggccactggaagttggtctcgtctttgaacagttacaaggcgcagaggatctggaattctcacagcagaacaagctgaaggcccacattaaccagttgtggctggagcgggtgcccaccagcgaaatcattaccgttgctggtggtcttgtcggcagcatgagggggaccgctcatgcgtga

SEQ ID NO: 185507 - DNA, 1290 bp, Klebsiella oxytoca
atgagtaacatcttccttaaagacagcgtgtttggtgaactaaaatacgaaaatgtctatgagtttttcgaaggtccaaaatttttctcagtgactaatgagataaatagtctctttgttgtttattggttaggggactttgatgacttcgaaaagtggatcatcattcctatatctgctgaacgcttagaatctttggaaagaaaaagaatagatattcgtagcgttctaatgcaccaagaacaaaagaaatactatcagttagatattttttatgaggatgagcgtgttgtagcattggctttagattcgtctgaagtatctaacaacatgactttgccacaaagtggattgtttataagctctgtactgcctgttttagctaatggtaaaataggcaaggcaattgagttttcaacgcatgaaatacatgtggagaaaactaagtcatctacggacccattagtactaagtggtgtttctaaattattcgaatgtttcaataacttatattcatctataattaactcttttgatgaaaaggacttgatgcgaccagtggcgggtcgccctggatcttttgtgctttcttttcaggcagagaaaatgcagacagtagagccgttattaaaagagctaaatgatctgattggtcttaagggtgatatagttagttttattaaaaataataagattgatgttcaaatgctttcggctttatttgactctgttgttaatacaagttcaagttttgaattgaaaaataactatacagatgagattgtattaacggttcgaaaaacggatgctgagttttactcaacagctttggctaagatgtctgcccaggttgttggcggttatcaggtgccccaagcaaatttaattgatcaagtttttaaagttgtagagttaaaatggaaggggatatatctcgatctaattagtacagggttggatactcgccatatactgtactatatacacgcaggtaaaatactaggtttacttaatgaaaatggttcaatctctgcaatgggacaacaattagctgaatctgatcatgaaaagagattaagaattgcggctcgtggttttgaggccagtcattgtggttgggcttggatacaatggagccaggcaaaaaatctttcagagctagatcccacaacggcggagccttttttgtttgatatgtgcttatcgcttagcgataaaactaagaaacgaagagcttcgactttaagacaatggtgtgaagctttgcaaccagcttaccgagagttgtaa

SEQ ID NO: 185508 - DNA, 1014 bp, Klebsiella oxytoca; identical to SEQ ID NO: 5004

SEQ ID NO: 185509 - DNA, 693 bp, Klebsiella oxytoca
atgcctgatgtattatcgatgaacttgtataatgttttgcagaatgtattttttccgttaatgtcagcacatcaggatgataaagagcgtttattaaaaatatataaaaaaggaattcagggcactgcatttattataataccagcgatggttggattgatgcttatagcagatccattcgttcactgcgtgttatcagataaatgggaaggggcaataattgttattcaatggattgcactatcgcgtattatcatcccaattagcgctcttaattgcagtattattaatgcagttggaaggtcagatatctatttaaaaatagacttgctcaaattaccacttacgattggtgctttgttagcaactttctcttttggcctagaagttatagttattggtaatgcaataatttctgcgatatgcttttttattaatgcttattatccgggtaaatggtttggttttggcgcttgggaacagttgaaaaaaatatcgccaattattttttgcacattatgtatggcattgccattatatttcattaaactcgataataaattactggaaatgattctcaaactatgtatgggaccgatcatatacagtgccatgtgttatctgatgaaagttgagacttttatggaaatgtgtacattgtttaagagtaaaattaaaaaggaatcagcatga

SEQ ID NO: 185510 - DNA, 513 bp, Klebsiella oxytoca
atgataacagtatttattgcattgtctgatctcattattaatggcggattctctcaggcactaattcaaaagaaacaaagaacacaagatgatttttcaacagttttctattttaatgtaataatagctgtgttcatttatggtttaatatattttcttgcaccgtatgttgcaaaattttataatcaaatgccattgattgatattctgagaatccttgcgatatctgttattttgaaatcattttgcgttgttcaaaatgctattctatcgataaaattgaattttaaattaaggactaaaattaaccttataagtgcacttttaagtggcactattgcaatttatatggcctataagggattaggtgtttatgcattaatataccagaccatacttttttcacttttagtatctgtattctcttttgcattaattagatggttcccatcattaaactttttaattttgggtctaaactactttttgctagcgtggttagaaccattgtag

SEQ ID NO: 185511 - DNA, 855 bp, Klebsiella oxytoca; identical to SEQ ID NO: 111823

SEQ ID NO: 185512 - DNA, 408 bp, Klebsiella oxytoca
ttgaatgatttagcaaagaaaaacatagttaatctaaatattttgtcgggtctcaacgatcatgagttaaataaatgctataacaaaacgaatctttttatcttagctgcacgtaacaataataaaaaaatagaaggttttggccttgtttttctcgaagctgctaaattcggagtcccgtcaatagcaacggacgtgggggcgattaaagaggtagttaaaaataacgaaactggattcgttgttaaagaggatatccacgaattaaagaaagccatatacaactgttatatcgatcgagatatactgattgagtttagtaaaaactgcgtctctaatgtgaaagaatttaaatggtcgactctggcaactaaaactttttccaaaacttatggttcgaaaaaatga

SEQ ID NO: 185513 - DNA, 444 bp, Klebsiella oxytoca
gtgaaatacggctttgttgcccagcgcattgcagatctgactcagaagtttgatatcaaggccatcgccttcgaccagtatcgcattaaatatcttgagccggagcttgaggaagcatctgtttctgttcccttaatccctcatgggcaagggtattacaaagcgaaagattccgggctgtggatgcctcactccatcgaattgtttgaagagttgcttgatgacagcgtcattatcatcaggacgaacccttgtcttcgctggaatgcggcttcagcagtgacggaggctgatcagaaagaaaaccgaatttttgccaagaaaaaaagtaccgggcgtatcgacggcattgtagcgggcgctatggcaatcggtgcctccgaaggctatgaggatgattctggcgatatcgacgactttttcagtaatcccatcattgtgtga

SEQ ID NO: 185514 - DNA, 426 bp, Klebsiella oxytoca
atgtttggtatttttaaaaagaaagcccgtaaagccgttgttgaggtgaaaaaaatggaaaaccgcgatgccgtagaagccacggtctggggagcgtactcgattgcatacgctgatggtacctgcgatgcaaaagagattgcagtgctggagaagactatttcggccctcccggcatttgcgccatttgctggtgaaattgcccagatgagctcgaatattcgcgctcgctatgaagcatcaccgcgttcagccaacgctcaggcgctgcgcgaactggctgacgttgccgggacggatgacgctgtcgatgttctttgcctgtgtcttgatgtagctgataacgacggcatcggggaagaagaagagaaacagctgaagaaaattgcccaggctctgcaacttcctctggaccagtacctgtga

SEQ ID NO: 185515 - DNA, 405 bp, Klebsiella oxytoca
atggcctatgacttcaaggaagccttcttctgcatctacgacgaacccgacaagcagagcgctcagaacgcctttgaggcttgggagaacagcctgccgccttatggcatggagcctttcaaaaaactggtaaaaacggtacacaaccattacgacgacatctttgcctactgggatgcgccgttctcaatcaccaatggctataccgaagggctcaacggcttgatcaagatgtccaaccggttaggtcggggttatagctatgagatcatccgtgcaaagacgttgtactccaaagaagcccgcaaggttggcagtggtattcgagcaggacgaggcaaggtcgagtatggaccgcacattccgacattgttgaagcaggcagaaggtggagagttggattaa

SEQ ID NO: 185516 - DNA, 255 bp, Klebsiella oxytoca
gtgggtgccgtcgtcgatctcaaagtcgcgacgttcgctggccagcatcaccaggtcggcatatttaacggtcgggtgctgctcagccggcaggccgaatttttggcgaatagctgcatcaacctgatcttcaatggcgcggtagtcaggaaggaggcgtttcaatggggcagggatatcttgcaaatatgcctcggcggcgtcatgcagcagcgcttcaagcgcaaattcttgaggcaccagatagctcgttaa

SEQ ID NO: 185517 - DNA, 291 bp, Klebsiella oxytoca
gtgcacagcgatcagggcagtcagtatggcagtgatgactggcagcgattctgccgggccaataatctggtaccgagcatgagccgtcgtggcaactgctgggataatgcagtggcagagtcgttcttcagttcactcaaaaaagagcgcatcaggaagcggatatataaaacccgggacatggcccgggcggatattttcgattacattgaagtgttctacaaccgtaaccgccgccacagccacctcggtggcgtcagcccggaggccttcgaaaaggcctcgccgtga

SEQ ID NO: 185518 - DNA, 399 bp, Klebsiella oxytoca
atgttcaagatgattactgcagtatccgccgttgtgttgtcttttaccgctagtgcagcgcagttacccgaacaactgatggataaagacaatccgggcgagtcgtactggtgtcaggggaacgatatcaatagctccgtctgctcgctgaccggtgtcagtgacgaccataaatttgctttgattcaggactggccgggcactgcctgtgctgataataattttggtgttatcgacctggtacatgagactggcattaatgtgccctacgatggcggtgactgtcagggtgatgtgaaggccagtttcgtgcgtggcacgaaggataacggcctgtatgtgaagattgtcaggggaagtaaaacgttgctgatgtataaagttaaaaccggatactga

SEQ ID NO: 185519 - DNA, 438 bp, Klebsiella oxytoca
atgaaacgaatgttcagaatgatactgataaccagcagcctgctggcctgttcaacgttgcaggctgcgccctataaccgggtattacctgctgcggtaaacaataaaagcggcaatattttctggtgtgatgcacaccgtcaggtcacagggaaatgtgaggctatgtttgctgatcgaagcggtggaatggtgaccgtacgttccgcaccgcgcaaagactgcgagggtggattgtggggctggataagcatccggcgcgatgaagcatcaaaaggtttcaccattacaccagaccagaaatttggtgtcaccgtaaaagacctgtgccgtcccgggacgattgccacctttatgcccaatcacaaaaagccagattacgacgacctggtggtgctgtaccagggtaaagagctgttccgctataagcgcttttaa

SEQ ID NO: 185520 - DNA, 537 bp, Klebsiella oxytoca
atgaactggcattacgagaaaaatggcatccgccacgacggtatcaccgaagaggaaatgacggagcgtgttaaacgcggcgaacttaccgcatccacactggtgtggcagccgggaatgacagactggcaacccttatccaccacctcgctgacggccgcgctggcgcattgcatcacaccaccggcattgccggggcacagcattcagggtggtgtcgtctggacactggcttttgccccgttcattggctacgcgcttgaactgtggacggcgggactgagcggtatggattttgaggaggcgtatgacgccgtatcgagtgggcagtactggtttatcacactactgttcaatatcgccttgggttacctggatgaaagacgcctgcgtaaggctggggtggagaccgcagccttcggcaagctggcgtggctggtgccgttctatctctggcgacgggctaaatcactggggcagaaaccagcttatttctgggtctggctggtgatgctgttcctgacgctggtggcctga

SEQ ID NO: 185521 - DNA, 711 bp, Klebsiella oxytoca
atgacacaggcagaacgtcgccatgaccggctggcggtcagattgtcactcatcatcggtcgcctggtggcgggcgaaactctgagcgtgacgaagcttgccgccgagttcggggtgtcggttcgcactctgcggcgggattttcgtgagcggctcatgtacctggacctggagtatcgtcaggggctctgtcgcctgcgcactggaggtaacggtgcgcagggtgaactggatgtgctgacctttgctcaccgcaccggtctcgctgatgtatttccgggctttgaccgcagactggtcagtgccctgctggcgtcggatgatgcaccctgtctggtgtggcaactgccacacggggtgagtccttccggctcactggtgttttaccgactggtaaccgccattacctcccgccagcgagtgacgctgctggccgaggggcaacgctgtgagagcctggccccgtaccgtctgatttcgcagtcaggttgctggtatctggctggtgagtttcgggggcatatcacggtccatccgctgacagatattcacgccgtcacagtgctgaacaccatttttatacccagaaaaaccatcagccagttgaccagtcagcctgctttcatccacgcacttcctcactttagtttcattcgcgaagccctgttactgacctctcctgacagaagctcagcgggcagtgctgcttaa

SEQ ID NO: 185522 - DNA, 819 bp, Klebsiella oxytoca
atgacccgtctggcttcgcgctttggcgcagctaatgttatccgtcgtgatcgcccgttaacccgtgaagagctgttccgcgcggtgccgagtgttttcagcgaagataaacacgcttcacgcagtgcacggtatacctacattcccacaatttccctgctcgacagcctacagcgcgaaggctttcagccattctttgcctgtcagacccgtgttcgcgacccggaacgtcgcgagcacactaaacatatgttgcgtctgcgccgtgaggggcaaatcaccggcaagcaggtgccagaaatcattctgctcaattcgcatgatggctccagttcgtaccagatgttgcccgggctgtttcgccaggtttgccagaatgggctgatttgcggtgagacatttggcgaggtgcgcgttccgcataaaggagacgtggtgagtcaggtgatagaaggggcgtatgaggtgctggggatttttgaccgggtagaggaaaagcgcgatgccatgcagtcgctggtgctgccacctccggcccgtcaggcactggcaaaagccgcaatcacttatcgcttcggcgaggaccaccagccagtaaccgaggcgcaggttctgactccccgtcgttacgaggattacagtgatgacctgtggaccacctatcagcgtatccaggaaaacctgattaaaggcgggttaagtggtcgtagtgcaaaaggtggacgaacccatacccgtgcggtacgtggcatagatggcgatgtgaagcttaatcgagccctgtgggtgatggcggaaaacctgctcgagcaactgtaa

SEQ ID NO: 185523 - DNA, 864 bp, Klebsiella oxytoca
atgaacagttctgaaggtctgcagccgctgcagaactcactttctggcttgcctcaatggatgtctgaacgcattctgcaccaagtaagccagctaaccagctatgaaccggtgatcggcattatgggcaaaaccggagcgggaaaatcgtcattatgcaatgccctgtttgccggagaggtatcgccggtcagcgacgtggcagcctgtacccgtgaaccactgcgttttcgttttcaggttggagggcggtttatgacactgatggatttgcctggagtcggggaaaatggcgcacgtgataccgaatatgctgctctttaccgtgaacagcttcctcgcctcgacttggtactgtggttgatcaaggctgatgaccgggcgctggcagtggatgagcacttttatcacaaggtgattggcgaggcataccggcataaggtgctgtttgttatcagccagtcggacaaggctgagcccaccagcagaggagaacgattatccacagaacagaaacaaaacatcagccgtaaaatctgcctgttgcatgagttgttccagcccgtgcatccggtgtgtgccgtgtcggtccgtctgcagtggggactacgggtgatggcagagcggatgattcgttgtctgccgcgtgaggcaagcagcccggtagctgcacagctcagtgtgccgcttcgtactgataccattaataaaaaagcctgtgacgattttggtgagacggtcggctcggtgctggacgcagtaagcgctatgccactgataccggccccggttcggacgatcatccaggctgtacgcgacactgtagtatcggtcgctcgtgccgtctggagtttctttttctga

SEQ ID NO: 185524 - DNA, 1182 bp, Klebsiella oxytoca
atgagcgagttaagttatctggaaaaactgttagatggggctgaggtagagtggaaagctcttggagatgtcacgagcgttttacggggaaaaaggttaactaaaaatctgctttcagcagaagaaaaattcccggtatttcatggtggcttagaacctttgggatattacaacaagacgaatcgtccggctaataccgttatgattatcaatgttggcgcttcagcaggtactgttggctatagcaccgttgacttctggtcctctgatggatgcttttgcttagagcacaataagttgttaaataataggtttttatatttcgcactgattggttatcaaagtcagctgaagtcaaaggtgagagtcgcaggcattccaactcttgatgcaatagtagttaataaactacttatccccattccctgcccggacaatcctgaaaagtcccttgccatccaggctgaaatagtccggatcctggatacatttactgcacttaccgctgagcttaccgctgagcttaccatgcgtaaaaaacagtacaactactatcgcgaccagttactgagttttgaagaggatgaaatagagttgaaagcacttgataatgtttgtgctttaatctctgctggcggagatgtacctgaaaatagtgttaaaggtcaggtaaaaccaactaacgaatatccctatccaatctacgctaacgcaacagatgaaaaggggttatatggatatactgaatcgtacaaaattgatagcgatgcagtgacaatttctgcgcgaggtgcaaaagttggataccatacagtcagagacgcgaaattcacccctattattcgcttaatagtattagtcgccgataagaatttagtaagaacacgatatcttaattatgttttagatatgacagctatcgggggcactgatgggggaatcccgcaacttacagttccgatggttaagaaaattaccgtcccaattccttttgcaagtaatcctaataaatcgcttgcggaacaagatcgtataatcgcaatcttagataagttcgaaatcctgactaattcaatcagcgaaggccttccgcgcgaaatcaacttgcgccaaaagcagtacgaatactaccgtgatttgctgctcagtttccctaaatcaaatgtacaggaagtcgcttga

SEQ ID NO: 185525 - DNA, 1317 bp, Klebsiella oxytoca
atgagccagacactaacgcagatagcccaagaactaattgatgccaataaaaaagtacaactaatctatgcttttaatggtacaggaaaaacacgtctatcacgtgaattcaaagagcttattgcccctaaaaacattgatgatccgaacagtgccgaggccgaaccatcacgaaacaaaattctttattacaatgcttttactgaagatttgttttattgggataatgatttagattctgacgccgatcccaaactaaaaatccaaccaaatacatttactggttggcttattacactactacaagagttgggagaggatggtaatatcactactaacttccagcgctatacgagtagcaaagcgacgccaacgtttaatcaggaatacgagcgtaaaaccaaagatcagaatagcaatgagatcgatgtcacaatccctgcattttctgaagtaacattccatgttgcaaaaaatgatccctcagcacctgaaactcctgatgaaattacggaagataacataaccgtcgttcagggacagtacgaaaagataaaaatatctaaaggagaagagagtaactttatttggagtgttatatatactttattagagcaggtaatagtaacgcttaatgaacctgatattacaaatcgcataaccgataagtttaatgaattagaatatgtgtttattgatgacccagtgagttcgctagatgatacccatctgatagaacttgccgttgatttagctaaattaataaagattagcacatacactgaaggtaatggtttaaagttcatcattacaacccatagcccattattttacaatgtattgtataacgagttgaacaacgatcttaaaaaattcaatccagatggaagttcaacatggatctataaacgagggcagtctgaaaaatatagattatataagcagggtgatggtacttatgagcttaataaatctaatgatcatcctttctcttatcatttatttttactgtcagagatttgcaaggcaataaacgcagggcaaattaaaaaatatcactttagttttttaagaaacattttagaaaaatctgccacattcttaggccatttacgttgggaggatcttcttgacaaaacagctgaaggtaatcccaatccattcgcgagcagaataatgaacctttctagccattctgctcatgccggagaagaaattgctgatattgaagagtcagacaaggaaagaatgaaaaaattagtaacgtatctgattaatacatatgggttcaaaacccaggatgcattaaatgactga

SEQ ID NO: 185526 - DNA, 3114 bp, Klebsiella oxytoca
atgactgattacaaaactatggcagaatctaatagctttatcattcttgataaacacaccaaagttcaggataccagtgacagctaccagaaagaggctgacctagagcgtgaaatgattcaggaccttcgcaatcagggctatgaatttcttttcgttaaatcgcagacagcaatgctagccaatgtgcgagaacagcttcagagcctcaatagggtggtgtttaacgaaagcgagtggcgacgtttcaccgagcagtatctggacagcccgagtgacagcagcctcgacaagacccgtaaaatccacaccgactatatctgcgacttcacatttgatgatgggcgtctggaaaatatctacctgattgataaaaagaacctcatgcgcaaccgggtgcagatcattcagcaatttgaacagacaggctcacacgctaaccgttatgacgtcacgattctggtcaatggcctgccactagtacaaatcgaactgaaaaaacgcggcgtagcaatacgtgaagcctttaaccagatacaccgttacagcaaggagagctttaacggtgacaactccctgtttaaatacctgcaactgtttgttatttccaacggcaccgatacccgctactttgccaacactacaaaacggaataagaacagtttcgacttcaccatgaactgggcaaagtccgataacaccctgattaaagacctgaaggactttactaccacttttttccagaagcataccctgctcaatgtgttgtttgactacagcgtgtttgacagcagccagactctgctagtgatgcgcccgtatcagattgccgccaccgagcggattttatggaaaattaacagctcctataaagccaagaactggtcaaccccggaaagcggcggttttatctggcacaccacaggttcaggtaaaaccctgaccagctttaaggccgcacgtctggcgaccgaactggacttcattgataaagtcttctttgtggtcgaccgtaaagacctcgatttccagaccatgaaggagtatcagcgcttctccccggacagtgtcaatggttctgacaatactgcaggccttaaaaggaatctggataaagacgataacaaaattatcgtcaccaccattcagaagctgaataacctgatgaaagctgaagctgacttaccggtctatcagcagcaggtcgtcttcattttcgatgagtgccaccgcagccagttcggtgaggcccaaaagaatctgaagaagaaattcaaacgcttctatcagtttggcttcaccggtacccccattttcccacaaaacgcattaggcgcagaaaccaccgccagcgtgtttggccgcgaactgcattcttacgtaattacggatgcaattcgtgatgagaaggtgctgaagttcaaggtggattataacgatgtccgcccgcagtttaaggcgcttgaaaatgaaaccgacgacaagaaactcacggcagctgaaaacaatcaggcttttttacatccgcgccgtattgaggaaattacccgctatattcttgctaattaccgtcagaaaacccatcgaactttccctggggcgagagggttcaatgccatgctggcggttagcagcgtggatgcagccaaagcctattatgaaacctttaagcagttacaacatgggcccgataatcacactgacgcccgtaagccactgagggtggcgaccatcttttcattcgcagcgaatgaagaacagaatgcggtcggtgatattaccgatgaaagtttcgatgtcagtgccatgaacagcagcgccaaagaatttcttgatgcggccattgacgactataaccgtcatttcaaaaccaatttcagtaccgacagcaatggcttccagaactattatcgtgatttagcgcagcgcgtgaagaatcaggatattgacctgttaattgtcgtgggcatgttcttaaccggcttcgatgccccaactctgaataccctgtttgtggacaagaatctgcgctatcacggcctgatgcaggcattctcacgtaccaaccgcatttatgatgccaccaaaaccttcggcaatatcgtgaccttccgtaatctggaacacgcgacgattgacgctatcacgctgtttggcgacaaaaataccaaaaatgtggtgctggaaaaaagctacaaagagtacatggaaggctttaacgatatcgtcaccggtgaagcgaaacgtggttttatgactgtagtctcagagctagagcaccggttcccagacccggcgaatattgacagcgagaaagagagaaaatccttcgtgaagctgtttggtgagtatctgagagccgaaaacattctgcaaaactatgacgaatttgccacgctaaaagcgctccagaagatcgataccagcaacctggaggcactcgaagccttcaaggccgagcattatctcgatgatgagaagctcgctcaattacagaccattcgccttcctgccgaacgcaagcttcaggactaccgttcagcctacaatgacatccgcgactggcaacgacgcgaaaaggcagcgaatgataaggataactcaaccaccgactgggatgatgtggtgtttgaggtggatttgttgaagtctcaggagattaacctggattatatcctcggtctgatattcgagcataacaaacagaataagagcaaagacgggctgaccgaagaagtcagacgtcttatccgctcaagcctgggcaaccgagccaaagaagggctagtcattgattttattcagcagacgaacctggatgaactgccagataaggctgggattattgatgcgttcttcgcttttgctcagcgcgaacagcagcgtgaggcagacgcattgataaaagaagaaaacctgaatgaagaggctgccaaacgttatattcgtacgtccctgaaacgagagtatgccaccgaaaatggtactgagctaaacgagacgttaccaaaactcagcccgttaaacccgcaatacaaaactaaaaagcagtccgttttccaaaaaatcggcgcgttcattgagaaatttaaaggagttggtgggcagatttaa

SEQ ID NO: 185527 - DNA, 1341 bp, Klebsiella oxytoca
atgggaactgtatcctatcaggtaaaaaaaacgaggatgctgctagagcagcgcctcgctattccgtcataccagcgcccctacaagtggcaacaaaaacacgtcaatcaactaattgatgatgtgttaacccaccgaaataaacagagctaccgccttgggactgtggtgttgcacagggataaattaaagccagcttatgaaggtgagctcgatatcgttgatggtcagcagcgccttctgaccttaaccttgctttgctcagtgctcgatcagagtggtgagttttcaacgcctctgttggaacaatcttttgcttcaaggactagcatcaataaccttgagcacaatgccaaagtcattgagaaccgccttgtgggactaaatgataacgagcgcaaatcactacttcacttcgtgtgtaacaagtgtgaactgatcgaagtgacgctcgatgatttgagcgaagcctttcagtttttcgactcacaaaatgccaggggcaaggccctcgcgccccatgacttgctaaaggcataccatttgcgcgaaatgatggatgccacagagcaagcggaacgactacatcacgttagcttgtgggagcagggtgtcagtccggatgatgaatccgctaaccttcacctcattatgggcgagtatttgttccgcctgcgccgatggctggatggcgattatggcgtgcagttcagccgccacaatcttgaggtgttcaaaggtgtcaacctctccacctctgattaccactatctgcagtctctgctcgccctggattttgcagttgagcattacaataacgaccctatcaggaagtgggacaagcagaataaaccttatccgtttcaagttaatcagttaataattaacggaaagcgcttttttgagtatatccagcactacaaatccctgcatcacaccctatttgaaggtgacaacgcgctgcttggcaatttcttaaaaaaacatacccgttacgctggcagttcacgcaaaggggatatgtatattaaaaatctctttatgtgtgcagtgatggcctattacgataagtttggcgacaaagaattaattcaagccgcaacaatctgtttttgttggagttactacttgcgcttgcaatatcaaaaaatcggcatggacagtgttgatggccatgcgcgtgagccccgaggactattgagagtgctcgataaagcgatccacccacaacaagtcctgcgctttcagccaaagcgttgtataaacattcgttttcaaaatgccaaacccgtagaagattcaatcgctcagatgctgggagatgtagatgccgacgagtaa

SEQ ID NO: 185528 - DNA, 1899 bp, Klebsiella oxytoca
atgccgacgagtaatgatttagccttgctgaccatcgaacagttattcagcgctaatagccattatgttatccctatttatcagcgtaactacgcctggggcgcgcaggagattgaacagcttattcgggacattgcagatgctgctgaagcccttaaaaatgcagggcaacaggaagacacgaaatactatctgggcagcttggtggtatatgtcagagatggcgctgatagcgcacaccaaggcgtaatagtctatgaaacgattgatggacagcaaaggtacacaacgctgtcgattttgctcgcatacttaaaaaaagttgcttgttgcagcgaacaagatttatccccgcttcaccttaatctcgactttgacagccgccctaaatcagcccgaacgctacataagctgtttcaacaggatcagagcaatgatcctgaagaaccctcaatccgagcggcgtttactattattgaacgctactttgagaaagaggacatagacaccaacaacttttgccgatatctactcaaacacgtcactattttacgggttcctgtgccaacagagactgatctcaaccactactttgagatcatgaataaccgtggtgaacagctagaaaaacacgaagtgttgaaagcgaatttgatgtcagtttacaacggtgatactgccgcaagaaacggcttttctgccatatgggatgcctgcgctgatatgaaccgatatgtgcaattgggctttagcccagagactcgcaaagcattatttggtgaacagtggctaggattccctgccgattttgaggcgatcaaatgtgctatagatactaatcctgatacacacgaaaagccgacgctacgggaaattatcgaaaggcgacgctttcatcacactgatgacaacgatgaaaaagcaaaagagcaacgttttgattcgattatcgatttctccaacttcctactgcatgtgctaaaagtgacagtggataatgacgtgtcattggacgataaaaaactacttcaggcatttgaaatcataaaaaatgaccgaaaaaaaatcacccagtttgcttttaacttgctgaagtttagagtcttatttgaccgctatatcattaagcgcgatcaggctgagaagtggagcctgctgacgcttgagtactatgccagagacaggaattcgagctttagctataacaactctttcgatcaagatgaactgtctggtgtaaataaacaactagcgatgatcttgtcgatgttccatgtctcccaccctgcctatgtttacaagcgatggctcaatcgctcgctggccattttgaatactctggctttgggtcaactgaacgttgacggagcggcttacctcagagagcttgagcaactcagccatgagtttttggctgagatttgtggtgaaaaggagcaattcgatgcagaggctctgcaccgtggtaccggtgtgcagaactttgtgttcaatttgctcgattatcgtttgtggcgtgatcttaatgctggccaatcatttgatggtaaagggcttaataatcccgagattaaaaagcattttgacggcttccagttttcaccgagtcgaacgtcggttgaacactactttcctcaaaccgatccttctggcgcaaaccaaatgggggatgatgtccatcgtttcggtaacctctgcctgatctcaccaagcagcaactcgagacttagtaattattcgccggcagacaagaaaaaattctacgtcgaaacagagcgagcagagagcttaaaacaagcaatcatgatgagctatgaggagtgggggccggagggacaaggctttaaaaacatagcaagccatgaatacgcgatgctgacgttgctcaggagacattga

SEQ ID NO: 185529 - DNA, 1575 bp, Klebsiella oxytoca
gtggccgggatcggccctctgagcaaaggactggtgagcacattgttaagtttaaagattttacgcaaagcagtttccaggctgatatttcgcctgctggcggacaaacctctgcccacgaaaacccccggcgaaaaactgcatattcttctgcttcgctgggatgcaaaattgggcgactccatcgtatcttctttcttttttcgcgaatcacgtaagctcaatgcacgattgactgtacttacggttaacgagttagctgaaatgcataccaacaccttcggtgtggatgaagtcatcgttacgaatccgcatccagggcttggtgaactacgcagattggtgaaccaactaagtaatgtcgatgtcgttgttcatctggttggacgactgcaacctgccgaaatcgtttttatgcggttactccgcccggcgagtctctattcccttgatgattcactgcgctgtgtgaatcgtaaaatgggttttgctgcaaacacgctcaatatcgtggagcagtacaaatatattctgcaggatctgggcgcgaaagtgatcgacacccagtacattgtgccgttgcctgccgagctcccgcctgcagcactttccccccaaatactttttaatccttatgccagccgaagagacaaggggctatccccttcccgtgcaaccgcagctctacaagctatcaccgacgagtttcccggccattccgtgggaattctttgcagcccttcaacgctgcacagcgcacagcatctggaaaacgcagttgcacgcgataatgtggcagtcttgcacgacgggctaacgcccgaaaaggttgcaggctatattcgccgcgcgcaggcagttgttagtgtggatactgccattgtgcatatggctgttggcctgaaagcgaagctggtggcgatctacccgttgattgcaggtcaacacaacccatggctgccgcctcgctcaccttttacacaagtgatctacagcgaacaacagccagacacactccgtcgtacgggcaaaaaaaatatggatgctttttcgctaacgtcattaatgaacgcattgcagactctcttaacgctgccagcagaagcgaaaaacagcatgtcgcttaacgccagaatcatcccagggctaggggtagcgacgggcacgctggcgcgacaactgcccttaatctgtgaaaaatttcctaaagttgcaggctgttatgccgggacgatcaaccttgaattcagcgttcctgtcgcagtcgtgcggcccgatcaccgtaccgcgccgctggcctggactcccagtggacgcaccaccgagatattcgatctactgcgcattgaacttgaattcagccatttaactgaacgcatccccgcatggctgtatattgcccacagctcgccacaccgccggacgccgaccattcacgaagcaatcgcgccgcgtattaacctcaatggcgccacgcactgtcgactccacttacccgctgaggctatcgtactaggcgaaagcggtactcaggcaacagaagctatcaatttgtcactttcatcaacccagtaa

SEQ ID NO: 185530 - DNA, 792 bp, Klebsiella oxytoca
atgacgtccgacactatccattacgtcagttactgggaaaacgcaccgggtcagaccatgccggcttatgttgccctagcactggtttctatgcgcagagctctgggcgatcgttttcttctgcttacgccgcgaacggtaagcgagcacatcgatgctgacatcatgaataaagcttgggcttttgaaccgctgagctttacgctggcgaacggcattgaagctattgtggcgaagagcgatttcattcgcatggcgtttgtacatcgctggggtggggcatggttggatgcggatacgttgctgtttagagatccgagtgttgagttatttccgacagggctgagccataaattgcactggcatagcgagtgtattttcgcgtccctgccgggaaaccccatacttgcgcaagccttagctatagggcttgagagcgagaatcacgcttggggtaatcctgggagaatcaaaaatatcattgcccaggctgccgatgctgccatcccgattggcggggaggtcatcgatcccggataccgtcctctttacaactttgctggttgcgaggtgatgcgtcgcaccgatattgccgtcggggcatttttgattaacgacgtggccattctcaaactttacaacacctatttccggcgtaccgaagcccggagagaaaccgtggctgaattcctggcgggtggctcgctgctggcaaaactgtttttgcatattgaggcgaatgcggattactgggttgatgaaagtgacaaattgatagcttctgttgcctga

SEQ ID NO: 185531 - DNA, 1131 bp, Klebsiella oxytoca
atgaatggactaaaaaccccgcattcacttgcgtggaacacgttgcacaacgaaccgctcgcaacccagttggcaatgtttcgccaggccagtgcacagatcaatgcgcaggatgttaaatccggttttcgcgcgttcgcgaccgatttgctggcgcgcggtttgatcgacatgtccgattacgtcgctatttttggtggtaaggcgctgcattatctgacgccgaatgcgactggatcattttgcgatatgcgcaccggtgctgacgctacaacattggcgggcatttatagccgtgcgaaatatggcggagtgagcgagatacgctatctggcacggtgcgttatcgactatcttgccgcagaactggatgacacctcttcttcatggtcagggttgttttgccaggccaaagaggagggagagagtgttgtgatgatgaccacgggctggcgtaatgtgccttccacggccaatgtgctctacgatctcgtggttgaggaaattaatctcacgttggcgcataaaggattgcccaccattatcaacgttaaactgcccaggattgcgccgccgtgtgaaaattacgctagccttagtcaggccgagcgcgatcgggtcaatcttgtgcaggatcatgtgattccagcggagaatttttaccgctggagcggcgtgcatgtcattttcggagatgacgtgctggtgactggggcaacggcggacaaagtgttgtatgaatcgctgtgtaacggcgcccggtcatttcgtgccatttacccagtggcgctagatccccgggtggcattaactgatgcgtcggtggaggatcggctgaacagtgtgagcgtaaagcagcatttggatgaaaacgtcgcgcaactgctctctgctccgggctatcagcccattctgcgtgcgttgcgtctgctatttggcgaagacaaccggggtagtttaccggctttcctgccaaatgtgccggtgcttacctggcttaatctttataaatcagcgttaaataatgagtttttggctcagcctgcatgcgcgccatcactggtgatgctcagaacatatctgatgcaaaatgggctgttgtgtgcgaaaggtaaggtgctggtgaaatga

SEQ ID NO: 185532 - DNA, 846 bp, Klebsiella oxytoca
atgattgattcgcactgccactcgttctactcgaaacatgctgtaggtaccatcgacgaacttgtttgtgcctcgattgctgcgggggtgacggtactcaccatcactgatcatgctccgttcccggtggatgcgcagaaccgtttgctggaatcggaactggagagctatttcaccgatattgataaggcgcagcaggcctataaaggagagatcacgctgctacgcggtctggaactcgattatatgccgggtactgagcgttataaccggcaattacttgcccgctatccaatggattttgtcatcggttcaattcactacgtcactgttgccgatgagccgatggtgaaggtctgggaactgccccggttagcggcagactcctttctggataagtactttgctcagcttgaagcgttgctggaaagccggttgtttgatgcggttgggcacgctgacacgctactgcgcgcaatcccagaggatgtgtatttgcgtcgctttgaaccgttgattgcgccgctcgtacgcagcggtattgcatatgaactgaatgcttcgggcctgcgaaaatccagccttgatcctacgacgggtaaagaaattgcaggaagatggtcctatccttcccgagctttgctggagaaattactgaggaacaatgttccattgaccatcggatccgatgcgcatgatcctcgtgatgccggagcggggatcgccgagttggtggaggtcctcaggccattagggcttcaatccatcagctattatcagcagcgtcaacgcattgatgttctgttggatgaccttcaatttcacactgtgccagcgtctcgctaa

SEQ ID NO: 185533 - DNA, 1029 bp, Klebsiella oxytoca
atggatttacatggtcatttgctttatgtggatatcacccagatctgcggcatcggctgtgcgttctgcatgtatgcagataagcacgtaacgggtaagagtatggtgctgtcaacgcaggcacgtgacaacctgtcggcgctcattaatgatccatctgtaaagcgtatttccgtgagtggcgaaggtgaaccgctcaataacattcataccttttatgacttactggcgttgtcccgagggggcaacagctttgagtttattaccagtggtttttttcgccatgagaagatggaaaagatctttgatgagattaatcgtcttgtctccgccaatggtgatacctgtaatattcgcctgagttcagatagccaccatattgaaaaagtaaaatggcgtgcacatggatttagcctggattatgttcagcgcaaaaaaccgtcatcgctcagtttttcatttcgctcaattgatatcgatcgggccttcactcgcgaatatctggtgagtgaactggcctcatggggaattaacgccagcataaagccagtcagcgtactggaagacaaattattaataggtgcggacacgtttaacatcgactacaaaaatctggttcatccggcaagagatacgccggagggttatctggacttacagggatatattgccgcgattgagtccaaagtggataaaccttttacctttggcagcctgaaccgtgcaccccagcccaatggcatggacgtgacaattaaacccaacggcgatgtgtttctgtacggtattgagaccgagcgtgttgcaaatatccattctgatgcgatcgactggcatcatctggcgagccatgtgcgggagaatcccttgtcgcgcgcgttatatacccagccgttaaccgaactgctggcgcggctggaagacaccccgcagcttcgcgcgatcatcgcgaccgccaataatccttactggctggtcaaagagatggggaagcattccgggttgcttgaacaatggaaggcagcatga

SEQ ID NO: 185534 - DNA, 1587 bp, Klebsiella oxytoca
atggacagaaaaacacttttattgcgtctgaaccagcagcgtcaacgacagacaagagagctcataccatcaccaacaaaagagggcgttacagtatccgatgtcagtgtttggcaggcacatcagcaagttcggcagtatcaacagaagtggcgcacggaacaaacaacattgatgctggctgagtgccgacagcgtcttctgcatagcattattggtccgtttgggctggggagtattgtctctgcatgggacaaggtgggggggaatgtcgataccattcataatgttcgcaccggggtgtacgccacggaagatgagcaggggcgttacgcaagccgtggtgagtacaacagcggtccgtaccataagcacggcaactacaagaagaccaatgccgaaaacagtaagaaacaggattcaggaaaagctgttgatgcctataccgggcagacactgagcagaaataccaaagcgcagcaggatcacctagtttctgccaattctatccataacgatcctgcggtctggctggcggaggctaatggtgcggatctggcgaaccacaaaaccaacctgcatcaaacgcaccactcgatcaatgaatcgaaacagcaaaagagcgcagaggagtacatcgcctggttgaacaaaaaccgcgccgatcgcgattcccaaattgcccggttggaagagaaagccaaaaatgagcctctgagcaaaaaagatcagaatgcactggagaagtacaaacagcagaacgccgtcgatcaggaaaaattgcgcgagctggatgaagtggcgcgcaagcagtatgaaagcagtcttcgttggggctactacggtagtgcgaaattcggtacatatttactgaaaaccagcgctgtcgaagcggggaaaatgggcctacagcaggcgattggcttagtgttgacggattttgtcgacggcctgttgttggaagttcatgacagctggcataacgggttttgtgatggggtggaccaggagcatgtctgggaggcattaaaaatccgtgctgggcgggtggcaaagagctgtctcgataactggcgcaacgtgctaacggcttttcgtgacggggccattagcggaataattagtaacttgatgacaacgctgatcaacaccttcttcacaactgcccgcaacctggtgagaatgatccgcgaaggcgttttttcgctgttccgcgcagccaaaatcgtactgatgcgaccagaaggtacaagccgtgccgaagcactagatgcagggctgaagattgccgtcagcggcgcattcgtcattggtggcgtactgcttgaagagtacctcagcaaaactctcggtgcactgtttactgttctgcccggtgggctgatcactaccctagtggctgtgctgacggggtgcgtcaccggccttggtaccgtattaacggtctatatgctcgatcgattagatctgtttggcgcgcagcaccagcaggaagacaatgccgtactaacgatgttacaggacggtagggcgcaggccgatgcgcgtttacaggctttgttgggatcggacccggaacctgtataa

SEQ ID NO: 185535 - DNA, 1215 bp, Klebsiella oxytoca
atgatgagtacaggtgatagtcaactgctgccagtattaagcaacgcaacggatagcgaattggccccgctggtggaatacatcacgaaggcgttcagcagcggcattgagagtaaagcacgttataaaacccattatccggcacacagtcagtatgcagatctgattgcccatgagctgtgcgagtttggtggcaataccgtcgtcaatctgtttcgcggcggtggccctgagtggaaaaccgtggtgatcgatgtggcggacaagcttgacgcgacgtacgagaaggactggggcgttgaccgtatcgaactggctgtgctagcggctattactcgcaaggcttggtcggatatggaccaagctcaacgcaaaaacctgcttgaaaaaatggatcttactcagggtagtacgatgcttttcccagaagcaaaattaatgacgcagttgcagtctagccgcttctcaagcttgctcttggcatcgttaattgccaacgtctttgccagccaactgctcggacggacggtggtgatgtccgcagcctcgtttgtggctgcgcgaggggcagcttctttcttggggccgattggctgggtgattactgggctatggaccgccctagacctggcgggaccagcgtttcgcgttacgattcctgcagtggttcaggtagcactacttcgccaacggattcatgctacggcggaagccgataaagtttggtgggagtatcatcgctggcaggatgagaaagatgctgacagctgggtggcgaacatgtttcgtatggtaggactttctactgcagccagtgtaaggcgtgagcgcaatatggcgtttgagcagggagtggtggccgggcaacagcagacgacggaagagtatgcagataaggtcctcaaaaaaatggatgaagttcagcgttttgaaaaacgttgtgaggcaatgctggctgttgcctttgcttgtgctaaagaggaaggtatcgcgccgtctgacgtgcgcagcgatatcgaaacctgctgcttggggatgatgagcgggcatctttcctcgatattacaagccacaattaatcgtcttattgtcaacccgcctgatatccacactgcgcttgaacaggcgttcgagttaggtattcaggaaactgaggctgctgagctaatggcggtgcttcgtgaggcatttagccagcgtgcaggtgcgttttaa

SEQ ID NO: 185536 - DNA, 999 bp, Klebsiella oxytoca
atgccaaagcgaacaaacagcgttgatactacattttttgctcttgagctgttgcgccgtattccgcgtagtcagcgcattaccgcccatgagttgcatcaacaacttacgaatgcgggaattgagcgcaatgtgcgtaccattcagcgccagcttgaacgcctgagtcagcacttcgatctggagtgtgatgatcgctgccgcccctatggctggcgatggcgggcaggctcgcgaggactgagcttggcgcaactatcgccagcagaatcgctgctgatgcagatggcacaggcgcagttaaagcatctgctacccgcacatctgatggcttcattttcaccattttttagccaagcgggacacactcttagccacagcgaacaggcgcagcgagagcgggaatggccgcagaaggtgcgggtagtcgctgccagccagccactcctaccgccagtgatccaggaaggcgtgtttgacgcggttagtgaagcgctttactacaaccgctggctgaatattgattacagcaatgctcacggtactcgccgtcaggtcgaggtgatgcccctcgggctggctcaacagggctcgcgactgtatctggtctgccgctttaaaggctacgataacgagcgcagcctggctctgaaccgcattacttcggcggtctgtagtacctttcacttttcccgccccacggattttaacctcaaacgttacgacgatgacgggcgtttcggattcggcgaagggcgacatatccgaattcatttcacgcttgaaaccgtgcgggcgcaacttttgctggaatcgccactttcatccgaccaacaggtcagcgagcttgacgacgggcggctgcgctttagcgccacggttgttgacagtccgatgctcgatggctttcttgcaacctttggtaacaccatcagtaacattaaacgcgacatagacgatgttagtacagaacaggaaaataatgatgagtacaggtga

SEQ ID NO: 185537 - DNA, 621 bp, Klebsiella oxytoca
atgcatttatataatggcactcatggtgaacatatttttgattataaagttaaaattgagcagaccttaaataatgccatcaggcaatatcctcgaacaatggcattgcgggtagatcttcattacccaccgattctggatagaggtgataccatctcctgctttcataatcaggaaccaggtgcgatctcccgcttccttaatgcactgaaagcaaccctcagcgcctgtgaggatcgcagaatgcgtgacggtaccagaatacacccgaatacattacgtaatatctgggtcagagaatttacgctgctgggtaagtgccactttcatatctgtctgttgttcaataaacatgcctattaccatttaggtgattttaaatacgaagacagcctgggagtgatgatcatgaaagcctggtacagcgctctgggtttgacgtttgaagattgcccacaactcgtccattttcctgacaactgcaggtatatgctggaggtcaatgatcctgattatgttgaggtttactatgatcttcttaaccgactggattacatgacaaaactcgataccaaagtctttggtgagggtgacaggaacttcggttgtagtagaggataa

SEQ ID NO: 185538 - DNA, 1410 bp, Klebsiella oxytoca
atgtcaggaaaccaaaaatttcctatacatctgtttccggcaagaatcgggcatgcaatttatgaggcagagcaacaaactcaggctccacttcccttaattgcagcagagatgcttggtgtgatttctctggtttgtcagaaccagattgatgtctgcaggctgaataatctgcgtagccctgtatcactgtttatagtgacaattgcggagtcaggggaaaggaaaagtacagtgagtaagcttttaatgaagccgctgtatcaacgagaagagcaactttttgagcaatataagcaggagttcattaactggcaaaataacgtaaagatcttcacggctgaagaaaaggccttgatgtcaaagctgaaatcagagattcgccgtggtaaagacccatcagatacacgtgagtctttgaaaatactgcaagccagttgtcctgtagaacccgttaggcacaagtggatatttaacgatgtgacacctgcggcgctaaaagagcatctctgtgggcataaaagatcagttggcatgatgtcagatgaggcagggagtatttttaatggttatacattaaatgagctaccactcattaataaaatgtgggatggatcaacttactcagtagaaaggaaaaatgaaccagagaaattaataaaagatgctcgactgacactatctctgatggttcagcctatagtcttggatgggtatatcgagaagaaaggtgagatagcaaaagggataggattttttgctcgtaccctgattagtcatccctactcaacacaagggcagaggaaaataactaacccgactgtttcaagtgagcatttaccggtgttccacaaacgattaatggagatcgttgatgaaggtatggttagtcagggagaacgaatttgtttgcatttttcttctgaagcagaactggcatggattgaattttataatcgaattgaatcagaaatggggattatcggcaatctttcagaatttaaagattacgcatccaaggtagctgaaaatatggcaagaatcgccgctttgttgcactacttcaacgaagataaaggagatatatcccttgttgccgtggaagctgccatagcgatcagcctgtggtatgcaaatgaacacattaatcttttttctaaacctaaggaatcgatgatggtaaatacagatgttgatgaaatgtactggtgggtgaaaaattactgcagacaaaatcttttgccatacatcaggaaaaacaccatacagcaatatggtcccaatcgcttcagggataacaaaaaaatgacagagttattaggtatgctttattctcaaggtagaataaagacctataaaaaaggaaaaactatttttattcagcctgttgatttattagatgtgacttaa

SEQ ID NO: 185539 - DNA, 237 bp, Klebsiella oxytoca
atgagtacaacatctatcattccaacccctgaacaacggctgcaaattctgcatgtctacggtgagaaaggtgaccgtctggtgcgggaaaaagagcggcagtatatcacttcgatttctcgctcgacagcctggaagcttgaaaaggctgggaggtttcctcaacgcaaatcacttggggctaagtcgtgcgggtggttgcttagcgatctactctactggattaatgaacgctaa

SEQ ID NO: 185540 - DNA, 1002 bp, Klebsiella oxytoca
atgacaagtaactccgatttttttgatgcttctgagctttttaatattcctgaacaatttgatatccccgatactttttgtcgtgctgacgagttctcgaaagaatttaaagtgagcctgaaggatattatatccacatggctggatgataaaatcagtgtctatgttaaccttcgttcagaatactgccgaataattcgttatgcgaataaaaaagaacatcgttatgatacttttgatatcagagctggaggcgacttttatcaacatgaaggtagccctcagttcgcagtgagaacatttataccttgtgaccagtctgaaataaatgagtatcctgcttttagcggcacttctttttttaaatatgtttacaatggatatgctagtggtttttggcggctacaacctacaagcaccactcgattagcaagggataattacagtctcaaaaatgctaatgaatcttggaatgctattcctggggaagttaaaatatttggtcgggatgaacgtgattgtttgctttttaataaagatacttatgtttcctttgaaaggatttatatagctaattctggatgtaaagttttgcgtgacttattttcatctaatgaagataataatatagaaaaacatgacccacccattaacagagttgcaatggttttgcttattaatgaactgtttagcattaatggaaatgtgacttattcaaatgtcagcacaattcttttaagtaatggaattgaagttacgcaatcaaccataaaaaaagtcctcgaagaaacatctgaaaaaagagatcaaccttacaaacatcagcctcagcactcaaagatagcttcgtgcttaatcacactttattgcaaaggcaaaaatcttgctaagacaccatcaaatgtagctcaaatattgaacgaacttgccgggtcatcaccaagaaaatggagtatcattttcacctctaaaatggctgctaacctaatgaaagtaaagtga

SEQ ID NO: 185541 - DNA, 864 bp, Klebsiella oxytoca
gtgaattggcagagagcgatagggagccagaatgatgacacgttctacgttaatctaagtattccgctcggtggtccgcagagtgttagcacttatatgcgtaaacaagggaaagatactagctacggtgtgcagaattccggttccttgtcgcagaatatgaattactacatctccgctgaccgtgataataaaggaagtgaaaatagccttaacggcagtttgaatagcaatctgcattatacgcaattaggcattggcggcgggcgcgtgggttcccgccaccgtaattataatgccacgctctcaggtggggttgcggcgcataaaagcggcgtcaccttcacgccttataccattcggaatacgtttgccattgcaaaactgagtgaatcgaaagctggcgttgaaatcagtactccacaggggacggtctggaccgattattgggggcaggctgttatccctgggctgaatgagtggcgtaattcgcgcattgaaattgatgcgaacaagctgcctgcgagtatgacgctggcaaatggaacaaagtatgtggcagctgcgcatgcttcggtgagcgaagtcggttttaaagtcctgaataaccgtcgggtgatgatccgcgttaagcgtgcggataacagggcgctggataagggattatccatcgttgatgagaaaggcaattatgttgtcaccagcgtggatgacgggcatgttttccttaatgaggctgagcaggtttcggcactgtatgtcatggacgacgataataaccgactgtgcaagattgattacatcttaagcgacaagagggatgaagacgcattttacgaagaggtggacggcgtatgtcgatga

SEQ ID NO: 185542 - DNA, 210 bp, Klebsiella oxytoca
atgattacagcccagtttaagtgcacgtatatttataaaaccagcgataacacccgcgtggatatttattttgacccggtcatgaaagaaggtctgcccgccggtaatctttacctgacaataacggagccggatgatttcgcatgttttgaagaaggcaaaacctacagcctgaaaattgaagaaacagagagcgaacaaaatggataa

SEQ ID NO: 185543 - DNA, 2340 bp, Klebsiella oxytoca
atggcaaatattaatgagtcctctcagtgggaagataacatcacattaatcagccgggccgaccgtgtcgaaggtgggcaggatggcgcagcgaataagcccttaaaacaactggcaaaccgcacggcctttctgaaggaaaaattagaacagggtagcgcggatgtttcggataaggtcggtgtgaaagactctttccagaaaggggcaacgctgaattctgtcagggatgaaatcacgtatgaagggtaccggctggtctggacgggggattttcctaaaacggttgcgcctttttcaacgccgcaaaataccgggggcgtcgggccgggggcctgggcctatacctctgacgccatgctgcgcgggaatttaaaatcctctgccggatacacgcatattgacgaatgtgcctccgttgacgaaattcgcacggcgaaatttgagcatcacggacagaaaataaagctccggtgctggagtactgaacaggatacgtcccctgttgatgttttctatgtctatgatgcgaatgacttatcatcagttgatgatggttacagaacgatagtcaatcagcagggccagcgtattaaagcgctgttaagcggcgctgtggatttgcgcgtcgcgggattccgttcgtatggcgataacctgggcacttcctttaatcgtgtcctgtcggcggagctggcacgcgtttttgcctccggttcggcgatgaaaatggcgagcatcaaaatccctgcgctgacgtcgtttgatgaccccaacgtctcaacgtataacgccattctgaacgcatctattgtgatgccgtcatatacgccggtggaatgtgacgggaattattactgcaaatttaacccgattaacgatgtcgccattcgtattacgaacacgattgaaggggttaagccgtcacagacggtatggcgaaatatgaagagcgtgaaaatgttcgccaataaatcaggacattttcagttagtcggcccgggagcgacggtcagtcagtctgccggtattcgtattggtaatgaccgcgccggagatgatgtactggacctgcgtgatttatgtctcgaagacgttcagattcgggcattccgttacggtctggattgcgtctggaacgatacctatattctgacctaccggaacctgcaattaaccggcaactatttcaacctgtcatcgcttctggcagcaaagcagaatgcgggtgagaacatccgcatggaaacttccctcctggcggattccgtgtcgcatcagatttactggaactctccggggattggtgtgaccctggataaagtcagcattgactatgctggcgggagtaccttctattttgataatggtgcgcgcggtaatacctggtatatgcacggggggcacgtcgagggatggaatggcatgctggtctttcaggtcgcccaactggtcgactggtatgggcaggctaactccattactttcgataatacccagattaaagccgccgggacctcgccgggcgcatgggcaccacgccggaaaatactgcattccggtcaggtacttcccggtctggggacaagggtaacgttcaataacagtccggtttactggcccgcgccggcttctgagccgcacgtggctctgatgggttataccgaccccacgccggaaaacatgaaagggatttaccactgcccgaactcaccttacccggattgcctgatgaactatcgtcagtcaatgaacaaggggctttaccggttcggcggaaaagagggtgtttccgttaaggacctgacagacccgttaaccgggttcaccttctcgacgaatggtaatccgtcgattgtttatggtggcgaagatgctgatggtctgagaaatatcatcattgattttgatgaaacaacaacatgggttgagctgcgtaataaagggctttactacgcacttgagcgtgaagcggaaattaatactgcgctgtctgtcatgatggaaaatattaccgggggagacctgacactgaatacgcggttccattattactatggagctgcaaaaacctatgacggttacgaagacggaagaactaaaagtctgtcgtcattattgacggcaacatataacggaataaccacaccgcttaaaccctctgattatgtcggtgaacaaactgccatgtcatatatccgtcaggacagcgctcaccccacccaggcggaatacgttcaggcagcaattgttctgcgcggcgcgaaaggccgggcacggattaaacttccggcaatctggaccacgcgcggtcggggtgcggcttttgctttcagctaa

SEQ ID NO: 185544 - DNA, 597 bp, Klebsiella oxytoca
atgaataacagccttctgccgccaggatcgtccgcgctggagcgcaggctggcgcaggcatgttctggcatcagtgatttaaatgtcccgctacgtgatctgtggaacccctggaagtgcccggcaaagtttttgccctatctggcgtgggctttctctgttgaccgatgggacgaaacctggacggaaacagccaaacgtcaggccatcagcgatgcgttctggatacatcagcgcaaagggacagtcgcggccatcagacgagtgattgagggaatggggtatgccatatccgtcaccgagtggtgggaagtggctgaccctgcagggacattccggctggcggtcgatctgaatgatatcggcattacggaagatatgctgaaagaccttgaaaggttgatcggggaaacaaagccggtcagcaggcatctggcgcagctcaatatgaccgcaactatcaccgggaatattctcgcgggcgcggcgcactgtatcggcgaagtgatcaccgtctacccggcggaatacgaagcacaaagcgatatccgatataacggcgttatttctcatgacgggaacattgaatacaggtaa

SEQ ID NO: 185545 - DNA, 675 bp, Klebsiella oxytoca
atgtttaatgtggtccgccctttgcaagttccggaaagtttgatatttcaaagaacgtataaaagtgaagatgttattgtcgctttaagagctatgtttcataataagtgttatctatgtgaacaaaattctttagctgatcctgaagttgaacacttcattcctcatgataatgatccattacttaaattcggctggagtaatttatattatgcatgtagacgctgcaatggtattaaaagtaattcacatgtgaacttgctggattgtacattatctaatggcaatgtttccgatgatattattcattttgctggcaatgcagccgtgggagagattttgattagggcgagcaataataatccatcccccgaagttattaatacagttaatttgcttaatgattgttttaacctggataatacaagccttagaagagtctcgaaagaaagtttaatggaaaagctacttgttgaattaggtcgctatctgcctcttagagatgttctagcaactagattaagctctcaggatgacattcagttagctaaaaatagtttgacaataatgtgtgctgataactaccctttttcaatattttggaagtggcatattttaaaagatgtgcagcttaggcaacgatttccagatttgagagtggagcttggtttttaa

SEQ ID NO: 185546 - DNA, 1233 bp, Klebsiella oxytoca
atgattaatataatgagaagaattagccagttgactgatgaagataaaaggaacattgaattaaatgggaagaatttaattatagttggtaataatggttctggaaaaactctttttcttagagctttaaatgaacatttaagtgtgatagttagggagcaacatgttactacaataggagaaatggaaaagaccttaaacgaacatacttctgcagtgaaacagtttcaggttgatactgatggatataatggtttcatgagttcagttattgggattaaggcacgcctcgaaaaaaagaaaaaatttgatgttgtgtttgcttcgacaactgatattgtaaaccgcctaagaaaaaaacaattcattcttaagttttttaaagcaaatagggagtttgtcagttctgatgagaatcatctaacaagtgttgaaagtctgtataaaacatttaacactttgacggcaaatgaacaaaacacaagtaattattttgaatcgtatttagtgtcaatgtcaaattacgccttgcttgaaaaaggtgccggcgaaattgatgaatacaatagagttgattccattcttaattctattcaaactgatttgtgcgatttatttgaagataatgatcttatattgcgctttaatagaaaaaaactcaggatggagattgctcaaaaaaataagataccatttgggttagatgagttaccatcgggttttgcatcaattttagctgtatatgctgagttgattatgttatcagaattaagtaaacagaataaaaatgaggtgacggggattgttttaatagatgagatagacgctcatctccatgtaacgttacaaaaaaaagtatttaatttctttgcaaatagctttccaaatatacaatttgtaatttcaacacattcaccttttgttgtccagtcagtatctgatgctattatttacaatttaagtaataatgaacagatggaggacttgtcaatctattcgtacagttcaattgtcaaaggattacttggcgaagcaacaaactccgatgatttagaaggtttgcttgcggaagttggagtattgtcaaaaagtaacgattttggtaatagatttgatgaggtgatggagattctggaatctaaagtcaatgtgttagacccaagagctaaagctatttatttgggggccaagtctcgtatggtggattggcgagagggggagcagaatgtttaa

SEQ ID NO: 185547 - DNA, 186 bp, Klebsiella oxytoca
gtgaacgatttgttcatggagtcacttgcactgcagcgaatagaacttatggccaggctggttgccagctcagattgtagcgatgacgacaaggaggttgcgatttcgtggctgtcggagctgacaagcgatctggttactaggctgaatgaatatggggtaaggcaggatgagagtacgcattag

SEQ ID NO: 185548 - DNA, 2382 bp, Klebsiella oxytoca
atgcctgaattaatagatgacaatggtggcccgactgaggccgccagggttttcccttggaatgccccgaaaaaagctgtaaacccctatctggacccggcggaagttgcgccggtttctgcgctttcaaacctgatcactctttacgctgcggataacgagcaggaacagttacgccgcgaggagctgagtgatgaggtgtgggaacactatttcttcaatgaatcccgcgatcctgttcagcgtgaaatggaacaggaccagctcatcagccgcgccaaaatggtacgtgagcagcaacgctttaatcccgatctggtcattcttgccaacgtcagcgctgaacccgcccacgtcagccaacctctgctggaaaggattaagttcttccaggggctgggcaggccgaaggcatattcccgctatctgcgcgagaccatcagaccgtgtcttgagcggctggatcgcgtgcgtgaaaatcaggtgtctgcctctttccggtttatggcgagtcatgaaggactggaggggttgcttgtactgtctgaaatgaaccaggaacaggtcaagcgcctgtctacactggttgcggcacatatgagcatgtgtctcgatgcggcctgcagcgatctgtttgtgacggatgacgtgaagcctgaacaaatccgcctgtcatgggaaaaggtagcggcagaagctatgcgtcttgatgtcattccgcctgcctttgaacagctgcgccgcaagaaacgccgtcgtaagccggtgccctacgaccttattccgggatcgctggcgagaatgctgtgtgcagactggtggtatcgcaaactgtggcagatgcgctgtgagtggcgggaagaacagctgcgtgccgtttgcctggtcaacaaaaaagcgtccccatatgtcagctatgaagccgtcatccacaaacgcgagcagcgccgcaaatcgctggagtttttccagtcgcacgagctggtcaatgccgacggtgacacgctggatatggaagacgtggtgaacgccagcagcagcaatccggcgcatcgccgcaacgaaatgatggcctgtgtgaaaggtctggagctgattgcagaaatgcgcggcgactgtgccgttttttataccattacctgcccttcgcgcttccatgcaaccctcaacaatggcaggcccaatccgaagtggaccagcgaaacggtccggcagagcagtgactatctggtcgatacctttgctgcattccgcaaggctctacacaaagccgggctgcgctggtatggcgtccgcgttgctgaaccgcatcacgacggcaccgtgcactggcatctgctgtgcttcatgcgcaaaaaagacaggcggaccctcactgccttgctgcgtaaatttgccattcgtgaggaccgcgccgagctgggcaacaataccggcccgcgcttcaagtctgaactcatcaacccgcgcaaaggcaccccgaccagctacatcgccaaatacatcagtaagaacatcgacgggcgcggactggcaaaagagatcagcaaagaaaccggcaaatcactgcgcgacagcgctgagcacgtcagcgcctgggcatccctgcaccgcgttcagcagtttcgtttcttcggcattcctggacgccaggcataccgcgagctgcgcctgctggccgggcaggccgcaagagcgcagggcgataaaaaaacaggtgcgccggtgctggaaaatgcgcggcttgatgccgtgttagctgcggctgatgcgggctgctttgccacctacatcatgaagcagggcggcgttctggttccccgcaaacatcaccttatccgtaccgcatacgagcttaacgacgagccgggcacctacggcgatcacggcatccgtatctatggcatctggtccccgattgttgagggccggatctgcacgcacgcgatgaagtggaaaatggttcgtaaggccgttgacgttcaggaggcgacagccgaccagggcgctcgcgccccttggactcgtggcaataactgtccccctgttgaaaaaacgtaccagacagggggcgaactaccaggcagcgaagaacctgcagcgctgccggacttcgaaaacatgagcaaaaaggaactgcgcgagctgacggcaaggctgcggctggttaaaccgaagcgccgaaaaggctacaaacaggaaattacggaacaccaacggctacagctcaatgcggagttgctgtccagaggctttgacgccagtgaaacggaagtggatctgcttctgcgtggcggcagcctgccatctggagccgggctgcgcctgttctaccggaatcagcgcctacaggaggatgacaaatggcgtcaatggtactga

SEQ ID NO: 185549 - DNA, 237 bp, Klebsiella oxytoca
atgcgaaatagtgaaacacgtttcaccaaaaccggaccggatgatgccagtttattccagctgtttaacgagactcgcctggatgagcgtaaaagttgcgcctttgccgtttccatccgcatggaggcattggctatccacattctaaaagaggggatgaatggagtggaggcggcagagctgctgcgccgtgaagtggctcgttatgaagctgaatcgcgcggggactggcactga

SEQ ID NO: 185550 - DNA, 342 bp, Klebsiella oxytoca
atggctatagaaggtaacacggcgacagttccgcttagtcccggtcagcgcctgaatgggctgaaccatatcgcggagctgagagctaaagtgtttggtttgaatattgatcacgagctggaaagatttattcatgatatgcgcgatccacgcgacattaatcataaacagaacgagagggcactggccgccattttcttcatggcaaaaattccgacagaacgtcacagtgtcaatattaatgagctgaccactgacgaaacgcgggagctgattaaagcaatgaatcattttcgtgcagtggtgagcttatttcccaaacggctaaccatgccgaattaa

SEQ ID NO: 185551 - DNA, 510 bp, Klebsiella oxytoca
atgtttgactatcgcatatcaaaacatccccatttcaatgaagcctgccgggctttcgctgtacgccacaacatggcgaagctggcagaacgtgcaggcatgaacgttcagaccctgcgtaataagctcaacccggagcaaccgcaccagctcactgcgccagatatctggctgctgaccgatctcaccgaagactcaacgctggttgatgggtttctggcgcagatccattgcctgccatgcgtaccaaccaatgaagtcgcgcgggagaaaatgccccagtacatcctgaaagccaccgccgagatcggccgcgtcgctgcaagtgcagtttcaggtgttcaactgaacgtaaccacccgtcgccaggttgttgaaagcgtcaattctgttacccgtctgatggctttaaccgctatttcactgcaggcgcgtttacaggccaatcctgcaatggccagcgtcgtcgataccgtgacaggtctaagctcttcttttgggctgagctga

SEQ ID NO: 185552 - DNA, 222 bp, Klebsiella oxytoca
atgatccctaatatttcaatcactctgaacacaccccacgtcacaattgaacgctatagcgagctaactgggctgcctgttgacaccataaacgacatgcttgcagatggtcgcttgcctcgtcaccgcctgcgaaaagataagaagcgtgaaaaggtaatgattaatatcgttgctttaaccgtcgatgcactctcagattgcaatgtgactatcaactaa

SEQ ID NO: 185553 - DNA, 561 bp, Klebsiella oxytoca
atgactttcgagtctggtggcaaagcagccattgaacgcttagttgaggcttacgggtttagcaccagacaagcccttgctgaccatttgaatgtatccaaaagcaccttagccaacaggtatctaagagatacttttccaggtgactggataataagatgttcgctcgaaacaggtgtttctttggcttggttagcaacaggacaaggttataaatcaaaagataatgcgacgaccagcttaactgcattgaaacttactgatggcgaactattggattcgggtttcatcgcctttgataaatctttcattccaaataatttacgaaagccgatgtctgtcatcgacaatatgagaacatttattatcgatatggatttcaatgagatcactgatggtgaatggctagttgaaattgagggtaaaaaaagtatccggcatttaacacgaatccctattgggaaagttaaagtagcatcatcagaatccaattttgtatgtgaacttaatgatattaaagttcttgcaaagtgctgtagcgtttttattaaagatatataa

SEQ ID NO: 185554 - DNA, 981 bp, Klebsiella oxytoca
atggactccagcaatcaaaaaaaagataatgaagatcaaaatgataaactcaactcaataatgaatgattattataggttaataaaagaatctagcgacctatcaataaacgaacgaaaataccttgctgatttattacataatggtgaacttagtaagttcagagagtattattggcaatatttaagagaaacaaaaaaatcgcatccaggcgatgaagaaatcgagacaaatataaagcgaagggatgaatcattaaaagaacaaaatgaactcaagaaattattgaaatcgtattcatcacgcttaactgaactagaagaaaccaattcaattctgcatttaaaaaatgaaaacttagaaagtttaaacttcgaaaaagaaacgttacttgaacaagcagtatctagaataaaactattagaaacatcaaataatgaactacaaagtcgtgttcaacaagaacgtatcgatgaaaaaatcccaggatatgttgaaagcgtaaagaatgaactcagctcagatgataaatattttattgtaatgtctcaagtatgggcagttgttggatgtgtattcggtttactgtccgtatgtgcttctttctacacactttttgccacacttgattttaattctctcaaaggatttgagcttttttatttctttactcgtggtttaattggaatttcaattctttcatggctagcatatatttgccttggaaactctaaaaaatatacgcatgaatcaattttgagaaaagatagaaggcatgcgttaatgtttggccaagtttttttacaaatttatggttctacttcaacaaaggaagatgcagttttagtatttaaagactggaacatgtctggtaactcagcgttctcagataaaaccgaacttccaccaggatttcaatcattgtgggattctgcaaaagaaaaactaaaatccagtacctctgataaagctgtaaactaa

SEQ ID NO: 185555 - DNA, 738 bp, Klebsiella oxytoca
atgaaatttgaaaaatcatttaaaatcatggcaatactagcgttttcagtttcagtaagcgcaacagcgtctaacgccaccgtatacgcacttcctgatgcaaaatcatttggcatcgccagcgaagaccaaaaaggtttgatgtttctaggaatggacaggaatgcggacctaaagggtgtttgtttcgccatgctgaaacaggctgaatcaagcatcccttatgctgatgtcatcgcaaccacaaataataaagacttccgcatgcatggcctgcgccccaacattcgtgacaataccaaagaggttgtatgctcctttggttccgatgcattcgactacctggataacctgtcaaaatccagtatgagtttggtcagtattcgctttaatggtgaacagcgtaatttcagttttaacaccagctctttcagtaagttactgacgcccagtggagccaaaatcgcagaacaagccgctgatgattataagcgaggtatccgcgctcctgtcttttacaacaaggctccatcttcagtcacagaaaatgaggacaggtatgcactaagtgaccagaaacttaatgaaatctggaacaaactcccctcagaaacccgtagaaaattactgccatcgcagcgggagtggattaagcaaaaagatacctgccgtagggacacagaatgccttaccgacatgaccaacagacgcatcaagatactcgagttggcaagataa

SEQ ID NO: 185556 - DNA, 342 bp, Klebsiella oxytoca
atggcttcagcaactcttatcaggctaaacaaagacgaatggcaaaaacttccagcaggccatttttataacggaaagtatcaggttggtccctttaccatcacctatgaatttatcgtcaaatacatggccctaatccacaaaacggaaataccggaatcctggcttaccgataacggtaccagtcttgatgaacgcagagttttgtacatggaagctagcgatattctgacaaaagatatcgtaagagaaattcgaaaaacagtgaaatcccctcaggaccaattacaggtttatcgcataaatgatcagatcataaccctcgaaatgatggaaaagtag

SEQ ID NO: 185557 - DNA, 618 bp, Klebsiella oxytoca
atgcaaaaaactcacaaacatttgaccaaaatagttacaatttctctgtcattagcgtttgcagtgcttgttgttcatggtgtccttacatcacttccgaaccatgacacagaaactccagatcttaaagcaacggtaactcaagtacctctaaaaccagcagaaccggaaatggtcaacattgttaatcggatacatactcctgaagaggtttacaggcgtttccaggacaacgaattcagggctaccaatcacttcagaacttgccgattaatggtcacaggtagggtaaagaacattggaacagccacctttaccaaagatccattggtcactatagctatccctggctcagacgaagggatgaagtttatctttgagaacacctcaagtaactggaatgaagttgcggcattggaaattgatgacattttgaccatatcgggaatggatacccggaaaggccagtttggaggcttgtttctttcaaatgcagaaataatgaacactttgcattctagaaacagtagagagatgatggttgaacgtaatggtttctacgaccgtattttatgtgaaaagagagcaatccaagcagatataagtgactataattaa

SEQ ID NO: 185558 - DNA, 540 bp, Klebsiella oxytoca
atgaaagataaagaaatttttatttctgtagatattgaatcatcggggccaattcccggagagtatagccttctatcaattggtgcctgcttgctttccgacccaaaggaatcgttttatacagaattaaggcccgacagccaaaagcatgatccagaagctgtagccattacgggtcttgatctagcatctcttaccctgtctggcttaccaccgctcgaagcgatggagcaatttaattcatggatcaattccgtgtccaaaccaaagcaacaaaccatttttgttggttttaatgccccatttgattggtcgttcatcaactattatttccataaatatctaggttttaacccatttggatttaccgcaattgatataaaagcatactatatgggacttaataagtgctcttgggaagacacgaaatcatccaaaatagttgaaaaactacgtccccatcttcgaaacaatcacaacgcattagaagatgctaaatttcaggcagaactattttcattaatgcttgctaccgattga

SEQ ID NO: 185559 - DNA, 1104 bp, Klebsiella oxytoca
atgcatatgagcagttactggaagcatcaattttctaagatattggattatctgacacgacaaaaaaagccagctgttgtattgatgactgttggggtaagcatcctcggagggcagaaagtactcaactttgttgttaccggcaagtttagttggggttcactcacagtaggtacaaacgacgggaatttcatcagtgattacatcgtacccattgttgcgattatacttattgtcatgggtggcatactgatggtcttaaatgagtgcttggcatttaaacagaactcacataagcgtattatcctggtggcagggaatggtctacgaacgacatctgaaacagggttggataagaaggttacttccatactgaaaggtaccatctatccagttgatattgatataactcagcaattcagagatgggtatgtctttgagcccgaactgactttcataagaaaaatattgccctctaaggataatctggcccaactccttgccaagggcagcgctgaaagtatacaggttggctacggtggttttttacccgtaccttttaccttttttataggtaatgtgcttgatgataaaagtaatgtgagtgtgtttgattgggatcgtgagaacgaacgctgggagcatatctcagagaagcacatcgacgatggcgagagtttcattagtgaaacaattcgtaccggagaattggacgaaatcgtacttgttgtttcatgttcatacagggtaaaaatgccacaagttggtgagtgtttcaaaggacttggcattgaacatctgacactggaaaccattgcatttgataatcattggtcattggtaaaacaacgccgtctttcaattcagtttgcagagaagattaaatcgctttcagatatggggatcagaacgattcacttgatactggcagcacagagcagtgtagtattgaatttggggcgacgatatgatagtagaaacatgtcagagcttattgtttatcagtatgagcaaaccaataagaacccttatccatggggaatttatgcactttctcatgggcatgaaaatggtggtttcattacacgtagcgaagaacagtag

SEQ ID NO: 185560 - DNA, 486 bp, Klebsiella oxytoca
atgaatgtctttttgcctaatcggcgccttacgcttgctgaacagtatcacgggcttcgcgcccgtttccctaactcacgttgctacttaactggaaataataaaaaactggtctgggagggaaaactttcgccaggaccgtacagtcggtcgtatcttgtccggattgaatacgctcctccagaaactcccgattgctatgttatttccccaaatcttaaagaactggccaagagcaagaggattccccacacatacgcgactgactcagaatcaaataaaacacaactatgtctttttttgccaaaacagaggcatccagaaaagtatgctgaatggcgtcctcagcttcagttatccgacaccatcctcccgtgggcatcactatggctgttttattttgaacagtggctattttccggaaaatgggaaggtggcggggcgcatccgaatgaagatgatgcaggtatctactatgaagattaa

SEQ ID NO: 185561 - DNA, 1281 bp, Klebsiella oxytoca
atgagcaattcagtatcagttctagctttgagtacagagcaaaagcagtatgtaggtgatttcctggattgcatagtaggaagcctagacttatcagaaacacagtacagcttaatcaagagggcctatgaatcggtgggggcttatcttgctgggggagacgatcctatcctcgttggagcggagatttattctcaagggagtgttagattaaacactactgttaagcctaaaggaagcgaacagtatgacgtagatctgctttgttatctgccaaacgcaagtgttgcatccggttgggctgaagttcttgaagccgtgcgtgcacgacttgcaagtcatggtacctatagcgaaatgcttacccctttgccaagagggcaccgcattatgtacgctggcgaataccatctggacatcacacctggaattgacttgggttataactcttcagagaacaaccatcctctcttggttcctgattcgcgtctccaggattggaagaaatcaaaccctgcaggttatgcgacatggtttgataacattacagagaaattaccgatatttgtaaggcttgaggttgcgtctgaaagcttcatcaaatcagcggcagtcaggccattacccgatcatacccgtaagaaacttctgaaccgaatcgtgcaaattttcaaacggcatcgggatgtatgggctgctgaaggtgggaaagagcggattgatttaaaacccatctccgccatcattactacgctcgcggggcatgcctatagcaaaatttgtgatgaaggcaggagctattccactgactttgatgtactgctggatgtccttgagctgatgcctgcctacatcagatacagttacggtctgtattttgtgcctaatccgagcatgccagaagagaactttgctgaaaaatggaacgttgaagagtccagaaaaggagaaaaactcagaaaaaattttgagttatggcataaaacgatcactgataacattatagaaattgcatcatctgttggagaagatcaacttcttgataatcttagtaaatacttcggagaaagacctgtcaaagcagttcgtgaagctatggttggaggtgttaacgcggcacgtgatagcaatgatttgcgtgttttagcccttacaggaacgcttagcgcaggtgcagcaaatgtgcctgcaatggcacggacagtcccagagaatacattttacggtgggaatgctctttcttctgcccctgtgaaaaagaatacattttttggggactaa

SEQ ID NO: 185562 - DNA, 633 bp, Klebsiella oxytoca
atggcagttccgtatgaaccagcggagttcaagaaagaagcttttaactgcccgtactgtcaggcttacgctaaacaaaagtggaagcaattatatcctttctatgaacaagatgcctttcctatgcatgtgtcacaatgtgagcactgtggggagtactcatattggtttgaaaattccctcctgattcctgcttctgcgaatgttgaaatgccgaacccggatatgccggaagactgtaagtccgactacatagaagccagaagcatcgttaacctgtctcctaaaggtgccgctgcgctcctgcgtttatgtttacagaaactcatggtccatctaggcgagcctggagagaacataaacaaagacattaagtctctcgttgagaaaggattacctgtgcgtatccaacaagctgctgacatttgccgtatcgttggtaatcaggccgtgcatcccggagagattagccttgatgatgaccctcagttaacacatggtctctttaagttattgaatatcattgttgatgaccgcatcaccagacctaaagaaatcgaagcgatgttccagagtatgcctgaaggtccacgtcaaggcatcgaaaagcgggacggcaaggctagcggatag

SEQ ID NO: 185563 - DNA, 1359 bp, Klebsiella oxytoca
atgagggatatctatcgggaccagtacggagaacttggcgagagtcttaccgacgcactggctagtgagccactgagtattgaccagcatcgctacatcaatgaggccctgaaggtactcaaggcttgcatgaagcgtatcgaagcgggagacagtcagtcactgatagattacgtcgatcgttttgatggtattgatcggcaggatgaccaagcctctgtgtccctatctgttagtgctcctgaagtaaaaccagtactagcagtcacaccaagcgtcactgtggccagcagcgttaccgtgactagcctctttaagcaatacgaagcggagaacgctcagaactggaagccagccaccttaagggagaaccaatcgtctcacgctgcgttaatcgaaatctttgactatctgggtctcaatgctgacgccaatacgataacacgcgctgatgtgcttagagtccgtgatgtcctccagcagttaccgaagaaccgcaagcagcgctttaaggatgccccgttggttgacctgctaggccgtgaagagaaaacagattgtctggatgtagtcaccatcaacaataaatatctcattaagatggcggctgtctttaagtgggctgtccgtaatgacctgattaaaaagaacatgactgaggggctggaactaaaggttccccagcgtaaagcctcagaggcccgcaatgctttctctacggagcaggtaggtcaactgctggttgccgctaagtcatactctcagaagacctcaggcaagccttatcactattacgttacggcgctggcggctatcactggtgcgcgactcaatgaagtagctcaacttcaggtaaaagacgttagggtcactgaggccgggaccgtttatattcatatcaatgaagatgatagcagcctacccggtaagagcatcaagaacgcccacagtgatcgctgtgtccctctagttaatggtgcctgcggttttgtattggctgactttatggacctgttagaagcccgtagaaacgctaacgctagctgtgctagtaacggtaatgatgctatggtgtttgatggtctgcgtctcatgaagaatggttacggtgagcaggtgagcaagtggtttaacagaacgttgttacctaaggttctggctgaccgtgacggcttggcgttccactcgtttagacatacggtcgccactcagttaaaacaacacggcgttgagttggcttacgctcaggcgattatggggcatagctcagggtctattacctatgaccgctacgctaaagaggttgaggtagaccgattagttaatgtgttggctgatgtctataaggaggtaaagtaa

SEQ ID NO: 185564 - DNA, 171 bp, Klebsiella oxytoca
atgctgttctggctctgcctgaccgggctagtggaaaagtcctcatacagagaagaatgtcttttacgtcaccttgagaaagaccgtaaaacctttctcgacttcgcttttgacgccctcttattcatgatagaaaaagggaatattagcgattgcgaaaaagctgactaa

SEQ ID NO: 185565 - DNA, 321 bp, Klebsiella oxytoca
atgcaaacctcaactgtaccggccacgttgccggtttcgtcacgtctgtcacctgtgcaggtctggcagcaacttttaacgtatctactggagcagcattacggcctgacactcaacgacacgccattccatgaggacgcggccattcaggaacatatcgaagcgggaataacactggctgatgcggtgaatttcctggtggaacgttatgagctggtgcgtactgaccgcaaagggtttacatggcaggagcaaacgccattcctgaccgctaccgatattctcagagcaaggcgagctaccgggttgatgaatacgtaa

SEQ ID NO: 185566 - DNA, 339 bp, Klebsiella oxytoca
atgatgaataaagatgctactcaaacctggggtcttaaacgagatatcacaccgtgttttggagctcggctggtgcaagaaggtcatcgtctgcattttctggcagaccgggcagaattcaacggttcgttcagcgagatgcaggcccgagatctggatgaagcttttccgcattttgtcgcacatatggaattgatgctgctctcctgtgagttgaatccccggtgcgcgcactgcgtcacgctgtaccgtaacgggctgacctgtgaagccgatacgctgggcagttatgggtatgtatatatcgcaatttatccatcaaatcaggttaaagactga

SEQ ID NO: 185567 - DNA, 480 bp, Klebsiella oxytoca
atggataaacaaaccactctttttacacctgaactgccgttaccggcactgcgtaccattaagcgagccttggttctgcttgaacaacacctgcgcgaaccgggtgtggcattcacctccacacaggccactcgcgactggctcaggctgaaaatgggaacccttgagcgtgaagaatttgtcgtgctgtacctcaataaccagaaccagctgcttgcccacgaaacactgttcaccggcaccctcaatcacactgaagttcatccccgggaagtggtgaaacgcgccctgtactttaacgctgcggcggtgatatttgcccataaccacccttccggggaggttgcaccaagtcaggcagacaaggctattacccagcgactggtgcaggcgctgatgctggtggaagttcgagtgcccgaccacctgattatcggtggcatacagattttctctttcgccgagcatggtcttctttaa

SEQ ID NO: 185568 - DNA, 693 bp, Klebsiella oxytoca
atgagtaagagactaagagattatgttgttgaaggcaatcaatgtgatgttgaaaatagactaggggaaatgattgaaaatatcacacagataactagttggattaacgataatattgaaagaaccgtgaaaagagtagtgttggtaaatttactatcttcaacctccgactatctgaaattgatgaaatcatcattgaaatctcatatttccgtaatagctctttctactagaagcatttatgagataaatattcgggtcaggtctatacttgagcttgatgatgaaatagataagtggcaatctgaagcagttacggatcaaatccaaactcttgaaggtatattattacttgctgatgaccaaaatcatgctactcaacgtaatatattgaaaagcgagatggcgcgtcttcaaaacctagtgagtaagtataatcttccggtcattaaaaatcctgtcacaacaggaagccttgctcagaaagttggccaagaaagtgagcacaagtcactttttaaactttattcaaagttagttcacccaagctctttattagtaaataattatcaaaccgcagcatccatagaaaatcaaaaaaccctgcaaattcatgcacagctttatacatttgatactatgaaccggatttgtgaagcgttaaatgtcccacctgatactaacccacaatag

SEQ ID NO: 185569 - DNA, 1437 bp, Klebsiella oxytoca
atgaatgacaaaatttcatgcccaattgaagattataacataacgggctttttgggagacggtgggaacggtgatgtgtatcttgtaacttcagatgatggcacgaaaaaactcgctttaaaaatactaaggaatgtacaagaatcaacttataatagattcaaaatagaagttgattttttgaaagacaataaagtagatggggtaatgcctctactcgatttttaccttccagagaatgcaaaaaaagaacaagcttggtatcttatgccattggctgaaacctttaaagaaagggtaaagcaaaaagattcattatcaatcatatctgaattcattccactcactcaaactattatagaactccatggccaaaacatatcgcatcgggatataaaaccagataatattttatatttgaatgacaggatgtttttagcggactttggattggtaaaatatcctgaaagaattgaattaacacccaatatgcgagacgttggcgcaaaattcacaatggctccagaaatgagacggatagcaaatcgtgctgacggactcccggcagacatttattctctggcaaaatcagtatggatgtctctgaccaaggactatcttggtttcgatggtcagtacagcgcaaaatctaatatcggattatcaaactatataaaagaactatatctaccgcccctagatgacctattagtacgtgcaacagataacgatccgcatcagcgaccaactgctagtgagtttaagacaggacttgaatattggattgagattaataatgatttcatccaacggaatttaactgagtggtttgaaattcaaaatctattattcccttacagtacacctaacagtgtagagtggacaaataatgatgatataataaatatactcaatttaattgctgaaagagagtctctaaatcacatgttttacccctcaggaggggggaacgatttgattcgtgtcgagccagccgcagaaaaaggatttatcgctcttatagcctatgaacgatgcgctgaaattttaatgcccaagaaactttcatttgaatcatttggtcatgatcccgagtggaattatttccgtcttgaatgtgaaacaatcgaacccatgaaaatttcgggtcccattaatagttcaacgatggaagaatacatggttgaaattgcaccggggaattacttacctccagattgctgggaaatttctgagtatcaaggtaaacctttacctgaaaatgctagagttgtcagtagatatattaagggcagttttgtatttttctgcaagtcatcaacttataacagaataagccaaacatatgaagcttggcagaatgtgggtgaagatgaattcagaaagctaatcgcaaaatttgctcagcatgcttctggccgtagacctatcaaataa

SEQ ID NO: 185570 - DNA, 786 bp, Klebsiella oxytoca
atggactgtgggcagaagataataacactgccgcgctcagatgcttttatatgttttgcgggtgatactagttgggcatatcctttgatgcatcaagtggcatcagcaattgatatctatgatcgttgctcctcacgcgctcaagatattaaagaactcaaaacccatattcttaaaatttttgaaaggttgagagagcaaattcatgatgccgtaggtgatatggatatacctgatgcaaaattcatttttggggggtattcatggatcagaaaaaaattcatgatttggcacatcacctaccaaagaagtaccaactcttttcgtgccgatcctgcgcgtgaaatatatggttctccagttgtatttactggtgatgaagagcatgtaactgaagctaacgccatgcttcgagataaattacagtcaagaggaaaactggataatttagtgaaagggataaaaaaacctgttaaatttgaatgggagccattcgaggttattcgtgacatgctctataaggtaaatgcaaatccttatgaattcaaaaactcatcaattggtggcgcaccacaagttctaaaaatatatgagcatttatcaagtcaaaaatttggtgttctttggatgaataggatggatagcgaaccgtgcatatatttgtcgggccgaaagcttactaattatggaccgagagatatgtgggttctcaatcctgaaaagttaataacatataatccactgaaaagtaattctaacaaggaggttatgaatcaattcatttaa

SEQ ID NO: 185571 - DNA, 876 bp, Klebsiella oxytoca
atgcgtcatcataatctctcaacgtatgttgttgatatcacaggcataattcctgaagaaatgcattatccgcaatatctccgcgtatggtatgccgtgacacaactaaattccgcttctgctaaaaatattgttcagtggatccgtaacagcaacgcccccctgaaagagagcgagattcgtattcaactggatgcattaaccgttaatagcaactcccgatatcgatatcttggtagccgaaaaagcgcccggactgacctgggtagcccatacgacttgttatttcgtagcggaaacctacgaaatacacggtatgaacagtatgtgcaggagctgcacggcatatgggacattggcgatgatggtaggacgccaattcagattgcagccccaaggccaggcgatcggatggtagttgaagcgagagatgaattattcaatgaattgcctgacgatgaaggtgactttcgcctcaaagcactacgtgaggtcattattcgagaagggcaaccagtatttagacgaaagctcattgaagcttatgagggtaaatgcgcagtaacgggctgttcaatccaagtgttgcttgaagctgcacatatcaccccctacgcaggagcgtggcatacccgtgctcagcatggcctgttactgaaaacagatatccatactctatttgaccgtggtttgctctggattgataccgagttgaaaataaggatatcagaacagttggccgggacagaatatgcagagttagatggccgatatctcaggttacctaaagataagcaaaactggccgttaacaactcatctgataaatcatcggcaatattggattgaaaatcgtaatgatgttgaaagtgcttaa

SEQ ID NO: 185572 - DNA, 132 bp, Klebsiella oxytoca
atgttgtttggtcattggcttgccaagcgtgagataccggatccatatcgcaaaagcgaagaggcatttgccttagtatataatttaattgagcaggctggcaaaagctggactgaaaaattaggcgcgtaa

SEQ ID NO: 185573 - DNA, 2163 bp, Klebsiella oxytoca
atgtcaccagtaataaataaaccacaagcaaaagactctgatgagatcgatttaggtcgccttatcggtgaattaattgatcatcgtaaacttattatatctattacctctttatttacacttatagcactagcatatgctattttgtccactcccatttatcaagcagatgcattaattcaggttgagcaaaaacaggcaaatgctctgctgagtagtttaagtcaggtactccctgatagtcagccccaatctgccccagaagttgctttattgcaatcaagaatgattctaggtaaaacagttgatgatctcaatttgcaaattcgaattaagcaaaattatttaccgatagttggaagaggctgggctaggctattgggagagtctccaggaagtttgacaatatcgcgtttatatttacactccacatccgaagaatcaccagaaattacagttattgttaaaaataacaaagagtttactatagcaggagaagattttacgattgaaggtcatgttggtgatttaattgaaaggaaggatttttcaattaaaattgactcaatcgatgcagaaccgaatactagctttaccgtgtcgtatgtctcgaaattaaaagcaatcactgatttacaagaagtgctttctgttgctgaccagggcaaggatactggaatgttagcgatctctcttaccggggcagatccagaattgatagttaagataattgataatttaagcgctaattatctagcacaaaatatagctagacaggctgctcaagacgcgaaaagtcttgaattcctaaataatcaattgccaaaagtacgtagtgaattagacctcgctgaagataagctgaatcaatatagaagacaaaatgattctgtagatctctcattagaagctaaatcagttttagatcaaatcgttaatgtagataatcaacttaatgaattaacttttagagagtctgaaatctctcaactttatacaaaagagcatccgacgtataaagctttgatggaaaaaagaaaaaccttacaagatgaaaaaacaaaactaaacaaacgagtttcagctatgccagaaactcaacaggaagtactcagattaagcagagatgtagaatctggacgtattgtttatatgcaattattaaatcgacagcaagaattgaatattgcaaagtcaagcgcaattggtaatgtcaggataattgataatgctgtaacacaaccaaagcctgttaaacccaaaaaaatattaatactagcggcagggattatcctcggtacaatattctcgtttggtctggtattattacgtgttgtattaagacgaggaattgaaacaccagagcagttagaggagctaggaattaatgtatatgctagtatccctgtatctgaaacttttactaaaaaagccgaccagtccaaagggtggcgcaaaaaacagcaaagcgaaatacaaggtttcctcgctgtcgacaatcctgcagatctagctattgaagcgattcgaggtttgcgtactagcctgcatttcgcgatgatggaagccagaaacaatgtattgatgatatctggtgctagccctaatgcaggtaaaacatttgtaagttcaaaccttgccgcagtaattgcgcaaacaggtaaaaaggtccttttcattgatacagatatgagaaaaggttatacgcataagctattcaatgttagtaacgataatggtttatctgatgtgctttctggtaaaattaataaagaaaatgccgttaaatcaataagttctgcgagttttgattttatatcgagaggtattgctcctccaaatcctgcagagttgctcatgcataagagattcggtgagttagtggcttgggcaagccataattatgacattgttgttttagatactcctcctattctggcagtaacggatgcagccgtaattggtcattatgctggtacgacattgcttgtggcacgctttgagttaaacaccgctaaagaaatcgatgtaagtattaagagatttgagcatagtggtgttatggttaaagggtgtattcttaacggaatagtaaaaaaagccagtagctattatggctatggatatagtcattacggatatagttatacagaagataaatga

SEQ ID NO: 185574 - DNA, 1515 bp, Klebsiella oxytoca
atgacgaggacagtaacggcaccacgggaagtaaaaacacgcaatattctctgctgggggatgggcgatatcttcggcagcggggcaatgacgatcaccgggctttggctgctttatttttatattgaagtggcgggcctttctcccgccgccgccgcatccatctttgcgatcgccaaaatttgggatggcatcaccgacccgatcatgggttatatcaccgacaatattcgcacgcgctgggggcgacgccgaatattctttattatcggcgcgccgctctccttttgctttgccctgatgtgggtaagcggttttggctattcctggtatcttggtacttatttgttattcagcaccgtttttaccctcttgatggtgccctacgatacgctgcctgcggagatgaccttgcgttacgatctgcgttcaaaaatgtctggcgcgcggatgctatttgcccaggcgacagcgtttttatctgcacttatcccaggacaaattttggcgcacgtcgccgataaatcgcaggcatttttatatatcggcctggtcttttccgtactcttcgccctaccgtggatcttcgtttggcggggaacctgggaacgggagaatctcccgccgccttcgactcagcgcgggatggggaaaacaattatttcgctgtatcgagaaatggcttcaactttccgtttacgtacttttcgcattcacatcatgatgtacgttggcggagccgtcgccctggatattttcggctcgctgtttatgcactatcttacatatgtacttcaggtcggcgcatccttagcttcccaggcaatgagcctgatgacgctatttcaattttttgccatccctttctttacctggctttgtattcgcatcggcaacggcaacgcctacaaactggcaattgcactgattatgtgcgctctactgtggttcagccagctttccgcctccattagccatttatcagggttcttattcggcggggccatcgtgatgggcatcgcacgcggcggaacctatcttatcccatggaacgtctacaactttttacctgatgtggatgaagcttataccggcgtcagacgtgaaggcatttacgcgggcgtcatgatgctaacgcgcaaattttcccaggccctcgccctgtttattgttggactggcgctggaggcgtttggctttaccaaaggcgcagagtcgcaagatgccgccgcgctaaacggcatctggtgggtattccttatcggaccgggtttactcactctgctggcgatgtacggcgcgtttcgctttcgtctaagccaggagtgtcataagacgcttaccttcgagctagagcgtctgcggtctggcggtaaacccgaagatgcatcaacacaggtacgacaaaccgtagagttacttaccgggcatccgcatatgaatacccactggcagcatacagctgaaacgacagcgcaaaggaatcactatgtcgcagaaaataagccatcctga

SEQ ID NO: 185575 - DNA, 1854 bp, Klebsiella oxytoca
ttgccgcatagtcaagaaatcgatgccgatgatgttctgcaggtgcgcggcctgaacgtcgtgttcaatcagcagcagcaggctttttccgccgtccgcgacctgtcgtttaccctgcggcgcggcgagacgctggcgattgtcggcgagtccggctccgggaagtcggtgacgtccctggcgctgatgcgcctgctcgaccaggcggtcagcgaagtgcgcagcgatgcgctgctgctgcgtcgtcgcagccggcaggtgattgagctgagcgaacagtctgaaaccgagatgcgcggcgtgcgcggcgcggatatggcgatgatcttccaggagccgatgacgtcgctgaatccggtcttcaccatcggtgaacagattgccgaatctatccgcttacaccagggcctgaagcatgatgaggccctgcgcgaagcgaagaaaatgctcgatcaggtgcgcattccggaagcggaagccatgctctcgcgctatccgcatcagctttccggcgggatgcgtcagcgggtgatgatcgccatggcgctctcctgccgaccggctgtgctgattgccgatgaaccgaccaccgcgctggacgtgactattcaggcgcagattttacagctgattgccgtcctgcaaaaagagatggcgatgggcgttatctttattacccacgatatgggggtggtcgccgatatcgccgaccgcgtgctggtgatgtatcgcggcgaagcggtggaaaccggcagcgtggaagagattttccgcgcgccgaagcacccgtatactcaggcgctgctggccgcggtgccgcggctgggggcaatgcgcggcacttcgctgccgcgcctcttcccgctgttaaaccagagcccgtcgccggaggggcagaacaccgttgtgcccggggaaccgatcctgaaagttcgcgatctggtggcgcgcttcccgctgcgtagcggcattctcaaccgcattacccgcgaggtgcatgcggtcgaaaaggtcagctttgatttatggcccggcgaaaccctgagcctggtgggggagtccggctgcggtaaatcaacgaccggccgggcgctgctgcggctggtggaaactcagggcggcagcatcaccttcaacggccagcggattgatacgctgacgggcagtaagcttcaggcgctgcgccgcgatatccagtttatctttcaggacccctacgcttccctcgacccacggcaaacggtgggctattcgattatggaaccgctgcgcgtgcatcggctgctggagggcgatgccgctcgtgagcgggtcagctggctgctggaacgcgtcgggctggagccggagcatgcgtggcgctatccgcacgagttttccggcggccagcggcagcgcatctgtattgcccgcgcgctggcgctcaatccgaaagtggtgattgccgatgagtcggtatcggcgcttgatgtgtcgattcgcgcgcaaattatcaatctgatgctcgatctacagcgtgagatgggtatcgcatttctgtttatctcccatgacatggcggtggttgagcgcatcagccaccgcgtggcggtgatgtatcgcgggcgtattgtcgagatcggcccgcgccgcgccgtgtttgaaaacccgcagcacccctatacccgtaaactgatggccgccgttccggtggccgatcctgcgcatcgtcgtccgcagcgcgtgctgctctcagacgagctgccgggcaacatcttcaaacggggcgaagaggggatcagtacgccgttacagcaggtggggccggggcactttgtcgccagagagcccgccgccgacgtgctggcgcgctaa

SEQ ID NO: 185576 - DNA, 948 bp, Klebsiella oxytoca
atgccgccattaatccggctatcaggtacaagtaaggtgcgattgctcaactggagaagacaagcggctatcaacgcgatgccggggattaaacccgggcagatacgtaccccgtggcacgagttctggcggcggtttcgcggtcagccggtggcgatgggggcgggggtatttgttctgctgctgattgcggtggcgatcgtggcgccgtggattgcgccgttcgacgcggaaaactattttgattacgaccggctcaacgacggcccgtcaatgatgcactggttcggcgttgattcgctggggcgggatatctttagtcgggtgctggtcggcgcgcagatctcgctggccgccggggtactggcggtattcatcggcgcggccatcggcaccgtacttgggctactggccgggtattacgaaggctggtgggatcgcatcattatgcgtatctgcgacgtgctgttcgctttcccggggattttgctggcaattgcggtcgtggcggtaatggggagcgggatgtcgaacgtcatcatcgcggtggcgatcttttcgatcccggcttttgcgcgtctggtgcgcggcaataccctggtgcttaagcagcagacctttattgagtcggcgcgcagcatcggcgccagcgatgctaccatcctgtttaatcatatattgcccggaacggtatcatcgattgtggtctactttacgatgcgtatcggggtgtcgattatctccgctgccagtctgtcatttctggggcttggcgcgcagccgccgacgccggagtggggggcgatgctgaacgaggcgcgggcggatatggtgatggcgccgcacgtggcgctgttcccggcaatcgcgatttttctgacggtgctggcgtttaacctgctgggtgacggcctgcgcgatgcgctggatccgaggataaaagggtag

SEQ ID NO: 185577 - DNA, 1764 bp, Klebsiella oxytoca
atgcctcaactttacagctatatccgttggtcctcggaacggcagcaaaaagggacgaccagacaacgccaggtcatcggtgcgaaggagtttgctatagctaatgggttagaacttgttgaaattgaagatcctggtgttagtgcctttcgtggtaagaacaccacccacggtaaactgggggatttcattgatgctgtgaggcagggagctataccaccggattcgtggctatatgttgaaaacttagatcgactcactagacaagaagttaccacagctcagaagctgtttattgaattgttggatttggggttaacgttggttacagggatggataaacgggtttatacccttgagtctgtgaacaaaaatccaaccgatttgatgatttcgcttttactgtttagtcgagcaaatgaagagagtaaaaccaagcaagctcgcacgataggtaatgttgaatcgttgatcgaacgtcatcgccaaggattgcctgtgaacattaaatcatgtggtaaacacccattttggatagatgattctggttcacagtatgaatccgttaagcgtcatgcaatttattgggagatagcacgagaagcgattgaattgtttttatcaggatatggtatttacaaagtgaagcgctttcttgatgaaaagtatcctaacggcctgaatggtaaagaatggggctatcaagtactcaaaaagatgcgtgagagtagagccctcattggagaaaggcaaattaacataggctcacatacatatacattacgtgattactatccctgtctatgtaaaaacgaggttgaattcctgcatttacaagagttaaagggacaaaacagctacaaatcgaagaaaaaccccttaaaggaacaaatcaagttattgtccggtctggcaatccttagatgtagtaagtgtggtgggactatgtctagtttcatgaataaaggtaaaccaagatatatctgtcttaatggtcgacatttacaaaaaggttgtgttggttggtcgcttactgctcccttagttgatcattgtgtcattattgccttacttatgggttatatggatgcaaaccgtaaggaaaggcaagatacatcagatatttccgcattgattgaagcgaaaaatacgagcgttggagaattgaatgtaagtattacgaaccttgttgcggttattgaagctggtgtgaatgtatctgagctagcaagtaggttaaaggttctatcaacagagcgtgagacatttctgaaagaaattgagcgattaaaggaacgaaaagcattaattgatagcaaaggatcgtttgaagtatcaatgatggatttcattaatctgatacattggaatgtattatcagactatgcacatgaatcacgtgataagattcgctcgacaatcaataaaattattgaacatgtaattattgataaaactgatggctgtataacaatcaagattaaatgtcgtggttcagatgaacaattgattttttgtggtattgggcgcaaacctcactggaagtttgatattgcgttatatgttgaacaagacactgatggagatacaaccttcgaagaaaaatctattttgccaatggcaaaccagttgatggaagaggctacaaagcagtttgcattgataagagaaggctacattagctactttgacaaaatatgtaaaattttagctgcaattggttatccagatattgatggttcagccttctggcctaatagatag

SEQ ID NO: 185578 - DNA, 531 bp, Klebsiella oxytoca
ttgattgcccttatctatggcgccaatctagggcctcgtggggtactaaaaaagctggacattgataccagtgacgaggctctcaaagatacctggattagcaaactaactgaggaaatcaccaatgtgagacgttatgtgattgaggattatacagcgcggactagaggctattgcaaaatcaaaaacgacgctggaatgattgttaagaccataacagaaaacggagaatcggttaagaaatcaaaattattagctcatcttctccacggtgcagaatcactgatacttcagtacatgattagctttcttggtgataatgttgtcttgcttcagcatgatggtgtcacatgccccaatcctgtagatacagatgaactcagtgactatatcgcagagaaaacaggctatcgtgttcaatttgatattgagcagctgaaaccagacttctatgtcgatgccactgatagatttcaacaacaagacctggaagacatttttgaaatctttaaatatgaaatggctgcgtga

SEQ ID NO: 185579 - DNA, 624 bp, Klebsiella oxytoca
atgggacaacatgcagaaaaatctgagtcactctttgcccaaatcggacagtactcgtggtgcataacccttataggtctttgcatcgctcttctcggatggcgagttgcttataacaattcgaaaaggctcgctacccggtcagagtccaagtccataatcgattcagtatcgaagttagtgattgaaatttctgatctttctattgacttctggcttaataaatcatcaccaattgatcattgcttagatctaggacagcagaacagagaaagggtgattaagataaatcagtcctcaacctatctgttcaacgtcctagctaaggcccagcagatcgcaaagctcgcagaagtattggatctccgtgggctatctattcctgacaattttctctcaacagtaatggaaaaaacaactctggactgtgagactgcttatcaactcgactctgaactccgcactataaggtctcaggaaatcgtgagcgcctgtatgcaagttgttcatgctctgcatgaaaccttccagttttaccaccctccagctaaacaagagacgttcttccaaatggtatctcggaagtatagtgaaatggaaaattggcataacgaattaagataa

SEQ ID NO: 185580 - DNA, 744 bp, Klebsiella oxytoca
atggccacagcaagaccaattgaagagcgcgaggtgtatgacgccatcctgaagggcgccaaacaatcaattcgtgtgtcaatgccgggggtaattaagtcttttgatccggaaaccgttacatgcgttgtggaagtctcgatatatattcctaagccagagtcaacggaaggcaaatccattgaccggctggcgcaggacaatgttttctatccgcttattttagatgcgccggttatttttccccgcggtggcggctgtacgctaacgtttcccgttagtgccggcgatgagtgcctggtggtattcgccgatcgctgtatcgacttctggtggcagaatggcggggtgcaaaatggctcgagggggagaatgcacgattactctgatgcgtttgttatccccggtccgcagtctcaggcgaaaaaaatcggcggcatcagcacgacggccgcgcagctgcgtaccgatgatgggtcagcgtttattgagctggccgccggaggggatatcactgccaccacgaccggcaatgcggctattaacgcccctgaaatcatccttaacggcaatgtgacgatcaacggcaacctgtcacaaggaatgggtgagagcggaggctctgcgacgatgcgcggcccggtcaccgtaaccaatgacgtaaccgctggtggtaagagcctgatgacgcacacgcatggcggggttgagactggtaacgacagcaccggcgcaccgcagtaa

SEQ ID NO: 185581 - DNA, 396 bp, Klebsiella oxytoca
atgctgatgttccttctcaaccaacaatcaataaatggttatgatatgaaaaaatacctttttatattttttgttctcgtttcggccaacgctctggctgatataaacagcgtgacgtcacagtgcggaaatttcactttattttctcgggtgggcaaattgacgaaggtcaatggcgaaacggttacctcacagaaaataactgaaattgggaaaaatgggttaagagttcaaatgactctcatgcctgctcgtgacggcaacatgtacggttttgaatatatccgcccggatgggaacagtaagcgtcgctggctaaatgtcgaactaattcgcaccaacatggaacaacctcgcattattggcactttcgattgcaaaaacaccgctggataa

SEQ ID NO: 185582 - DNA, 1080 bp, Klebsiella oxytoca
atgccaagaaactggaaccgacattttgagctacagctcatcgacgagaacggcgagggtatcagcctcagcgacttcaaagttacctttaccatagagcgtaacgataaccgatggcccgcaatggcgctggtcaaaatctataacctggcccccgaaacccagaaccgtatcatgcgccgtgagtacagcaaaataaccctgatagcgggttatgacgggctggatagtgcttcctctgataccgtaagcgccagcgaggtagggaaggtgcgctacgtaacaaatgacacgataaacagccctgatggctcaaattacggcgtcattttcagcggtgatattgctttcaccgtagaaggcaaagacaacattaccgatcggtacgtccgtatacaggcatttgacggcgacaaggcgtttatggaagcgcagatcagcacctcgcttgccgccggctatacgctgagtgatgagtacaatttgctcatgaagcaccttgagccgttcggcatccgtaagggggttgagccggttttccctggcacggtctatccgcgagcagcgtcataccacggccttgtgaacaactatctttcccggctggctgatgatctccgcgccacatggcaattcagcttcggaaaggttgacttcattcagcaggatgtggcgaaacatcgtgcaatcgtcctgaacgctgataccgggctggtgggtatgccgcagcagaccattggcggcggggtgaatgttacgtgtcttattaattccttcattcagctacacgggcttattcagctggatcaggcgtcagtgtatcgtgcacagttgagcaatgagcaggttgtacaggctggtggcattgcgccggagcaagaggtcaacggtaaccttgtcacaagtggactggcgcagagagagaaccccgccagcgttgcgacagacggtgtttatatcgtccgctatctctcatatcgaggcgatacgcgcgggcaggactggtatatggatttagcttgcgaggcgcggggtaatgctgatgttccttctcaaccaacaatcaataaatggttatga

SEQ ID NO: 185583 - DNA, 306 bp, Klebsiella oxytoca
atgtccgtttcggaaattccgttagcgcccgatagtcagagttttaatatcaccctggctggcgttgattatcaaatgcgcgtggtctggcgtggggtatgttggtttctcgacctgatggacagtaccggtacactgatgattggcggtatcccgctgatcaccggcgctgatctgctggcgcaatatcactatctcaatctgggattctcgctgtatgtagtctgtgacgacccggccagcgaaaacccgacacagtttgatcttggcatcaacagccacctgtacgcgaaaactgaggattaa

SEQ ID NO: 185584 - DNA, 588 bp, Klebsiella oxytoca
atggatattctttctacgctgtttcagcaaaatagccgcagaatcgggttaatggtgccaagcgttgttgtatctgaaaaacacactgacatgctggagattaccgagcatcccgttgagcgccccacgtctgctggggctggttttattgctgatcatgcgtatcgccgcccctctgaagtggtaatggaaattggctttgctggcggaggttcactgcttgatttctacgacacccgaaatattggactgtcgacgccgctcaacagcatggggccgaaagaggtttatgcggagctgctgaatatgcagcaagataagcagttgctcgacgtcaccacgggcaagcggttgtacaaaaacatgctgatccgctctctggaggttaccactgaccgaactaccgaaaatgtattatcggccacagtgacacttcgagaagtcattatcactcagacaaaaagcatcaaagtggctgataaagccgatatgaaatatggcgtaaacacatcggccgtaattaataccggaactaaaacgccagtaccgaaaaatgagtccattctttccagcgtgtttgggggttaa

SEQ ID NO: 185585 - DNA, 2007 bp, Klebsiella oxytoca
atgaatgctgaaactctgaaggattttttaatcagtttgggcttcaaggtggatgacgccggggccagaaagtttgatgccatcgttaccggcgcaacgctcaaggctattgagctcggcaccaaagtggagctggccgccgcgtctgtggtggcctttaccgcgaaagtcgccagcggtctcgataacctgtactgggcttctcagcgtactggcgcgacggtgcagggcattaagcaaatcgggtatgccgtcagccagatgggtggcagcgtggacgccgcccgaggttctctcgaaagtctggctcagttcgttcgtaccagcccaggtgccgagggcttcctgaatcgccttggcgttcagacccgcgacgccagcggcaatatgcgggacatggcgacgatctttaccggcgtcggccagcgtcttagcagcatgccgtactaccgcgctaatcagtacgcgcagatactgggcatggatgaaaataccttgctggcaatgcgtcgtggtataggcgagtacgtgggccagtacaacgccatgaaaaaggccatcggttttaacccggatcaggcatcggcggcatccaacaggtttatgacctcgctgcggtcgttcggtgaaatggccggcatggcacgcgacaaaatcggctctaacctcgctggtggcctcgcgggagccattgataacctgcgccgccagatcctcgataacttcccgaaaatagagcgcaccattaacgcagtggtgaaaggcatactctggatgggggaggccgttggtcgggtggtctatcgcctgatacaggctacgggtgatatccgggactggtggaaagggcttgatgaggactcacagaaactcatcggcacgcttggcggcatgctggtgctctggcgccttctgaacgccgctatgctcgcctctccgattacttgggtgcttggtcttgcgggcgcaatgctgctgctctacgacgattacaggacgtggaaagaaggcggtaaaagcctcatcgactggaaacagtgggagccagacattgaaaaggccaaagcggcgatactgtggcttcgcgacaagctgctgggtctgaaggatgatgtcggcggttggaaaaatgccctagagggaatcgctaccttcatggctggcgcatgggtagctaaaatcattggcgctcattctaaacttatgggacttccgataccgccctggctgaagctttgggcggtgtatgccgggtatattgtcagcgataaagacaacatatctgacagcgctaaatcctcatgggattacaccaagcgcaatatcggggatgctctggctgcaataggcattaaaacagatcttggccggaaggatgtcagtgaggtccgtgatcaccctgcatggatgaattggttactcggacccggaaagataatccgtcaggggcagagtaacggtgtggtatatggtcccaatattcaaccggacattcccggtggcggtggcactcttgccgacagaaacaacaaccccggcaatatccgccccgtgggtgggcagggtttccgaatgttccggtcagctatccacggctgggaagcgatgaaaaaccagctgatgcgctatttcaccggtaaaacgaccggtcggcgcctgcagacaatcatggatatcgtcagcacctgggcgcccgcgggcgacaataacgacccgcagcagtatgcacgtcaggttgccggatggatgggggtatcacccacggcagcacttaacctgtcagatccaaatacgatgggggctcttatgcagtcaatggcccgcaaagagggctattcgaactggaacagtccgttggctcatcaggctgcaggggcaacgctgaatcaggaaaccaatatccatattcacggcgtcaataatccgcgagaggcggccaatctggtggttgaaaggcagaacaccgtaaacaatcgggcaactcaggatctggggaggagtaactga

SEQ ID NO: 185586 - DNA, 186 bp, Klebsiella oxytoca
atgtccagacaaaacgtaaacgtaaaaccggtattgctcagtcacgagcagataaaggcgctgagtgacattcaggaacagcaccgcaaaacatccagtatcggcgttgcgccaactatccacgagattgcacgcggtctgatggataaggcgctggcgtctctttcagacggagcaaaagcatga

SEQ ID NO: 185587 - DNA, 1083 bp, Klebsiella oxytoca
atgattaatgttacgaatgaaatgctcattgatgtagtcagtgatgcgcttacagggaagagagaaagtcttctcatgcggctaagagttatggcaaaaaaactcaagaaagaatctcctgagttagcaaacaaactggaaagcctgcttctgcataccagcggtgccgtccctgttgagcgcgcccagtcactgatacctaaagccgctccagttgatgctgacagtaggcaaaagttgttagttgaaacttatcctgtggttatggatgtagagcctgtttggcctagtaaaactgatgtgcaactaaataggtttgtgatcgaatgggaaatgaaagaacgtctctataaggaggggcttcacccttccagatctcttctcatgggggggcctccgggagttgggaaaacgttagctgcaaaatggctggcttgtaagcttgatatgccgcttcttacactggatctagcgagtgtaatgagcagttatttaggtaaaacgggaaataacataaaagcagttcttaattatgcttcatcattcccatgcgtgctgctgcttgatgaatttgatgcaattgctaaaaaaagagatgatgcaacggatgtgggagaactcaagcgattagttactgtgctcttacaagctattgatgaatggcctaatacctctatactaattgctgctacaaaccattcagaattactcgatcccgctgcctggagacgatttgatagggtgattgattttgactatccaacaaaagacctaattcaaaaatatttaatgtctaaagatatcggtgatagtttggctgagtatatttcgtccagattggataaggtatcttatgccgtaattgaaagagctataaatcaggctaagcgtaactctattatagaaaattctcctttaagttcatcgttaatagatgaattattagaaggggagtctattgaagacgttattagaataatgttagctgaaaatgttgcgcaaaggaaaatctcacgcgacctaggcatacctagaactcaggtcagtaaatttgtgaaggcagaggaggaaggaaatgaatga

SEQ ID NO: 185588 - DNA, 2193 bp, Klebsiella oxytoca
atgaatgataaaaatatgctgctcggatatggggaaactctaactggttcaatagaattgaatcgtggcggtggtggtaaaaacaaaccttatacctactctgaaaacaagcctgttatttcccaacagttgggcgttttgatttctgaaatcaataaaatcccgctttcagcaatgcctgagggaaaagctgtggcaaaatttgttcttcacccaacattcctggctaaaagctattttcctgtcgggttgttagataggttttctcttggtagtatcggtagtaaagctgttaaaattaagcctagaaaggatatcaaaaagaaggggcggaaagatgagtatacaacggcctgtatttatgtttccggtaagcaggaaaactttcagaaattccttgatgctattaataaagatgcgttaacgaagggacagcaaaacgactttattacgctggaaagtatttcaatacttgaagtatctgataaagtaaaatcaatcaacaatcatgaaatgatgaatattgaggtggcgctgcatactccagaaaacacctcaagtgtaattgatacttttgaactcttcgctttgcaaaatggcgctatcattgatacaacaaggagcataaaagttaaaggtttaaccttcatgccaattaaggcaagtaaagatattgctttaaaactggctgagttttctttccttagaacgcttagagaacttcctgaattaagattaagcgaaccagttatagcacgatctgtgacacaaacttcgcatcttagtttgcctactgagggggctgtgaatccaaatttaaaagtggctatattcgacggtggcttgggagtggatgatttcagcccatgggttactgagtacacctttaatggcaattctgccacaagtgctaagttactttctcacgggcaggatgtaacgtccactgttctgtttggtgctctgagtacggacaccgagaaattgatggtacctttttgcaatattgatcattatcgtgttttagaccccaatattaataattcggatgttgatctctttgatgttttgatccgaattaaaagcgttttagaacaaaaacattatgattatgtgaatttaagtttaggaccaagattaccagttgatgatgatgatgttcatgtgtggacttctacgcttgaggaaattcttgcagctggtgaaacgctttgcactattgcagtaggcaatgatggtcatctccctgctcaattgaacagaatccagcctccagcagacttggttaatggactatctgttggtgcggcgacatctttatctgaagactgggagcggtgctcctacagttgcattgggccagggcgaagccccggctttgtaaagcctgatggggtcgcatttggtgggaatgaggatgaaccttttcaggtatacagccctatgcttaatgggcttgccagcactgccggaacgagtttttcagcaccgttggtgttgcggcaggcgatagcgttaagttcatcactgcaatacaacattacgccgctgactgctaaggcacttcttatacatcatgcagaatgtaaaaaacttaatcgccacgaggtaggttggggtcgtttccctcatgatctgagtgaagtgatattctgtggggatgatgaggtaaaagttatctatcaaggaaagttgaagccatcccaaaacatgagagcgcttattcctgttcccgaaattccgatgaggggtcatgtgaatttgagggcaacattctgcttctcaagtccagtggatgctgagcaccctttaaactacaccagaagtggattggaggtaactatgcgcaaaggcatttcggatagtgatggactcacgttccctcttttcaacctgaaaaatgtttatgctgatgaaaatgagcagcgcattgatgcccataaatgggagacgacgttaagaagtgaacataccttcaaagaaggtgagttaactaatccttgctttgacatcacttattatggtcgcgattgcgggatgcctattgatgtagatgagttagatgaattgccttatgtgctaattgtaactttatctgctgaggaaatgcctgatttatataacctaataaggcaaaaatatcagacattgcagcctatccaggttcaacaacaaattattttacgtacttga

SEQ ID NO: 185589 - DNA, 315 bp, Klebsiella oxytoca
gtgcttcctggcttccgcaacctgtttatgtattcactgtcaacaacaggtaaaaaggatgggattccgatcatcccgctgtcaggagatgcggcaaaagatgagtttctgaacatcaagaacgtgggccgcgatgacatgatggcagcgcactgcgttccgccgcagatgatgggcatcattcccaacaacacaggcggctttggttatgtggaaaaaaccagccgcgtctttgtgcgtaacgaattgatgtcgctgcaggatcgactgcaggagttgaattattgttttggagagggaagtgatccgctttga

SEQ ID NO: 185590 - DNA, 369 bp, Klebsiella oxytoca
atggctatggcccgtctggctgtggcgctgccctgtaatgcggcagagaacggagaggctactttctggctggatgtcattgcctttggtaagcaggccgatgcgctggccaaacaccgtaaaggcgaccttgtcagcgtggcgggcaatatgcagctcaatcagtgggctggtcaggatggcggtacacagcaagtctatcaggtcattgcggacagtatactcagcgccagaacggtgcgacctggaggtaaagcggggcaaaaaggacaggatactgatgccctacgcagggctcatgagcagcaaccacccactaccgggtatgaaggattcgaccggacgccgccgtatgacgatgatttttag

SEQ ID NO: 185591 - DNA, 216 bp, Klebsiella oxytoca
atggccaatattactcaagatgatgaatggatgatggaagcgggaattatagcgaggatgtatatgactccccggcaaataaaagcttaccgcagcgggcggtgggtagaaggcattcattataagaagcattcccccgatccgttcgctacagaagggagagcgacacttctttataactacacaaaaatcaataagcttgttggagatacttaa

SEQ ID NO: 185592 - DNA, 2676 bp, Klebsiella oxytoca
atgcgaaatgattttgtgagcgatgtacgaagcatggctaatggctactggccatcgatacttgagcgccttgctattccgacgaaccgaagtgagggggaatgtccgtcatgcgggggtaaaactcgctaccgtttcgatgacaaagacgggcggggaacttactactgctcacactgtggggcgggtaccggtctggatctggtgatgaaggtcaatcaatgcggtgccagagaagcggctgagctggtagctgaagcgatggcgctgccgatgccgatgccgatgcctgaaccgaagccggccagagagaagcctcaaacggatatctccgggaaagtggccgggatggctgctaaagccgcatccggacagtcagcctatctcagatcaaaggggcttcaatgcctcttcccgatgctgtccgatggatcgctggtgctggtgctgaaaaacggcgctggcgcagtcaccggcgcacaggtgattaagcccgatggcagtaaacggctggtggccggaacggtgaagaaaggtgcgttccatatcatccaacctgttgattttcccgagaccgtcattttggccgaggggctggcaactacgctctcagttaacctgatgcggcctgacgcgctggcagttgttgccgttgatgccggaaacctgctgcccgtagcggaggtcatgcgccggcgatacccggaggcgcggatcattatcgctgccgacaacgacattaagccaggagagccaaatacaggaaaagaagctgcggagaaggctgctaaagccgtctctggctgggtggctttacctcaatctgaggaaaaggccgactggaacgactaccaccagcaaaacgggctggaagccgctacagcagcacttaacgattcgatgtacctgccggagggcgaaaaagtggttgtaaaactgaaggcgattgacggcggaaaaaaagagaaaaaatcagggccacgaggtgacgaactgaaaccccgcattgagagccgtgatgatggtatttactggataacgccaaaggtggacaaagacagcggcgagatcatcaataacgaaacgtggctgtgctctccgcttgaagtggtaggggctggcagtgacggggcggaacgctatcttgttttgcgctggcgttctccgcgtggccacgcggatattatcagagcactcccctgcgctgatatcggagagcgtgaaggctggcgctctctaaaggctggtggggtaaatgtgacgacgaaaaacacattccgggcgattctggccgactggttacagcagtgcggggcggggcatgaatggattatcacccatactactggctggcatcatggggcatatatcatgcctgatggtgaggtgattggtgatccagagacgcccattctctttaacggtcgtagtgcggcatcttccggttatgccattgctggtaccgctgagggctggcgggattccgtcgcccgcctggctggcggaaacccctctatgatgctgggcgttgccgcggcgttatccgctccacttatcgggctggtgggtgctgatggtttcggcgtccatttgttcgagcagtcgagcgccggtaagacaacaactgccaacattgcgagcagcctgtggggtgagccggatgctttacggctaacctggtacggtactgcgcttggcattgccaacgaagcagaggcacataacgacagcttgttaccccttgatgaggttgggcaagggagtagcgccaaagatgttgccacgtctgcttacactctgttcaacggtgccggaaagctacagggggctaaggaaggtggcaaccgtgagctgaagcgctggcgaactgtggcgatcagcaccggggaaatggacattgaaaccttcctgtctgctggtgggataagagttaaggcgggccagctggtgcgcctgctgaatatcccgatggagaaatcgatggtctttaacggcctgccgaacggcaaggctcatgctgacgcgttgaaagaagcctggactcatagccatggcgcggcagggcgtgattgggttaaatggctggcaacccaccagcaggaagccaaacaggctgtacgggacgcgcagacgcgctggcgtggtctcattccggctgattatggtgagcaggtacaccgcgtggccgaacgctttgccatccttgaagcggctctggttgtgggagcaccgatcacaggctggagtgagcaagccagccgtgatgccattcagcatagctttaatgcctgggtgaaagagttcggtacgggcaacaaggagcaccagcagatcatcgagcagtgtgaggcgtttctgaatgcgtatggtctgagccggttcgctccgttgccttatgaccccaccagcctgccaatcagcaaccttgccgggtatcgcaagcgtaagagcagccatgacgatgcgccgatggtgttctatacgttccctgcaacgtttgagaaggagattgctcaaacctttaacgtcagccagtttgcacgagcacttatagccgccgggatgctttcggagccagccagcgggcgtgggtatcagcaaaaatcaccgcgtgttaatggacgacaggtcaacgtctatgtgctccagtacggtacagaaaaagacgagatttaa

SEQ ID NO: 185593 - DNA, 573 bp, Klebsiella oxytoca
atgaataaacaattttatccggaagctggccctgatggtgttattacctgctccgggctggtgggctttctttcggtaacggaaaggcttagccgcggtgattatgaccgcaaccataaggaaggtatgggccttgcttgtgccgcgctggatggtgtggccctgacgtggtttgcggcagcgccagaacaacatgctgctctatggcggtggattgtggcggcggcatttatcgaggaacaggtgaaaaataacgggaatatcgacatgattggcgatgatggcctcaaagttagggtcgctctctatgccgggaaatacggcgccataaccgtttatccggtagctgagcgtgttgctcttgcaagccaggtcgaagggtacgctttacagaaatacgggcctacaacgggtatggatctggctatccagcattatcagacgatgctcgattggcgtgatggtacttactgcctgtcagatcatggccgggatattctttccgacctgcacgacaaccttatcgccaccattcacgccagtggtgttcctgcgatgccaacggagcactaa

SEQ ID NO: 185594 - DNA, 222 bp, Klebsiella oxytoca
atggcaaataaaaattctggctcatctgccagcggtctcgctcaccctgaaattatccccggcgataaatggacggaaaggagcggtatgcgggtaattatagaaagctaccagttcaacagggttaagttttatcgtgaaggctatcagtcgccgtgtatttaccctgagcagcggtttatcaaagagttttcacaagcaaaaggagcgggccatgaataa

SEQ ID NO: 185595 - DNA, 630 bp, Klebsiella oxytoca
atgcgtgaatttaatatgaacggcccgatttctattcctgcaccgcgtttagttaatggttctggtgaaatcgtgtgtcaggaagagaaaccagcggtattgctgggatcccccctgaaaaatagtaacagagttgctggtggaaaaaataaacgaaccgggcaacaggtggaaatgcaggttaacaggacagtgatcgaaaaagatagctgcctttctccggacagttccgcagagatcatgctgaaactgttacatgcactgacggatatcaaaactatcgcccataaaaagagccctacgataacaggcaatccctgtcattttcttgagctcattggggacattgccggagaagctattaggcagtctgttgtactccttgaggacgatatcaaaaaatcccagagccttgggcatactcaaatgaagaaaacgctacaaaacccgccgcagttgaatttttcacttcctgtatcagagagctttaccggacagatacttgtaaatgtcgaaaatggcacggctattaatggctttcctttaagacctggagaatttgtgggaaccgtagacagctttatgcatagctgtcgtctcgcaggttttcagatcagaatgccccggtaa

SEQ ID NO: 185596 - DNA, 486 bp, Klebsiella oxytoca
atgcgtaaccctcaacctaaaaactttacctggctgtttctggcaacttacgctgatccaaaacagcttccagtcgttctgcgtactcaggccgctaccgaagaagaagctagagcacatctggctggtgatttctctctgtcattcgccgccaaaatttgcaccgaaagtccgatccatgaatgctggattgacccagaaagcggaactctgtggcagataatgagtgattacattccgcctctttctgcgtttcccgatagtttgcgtcagaagcgaccactggttaactccatgaataccagccacggtaaagaactcgaaggcatactggcaaaaagtgacgtacaggggaaggcctctggttatctttataaagacagcgaacacatacccggcaacagccttgtggaagtgaacgcacgtatttcccgtgaagtaatcgcccctgtacaggagaaaaaagcatgcgtgaatttaatatga

SEQ ID NO: 185597 - DNA, 201 bp, Klebsiella oxytoca
atgtgtgatctaaccatccagcaggctgctgaaaaagcatatcaggcagaaattattctcgccctgatgcagaaaaggcaggttgagaaaatggaatctagtgaagtggccgcactgataaatctgctcaaagatctggtcggtgatactggcggttttcttggtgaagaagcatcacgcgaggaggtggaaaatgcgtaa

SEQ ID NO: 185598 - DNA, 1080 bp, Klebsiella oxytoca
atgatcgcggataaaacaaaggcagctttgcagagctgccaaggtcactacggaatattcaagcagagccagcataccagggttaatgctggtggtcaaagaatgagtcagctcaatattgagcccgctgattttactcagcttttatggcaaagcgtaaaattgcgctttatgcctaagttattgattgttccatccctcctcactttgaggactgtcagccgatgcgaagaaaatcgcatctcattactgatgaacttttcgcaaaggtggcaaattaatcgcgtggtaaccaaccctttccattcctttctggagttggtaggttcttttccttcaaaatcctcaaaatggcaggttcagaatgcgggccccatccatcccaattaccttcccagcagtcgttgcagcagaaagccctaccgtataattgcaatacacgtccttggtaaagatctgggccgaatctcgtttctgcaccacaaatttcgcatgtgcaataaaaatgccctttctcatctatgcgcatcatctttttccccaaatcaaccttttggttctattccttgccgacgcaattctgtgcgggctaattctttcatccaattaccaaggcttacgccttcacgctccgctgcatcgttcagttgttggcgcaactcaggattgattctgatctggaaagttggtgaccagccatcacctttaggggttttgtctcgtttaatagttgacacgtacgtacataacctcataacatggagtttattatgtacgtacgttaacacgtcgggcatagaaaagacaacgccccaaactgttggagcagtattggggcgtctaaccaaaccgttaactggagtaacgatcatggctgaacaacagcatacccaaactcaccctaaatttacatggcgttttatctccacctctgagcgctaccccgcagccaaaccgttggtgatttatatcaacgcatctagtgaacagaaagcccgcagcacaatgccgggggttaacctaattctcgcagcccgtcttccattccacgccttacaggtgacaggaggtcgagtatga

SEQ ID NO: 185599 - DNA, 633 bp, Klebsiella oxytoca
atgcgtgacgttatctcagcgcaaaataccactatgccgctggtggagtatcaggggcggcgggtagtgacgttctctatggttgatgacgtccaccagcggcctaaagacacggccaaaaagacttttcagcgtaaccgtactcgcttcattgatggtgaggacttttttattgtcggcgcgtcagaggtcgaatggggaggggctggatatttagacaggggcattaaacgccctggcaaaaaaatgaacagtccgatacgcggccgcataacgctgattaccgaatcaggctatctgctgctgaccaagccgtttaacgatgatttggcctggcaggtacagcgccagctcgtgaaagcttatttccgctgcccggaggtcgtcaccttccagcacatcgagctgccgtcgctcaaggagctggcagctatgccggttactgatgcgcaaaacgttgtcacccgtgcagggaatcattctaagcagcttcatggctcacagggcagtaatggaatgaacctgcgtaagaaggaactcaaagccctacgcccggcggaacggctggtggatgcgatggtgcagattggtttcgataagtatgagtgggaggtacagcatgatcgcggataa

SEQ ID NO: 185600 - DNA, 372 bp, Klebsiella oxytoca
atgaataagcccaccgcctaccacatcgaaatcacggggcccgagcgcacaccaatccgtgttctgacactgaataaatcgccgtggtttgtccttggcgatgtcctgattgcttccggcgcctgcgcggatgatttgatgccattcccaaattttgggtgcgaggttgttctgttgcctgccgctgacggaagtgaaatgacagagattgttgatgaatctgcattcctctggctggcgttgcgcgggtggaagtacgccgccggctcaagcgagtataggttttccgagtgggtagcgaccgacctgataccccacgctcgccagcataacagctacatccttcccatgacggaggccagccatgcgtga

SEQ ID NO: 185601 - DNA, 198 bp, Klebsiella oxytoca
atgtcccacaatcttatccgacttcccgaagttcagcgccgcactggttatagcaaggcgtggatctatcacatgatgagcgagcgtcgctttccatctccagtaaaaatcggttctcgtgcgatcgcatttatcgagagcgaaattgacgaatggattaatcagcgcattgctgaatcgcgtggtgaggtggcctaa

SEQ ID NO: 185602 - DNA, 945 bp, Klebsiella oxytoca
gtggcaaaaaaaaatgaaacaccgaatgtatggtgtcttaataatattcctgctttggaattttgtaccttattaagggctgctgagttgcttcgatgccatccaagtgatttaattcactttagccagattggagctattgagctttgtttagcccttcatgattttgaggcggcattatttacactaggtcgttgggaagaattaaatgaatgggaggaaaagtttcctcctaaattaatgaaaaagtatagtaataagtcacctttaagtctttttatgccaaaagctgaattggatatgagtccagcatcaaaaatgcgagttaagcggttttatcaaaatgaggatatacctggattaaaaaagccgattttatatctttccggactttgggcattatcaacaggttacttgcctcattcatttttcaatgcattaaaatgtaatgaacaaatcgcacttactcctttcaatttatcatttaaagaagccgatatcccaatgagtccagaagattattgtagtgataattacgtagttatggctcacccaataacagagcacctttactcatctggtttgctaaaagaaggagaagtaaaaccgattgcaacagtcacggtgaacgatatttttgttactaggcttcaaattgaaaaagtatacaattttattgggagggaaataccaagtgttataaatggaggggttagccaacctcaacttcctgaaacggtgatagagaaacccgttagaacaacagcaaaacaggctgagcttattgttgctttacttagagggattggcctaaccgatgatgatctggctggtagcgtgtcacaatttaggaataaagccagcaataaagtaagcgacctcccatttccggatgatgataaagcgttagttgaatggttacgaagagggggggtaaaccggtaa

SEQ ID NO: 185603 - DNA, 654 bp, Klebsiella oxytoca
gtgctgcgctcgccgcgcaatgcgctcatttccctgcagaattccctttctgaaatcaccggaccggtgttcagcagcgacgatctcggcgcgctcgataacgacctgatcctcaactacgccaaagacggcctgccgattggcgaaaggataatcgtccacggctacgttcgcgatggatttggccgaccaatgaaaaatatgctggtcgaagtctggcaggccaacgcgggcggacgctaccggcataagaaagatcaatacctggcgcctatcgacccgaactttggcggctgcggacgggtgctgaccgacgaaaacggctactattgtttccgcactatcaagcccggcccctatccgtggcgcaaccaggtaagcgactggcgtccggcgcatattcacttttcgctctccggcgacgcctgggcacagcgcctgatcacgcagatgtatttcgaaggcgatccgctgattaaacagtgtcctattgtcaaaaccatcaataacgataatgccatcaggacattaatcgccgagctggatacccatgccgccgtaccgctggactctctggcttaccgttttgatctcgtgctgcgcggccatcgcgcaacgctgtttgaaaaccgcacgcagggggccgcccgatga

SEQ ID NO: 185604 - DNA, 348 bp, Klebsiella oxytoca
atgttccgatattttaccctgcgcactgaacagcaattattctgttatttgtacgggggcgcgctggcgctctttctgacactcttatacccgtcttttcccgcatgggcaggcccccttctggtgatgctgccggttgcgctgttctgggccggtctggcgctgtacacccgtcataccgaccaaatgagaacgctggaggtttcaccgctggtctgtatccgtgatggtgttcaggtggtggccatgctgccgcaccacgagaaagcccggctggaatgggaaattctccaggacggtgaggtgtatcaggggtctgaggtccaaccatgcgaaaaaccacgttaa

SEQ ID NO: 185605 - DNA, 786 bp, Klebsiella oxytoca
atgaaacgtaaaatatatttgctgcttccatttattttcgccacctttgttaataacagcgttgctcaagagcctgagacagaaaagactttctccgtcatccaggaaaaaagaatcggagaaatagcggccgattatttgcgtgctcatcctgaaatactgattcagatgagcgagaaacttcagcaggagcaggaggaaaaacaaagccgggggctgacatccgctgcgctggcgcagcaggcgaaaatactgggcgataaaactatcccgtcctgggggcctgcggacggggatgtgatggtggtcgaattcttcgactatcagtgcatctggtgcagccggtttgcacccgagctggagaaggtcataaagaacaacacgaaggtgcgctatttctttatggaatggccggttttcggcagtcggtggccagcgtcactgctggcagcgaaaacaggtctgcaggtctggaaagagcaaggagcggaggcctatcttaaatatcacaatggtctgtacgggacaggcctgaatgaagggaagctgacgaagggagatattgaaaagacatcggggggaatttcatttcaaccgcagaccattgaagagattaacaccacgctgaagaatattaatgatattgccacggagacaggattaaccggaacacccggaattattgtgctgccggtaaaaggcgcgacggctgaaaacatcacagtatttaccggaatgaccgaagcagagaatattcagtctgcaatcaataaatcccgtcattaa

SEQ ID NO: 185606 - DNA, 588 bp, Klebsiella oxytoca
atgactgaagaaaaacgccctgtactgagtctgaaaagaaagccggcagcggataccgcggcgaccgggacccctgagacgcccgtagtggtacggcgtaaaaaagtggtggtggtcacgacgcctccggcctggaaggtaaagaaggagaagctggagcgggccaaaaaggctgacgaagccgcagcacgtgaatctgcgccggtggtcaatgcggtaaagccaccgcctccggtccgatatctgcgcctgctgccgccggaacaggccatcatgactttgaaggcgttctggccacagttgttcgacggtaatgtgccacgtctgctggcgacggggatgcgtgatcatctgtttgcggacattacgcaacgcaacctcccgctgtcgcataaacaggtgattaagtgcctgaaaagcctgacgcgttcagaagagtatctttccctgatgcaggctggcgctccccggtatgacctgcagggaaatattgtggcgaccgtgacgccagaagaagaaaactatgcccgtgaacggagagtgcgccagagccgcctgagtgcccgaatacagagtcagacgctttaa

SEQ ID NO: 185607 - DNA, 726 bp, Klebsiella oxytoca
atgacaacacatgtaatgcgcctcagtgccgctgaccgctggctgcaggcactcctgacctggacgcccgggcagacggatatgattaaaacggtggccctggtcctgatggtcaccgaccatgcaggcttattgctggcccacaataacgagatcatgcgcctgctggggcggggatgttttccgctgttcggtctggtgtggggggtgaacctggcgcggcacggccaaattcgccagtcgcagctgaacagtctgtggggctgggcgttggtcgcccaggtgtcttttatgctgattggatatccgtggtacacggggaatattctgtttgcctttgcggtgaccggccaggccctgcggtggttcagccagccttcccggcaatatgttctgctggccatgacactcctggcggcgtggataccgctgtcatccggcagctacggtgcggccggggtgggcatgcttatcgccggctggtttctctgtcgggcagaacgtgctacggaacggctgggatacggcgtgctgtgggccatcatggtgttattgatgaacccgaacgacgtgagtgagtcggtggccgggttgaccattgcgctgctggcattgatggtgtgttcatctgccggggaacgtgtgaaacgtttctggccacgtcatttcttcgtgatgttctatgccgtgcatctggcggtgctgggtatcgttgtctcgatgtaa

SEQ ID NO: 185608 - DNA, 5262 bp, Klebsiella oxytoca
atgatgtcgattggttcggtaaagtccgcggggagcgccggcaattactatacagacaaggataactattacgttatcgggagcatggatgagcgctggcagggaaagggggcggaggcgctggggctggacgggaaggtggataagcaggtattcacggacctgctgaaaggaaagttgccggacggcagcgacctgacccggatgcaggatggcgtgaacaaacaccggccaggttacgatctgaccttctccgcccccaaaagcgtgtctgtcatggccatgatcggcggggataagcgcctgattgatgcccacaatcaggccgttaccgaagccgtaaaacagattgaaacgctggctgcgacccgggtcatgacggacggaaaaagtgaaaccgtgctgaccggtaacctcattgtggcgaaattcaaccacgatacgaaccgtaatcaggagccccagttgcatacccatgccgtggtgatcaatgccacgcagaacggggataaatggcagtcgctggggaccgacacggtcggtaaaaccggcttcattgagaacgtgtatgccaaccagctcgctttcggaaaaatataccgtgaagtgctgaaacccctggtggaaaagctcgggtatgaaaccgaagtcgtaggcaagcacggcatgtgggaaatgaaagaggtgccggtcgagcctttttccacccgcacccaagaggtcagggaagcagcagggcccgatgcgtccctgaaatcccgggatgtcgccgcgctcgatacccgtaaatccaaagaaaccctcgacccggcagagaagatggtcgagtgggtgaacaccctcaaagaaaccgggttcgacatgcgcggttaccgcgaggatgccgataagcgcgcgacagaaatcgccagtgcgcccgtcagcccggtgaaaacggacgcccctgatatcagcgacgtggtcacgaaagccattgccgggctcagcgaccggaaggtgcagttcacctatgctgacctgctggcccgtacggtcagccagctggaagccaaacccggcgtgtttgagcaggcgaggacgggtatcgatgcggcgattgaacgtgagcagctgatcccgctcgaccgggagaaaggcctgttcacctcaaacatccatgtcctggatgaattgtccgttaaagcgctgagccaggaggttcagcgccagaatcatgtctccgtcacgccggatacctctgttgtgcgtcagtcgcctttcagcgatgccgtcagtgtgctggctcaggacctgccgacaatggggattgtctccggccagggcggcgcggctggccagcgtgagcgggtagctgagttaaccctgatggcacgggagcaagggcgggacgtgcacattgttgctgctgacaaccgttcgcgtgagtttctgtctgcggatgcgcgtctggcgggagaaacggtgaccgggaaatctgccctgcaggacggaaccgcgtttatcccgggcgggacgctcatcgtggaccaggcggagaagctgagcctgaaagagactatttctatgctggatggcgccatgcggcataacgtgcaggtcctgctctccgacagcgggaagcgcagcggcaccggcagcgcgctgacggtgctgaaagagagcggggtgaatacgtatcgctggcagggcggaaagcaggcgacggcggacatcatcagtgagccggacaaaggcgcacgttacagccgcctggcgcaggagttttccgtcagcgtacgcgaagggcaggaaagcgtggcgcaaatcagcgggacgcgtgagcagggcgtactcaacggcatcatccgcgacaccctgaaaaacgagggcgtgctggggacgaaggagatggccgtcaccgccctgaccccggtctggctggacagtaaaagccgcggcgtgcgggactattaccgggaaggaatggtggtggagcggtgggacccgaacgcccggaagcatgaccgctttgtgatcgatcgggtgaccgccagcagcaatatgctgacgctcagggacaaagagggggaacgtctggatatgaaggtttctgccgtcgacagccagtggacgctgtttcgggccgataagctaccggtagcggaaggtgaacgtctggcggtgctggggaaaattcctgagacgcggttgaaagggggcgagggtgtcacggtactgaaagcggaggccgggcatctgacagtgcagcgccccgggcagaaaaccacccagaccctggctgtgggcgccggaccgttcgacggtatcaaggtcgggcacggttgggtggaaagccccggcaggtcggtcagcgagacggcgaccgtctttgcctcggtgacgcagcgagagctggataatgccacgctgaaccagctggcgcagagcggaagccatatccggctttactccgcacaggatgcggaccgcactacagagaagctggcgcgtcataccgccttcagcgtggtctcagagcagctgaaggcccgttccggcgagacagaactggatgcggccattgcgcagcaaaaagcaggccttcactccccggcagaacaggccattcacctttccattcccttactggaaagcaacaacctgaccttcacgcgtccgcagctgctgtccacagcaatggaattcgacgggggaggtaaggtcccgatggcggatattgaccggtccattcaggcgcagattaaggccggcagtctgctgagtgtgccggtggcgcccggtcacggcaacgacctgctgatttcccgccagacctgggacgcagaaaagagtgtgctgacccgggtactcgaagggaaagcggcgatgcagccgctgatggaccgcgtgccggccagcctgatgacggacctgacctccggacaacgtgcggcgacccgcatgatcctggagacctctgaccgcttcacggtcgttcagggctatgccggggtggggaaaacgacccagttccgggcggtgacgggcgccatcgaccttctgccggaagagacccgcccgcgcgttatcggtctcggtccgacacaccgtgcggtcggggaaatgcagagcgccggcgtggatgcgcagaccaccgcctcgttcctgcacgacacgcagctcctgcagcgtaatggccagacaccggatttcagcaacaccctgttcctgctcgacgagagctcgatggtggggctggccgacacggcaaaagccctgtcgctgatagccgccggcggcggccgggccgttctgagcggggacaccgaccagttgcagtccattgcacccggccagccattcagactgatgcagcagcgcagcgccgcggatgtggccatcatgaaagaaatcgtgcgccaggtaccggaactgcgaccggcggtctacagcctcattgaccgcgacgtgaacagcgcgctggcaacaattgagcaggtcacgccggagcaagtgccgagaaaagaaggcgcctgggcgccgggcagttctgtggtggaattcacgcgggcacaggagaaggcgattcaggaggcactgaagaaaggcgaaagcgtgccggcaggtcagcccgcgacgctctacgaggctctggtgaaggactacgctggtcgcaccccggaggcacagtcgcagacgctggtgatcacccatctgaataaggaccggcgggcgctgaacggtctgatccatgacgctcggcgggagaacggggaaaccggcaaagaggaaatcaccctgccggtgctggtcacgagtaacatccgtgacggtgaactgcgcagactgtcgacctggacggctcacaaggaggcggtggcgctggttgataacgtataccaccgtatcagcaaagtggataaggataatcagctgatcaccctgacagacagtgaaggaaaggagcgatttatctcaccccgggaggcatcggcagaaggcgtgacgctctatcgccgggaagatatcaccgtgtctgagggggaccgaatgcgcttcagcaaaagtgacccggagcgcggctatgtggccaacagcgtgtgggaggtaaaatccgtctcaggtgacagtgtcacgttgtcggacggcaaaacctcccggacactgaacccgaaggccgacgaggcgcaacgccatattgatctggcgtatgccattaccgctcacggggcccagggggccagtgaaccgtttgccatcgcgctggagggcgtggcggagggccgaaaagcgatggccagcttcgaatccgcctatgtcgggttatcgcgtatgaaacagcatgttcaggtctataccgacagccgggagggctggataaaagcaattaatgcctcgccctcgaaagcgacggcgcacgatattcttgcgccgcgtaatgaccgggcggtacacactgcggagcagctgttcagccgtgcgcgaccgatgaatgaaaccgcggcaggccgcgcggcgctgcagcagtccggccttgcgaaggggatatcgcccggaaaattcatttcgcccggaaaacagtatccgcagccccacgtggcgctgccggtgtatgacaagaacgggaaagaagccgggatctggctcagttcgctgacggacagcgacggccgcctgcaggtgatggggggcgagggacgggtgatgggcaatgaagatgcccgctttgtggcgctgcaggggagccggaacggcgagagcctgctggccgggaatatgggagagggcgtcagggtcgcccgcgataaccctgacagcggcgtggtagtgcgccttgctggcgatgaccgcccctggaatccgggcgccatcaccggcggacgcgtctgggcagatccgataccggtagtttcaccggaggcggcaggaactgacattccgcttccgccagaagtgctggcacagcgggccgcggaagaggcgcagcgtcagaatatggagaaacaggcggaacagactgcccgggaagtggccggggacgggcgtaaagccggcgaatctgaagaccgggtaaaagaggtcatcggagacgtcattcgcggtctggagcgcgaaaaaccgggtgaagagaagatgaccctgcccgacgatccacagacccggaaacaggaagcggccgttcagcaggtggctcaggagagccttcagcgggagcgcctgcagcagatggagcgcgatatggttcgtgatctcaatcgtgagaaaacgctcgggggcgactga

SEQ ID NO: 185609 - DNA, 2298 bp, Klebsiella oxytoca
atgagctttaatgctaaggacatgactcaaggcggtcagattgccaatatgcgctttcgcatgtttggccagattgccaatattatattctatgtgctttttattattttctgggtgttgtgcgggttgatactgatgtaccggctcagctggcaaactttcgttaacggctgcgtctactggtggtgtacgacactggcgcccatgcgcgatattattcgctcccagccggtctatacgattaactattatgggaagtcgctggaatataattcggagcaaatccttgccgataaatataccatctggtgcggtgagcagctctggaccagcttcgtttgtgccgccatcgtgtcgttgaccgtctgtattgtgacgttctttgtcgccagctgggtactgggccgccaggggaaacagcaaagcgaagatgagaataccggagggcgccagctttccgataaaccaaaagaagtggcccgccagatgaaacgcgatggggtggcctccgatattaaaattggcgacctgcctattctgaaaaactccgaaatccagaacttctgtcttcacggtacggtcggctcaggcaaatccgaagtcatccgccggctgctgaattacgtacgtgcacgcggtgatatggccattatttacgaccgctcctgtgagttcgtcaaaagctattacgacccgtcactggataaaattcttaacccactggattcccgctgtgcagcctgggatatatggcgcgaatgcctgacactaccggattttgataacgtctctaatacacttattccgatgggcactaaagaggacccgttctggcagggctccggccgcaccatattttccgaaggtgcgtacctgatgcgcgaggataaagaccgtagctacgaaaagctggttgataccatgctgtccatcaaaatagacaaactgcgcgcgtacctgaaaaacacgccggccgctaacctggtggaggaaaagattgagaaaacggctatctccattcgcgccgtactgaccaactacgtcaaagccattcgctatctgcaggggatcgagaaaaacggtgagccgttcactatccgtgactggatgcggggcgtacgtgaggaccagcccaacggctggctgtttatctcttccaacgctgacacgcatgcgtcactgaagccggttatctcaatgtggttgtctatcgctatccgcggcctgctggggatgggggagaaccgtaaccggcgcgtgtggatttttgcggatgagctccccacgctgcacaagctgccggacctggtcgagatcctgccggaagcgcgtaagttcggcggctgttatgtgtttggtatccagtcttatgcccagcttgaagatatttacggggtgaagcccgcggcgacgctgttcgacgtgatgaacacccgtgcctttttccgctccccaagtaaagagattgctgagtttgccgccggcgaaatcggtgagaaagaaatcctcaaggccagcgagcagtactcttacggtgcagacccggtacgtgacggcgtgtcgaccggcaaggaaaaagagcgggaaacgctggtcagttactccgacatccagacgctgcctgacctgtcctgctatgtcaccttgccgggcccgtatccggcggtgaagctggctctgaaatacaaatcccggccgaaaattgccgagggatttattctccgtaacctcgatacgcggacggacgccagactggataccctgctggaagctcgcgaagctgaaagcagtcatgcccggatgctgtttacgccggacgaagcgacagggatgcctgaagggggagaaacggcgacggatacttctggtgcaccggcggaggttgctccgatcaaagcgtctcctgcggcggagaagcaaccggctcaaagtgttcctgttaaggctccgtctgcatcccagcctgtatcacccgaacgccacgtcacaaccgtcccgcttactgtgacccgaccggcggcggcgacaaccggcgcagcggcagcggcatccacttccggtgcgactgctgtgcctgcgggtgggacggaacaggcactggagcaacagcccgcagaacagggtcagaatatgctgccagccggggtgaatgatgcgggtgaaattgaagacatggatgcgtatgacgcctggctggcgactgagcaaacacagcgtgatatgcagcgacgcgaagaggtcaatatcaatcacagccgcagcgagcatgacgatattgaggtgggagggaacttctga

SEQ ID NO: 185610 - DNA, 732 bp, Klebsiella oxytoca
atgaaactaaataaagtcatggctgtaatggtcatcagctcagcactggtgctttctggttgtagcgcaatggggacagcaattaaaaagcgcaatctggatgtgaaaacacagatgagcgaaacaatctggctggaaccgtcaaataataagaccgtttatctgcaaatcaaaaatacctctgataaagacatgagcgggctccagtcgaaaatcaccagtgccgtcacagcaaaaggctaccaggtcgtcactaatcccgataccgcgggttactggattcaggcaaatgtgctgaaggccgataaaatggacctgcgtgaaacccagggctggctaagccgcggttatgaaggcgcagctacagcggctgcgctgggggcagggatcaccgcctacaattccagttcagccggcgcgaccctcggtgtcggcctggccgcaggactggtaggcatggcggctgatgcgatggtggaagacgtgaactacacgatgatcaccgatgttcagatctccgaacgggccaaaacccaggtacagacggataatgtcgcggtattacgccagggtacctccggtgcgaaagtgcaaaccagcaccgaaaccggtaatcagcataaataccagacgcgcgttgtctccagtgcgaacaaagttaatctcaagttcccggaagcacagcctgttctggaagaccagctggctaaatctatcgcgaatattctgtaa

SEQ ID NO: 185611 - DNA, 528 bp, Klebsiella oxytoca
atgataaacaataaagtcatcctccacgaggtggaggaactgaaaaatgtactttcacaaggggaagcagcgataccgtctttttgggcatgtctgtggcctggattagttatagttgcatggaatgttctttgcgcgatgattagcgttaatcataactaccttgcagtaaaatatattttttgggtcgtgatttttccagggggggtggggttgattcttcttcttggtatagctagtgctcgctccttgtttttatccgtgcctaaatcctttaggatacgttcaaatatatatcgatttttttccagaaaaatcattatttatgcatttttatatatgttgacgattctttttcttgccttttttaatcgtttttcttatgactcaccatttccttttggttttatggtcttaattacgtcgattttttttggggttgttatgaatctggactttggaaggtatcagctatcgttactcacatctgcgataaactctttcaaggcagagaaattggaaggttag

SEQ ID NO: 185612 - DNA, 2850 bp, Klebsiella oxytoca
atgctggaaatctacacgatagccggcggcgactggtttcggggcaacctgaatgccattgccgctttcatgagtaccggtacctggtcctccatcgagaaaatgtgtatcgccttttccgtgctgattgtcgccagcagctgggtgaaaaagcataacgttatggatctggtcggctgggtgtttgccctgacgctggtctcgatgctggtcgtcattcgcaaaccagtgcagattatcgactacagtaatgtctctcaggtctatcaggtcgacaacgtcccgataggcctggctattcctgcctcgctgacaacacgcgtcgggaatgcgctggtacagagctatgagatgattttctccctgcctgacagcgtgacgtacagcaagacagggatgctgtttggcagtaatttaatcgctaaaagcaccgactttttatcgcagaacccggagatcaccacgttgttctccgactatgtacagaactgcgttatgggcgacattttcctcaaccataagtactcgtttgaggaactgctgaattcctctgatccgtacaccattattttctctaaccccagcccgctgcgcggggtatttgataaaaataatcaatttaaaacctgtcaggaagcctcccgtgatttgaaatcagccctggcgctggattctcagactggcgggaaaacctggaactactatgtgcgccagctctttggtggcaaacccaatccggacctgctgttcagccagatgatcggtgacagctataacttcttctacagctcggggcagagcgcgggacagataatccgccagaatgtcaccatgaatgcactgcgcagcggtattcagagctacgcggcccgcagtggcgatacggccagcctggtgaacatcgccaacacctcttcgctggagaaacaacgcctggcacaggcgacaatgggccaccaggcattacgctccctgccgttgatgcagacggtcgtgatggggatcatgattggcctgtttccgatcatggtgatggccgccatgttcaacatgatgacaatgcaggtcatcaagggttacttttatgcgctgatgtggctgcagtcctggcctctgctgtacgccattctgaacagtgcgatggcgtattatgcgaagcaaaatggagtaccggtggttctgtctgaactctctcaggtccagctgaaaaactcggatattgcaacaaccgcaggctatatctcgatgatgatccctcccttaacctgggccatgattaaaagtatgggggcagggttttccagcgcgtacagtcattttgcctcgtcgggcctcagctcgacgtcgcaggcctcttccagcgtggtagacgggaattactcgttttcgaatatgcagacggacaatgtcagcggaaacagctggaacaccaacagttcaacggcatttggacagatgtcccggcaactggggaacggaggcatgggtacacagacccgggatggttctatggtctgggacagcagcggcgcaatgtcaaaactgccggtggatattaatgttggccggcagatagccagtgcacagcagcagatggcacgggagtcggatgtgcaggcagagagctctctgcagggctataacagcagcgtgaccagcgcctggaacagcctgaagcagtttggcacaaatatggggaccagcgcgtcaaccaccaccggcgccgataatactgagtcatcacaagactcgatggcgaagagtaaaatgtggaacgcggttgtttcaaatgcaaaagccaacaacatcagcaatgaagagtctttccagcaattgatggatgactcctctaaacgaactcaatcttttgatatacatgcatctggtaaatggagttccggagaccagttgtttggcaagcttggtaagttgggcacggggttatctgctgaagttggtggaaaaggaagcgctggctggggacatagctcaggtgatactgataatgtcagctcttctgggcgggaatcacatgatagcaggcatgataccagtagccaggcagcgaaagactttaaagaggcgtccgattacattacaagccataaaaccagcacttctggtaatacaacagataataatgccagctcccgcgtggaccagttctctacgtcactttccagtgcgaaaaacagctacgaccaatatacaaacagccgtacacgtagccatgaacttagtgaaatggcgtcgcgtaccgaaagtatgagcggccagatgagtgagaatctgacgcagcagtttgctaactttgttcaacaacgttctccgcagaatgcagaagctatcctcaccaataccagttcacctgaagtagcggcacagcgggaatcactggcaagggagtttgttaaagagcaggtcgagcctaaagtggatggtgcctatcaggaggcgagagggacaattggtcagggaatgcctaatgtgtcaggcggtggaggcacgggttccgtagaagctgattatagccagcacagtggtagtattgatggaatgacgcataatgccggaattaaggataatgtgggtcagacagtagatacgatggtgtctcaaaataaacaggcacaccaggaaagccagcagggaattcagcagcagggtgatggggtcaagaaacagcagactgatctggaaagtcaccataaaacagaaggaaatagattcgaaaatgaatataatgaaagaaagagtaaggtgaaatctttaccaggcgctgacgctccgggtgagttagcggataaggcggctaaaatccaaaaggattatcttaatagggaaaggtga

SEQ ID NO: 185613 - DNA, 1371 bp, Klebsiella oxytoca
atgttcatccgtaaaccattatcagtgctttgtggaatgttgctaggggtgtcattgacggcggccgcagatgttaacggcgacatgaacaacttcttcaataagctggggttcgcgtccaataccagtcagccccaggtctggcaggggcaggcggcgggttacgcttccggcggttcgctttatgcgaggacgcaggtgaaaacgatccagctggtcagtatgaccctgccggatattaatgccggctgtggcggcatcgatgcctacctcgggtcgttttcttttatcaacagcgagcagctgcagcgcttcggcaaacaaatcatgtccaatgctgcgggctacttctttgacctcgcgctgcagaccactgtaccggaaatcaaaaccgcaaaagacttcctgcagaagatggccagcgatatcaacagcatgaacctcagcagctgccaggcggcacaggggatcgtcgggggactgtttcctcgtacccaggtagcccagcagaaggtctgccaggacatcgccggtgagagcaatatctttgccgactgggcggcttcccgtcaggggtgttcggttggcggccagatggacaaggtgcaggataaggccagcgacaaggacaaagagcgggtcatgaaaaacatcaacatcatgtggaatgccctgtccaaaaaccggctcttcgacgataacaaagagctgaaagagtttgtgatgaccctgaccggcaccttgatttttggggaaaacagtgaaattacgccgctgccggcacggaccacggatcaggacctgattaaggcgatgatggaggggggaacagcaaaaatttaccactgcaatgattccgataaatgtctcaaggtggttgcggatgcgacggtcactatagccgcaaacaaggcgctgaagaaccagatttccacgctactgagcagcatccagaacaaggctgtggcggatgaaaaactaacggagcaggagaagggctttatctccagcaccaccatcccggtctttaaatacctggttgacccgcagatgctcggggtctcgaataccctgctttaccagctgacggactatatcggctacgacatcctgctgcagtacattcaggagctgatccagcaggcgaggacgatggtggccaccgggaactacccgcagtcaacgatggatatgatcctcgaaaacctgaaccaggcgagtgtgcagattgccgcttttcagtcccgggtacaggtgcagcaggacgcgctgctggtcgttgaccggcagatgagctacatgcgtcaacaggtatccgcccgcatgatgacccgctaccagaacaactatcactttggaggaagcctctga

SEQ ID NO: 185614 - DNA, 429 bp, Klebsiella oxytoca
atggatagtctcaacaaaatatattcttcgttacccgtactggaaagaaataaacgcctgaagctatcacggcaaaagagattcgatatttattattgtcttgcttttatgtttggttcagccggattagttctgtggtggggaagtcatgcgtatttcagtgtgttcactgagttgttaaccccgtcggagaagctggggtctgcaaagaacttcatgaatctgtggaatgtcctgatgtatttcgttccctttattcttttctcactttccattggttgtctggcaacggctttgctgggagtactgatggccgaactggctttctggtttgaatatgcctttgaaaaaagcttccagcgatatttaaaccgcaacctccgacggaaaaataacatgaaagaaggagggcctgatgttcatccgtaa

SEQ ID NO: 185615 - DNA, 567 bp, Klebsiella oxytoca
gtgaaaagcaaactgaagacaattagggcgggtatcaccacggctgctctgctgctggcactttctcccgtgacctgggccggtacgctcgatgaagtgaaatctctctgggacccgcagggcataacaggttcggcgccggcgtcgcccgctggcgcgcccacgtccgcgaagccggtctctcaggcccgttggtaccggctcagcaacggcaaacaggtcaatcttagcgactggaaagtggtgttgtttatgcaggggcactgcccgtactgccataagtttgacccggttctgaagcagctgtccggacaatacggattctcggtgttctcttacacgatcgacggacagggggacgaggcgttccctgaagccttgccggtaccgcctgacgtgatgcagacttttttccccaatatcccggtagctaccccgaccacgtttctggtgaatgtgaatacgctggcggcgtatccgattctgcagggcgccaccgatgctcagggatttatggccagaatggatacggtatttcaaatgatgggggcacctgataatggatag

SEQ ID NO: 185616 - DNA, 237 bp, Klebsiella oxytoca
atgcgaaagattcggttccccgatttagatataacgggaatgtgggtactggctgtaggcgtgtttttccacctgattgccaggctcgtcagaaaacagcctgagctggccattcaggccggggaagttctggggctgggtatggtgatatttggtggataccgaattctgaatgccctgattgctgaagcagaaaaacaggagaaggcccgtgaaaagcaaactgaagacaattag

SEQ ID NO: 185617 - DNA, 753 bp, Klebsiella oxytoca
atgggaaaactacatgccgccatactggcggggtgcctttgttgcaccctgatgccggcctgggcgaaagatgcgggctggcagtggtataacgagcagctaaaaaaaacagacccggaaacgcctgccacgcctccgccaccgccggcaaagcaggacatcctggagaagctggcgcagctgcagacggccacaaagcgttcgctgtatgaggctattctttacccctcatctgacaatttcgtgaagtatttccggctccagaactactggacgcagcaggcaggcctgttctcgatgagcgcgaagaaagccatgctggaaaaccccgagctggactacaacctgcagtacagccactacaacggaaccgtgaaaaaccagctggctgccgactacgccgaacagcgcaaggcaatctcctccctggcccagcactatggcgtgatgtttttctaccgcggccgggaggccatcgacgggcaactggtccaggtcatcaaaaacttccgcgaaacctacggactgagcgtgataccagtctccgtcgacggtgtggtgaatcccatgctccccgacagccggctggaccaggggcaggcacaacagctcggagtgaagttctttcccgcgatgatgctggtcaatcccaaaagcgggcaggttaaacccctcagttacggctttatcagccaggacgacctggcgaaacagttcctctatgtctccagcgactttaaacccaatttttaa

SEQ ID NO: 185618 - DNA, 327 bp, Klebsiella oxytoca
atgaaagagagcaaatcatacgggctggtgatcgtgtttgtcggcgtgtttgtcgtttttctgatcagcatcatgtcttacagcctgtggcgggataaacagattaatgcgtttctggccaccaaccgggcctggggtattcagtgtgacagaagctcgcaggctgcatgggttatcaggaacggtgaacgtacggcattagaaatgaataatatgacactgtactgccacggtttccggtttgagggacgcactgaccctgaaacgaaaacggtcagtctcgataaatacatcgtctaccaacatatttcacgccagccgaattaa

SEQ ID NO: 185619 - DNA, 228 bp, Klebsiella oxytoca
atgaaaattaactatcataaatatcctgccgtcgattttgtagtgagattactgctgacaataattattatctcccctgtgctgtatttttcatgggatgccgtcaaagggacatcgggcagtgattatattgagagtgtggtttttatccttatagtcggctttttctggttgatgagtcacctgtttatttctgcttttgtagggattttgcaaaaaagaaaataa

SEQ ID NO: 185620 - DNA, 1956 bp, Klebsiella oxytoca
atgaaatcacttcccctgatcctgatgctccatatgttcgtgctcgggacatttatctggtttacggttcctgcctgtgctgacagcacgtccgattacaaagcgggcgctgattatgcaaaacaaatacagggaagcgggactgacgcgctgaagaatttcaacggggctgacacgctgccagggtataccagcaaaccggcgcagacgaaatattacggcggcgtctccgccagcggtgacagtaacctgaaaagcgattccgcagcggaatgggccagcagtgatgtggggaacagcatcacggagtcgtttactaaccgtcccccggacagtatttcggccgacgcgccattcattcaggcggcgaaagagaccgagtccagagcggattcgattgtggggaataccggtcaggcctgtacggcacaggtggttaatcgtagcgagttcacgaaccatacgtgcgagcgggatttgcaggtggagaacttctgcacgcgggaggcgacgctgaaagacaacgccacgacgcaaaaggtcagtcgtacctaccagcaggctgtcccgatgaatttcacccgaaacagcacccgatggagcgggacgctgaccatcccgtcgacagggcggctgctcagcgtgtctgttgacggtgaacctctgccggttccctggatttatgaatgtgacaacgaaggaaaggtcagagacagttgcaagcttgcagtcagtgaaaacatcagcctctttgataaaacattccctgtcgatgtgatgacctggcctaatacgatgtcgatatgttccggtggtcagaacacacactgtagttaccattactacgatggtaccgggaaaattcaccagtctttcagcatggaccggaacgttgttgcagggcagacctttgcggtaacgaaaacgtcgaaaacccaaccatcagtaaatgttaaatccattcaggtgacggtcatactggtcatggaagagacggaaaccgtatttgcaccagaggtggtctgggttgaaagctgtccgttcagcaaggacgagggcacgaaaacaggcgaagaatgtatcagcccgggcgggacgaaaaccctcaacctgggcgggaaggcgtattccttcacagaagcatgctggaaatacaaagacacctggctgactcagccggcggataacggctcctgtgaaaacctgatgagtaatgcagcctgcacgctctcatcacgccagtgtgcattcagcgcggaagacgggacctgtttgcacgagtatgcgacctattcctgtgaaacccggaccagcggtaagcagatgatctgcggcggggatgtgttctgcctcgatggcgagtgtgataaagcggtcagcggcacgaacaacggctttggacaggcggtttctgagctcgcggcgctggcggcggcaggagaggatgttgctaagttgaacggcgtggatgtgaaggcgttcaccggtaaagcgaagtactgcaaaaaattcgcggccggattcagtaactgctgcaaagacagtgggtgggggcaggacgttggcctggcacgctgcagaagcgaagagaaggcactggccaaagcaaaaacaaacaagctgacggttagcgtgggggagttttgctctaagaaggtattggggatctgcctggagaagaaacgcagctactgccagtttgactccaagctggctcagatcgttcaggaacagggccgcaacggacaactgcatattagtttcgggggcgccagcagcccgaactgccgggggatcacgatggctgaactccagggcattaacttcaaccggctggattttgcgaacttcatggaggacctgatacataatcagaaaataccggataacagtgagctgactgataaaacaaaacaacgcataaaagaacttctcacgcagtcttcagcaaaatga

SEQ ID NO: 185621 - DNA, 630 bp, Klebsiella oxytoca
gtgaaattactgaacatactgacggtgatgctgttactgacccgtaccgtcgccgcggcagagggcgcagtttcgtcagacccgatggcggcggatcgtcagtggcttaagcagcaggaggatttcagcgagcagttgcgccggcatccagataaggcgttgcagcaggatcttgaagcacaaatcagccgtaacccccttacccgttcagatcagcagttcatcgataatctggccagtcagcagcgggagtcgacccgggataagccggcggaaggtgccgtgtatttcatctccttctcaataccggacgaggggttaaaacggatgctgcatgaaacccaccgctacggtattcccgccatgctccgggggctcgtcaataacgatatgaaagccaccactgatgcagtgatgggattggttaaagcggggatcaccgaaggggtgcaaatcgacccgacgctctattcacagtacaacatccgcagtgttcccgcgctggttgtgcgctgcaaagccggttttgacgtcatacagggcaatattcgcctgaagcaggccctggaaaaggtggttgagaaaggggattgtgcagagactgcccgaaaactgctgggaggtgcctga

SEQ ID NO: 185622 - DNA, 990 bp, Klebsiella oxytoca
atgaaagccgctgtgtttttcctcatctacgttgcgttctcaacattctctggccgcgcggccgcagacccgtcctgcgaaggccgctttgttaacccgatttccgatgtgtgctggcagtgtattttcccgatgtctatcgggagtgcctctgtggccgccggcggcggcccggacacggtgaatccggccagccctattcaaacgtgccccatgccgccaccgattttttaccgtattgggatggcgataggttactgggagccgatggccctgacggatgtcagccgctctccggggtgcatggtgaatatgggcgggtttagcctcaacctgggaaaaaccgggatggggaccgcgaaaaaggacgacaagcaggtcaacggggccttctatcacgtgcactggtacaaatatccgctgaccagctggctcagcattatcacgtcggcgggttgcctgcagggcggagatatggatatcgcctacctctctgaaattgacccgacctgggtggacagcagcctgaccaccattctgaaccccgaggccgttttgtttgcgaacccgattgcccagggggcctgcgccgctgatgccattgccagcgcattcaacaagccgctggacatcctcttctggtgtgcaggctctcagggctcgatgtatcccttcagcgggtgggtcagcaacgaatccagcccgctgcagtcatcgctgctgctgagtgaacgcatggcctacaagctccaccggcagggacagatcctggagaccgtcggggccgatgtcgcggtctgttacgaatacccgtcaccgattattcccaaggagcgctggcggtaccagatggtgaatatgtaccccgacagcgcgcagtgccatcccctggggcgaacggtcacgcgctgggaggtcgggaaaaacccgccagtaacccgaaagaacttcggctatctgatgtggcgaaaacgtaactgtgtctactga

SEQ ID NO: 185623 - DNA, 402 bp, Klebsiella oxytoca
atgacgttgatattagccgtaacaacgatgctcctggcgctcttgactgggctgatgtggtcagtcatgcgtaagcaggacaccgttatacagagtctcgcgacgagagaaagctacctggtatgtgaggccgatcgactccggacagacaacgagaaattgtatcgctggatgagagtcaacggggagttcgttatcgatgaaatgacccttgaactcgatgtgttgcccaccgttcgccagacgaaccgcgattcgtatcgccgccagctttacctgtttaactgcctgtccctgattgtatggaacgggatggagggggcggaagacgcgacccgggaaaaggtccgcaacaaaaccgatgcgctccgtcttgtcctcagggagaacattaacgaatga

SEQ ID NO: 185624 - DNA, 636 bp, Klebsiella oxytoca
atgaaacgcaccggtattgccgtgctggcgttttgcctgatttccccgggcgtgccggcggctgacctgggaacctggggtgatctgtggccggttcaggagcaggacatgctgacgctcattactcagcgtctcgaggcgctacagaagtcggggaaatgggcgcaggaaatggaagcgttcaaaggacgcgtgattgagaacagccagcgaccggcgccggttgagggagtagggaaagcggataagtatgaacagcgctggttcgaccccagtatccggctgactgaggacctgaaagatcacaacgggcgggtgttcgcgcgcaaaggcgacgttctgaatccgctgaaaacggtcccctttatgcagacgctgtactttatcgacggtgacgatccggaccaggtcgcctggatgaaacggcaggtccccgacaccctgataagcaaaattattctggtgaaagggagcgtgccggatacgtcagtggcgctcgatgcccgaatttattttgaccagaacggtgtgctttcaaaacggttcggcctgaccagggtgccggcgcgcattaccccggcgccctcgggtgagcggctaaatattgagaccttcccgtctgtcccgcagccatga

SEQ ID NO: 185625 - DNA, 390 bp, Klebsiella oxytoca
atggacaacaactctgagcagcaaagaacgacattcttcactttacgacggagtctgaccgttatcgccctcgtgggcaccattctggcgaccaatgtctttatcacgcgtctggtgctggcacataccgcgccacgggtggtggccttcgatatgaagaagacgctggacagttttatggacagcgtcagtcagaagccgctgtcagaggcgcagtcaaaagcgctctcagaccgctttaacgcagcgctggagcagagcctggccgactatcagaaaacgaatcatgtcctgatcctggtttcaccggccgtggttcagggcgcacccgatgtcacccgtaaaatccagaccgacattgccacccgaatgaagggggcgcgggaatga

SEQ ID NO: 185626 - DNA, 2640 bp, Klebsiella oxytoca
atgagtaataacctgatggataccgttgctcaggccgtgaattcgctggtgtctgcgtttaaattgcccgacgaatctgccaaagccaacgacatgctgggcagcatgaatttcccacagttcagccgggttttgccctataaggattatgactctgcgaccggactgtttattaatgccaaaaccgtcggttttatgtttgaggcccgacctttaccgggcgctaacgcacatatcgtggcctcgctggaaaacctgctgagaaccaaaattccccgcggtgttccggtgaccattaatcttatctcgagcaagctggtcggggacgatattgagtatggattacgggagttcagctggagcggtaaagaggccaaaaagtttaatgccattacccgcgcctattatcttcgggcggctgaaacacagttctccctgcctccggggatggatttacccctgactctgcgtaactaccgtgtctttatctcctgctgtgtaccccgaaagaaacattcgaaagcacagatcgtcgagctggagaaccaggtaaaaatcatccgggcttccctgcagggtgcgcaaattccaacgcggatactggatgcccagggcctggtcgatatcgtgcgtgaacaggtgaaccctgatccgggtgaaatgtaccgtaagccttacaaactggacccgtaccaggacctgaattatcagtgtgtggatgacagttttgatatgcaggtcactgcaaaccacctgaagattggtctgctggaccggaacggtaaagagaaagtcacccgtgttaccaattatcatctggcccgcgatccggaaatcgccttcctctggaccagtgcggacaactacgccaacctgttgaacccggagctctccatctcctgcccgtttgtcatcacgctgacgttaatggtggaggaccaggtgaagacccagaacgaggccaacctgaagtacctcgatctggagaaaaaaagcaaaacctcttatgcgaaatacttcccgtcagtggaaaaagaggttcaggagtggggggacatccgccagcggctggcaaccaatcagtcctctctggtgagttacttctttaatatcacggcctacaccgacgataacgccgaagcctctctggcgaccgagcagcagatcctcaacagctatcgtaaaggcggctttgagctgctgcccgcacgttaccaccatctgcgaaattatctggccatgctgccgtttaaatccggtgaggggcttttcaaagagcttcaggctgcaggtgtcgtcaagcgggcagaaaccttcaatgtggccaacctgctgccggttgttgctgacagtccgttagcgcctgccggattactggcgcccacctatcgcaaccagctggcgttcatcgacctgttctatgaggggatgaacaacaccaacttcaatatggcggtctgcgggacctccggggcgggtaaaaccggccttattcagccactgatccgcagcgtactggactctggcggttttgcctgggtattcgacatgggcgacggctataagtccttatgcgagaacatgggcggggtttacctcgacggtgactcactgaaattcaacccgtttgccaacattctggatgacgccaattttgacctgtcggctgagcgtatccgcgaccagatgtcggtgatggcgagcccgaacggcaacctggatgaggtgcatgaaggtctgctgctgcaggcggtgcaggcggcctggctgagcaagcgtaataaggcccgtatcgatgatgtggtcgattttctcaaaaccgcgaaagagagtccggattatgccgagtcaccgaccatccgcagccgcctggatgaaatgattattctgcttgaccagtacacggtcggcgggatttacggtgattacttcaactccgatgaaccgtcattgcacgatgatgcccggatggtggtcctcgagctcggcggtcttgaatcgcggccttcactgctggttgcggtgatgttctcgctgattatctatatcgaaaaccggatgtaccagtccccgcgcagcctgaaaaagctcaacgtgattgatgaaggctggcgactgctggacttcaaaaacgaaaaagtcggcacctttattgagaaggggtaccgtaccgcgcgccgccacctggggtcatatatcaccatcacgcaaaatatcgtggatttcgactcacccaccgcatccagtgcggcgcgggcggcctggggtaactcctcatacaaagtcatccttaagcagtctgccaaagagtttgccaaatataaccagctctacccggatcagtttacgcaaatgcagcgggacatgattaacagctttgggtcagccaaagaccagtggttcagctccttcatgctgcaggtggaggcacatacatcctggcatcgtctgttcgtcgatcccctcagccgcgcaatgtactcctcaagcggggccgatttcgagtacatcaaaggtcgcaaaaagcagggaacggacattcacgacgcggtgtacgagctggccagccggaatttcccggcagaaatgtctgacctggaagcccgcattgcccatgacaacataaggaacgtagcctga

SEQ ID NO: 185627 - DNA, 399 bp, Klebsiella oxytoca
atgaaaggggtgatgacaatggggtttgttacaaaatacgggtctttgtttgtccctgttatctactggcttgtttatctggcagccaggtttatttataacggactggcgggagagtacacgcctgatttcattcagagcattagtcatgatggtgtgtttattatctgtagcttactggtgttctatcttgcttgtttacgaattaaagacagtggtagtgaaatctcagcagtactcttttggtctgttgttggttttcatgtggccgcgttagttattacgtttcttatctgtttatggaagggggcgcttttgtgggacgttattttcttctggcaactgggggcctccatgttattgctgttttttatgcctgcttaccttctcctgcggtga

SEQ ID NO: 185628 - DNA, 345 bp, Klebsiella oxytoca
atgagtgcacgccagctaaaacttatcatttctctttgtgttattgtttttgtaggcagcatattttcccctatttacgaaaactatcttgatagtcagcctgccacgccggagcaactacatacgattattcgcgaaacaccctgtgcgggtaaagtattgctgctggcccttgacgttaacgatggtaattcgtctgagccgttaactctcggttacgcaaacgaactcgcgtcagggtgtaaagaaaaagaaatgctaatggaaagcaaaaaaatccgtgagggtgaaatgactacattccgcgaaaaacaactgaaagctctgaacggtatcaataaatga

SEQ ID NO: 185629 - DNA, 405 bp, Klebsiella oxytoca
atgagaacctactatctggaaggtaataatattgcctggcttaatggtgtgtggttattgcttatctttatcggggttgtcggggcactggccatgtttgttatccctgaaaaaattaatcttcgagtctgcagagctaatacgtttttctttagtgcgcttatggcagtgcttgcgtttggcatgcttattggcttctcaagtcggtcattcacaaaggatgaacttgaagccgggagacactggaagaatgactgcaaactgctggaggtgaacattccaacaggcacgtttactgatactgtaaacaaactggattgtgcgggtgtcactatcaatgtccctaaacctgaatatgacgtttatatccggcagtggaaattgtatgaggctaaaaataaatga

SEQ ID NO: 185630 - DNA, 252 bp, Klebsiella oxytoca
atggttaattttaaagactttgagcacgacagagatgaaaaagatcggaagtattgggattatggcgaaagtcaggcccttgttaatatgaatgaatggattggaaataataatattgaagtagtcgccgttgaaactatggtcactgttcggggtaatatggccagtactgttagcatgtttaatgcatttagactctggtataaagaacctttgaatgatgcgatggatacactgaaaggaggtcggtaa

SEQ ID NO: 185631 - DNA, 270 bp, Klebsiella oxytoca
atgtgggatgacagggttataaattttttttgtttgcttatagttgtattggcaagcgtgatgtttttatttaaattaacgcaacccagcaatgatgatttaattaaggacggtaaatactggtcgactgactgcaccttaaaggaagttgacattcccaccggctttttaaccagtaacattaaccgcctggactgttccggggtcgttgttaatgtggtgacagacaagtatgaccgcgcagtaaccgcttataacaaatctaaatag

SEQ ID NO: 185632 - DNA, 570 bp, Klebsiella oxytoca
atgaaggaattaatgctgttaattcctctgggcagcgctttgctcttaaccgggtgcgcgggcacagagtctgattttgaatgtaatgccacaacatccgatacctgtatgacgatggagcaggcgaatgagaaagcaaaagccctggaggaaaacgcatcagcaaagccggctgcggcagggttgccacgactggctgacggaaatttcaggacgtcttcgccaaactcatacccgctgccgcctcagacagtcattaatccggtgcgaaatactgcgccagctgtgacggtgagcaataaatccgggttcctgaatacggtaccggtcaatcatgatgacgtcctgagaacccggactgctccggtatatatcaggccggttagtgttggtacctatacctctccgtctacggtacccggtaattatccaaggccgctaagaaagggcgagcaaacagcgtcattatggatagcgccttacgttgattccggggatgtttatcaccagcccacaacggttgtatttgttgttacaccatcggcgtggggccagccgcgtattaattaa

SEQ ID NO: 185633 - DNA, 1425 bp, Klebsiella oxytoca
atggccaactttaatacgctaatcaaacgtaaacagtatctctggctggtcctcattcttgtcagtggtgcatgtgcgattgctggcgggatgtatctgtccgatctgaatctgagttcagaagaagaagcccccgtacagggtgaaccggcgccggacatgaccggggtggtggacagtcagttcaacagtaaggtggagcaacatgcgaccacggaaatgcaggccactgcagcagatctgaataagcgctttggcgctctgcagggagaagtggatttactcagtaaagcgcgcagcgcagaccagatccgtatcgacaaactcagcaatgaaaatgtggccatgcaggagcaactgaagacgctgggcgtgaaaccggccgtgtctggcggcgagcctgcgccgtcgccaccctcgccgccgccgggaccggaaggggagccgcagccgacaaatttccctgcgcagtctggtggtgcagtccctccgccaacagcgttctatcctggcaatggcaccgtgcaggctccacaggttagctatcagtccgtaccggtaccgaaccagatacagcgcaaaacgttcagctatgaccgcggtaagaaaacaaagtcactgccctacattccgtcaggcagctttgccaaaagcaagctgatcgaaggtgctgatgccaacgcttccgttaccgggaatgaatcaaccgtaccgatgtcgctgagaattattgggcatgtggaaatgccgaacagcaaaacctatgacctgaccggttgctttgtcggcctcgaagcctggggggacgtatcgagtgagcgcgccatcgttcgcacccgcaatatcagctgtatcaaaggcgacaaaactatcgaccaacccattcagggtcatgtgtcctttatgggcaaaaacggcataaaaggggaagtggtgatgcgtaacggaaaaatcctcggctgggcctggggggctgggtttattgacgggattggtcaggggattgagcgagcttcgcagccagcggtcggtctgggtgccacagcctccgttggcgccggtgatgtcctgaaaatggggattggcggcggatcatcgaaagcggcacagacgttaggcgattactacatcaaacgcgctgagcagtatcacgcggtgatcccgatcggcgcgggcaacgaagtcaccatagtgtttcaggacggtttccagctgaaaacgattgaggagattgaagcggagaagaatggccaacagcaggagcagaaccagcagcaacccgaacaacctgagagcaggtcacagcaatccggcgggaacctgaatggttttaataccgatgagatgctgaagaaactgggcaagctggacccgcatcagttctcgccgggagcaatgtcgaggggcgaaaactcaggtcagtaa

SEQ ID NO: 185634 - DNA, 735 bp, Klebsiella oxytoca
atgaaaaaaattaatccgttatttatttccggttgtcttttttttatggcgcctgccatgtccgtcacaatgagcggcacgctggcaccgacggtcgtgccactggcgaatggcggacaggccaatattgccgtgagcaatactgacccgaacctcttcacggtaccaggagaccggatcaccgccattaacagtctggatggcgggctgacgaaccaggagcagaccgacagtggcggggcgatccttgctacggtcagcaagaaaccattcacgtttattgtggaaacagagcgcggcctcaacttttctgtccgtgcggtgccgcgtgccggagtgggccggactatccagctggtatccgagctcactggcacgcccgggccggctaaatcatgggaggaatccaacccgtatgaaagcgttcttgtttcgctgaaccgcgctgttcgccagggtcagatccctgatgaataccagtccatccctgtcacatcagaagtgttatccgtgcctgccggccttcgcgccacggcggcccgggtctggaccggtcaccatcttaaagttgttctgtacaacgttgaaaatgtaacgctgtcggcgcgaaacatccgggaaagcgatttctggcaggcgggaacgcgcgccatcatgctcagtggctccgcgagccagctggttggcggtggtcgcatgcaggtctgggttaccacggcagaggagtcacgttga

SEQ ID NO: 185635 - DNA, 567 bp, Klebsiella oxytoca
atggaacatggcgcccgactcagtaccacgcgcgtcattgcgctgggatatatctgtctggggacagttacgacgctcagtctgaccaccaacattattcagggtatcaataattatcgcctgcagacggaacagaaagtggcggttactccgatgttatttggtgcaccttttgcggtgtcgcagaatcagtcggatgcctcttatattgaacagctgggcctgagttttattgcgttacgccttaacgtcacaccggaaacggtcgatgcccagcatgcgcagttgctgagatatgtattcccggggtcgcagaacgaactcaaggttcagctggctgaagatgcgaaacgaattaaagacaacaacgtcaatgccaccttctatatgacgtccgtccgctcatatccggcagagaaccgtgtggatttccggggagaactgaaaacctggatcggcgactccgcaccctataccgaaattaaacactatgtcctccagttttatcgtactgacggcatcagctggctggcccgcttcggagaaataaataatgaaaaaaattaa

SEQ ID NO: 185636 - DNA, 306 bp, Klebsiella oxytoca
atgacgggagacgaattaaagaaataccgtttcccggaaacactgactaaccagtcccgctggtttggtttatatctcgatgaacttatcccggccgtgatttgtctcggctggggtttctggaccagcaagttcatatttggtatggctgcagcggcactggttttctggggtatcaaaaaactgaaaaaagggcggggcagttcctggttacgcgatcttatttactggtatctgccgacttcccttcttaaaggtttttttcatgatgttccggactcctgtttccggcagtggattaaatag

SEQ ID NO: 185637 - DNA, 675 bp, Klebsiella oxytoca
atgtgtgcgaaggatcgtagtcaaattgcagtatgcagtcaaacagaatccattcaatactttgtcgaaatgcttaacatttcgtcgagtccttcttttgttcgtgactcccacggtaaacttgttcacaccaactcacgctttgatcaagtttttttaacaaacaatgaacgcaattcatggtttgcatctattccagtagatacaggaatggagttggttcgttctgaattaagagctctaacatcaagagttgcttgtcttgtaagtaatgttcaaattaataatgaagtttggacggtatttatagagtgtatgacttttaatgatgacttatttagtaaatgggtgttcataaaagactctgatagtattgttgatcaacttggcagatataaggctttttctgttcgtatggatcgctatattgaaaaaatatcaagagcggctagttctgagtgggctattataaatctatactcagcagggttaacccattcaactatttctaaaattactggtgtggaagagcaaacttcaaaaaatgccgtgagtaaaatgaagagagagttaaatttccctgacagagattatattatattatcgtcaatatattctctaaattatagcaagataattcataatgtgattagtgtgttaaagttggattgttag

SEQ ID NO: 185638 - DNA, 387 bp, Klebsiella oxytoca
atggccagggtccaagcgtatgccagcgatgaagtagctgagaaaattaatgcaattgttgaaaagcgcaaggctgaaggggcgaaagataaagatgtaagcttttcaagtgtagcttcaatgcttcttgaattagggttgcgagtttatgaggcacaaatggaacgaaaggactctggtttcaaccagactgagttcaataaaatgttgcttgaaaatgtgataaaaacccagttttctatttctaaagttttggctatggaatcgctcagcccacatatactgggtgacgagcgttttgatttcaagtcaatggttgtgaacatcagagatgatgcaaaagaggtggtggaacgattcttcccagctctggatgaagatgaataa

SEQ ID NO: 185639 - DNA, 318 bp, Klebsiella oxytoca
atgcgtatgtcagtcatgtttgctgttgttgctctgtttaccggtattaaccttttgtataacccgattcagccgctgctcgcattatggggggcaatcctggccgttgctttcatcctgatgaacgtagtggcggataagatgcgtctctggagtggcgttgcgtggattatcgttgccggcgtcatcatgacgatgatgctgaaggggaaagaaccgggggacgaattaagagtggtgattaacgtttttgctttcctgagttcagcctggtacagcgttgcgctgtacagaaaagaaaaacatttccgttcctga

SEQ ID NO: 185640 - DNA, 321 bp, Klebsiella oxytoca
atgaaacttgcaccacaaagccgcgatatcctgcgtcagtacaaagccctgattaatgcacgccgccgtgatgccgggcagcgggaactgaccaccgcgcaggtcatggatgaaatctgcgaatatatgacctgtcagtgtgccgtgtatcccggcggtcatttcatctttcagggtgaaaggccagtaagcatgatgacaggtgtcgggcaggaggacgcctgtcagcccgcgcgaaaacccgggcaggctgcgcctgccggagaggcgtttcgccgcgcccgcggcgccgcacacgctctctccgttactggtcgatag

SEQ ID NO: 185641 - DNA, 507 bp, Klebsiella oxytoca
atgaattcatcaatcaccgttcctgctgtctacgtgggcacgtatcaccagtacaactgcggcagcatttttggtaaatggtttgatttaaccgattttgacgacgaagacgcgttttatgacgcctgccggacgctgcacgccggtgaggatgaccccgaactgatgtttcaggactgggaaggtattccttccccgtttgcctctgaatcgtctgtgaactgggcatttatagaggcattccggcaggcgcaggatgaagggcgcgccgtcgcgtttgtggcctgggcggaatataccggcgagtgtgactatgatgcctttgatgacgcgtattacggcgaggcggaaagcgaggaagattttgcttatggctttgtggaggacaacggcctgttaaatgacgtgcccgaatccctgcgcgtgtatttcgattatgaggcatacgcgcgggatttattcagcagcgggtatgtgtttcagggcggctatgtcttcagaaactga

SEQ ID NO: 185642 - DNA, 429 bp, Klebsiella oxytoca
atgcagtatgtgaaaacgcgccctgtcctgaatgtcgaagagtccgaccgactgtccttcatgccgtacatgttcggcactgatttcatgctcgcagaattacaggtgtacgccctggcgaaaaaatggatgccggaacatgacagcggtttctggcatttcatccgcttaccggagggcggcggttacatgatgcccgattgcggccgcgtccatctggtcagcacggaaagctggtttgaccgctatgtcagtgccgacgcagcgggcattattctgaccagcctggcagttaaccgtcgtctggctgcccaccatgacagcaataacccggccctgactcacctttatatgctgcgtgatgtccagctctggaatcacatcacttttcacccggaatgcaatgcgatttacgccgcgctggactga

SEQ ID NO: 185643 - DNA, 297 bp, Klebsiella oxytoca
atggagcgacgtttcggtgactggcggttgctggccgacgagtacgaccatgacaactggctggacgacagcgagaccgacaggctggagctggttctcgacgccattctggtacgcaatgcgcgtttctgcccggtcctgctcacgctgattaacgagcgggaagaaaatattgagggtgcaggcgttatcactgagctgctccgttttccgggcgatccgccccgtcgctggcttgaccgccgtgttttacgggatgtggtgagagaggcccgcgccgtcaacgctcaggtgtga

SEQ ID NO: 185644 - DNA, 360 bp, Klebsiella oxytoca
atgaataacgataccctgaatgcactcattctgcgccacggggacagtcttctgcgccggtccgggtggcctgaaagtgtcggtatgatacaggtggctccgcaggaggttcccggctggctggctgtctgcggcgtgctcagcgcggacgcaatcctgaagctgactacccgcctttgtcagaccctcagtggcgggcgggcgcacctgttgatcgccagcgcgcagcggctgacaggaacgcctgcccgcctgcatctgtacccggcgcaggcttacccccgccccgaagcgttgccggactgtacgtgtatcagtctgcctttacgcacaggaatggctgacaaaatccgaatgtga

SEQ ID NO: 185645 - DNA, 411 bp, Klebsiella oxytoca
atgctgtacggcacccgcaaagaactgaacaaaaaactcaaacgcatgttcggcaacgaagaacgttacgccctgctggtctggacgaaagaggacgtgatggcccaggtggaaaacatgacggagcacgaggcccatattgttctcgaactgatcggacagaccggcaccggcgaccatgccgaagaaggcgtgtcattccgtactgtccaggacctgtacgcgggcattcaggagagcacccgccgcatcagtgttccggctgacatgctggcgaagctgaccaatatcgccgggcgggcactcagcgaggaagatgcacgggcctggccgctggtctgcctgcaatatccgactgttgccgacgcgctggccgatatcgactggctccggctgcaactggccgcttaa

SEQ ID NO: 185646 - DNA, 222 bp, Klebsiella oxytoca
atgaactacggcggacacaaagccctgcgccgcaacatggccgggctggccaataacctgtgcgacctgaaaaccaccctgaaagtgctggaagaaacgtatcactaccggcatgacggactgccggagcgacttgccggaataagcctgcggcgtatcagcgtcctgatggatgaggcattcaatatcgccctgatgctggacgaaagttttcaggactga

SEQ ID NO: 185647 - DNA, 231 bp, Klebsiella oxytoca
atgtcaccaggcttcagaaatgtgctccggttcgccggcgtgcccgtggacagcgctgaacctgtccgcagaaaatatggcagtcgcatgattgggattgtgacgctctgcctgctcccgctcctggtgttcgacgtcccgcagtgggttttcattttatcgcagattatctggggggcgggcgtatatatcggcctgtccgtggccggggataactcccggaatcgctga

SEQ ID NO: 185648 - DNA, 252 bp, Klebsiella oxytoca
atgcccaacattattctgagtgacacaagcgcgagcatcagcgaacttaaaaaaaacccgatggcgacggtcagtgccggcgacggcttcccggtcgctattctgaaccgtaatcagcccgctttttactgcatcccggcagagctttacgagaagatgctcgatgccctggatgatcaggaactggcaaagctggtttcagaacgcagtaaccagcggctgcttgacgtggatctggacacgtatctatga

SEQ ID NO: 185649 - DNA, 288 bp, Klebsiella oxytoca
atgacttatacggtcaaattcagggaagatgcgctgaaggaatggcaaaagctggataaggccattcagcaacagtttgcgaagaagctgaagaagtgctgtgacgaaccacatatcccctcagcaaagctgagagggataaaggactgctataaaattaaacttcgcgcgtcaggctttcgtctggtctatcaggtaatagatgatcaactgattattgctgttgtggctgtcggaaagcgtgaacgtagtgacgtgtacaatctggccagcgaacggatgaggtaa

SEQ ID NO: 185650 - DNA, 858 bp, Klebsiella oxytoca
gtgtttcgtaaaattaaaaatatcaaaataatagctgctttacgcctggaccttttacgatcagtatttaatattacaagaggctctggttttcaggaggaaaaatatgagtcatatatacttgatataaaatggacctctcaacaactaaccgaattagtccaaaaacgagtgcgagaggtatacaaaagacaatatactcgagaagatgttactattaaagatatatttccaaaagcaaagggggggcatttaggcatcacccctattgaatatataattgaaagaacattatttcgaccaagagacgttttacaatacgtgaatgagtgttttaatgtggcacttaacagagaaagaatatcatgggattcaattcataaagcggaggcagtctattccttaaagcgcctgagatctctaaaagaagaatggggggatatatacccttcctttgaggaaacaattgaaatactgagaaatcttcctgataaatttagtagaacatctatgtcaaaaaacactatagacgcggtattaagtgaattatccattcaaaatactactgatccatgtgctattacagcaaacaaatttttagaaggagaatcaagagaacaggatgtcattaatgaaataatgctttgtctttatacagttggaattgtaggtttcaagattagtagcctgacaccttacaaatgggcattcagagacagtacaccaacaacaaaaaatgaaatcaaacgtgccagtctgatgaaaattcataagatgctccattcagctctagatataagaataattactggaaatcgctatgaacgcgatgatgaggaagatattgagtgttcttaa

SEQ ID NO: 185651 - DNA, 363 bp, Klebsiella oxytoca; identical to SEQ ID NO: 170104

SEQ ID NO: 185652 - DNA, 1128 bp, Klebsiella oxytoca
atgcttttcatgaaagaacattcagggcgcaacggctttatgattaaactcgataatattcgcaagacctaccccggcagcgcgcatgcggctatccgcggccttaatctggtgattaatagcggcgagctgtgcactttcgttggccccagcgggtgcggaaaaacaaccattctgcggatgattaatcagctggatattcctgacgccggtgacgtatacgttcagggcgttaagcttgccgctgccgatattattcaggtgcgccgccaaattggctttgtcatgcaaagcgccgccctctttccgcatcgtacggtcgcgcaaaatatagccacggttccgcgccttctcggctggagcaaaaagcatatccaggcgcgcatcgacgaattagtggatttgatgtctctcgaccgcaacgtcctgccccgctatccgcaccagctttccggcggccagcaggggcgcgtggcgatcgccagagcgctggccgccgatccgcctattctcctgatggacgaacctttcgccgccatcgatccggtggttcgcgagcgcctgcaggacgagctgctgttgttgcaacagcgcctgcgcaaaacgatcgtcctggtgacccatgatatcaatgaagctattcgccttggcgatagaatcgctatcttccaggagggcggcgagctggcgcagttcgccacgcctgaccatattttgtcgcatccggccagcgactttgtgcgccgttttatcggccccgaaccgaatctgcagcggctggggagaattcaggtcggacagctcccgcgtcatgacgtgccgcttattgatgagagcctctcccccatcgccagcccgcatccgccggtcgccagtccgctgcgcctggtgctggacaaaaaacggcgtccgctgaactggttcgatccggttaagcgccggacgctgccggtcgacgcgccgctggcggccatcaacacgctgcgctttgcctacagcgcgctgctggatgcgcccggcggcgtagtggttcatgtcgataccgacggtgaatatcagggcagcatctcccacgctctgctgcagaacgtgctggaaggccacgtggatcttcgccgctatgattga

SEQ ID NO: 185653 - DNA, 987 bp, Klebsiella oxytoca
atggctagatttattcttttggttcctttgttgctttcttttatatcgttttcatcatctggcaagagcgatgatttttattatggtgtgggattgttacctaaccgaactaatcttagttcaggtcagttatttgatttgatgcgtgagtataaggtttcttcatttcgtgttgattatttttggagtcgagtcgaagttacaaaagggcaatatagtctgacagataagcgattagataatctagttaaaaactcatccaatcttaatattactccgttgttaattttggattatgggaataaaaactatggaggagggcggccaataaataaaagtgaggttgatgcatacgcaaactattcagcttggattgttgaacattataataaaaaagtacatctttatgagatttggaatgaatggtggcatgctcgttctggagatgactatccagctttaacaaaaacgtctgctcttgattattttaatttggtccgtgcagcttcaataaaaataaaagaaaaaaatccagatgcaataatccttgtcggcagttttaatccttttaaaaaagatcagttggcatgggctgaaactttggttaagctcggcgttttaaattacgcggatggattatctattcacccttactcccaagaagaacccgcgaaagatttttctcgattagatgatttccatgagtcgatgataaagctctctggaaaggaaaatattaacctttatataactgaaatgggatattctgattttgtggggagtaaaataagtgaagataaaattgcacggtttattccagaatattattctttagcaagaaaacgctcatacataaaaggaatatggtggtatagttttataaatgatggatacgataagtcgaacagagaacataatttcggtttacttaacaaaaaccttaaacaaaaatctagcatgaagggattcatcgaaacaactcgttag

SEQ ID NO: 185654 - DNA, 1167 bp, Klebsiella oxytoca
atgactaagcatgttgtgttgtatggggcttttgatcgctataattatggcgataacttaatgcctattttacttgaacgttttttcttaagtgaatacgtaaaatgttctaaagattatgagtttatttatgcctctattaattcatctgatttaagttgctataaatgtaaacctactgttccaattaaatctttgcttaaaaacgacattgattataatattatagtcgttgggggagaggttatgggggctgacgttggtactttattttctcatgttcaaaataatattttttatgcaaaagcaataaactttactaagagggtctctcctaaatttgttaatgcttatgccaaactgttttatcctgcagcttgggattacccatatattcctagaaaaaattcatttaaaggcaaagtgaagataatttataatacagttggtggtgttccagttaaatctcagtgggaatatgttaaagatgccgattatgtttcagtaagggatcagcgttcatatgatgggatgaaaaaaatatgtaacttaaatctaattccagattcagtcctgatagcctcaaagttagttgataatgatttttttaaaagcaatgtaaggccgggtattattgctctctgtcagaacaaacgttttattactcttcaggcttgcccgtataaggtgaaatttactccgaaggacatggcattggtcttagatgatattaaacgagagaaagcgatggacgttattttattaccgatcggttacgctagcggacatgatgattctctctttctcagcgaggttaagaaatattcaagggaggagattgaactgctggatgatctcaatgtatgggaaattatgtttataatttcaaaggctaaagctttttacgggacaagccttcatggcgttattacggcaatgtcttttggtgttccacattattgcattaattctgacatcaagaagttaacctcatttctaaatacttggagcatctcaccatttaatgagtccttgacaataaataacatttttaattccatttcgtacatcgaaagttatgataatacccagttacttgaaagtgttgaaaatactcagggtttaataatgtcaagcttaaatgatatagtcaacatgttagagtga

SEQ ID NO: 185655 - DNA, 1317 bp, Klebsiella oxytoca
atgggcgcgttgcgaaacagatctttcaaaaatattatatggctgtcaggtgacagtctaattcgtatgggcttaggttttttagtatctgtttggttagcccgatatcttggccctgaacatttcgggctctataactatgctctggcaataattactatttttgtttctgttgcttcgctgggtatgaatggtgtagtagtaagagaattaataaaagatgagcattcacattcgattgtcatgggtacctccttttttttgcagttggttgggagtattttcgcaagtattttagtattgttaacaatttacctcctcaaaccgggtgactggaatctttttttagctactttagtgatgatcccatcagtattgttgagaacatctgatattctgaagtattggttcgagtcccgagttcaagcaaaatatactgttttagctcaaagtatagctttcttttctagttcaatatttaaaatattagtaatcttctcagggggatcatatatatatatatgcgcttcagtatctttcgaagctttaattcttacctttgggttgatctatttttattcaaagaaggggatgggcaagaattggagttataatttttcagaagccaaacgtttgttatcacttagctggccattaatcatttcaggcgtcgcatttatgctctacatgcgtatagatcaggttatgattggtaatatgttaagtgcttcagctgtaggtgtatattctgtggctgttaaaatggttgaggtgtggtacttttttcctatcgcaatagtaagttcactctttcctaaaatcattaaattaagagaggtaagcgttgagcaatactacgaaaggttacaatttctttatgatatactagtcgctataagtgtttcaattgccttatttgttactttattttctgattttattattgatttattttacacgaaagattacataacagcttcttctgttattaaagtatacgcatgggtgagcgtgttttactttttaagctctgctagtggtcgttggtatataaatgaagggttacaaaaatatgcattgagtagaaatattttagggttagtaatggggattacccttaattattatttaattcccatttatggggttttaggttcggtatatgccactttaattgcatatgcgtgtgctggctatctctttgattgtttaacacatcatacgcgaatttcatttattcaaaaaacaaaagcattatggttacctggttcatttgtcaggttatttcgtataattaaaaaggggttaaataaatga

SEQ ID NO: 185656 - DNA, 192 bp, Klebsiella oxytoca
atgttaaatcatgatgatatagaagtaacactcattagccttgccacaaaacagggactgagcctgaatggaaaagatttattggatattcgcacacaggtagcgacagctctggccgtcaaaaaacggtaccgacagcggatgacggcacccgcctaccagtggaagaagccggacaatccgcgtcgctaa

SEQ ID NO: 185657 - DNA, 351 bp, Klebsiella oxytoca
atggctcttaaaagtgtgaaattcacagtaataattacttttgatattacggttgatggacgtactggggtttatgctcaggtgacggaactacttgctaaaaatggatttgttaaggaaagcccttcgggaaaaaaattccctgagaacgtttattacggcgttgttgaaagaaccatagagtttgatgatgaaggctatgtaaccgtcggtgagttaaagtctgcaacggatacaattagtgagcgagtggttgaacttctggagaagatttttgacatcaatgatgtccagaacaagatacttgtccatgttggtcgtaaggtaacctctaccacattggttaaataa

SEQ ID NO: 185658 - DNA, 171 bp, Klebsiella oxytoca
atgagtaagaatcagattcgctgggcagggatagccattatgatgttttgcttggttaatagcatgatggagttatcttcacctgaaaaaagaaacctcgccatcgtttcggctgtaggcagcattgtctacattgcatgcatgctgtgtcttgttctcagaaaaaaataa

SEQ ID NO: 185659 - DNA, 204 bp, Klebsiella oxytoca
atgctggctgaacatctcgggctgctaatacaaagcgacccgggatatggaacagaggcatggcgggaaatgacgcttatctacgggatgatgggtctgcataccgaccgcatcatgaagcttgagttgcagaaagcgaaggctggtctggcccgcgccagactggagctgataaggcttaaaaagcgccatcccgccagatga

SEQ ID NO: 185660 - DNA, 474 bp, Klebsiella oxytoca
atggcaacgttaaaggctgagtgcaaaatatttattgtccaatccattgcgtgctacgaaacgccttctcaggtcgtggagtccgtaagggagaaatttggtattgaaattacccggcagcaggtcgagtcacacgatccgacgaaggtcagcagcaaggggctggctcaaaaatgggtagacatattcaacgtcacccgcgaactcttccacaaagagacctcggacattccgatcgccaataaagcctatcgtctccgcgttctcaatcgcatggctgtaaacgccgaaagattgaagaactacggaatgacggccgatattctggagcaggccgctaaagaggttggcggaatgtacaccagccggctgaacgtggagactacaggcaaaagcagcagtaacgctcaggctcgggcagcagagctcaacccacaagaagccgctgacgcctacaaaaagatgattagttga

SEQ ID NO: 185661 - DNA, 294 bp, Klebsiella oxytoca
atgaacatcaagttagtcactatttccgtacttgctgccgctttcgtctttgtatcagatatggctgtcgccaaatcaaatcagttaagcgacgaccaggttaagcaaaaaattatcgacgactctatatcgtcttaccccggtacctgtgcttgtccattcaacgcggcaaggaacgggagttcatgcgggcgccgcagcgcttggagtaaagccggagggtattcacctatctgttacaagaaggaggtctcgaaggagatggtcaaagaatggcgtcaacagaatctgtaa

SEQ ID NO: 185662 - DNA, 288 bp, Klebsiella oxytoca
atgcttacatatggtcgcgcgcttgctctgctcaaatgcgaaggccggtgcccgtctgacgttgaacaccgacagattaagtaccggaacaacgtgattgaatgcgatcatggcaaactgaaacggataatcggcgccacgctgggatttaaatccatgaagacggcttacgccaccatcaaaggtattgaggtgatgcgtgcactacgcaaaggccaggcctcagcattttattatggtgatcccctgggcgaaatgcgcctggtaagcagagtttttgaaatgtaa

SEQ ID NO: 185663 - DNA, 435 bp, Klebsiella oxytoca
atgaacccattcaaaggccggcattttcagcgtgacatcattctgtgggccgtacgctggtactgcaaatacggcatcagttaccgtgagctgcaggagatgctggctgaacgcggagtgaatgtcgatcactccacgatttaccgctgggttcagcgttatgcgcctgaaatggaaaaacggctgcgctggtactggcgtaacccttccgatctttgcccgtggcacatggatgaaacctacgtgaaggtcaatggccgctgggcgtatctgtaccgggccgtcgacagccggggccgcactgtcgatttttatctctcctcccgtcgtaacagcaaagctgcataccggtttctgggtaaaatcctcaacaacgtgaagaagtggcagatcccgcgattcatcaacacggataaagcgcccgcctatgtgtaa

SEQ ID NO: 185664 - DNA, 348 bp, Klebsiella oxytoca
atggattttgaagtacgtaaacaaaaggcgctggcgataatggtcaggcgtaatatgtttaaatgtaattacgcaccgcctctgatacgttttctgtggtggctgggtgtaaacattcccccgctgccgtttgcttcgttctggcaggttttcgggttgatggcaggcagtttctccataatgtacgggctgttgatgtaccttatggtctggcgtccacaggggatgagtcctctgttcgcttgtgcggtcagtcttatcactagcgtattatttggcttgacgatggcgcttttttatctgtggctgcgaagagtgcataaattacctgactggcaagacctgtaa

SEQ ID NO: 185665 - DNA, 528 bp, Klebsiella oxytoca
atgataacaaataatattattgctgaggaagtggaagagcttaaaagtttattgtcacaagggaaggccgaaattccatctttctgggcgtgtctttggcctggagtcgtattggttttatggaatacgctttgtgctgtgattagtgttgatttggtttatttgtcaggaaggtatatatttcatgtgttgatttttcctgttggtgtcagcgttattatgctgctcggcattgctagttcccgctctctatttttatcagtacctaaatcctttagattaaggtcagctatatatggtttctttgctaacaaagttgccatttatgctgttgtatacatgttgttgattatggtgctggctttttataatagattcttttatggctcaccatttccttttgcatttatggttgttttaataacgattttttttgggtttataatgaattttgactttggaagatatcaattgccattattgacatctgcaataaattcttttaagactgataaggtggataaataa

SEQ ID NO: 185666 - DNA, 348 bp, Klebsiella oxytoca
atgaagtcaatatttagaaagttgttttgccgcttagaggacaaagacgttcgggacaacttacgcgatatattcagagacgtacttaccggaacgacattaataaccccgccaaccacatcttcagtatggatgattaaattctatggtattccgggctggttcagcttgttttttgccgtcacagctgactttattatttttacctgggtggtatacagcgtccagttttcactggaaaaagtcatatctctggagaagaaagtgaacaggcttttcgttgtattatgcatgtttttattccaggtaagcatcacttacagcattataaatatcatcacgagatga

SEQ ID NO: 185667 - DNA, 531 bp, Klebsiella oxytoca
atgaataatactgcgacaaaaaaacggttgtctgcgatgtactctgcttattttttcatgatagtcagcattatcatggcggtatattatatcagggttaacatatcttcgctgacaagttacctgagcctggtctttgtgttctcatttgaatgtgttgcaatctcttttgtgtttgtttccatgtttgtggtttgtctgtttttttcagtttctgttggggcgtcatcccgtcatgaagtccattggtctgttattattacaggtggagtgattgccgtatttttccagtttacatttgttatgctcactcatgcctggacgtggagccctgttgcgctggcggaaacgattttcctgattcagttctggtgcggttacctgacggggtgggtgcagagagatattgcagagggccgcgtaaagaaccatgttctgtatatcgtgcctgaattctgggtgctcatccccatgactggattcggctggcttctgtcatggggatgttatgcggggttattcatctcgtga

SEQ ID NO: 185668 - DNA, 555 bp, Klebsiella oxytoca
gtgaaaaacagcctgaagaacacaactaaaacagccgcaacggtgaccctgctcctggccctttccggcatggcgcaggcgggcacactcgatgaggtgaggtcgctctgggacccgcagggtatctccggcgcttcatctgtctcccggcaggatggcgccccgcgtgcggtgacgccggtttctcagccccgctggtttcgtctgagcaacggcaggcaggtggacctgcgggactggaaagtggtgttgttcatgcaggggaagtgcccgtactgccataagtttgacccggtcctgaagcagctggccgggcagtacggtttctctgtcttcccttacaccattgacggacagggcgatgaggcctttcccgaggcactcccggtaccgcctgaggtgatgcagacctttttccccaatatcccggtggccacgccgaccacgtttctggtcaacgtgaatacgctggcggcatatccgcttctgcagggcgccacggatgcgcagggctttatggcgcgagtggatacggtattccagatgatggagtag

SEQ ID NO: 185669 - DNA, 294 bp, Klebsiella oxytoca
atgagtgagccattcaagtggggtctcgcgctggtatttacgtttacagtatatgccctggtgttttatcccggccatgacacggtaccggaaacactcacccgtcactggataaatgactgccggttgctggaatcgaatattaacagaggttttttatctcccgcacaaaaccggcttcagtgtggtgatgttattgaaaatgtcagcaaggctgattatgacagcgcggtaaatggcggtaagaaaataacaactatcaaagcattactcgaagaactgttcggtcgttaa

SEQ ID NO: 185670 - DNA, 321 bp, Klebsiella oxytoca
atgcgtgtgtctgttttatttgctctgacgtctgtgttcagcgcgttgaatctcgtatttatgccattccatccctttatgatgttgtgggctttcgggctctccatcggctttattctggttaatgttattgccgacagactgcgtctgtggtccggtattgcatgggggatggctgccgccgtaatagtcgtttttatgcttaacggtagagagcccgatgcagaaaaccgggtgctcatcagttcattcgcatgtctcgtctcagcatggtatgccggggttcagttcagaaaagagaagagcgagtctctgtcctga

SEQ ID NO: 185671 - DNA, 192 bp, Klebsiella oxytoca
atgaaacttgcaccacaaagccgcgagatcctgcgacagtacaaagccctgattaacgcacgccgccgggatgccgggcagcgggaactgaccaccgcccaggtgattgacgaaatctgtgaatacatgacctgtcagtgtgccgtctacattggcggacacttcatcttacagggcggcaagggccagtaa

SEQ ID NO: 185672 - DNA, 765 bp, Klebsiella oxytoca
atgagaaacgacacactcaacgcgctgatactccgccacggcgaccggatgctacaggatgcgggctggcccgacgctgttgatatggcgcccgtcgcacctgaaatcgtacccggctggctcgctgcctgcggctctctcagcggtgcggaaatcctcacgctgacagagcagctttgccagccgctgacgtatggccgggcagcgttgttgctcgccagcgcccggcggctggcgggaaccccggcgcgtctgcatctctttccggttcaggcatatccgcatccggagcggctgtctgactgtcaggttatccgcctgccttacgcgcaggaatggctgacggcagcggaatgtgacgatctgctggccttcctgaaagcctccctcacgcagataacagaaatcgtgtgccgggatacgaaacgtatcgctgccgtgctggttccttccgccgccccgcgactgatggacaggtgtttcggggactggcggttgctggccgacgagtatgaccatgaaaactggctggacgcaggcgagaccgacaggctggatcaggtcctcgatgccgttctggtacgcaatgcgcgattctgcccggtcctgctcaccctggtaaatgagcgggaggaaaacatggagggcgtcggggttattacagacctgctgcgttttccgggcgatccggttcgccgctggcttgatcgccgcgtattgcgggacgtggtgagagaggcccgcggcgtcaacactcaggtgtga

SEQ ID NO: 185673 - DNA, 411 bp, Klebsiella oxytoca
atgctgtatggcacccgtaaagaactgaacaagaaactcaaacgcatgtttggaaacgaagaacgctacgccctgctggtctggacgaaagaagacgtgatggccctggccgggaacatgacggaggccgaggctcacaccctgcttgagcttatcggccgcacgggaacgggggagcacaccgaagaaggcgtgtcattccgcaccgtgcaggcgctgtacgccgggattcgcccgggcattccccgcgtgagcgtccccgtcgatacgctgtatcgcatcacggacattgccgcacaggcgattaacggagaagacgagcattcgccgtcgctgacggtcgatcactacccgagtgtcgctgacgctcaggcagaaatcgcctggctgaaacgtgaactggccgcctga

SEQ ID NO: 185674 - DNA, 222 bp, Klebsiella oxytoca
atgaactacagcggacacgaagccctgcgccgcgatatggctgggctggcgaacaatctttgcgacctgaaaaccaccctcaaagtgctggaagagacgtatcactaccggcacgacggactggcggagcggcttgccggtatcaacctgcggcgtctcagtgtcctgatggatgaggcgttcaatattgccctgatgctcgacgaaagctttctggactga

SEQ ID NO: 185675 - DNA, 201 bp, Klebsiella oxytoca
atggataaaaaaacgctggcagagtggctacgggatattgcccatcatatagaagaggaaagccctctgattcgtgatgtcagactggatgatgctatttcagaggaagggctggccagaaagattgtcaccatcacattcaacgcacatggacaagttttactgccggaacgagacgtcagcggcatcacccggcattga

SEQ ID NO: 185676 - DNA, 231 bp, Klebsiella oxytoca
atggctcttgaaaaggcccatagtggtagtaaaaaaatgacctttggtgagaatagagatcttgaaagagtggtcgctactccagcttcatcaggtaagagcaagcgtgttaacgtcaattttgatgaggtgaaacacaccagatttaaagctgcttgcgcgagaaatggaacttcaataacggatgtgattagcaagcttgtagatgactggcttaaagaaaatgaataa

SEQ ID NO: 185677 - DNA, 627 bp, Klebsiella oxytoca
atgagtatgaaggttgtttctttccttaatccgaagggtggctcaggtaaaaccaccgcagttattaacgttagtacagcaatggctcgtgcaggatacaacatcgccgttgtggatacagatccacagatgagtctgactaactggagtaaatcaggcaaagccgcattcgatgtgttcacggctgcgtctgagaaagatgtttatggcatcaggaaagatcttgctggatacgactttgccatagttgatggcgccggttcgctttctgtaattacttctgctgcagtaatggtcagcgatttagttatcattccggttactccaagcccacttgatttttccgcagcgggaagcgttgtcacagtccttgaagctcaggcatatagccggaaagtagaagctcgttttctcataactcgaaaaatcgagcaggcaaccatgctaaatgttttaaaagaaagcattaaagacactggtgtcaaaccattccgaacggcaattactcaacgccaaatttatgttaagtcaattctggatggtgacagtgtatttgaatctaatgatggggccgctaaaggtgaagtggaaattcttacaaaagagatagttaaagtttttgagtaa

SEQ ID NO: 185678 - DNA, 519 bp, Klebsiella oxytoca
atgtacgtaaaacccacagatgttttatcccccagaggccatgtagaggtgctagatgtgctttacgatgcgggcgaatgggacgtgtccgtcgcccgcattaactaccgggacgaactgaaccagcccttcagcgaatgtaccggcatacgctggaatggtaatctggatgagggtagtaaaggtatgccgctgtcgcggggatatcccgtgtggtttgtaatccccaaggagtttgccgcgtgcattcaggctagagcactggagctcaacaccgataatattcctgcggtcattgccgaaattaaaatgaaagtcgagtctgagcgcgcatcgaaccctaacacttacatgttggaatacaaaacagcgcgtcagctgtcagaaactgacgtcgatgcgatactgggcggtctgaaagacgtcgggatttttgaggctttcacggaaggcgcccatacgatcgatatcaacggtgttcacaccctgatgctgatgtttccggccaaaagaaaatag

SEQ ID NO: 185679 - DNA, 231 bp, Klebsiella oxytoca; identical to SEQ ID NO: 129443

SEQ ID NO: 185680 - DNA, 633 bp, Klebsiella oxytoca
atgccacttatgcagcgtctgagtggtacacacggggtcgggccggtatgtcgcgaactggatattgccccgtcgacatattactggcatcagcaacgccagctacatcctgagaaatgtagccaacgagaaaagtgcgatgctcaaatcatccaggagataaaacgcgtttacggagaaaattacagtgtctatggggcacgaaaagtctggcgtcagttgctccgcgagggctttagcgtcgcccggtgtactgttgaacgcctgatgaaaataataggtcttcggggcgtactccgtggcaaagtcatcaagaccacgatcggtcgtaaaacagcggcagcagcggatctggtaaaccgccagtttgtggcagaacgtcccaatcagctttggtgtgcagattttacgtacgttagcacctggcatggcttcgcctatgtggcgttcatcatcgatgtgttcgcaggcacgatcgttggctggcgggtctcatcgtcgatggaagcaaggttcgtgctggatgctctggaacaagctctgtgggcacgtcgcccctcaggtacaatccatcactcggacagtaagaatgtctgtgtcagctttcatcatcatgcttgttgtttcgcctga

SEQ ID NO: 185681 - DNA, 354 bp, Klebsiella oxytoca; identical to SEQ ID NO: 86582

SEQ ID NO: 185682 - DNA, 789 bp, Klebsiella oxytoca
atgatagtgcctaccattcccggacagaatatagcgaatccctctacacaactgccggtagccatcgactaccctgcggcactggcgctgcgccagatggctctggtacaggttgaactgccgaaatatctgctggcgccggaggtgagcgccctgctccactatgtgccggatcttcatcgcaagatgctttttgctaccctctggaatactggcgcgcgtattaacgaagcgctggccctggcaagaggggatttttcgctggcgccgccgtatccgttcgtgcagctggccacgctcaagcagcgcaccgagaaagcggccagaacggcaggccgtgctcccgccgggagtcaggctcatcgcctggttccgctctccgatcatcagtacgtcagccagctgcagatgatggtggctaccctgaaaattccgctggagcgtcgtaacaaacgaaccggcagaacggagaaggcgcgtatctgggagatcaccgaccgcacggtccgcacctggcttaatgaagcggttggagcggcagcggccgacggggtgacgttctcggtgccggtgacgccgcatacgttcaggcattcctacgcgatgcacatgctgtatgccggtattccgctgaaggttttgcagagcctgatgggccacaaatcgattagctcgacggaggtctatacgaaggtgtttgcgcttgatgtcgcggcgcgccaccgtgttcagtttgctatgccggaaaccgatgcagtcgcgttgatgaaacagctgagacggggataa

SEQ ID NO: 185683 - DNA, 678 bp, Klebsiella oxytoca
atggctgactggtttattgcgactgaaggcgtgaaggttgtgaaagacagcgccagcctgtggccacagatcatcacggcggtttcgtccgccggtgcagccctgggcggtgtgtatctggcccactactttacccggcggcgtgaagaaagagcggcggcggcgaagcaggtcagtgagcgactttttattgctacggagctggtctttttgctggagcagtttgcggaaggttgcactcgcctggccacagacagcggcgagcaaaatccggagggtgaatacactcctacagaaaaccttccggagttgataatcacaaatatttcaggtgactggcgaacacttcccccccgggttatgtaccgtattcatgaactccctgtactccagaatgaagtccggaggcatgttgcggctttctatgagcattactgggaaccgcccaaccactccagatactttcgggaacgtcagtttcagtacgccagactgggattaaaagccgttattcttgcccgtcgtctacgtaaactggtcagtttgccaggaacacgccttgaagctacggaatggtctgcacaacccgttctctggagagtgtggcggaaaaaacgcaaagaaaggaccgaagcggaaatccgtcgccggcgtaagaacaaaggggataactcatga

SEQ ID NO: 185684 - DNA, 360 bp, Klebsiella oxytoca
atgggacgttcaataccagtgaaatttggtcagaaggaatttaaatccaaaactgctgctgttagctattacatggatcagcggccggatgtgaaagctgtcgggaccatttccggtggtgattattttgaagaactgaaagaactgttcaccctctattgtgaaatctgtccggggtgggaactgaacggccgacttgttaaacattttacagttcagaatgagcctcgctgtatcaatggcaactgggtgtctcacccctgctataaggtccaactgagcaacggtgagctgagaccgttttcagttgaaaaggcaatagatgccatcgtcaaagttgctgcagctgaacaacgatag

SEQ ID NO: 185685 - DNA, 1128 bp, Klebsiella oxytoca
atgccagaagtaaaacgtatcgactcgaacaattcaaagattaaacacaccgacgaactccgcacccacctgctggataaagaaggtaacaagattccgcatagcgtctttggtactgacacgacgcgcaccgagattatctctcaggctgacggtacaggcgagaccatgaatgttggcttcactgaccgctcaggtcgccctcaggcattcggtaatgacgtgactgactacgtacaggcccttgagtctgcacttgatgagacgcttaacgatggtgattttatcgatgggttgaataccgaagtattcccttgtgagcagcgcccatttgctactctgccgactccgattaaccgtgagaccctgaccgatcgcaccgtccgcttcctgtcgaacggcgtgtataacccagagaagaacgccccgactactaaggtgaaaggcggtcagaccttgatggttaaccctgtgattgccgacaaggacgccaaagaaacaggtatcctgtgctcagctactacccacgtgtccgactttgcgatgatgggcggctggactggcgctggcctgatggctacggctaccgatatggttgaccagtatctgcgtaacatgacctctaaagttgtcgatgtgctgctggatgctccagaccttcaggcaaccaaagtgggcgcattgtctggcaaagcgtcagcacaagccgatgacattctggatgctgtagcggtgaacctgcctttctaccttggctcctcactgaccgattacactctactggtcccagagaagtacgaagctatcctcaatcgtgcagctcagaaagcgggtatgaccgagattagcgaactggtaggcactgccgttgcgccttatagtggtgatgaccgtggcgttatcattctaccgaagaagtacgctatgttatctttccgctcaacccgcagcggcgacctcgttaacgtgttggttactcgtgatgctaaccgtgcaggctatgacgtcgaactggtaggcgcactagatgtcatggcaacgggcaccgttaaggttaaggctggagcgttcgacactgaggcggctgctagttatccgctggtccacgtcctgaagtttgaagactaa

SEQ ID NO: 185686 - DNA, 411 bp, Klebsiella oxytoca
atgtctatttcataccgtaaactcgacatcaacctgagtgccgacaaagagaccgtgctggtcttcggccaagagatgtccaccaagtatttcactgagattgtagtgaccgcaatgctgaatggtctaccggccctgagcacaggagcacacgccatcctgacttccctgcacgcagcgggtcttaacgctaatgactacggggcatattcccgagcgtgggctgagagcaacgcagaggcacgccgagaggctgagcgtcagcgcattgagaacgagaaagaccgtcagcgcatcgccgctatgtatgcaacgcctgaagaaatcgctaaagaggccgcagagcgtaaggaacgtaaggcagaccttgagcgtcgcttcagccgtaaaggcgctgcattcggtctgtaa

SEQ ID NO: 185687 - DNA, 252 bp, Klebsiella oxytoca
atgtccatcccaccagaagtgaagcatgagcttccactagacctcccgccaccttacagcgttgacgtgaagattgacccccggacacctgaaggccgcaaagctatgcgcttgttggatgtgcctacggacgttctcgtagccgcgctgggtctcccaccgaagcacacccggcccgatatgtattactcgaaaggtgcgctgtgtctcatggcgaccgctgaagggttgaccccgatggacttcaagtaa

SEQ ID NO: 185688 - DNA, 579 bp, Klebsiella oxytoca
atgaacattcagcataaacactcaggccatatcattatcatcaacggtcacagcttcaaggccaatgagtctggcatgtggaaccttacggaaatctggaaggtgttagacctgacccgctctaaggctccctctgagtggcgaaccaaagacgctaagcggttcacggaatgcccgcaaaaaatgcggtcattagggcagggcgttacatcccacgttctcgccgacaaacaggcgaccctcaagtacgccggatgggtctctacagctttcgaagacatggtctatgcggcctttgagtccatcctagagatgccagaggtcgccacggtcgttgcaaataaaatggtcgagctgggctatcagaaagaagccgaactatttgagcgccacactaatgcagaccgcgattatgcacacgctgagatgaaacgctggcgagataccacaaccaataagtcccgctgtagtgccgtgttggctggtcatattagcttgcagaccgctatctcacagggccttaaaggcgtctggctggagcgctgccgggctggactagaagctatgggggattactga

SEQ ID NO: 185689 - DNA, 288 bp, Klebsiella oxytoca; identical to SEQ ID NO: 84381

SEQ ID NO: 185690 - DNA, 240 bp, Klebsiella oxytoca; identical to SEQ ID NO: 99304

SEQ ID NO: 185691 - DNA, 1215 bp, Klebsiella oxytoca
atgcctaagtataatatttatacaaagattgaatcgaatgtttcagcagtcgaccttttttatgatctcaatgtgtatagaactgacgccaataataaaaaacatatgttattgtcagtggtgcagcaaccagtaactcccaattatcaaacgcagtcccatgaaacgaatgagacagaggatgatctgtctgtaatctacatcatggaaattaatttgtatcgcaagcatggcggtaagttggtttctgttctttcatcgcctgcgaaaaaaatgtacacacttggtgaaatggcatcagggcaagcgtactctaaaaataaacgcgaaaacgtctgctattttgagactaaagcccagacaaaaccggttaatgataatggtgaggataacacacataatgtgcagataacttgtatggagagagcgtttattgcacaaaaatatcccattggtagttccgatgatccattcgatagaagaaagatcgagagtcagattgcatcaagaatgaatcatgccacttatcctaaccaaggggggactagtttatgtggtccggcatcttttttttattgcctgcaaatggacaggccggaagtttataaacaagcggctattgaactttggttgcatgggaaaacaaaaataggtttattggagatcttaccaggaggcggatgtaggcatcccaaaggaagtttttatgatgactacggtagggaagccgtatcaggtctggactggatcacattggctagcctgagggattctgaaaactccatcatgagttacgatgaagtgggtgatcaggttgctggtattacaatgtgggggaagttgacggaatggttcgaaaaagcaggttatgagaaaatattcgataatataagtctttcacatgccaatgaggcagatatagtaaagcttaattcatatatgaaacaaggatacagagttgtaactctgatatctgcaggaatgttaaaggggtggggttctggtgactcatcgtcaaagaatcactggattgtttgggatgacgctgtttgcaaggttaatggtggagatattactcccaaagatagtgatgaattaattgaactgaagcttttctcttggggaagggttgattggcaaacaaaaaatagtagtactctcagctacttcgctaagcatgtttttggagggttggtttttaaaccaataaaataa

SEQ ID NO: 185692 - DNA, 1227 bp, Klebsiella oxytoca
atggcaagaatcgttactaagctcaacgatactcagatcaagaagtccaaggcaacaaacgataacaaagagataactctgtatgacggcgatggcttgatgttgagagtcaaacccagtggcaagaaaatatggtacttcaactatcaagtgccaatgaccaaaaaacgaacaaaaacaaagttaggaaactaccctcatcttacccttgctcgtgcaagagctatacgtgatgaatacctgtctttacttgcaaacggcatcgatccacaagtccataatgaaaaagtagctaatgacctgaaagatgctactgaaaatacgttgcaagcagttgctgaacgctggttagaagagaagaagaagacagcaggactctcgcaagaccacgctaacgatatctggcgtagtcttgaaagaaacatctttccaacgctgggtgatgtccctatcaaagagatccgccccaaaatgctcaagcagcatctagacccaattgagcaacgtggtgttcttgaaactcttcgccgcatcatttcccgtctgaatgaaatctttcgctatgccgccacggaagagcttatagagttcaatcctgccgacaatctcgctcagcgtttcagtaagcctaagaagcaaaacatgcctgccctgccccccgatgagctaccccgcttcatggtagcaatagctaatgcttcaatccgtttagaaacccgtatgttgatcgaatggcaattgttgacgtgggtgaggcccggtgaagccgttcgggcaagatggtgtgatattgatgaagagaacagattttggaacatccctgcagaattcatgaaaatgaaacgtccacataaggttccattgagtaaagaagctctccgcattctagaaaacatgcggcctatcagcggtcatagagaatgggttttccccagcatcaaagctcccctcagtcatatgcatgagcaaacagcaaacgctgccataatcagaatgggattcggtggtcaactggtagctcatggtatgcgttctatcgcccgaacagcagcagaggagtcaggtaagttcagaacggaagtacttgaggcggctcttgctcactcgaagaaagatgagatcatagctgcttataaccgtgccgaatatcttgctgaaagagtggcgttaatgcagtggtggggagattacactcatgcacagaaacacaaggctctcgcggcctga

SEQ ID NO: 185693 - DNA, 1011 bp, Klebsiella oxytoca
atgatcgatattagttccgccaaaatagaaaaaataattattcaccaagtaggtaataaaatacgggaagaaggttttcgattctcagataaagaggctaatataaatgaaaatctaaatgatttattattaaaacattatcttttgcccttatcgaaaaccaactcttgctttcaattttatcatgaatcagatattactctcaatgaaatgcatcaattttcctctcgtatttttaacaacccaaaaacatttaaagaccaatcaataaatattgcgaaacatttatatagtgcatcaactcatccaaatatatcgggaggggatttcattgtcatccttttttcagacattaaattgaacgacagcttatcttatggtatagcaacattaagaatagaaaacaaagatgattaccttgatattcaggataataatggagtattccagcctttagaaaaatcggggatttctttaactaaaattcaaaaaggagcattaatcctatcaactacaaacgttatatttgctattgacaatttaggacaaaaaactaaatattggttggattcatttctaaaagctgttccagtaaaaaccaaagcatcgtgtcttagagcaggtggagagatactgaaatctatctcaactaaaattaaagaaacatctacattattaaatatcaatgatgaattggatagaaagatacaaagctcagatgagatttctttaaaagatataaaagatatagcaaaaaaacaccttaatagcgaagatgttgatacagttctcaccagagttagtgagaaattcggttttgaattatctgatgatataatcattgagtcaaaagatttattacctgtggcaaaaaaaatatcaaacaaaactaaaattgatgatggaatcagtttattaataacagataaaaatcatcatattaacaatatttcagttacaaaagtagataacaaaattcaggccataatcgatatcaccataaaggaataa

SEQ ID NO: 185694 - DNA, 891 bp, Klebsiella oxytoca
atgggtgaagactctaaaaaatcaggcgagatcggagaaaaactaaccactaatattttatccagcattgggtggttaatgtctttgcataatgtgtctataaaatgcaatacccccgaacatctgtccgaaaagggaaagcaacgttcgacacatggtgaagaccaaatttatatttaccacaatccatttcatgacgaaacgactaacatagttcacatctctgttaaaaataatatcaaaaaatatcctgccgaaggtacattaaaatcaaaatttaaaaattacataaaagaactacaagaaacaatcgactgcgcaagacatagccctgagttaaaagctttaaacatagctaataactccagaaaaaacaaagttaatatagaatgcgatattatttcaatattatctacaatccgtgttgaacaaaacattaaataccctatgtatttaattgataatgccagagcttcatttcttttaaaaatagtagatgatataaaaaatcggttcagtgacaagaaaattagttttttttaccctaaaataggttcagctattttggtcgaagagaatcggagtggaaacagtctaccattggaactaattgcatctgaagtaataccgtttactataaatgatggaaacgcaattagtctcattttctacgccaatcaatccttctctcttgattcttacaaaaagttaattgcttattcactgcaattttctagtggcttagttcaagaaataagaattggcatgccagattacaaccctacaaaacatgagcaagaagcaaaaatagcaagaatgcatttctcaaacagggaggaagaaattattccattctcattcaaccgttcgatgttaagtttcttagaataa

SEQ ID NO: 185695 - DNA, 468 bp, Klebsiella oxytoca
atggacacgaaattcgatataagatccacaatactttctggtaatgaattaagggttcttttaaatagtgaacatatttcctatggcgagattcataatacattaaaaagcaaaggaatttttattggagagtccgataaatcgatcacagttccgcttttggcatcaaccattcttaaacctgatgagttttctaatttaattgaatccagtataaatagagaatctataccaaagaaaaaaacgctgtctcatgaacttacagcagataatttagattgggtttctcctctcaaaggattatttgacgagcaattaaacagtaacttgttaatttcagacgtcgatagcattaactttgtagattttccagatgttgttattgaagacaacaacagaattaagattagctacaaggttaacagaaaagactatagcaaagattggatagaaagagatctggactga

SEQ ID NO: 185696 - DNA, 1419 bp, Klebsiella oxytoca
atgaccactctcagtcacgactctacaaccatgccgcgtacgcagcgcgatacccggcgcatgaatcagtttgtctccattgccgccgcggtggcagggttgctgtttggcctcgatatcggggtgattgccggggcgctgccctttattaccgatcattttgttttatccagccgcctgcaggagtgggtggtgagcagcatgatgctgggagccgccatcggcgcgttatttaacggctggctctctttccgcctcgggcgcaaatacagcctgatggtgggggcggtgctgttcgttgccggctccgtgggctccgcgtttgcgaccagcgtcgaaatgctgctggtggcaaggatcgttctcggggtcgccgtggggatcgcctcttataccgcaccgctgtacctgtcggaaatggcgagcgaaaacgtgcgcggcaagatgatcagcatgtatcagctgatggtgacgctgggtatcgtgatggcgtttctctccgacaccgcgttcagctacagcggcaactggcgagcgatgcttggcgtactggcgctgccggcggtggtgctgattattctggtgatcttcctgccgaacagcccgcgctggctggcggaaaaagggcgtcacgtggaagcggaagaggtgctgcggatgctgcgcgacacgtcagaaaaagcccgtgacgagctcaacgagatccgcgaaagcctgaagctgaagcagggcggctgggcgctgtttaaggtcaaccgcaacgtgcggcgggcggtattcctcggcatgctgttgcaggcgatgcagcagtttaccggtatgaatatcatcatgtactacgcgccgcgcatctttaaaatggcgggcttcaccaccaccgaacagcagatggtcgcgaccctggtggttggcctgacctttatgttcgctacctttatcgccgtctttaccgtcgataaggccggacgtaagccggcgctgaaaatcggttttagcgtgatggccatcggcacgctggtgctgggctactgtctgatgcagtttgataacggcaccgcctccagcggtctctcctggctgtcggtggggatgaccatgatgtgtattgccggctatgcgatgagcgccgcgccggtggtgtggatcctgtgttcggaaattcagccgctgaagtgccgcgatttcggcatcacctgctcaaccaccaccaactgggtgtcgaacatgattatcggcgcgaccttcctgacgctgctggacgcgatcggcgcagcaggaaccttctggctttacaccgcgctgaacgtcgcctttatcggcgtgacgttctggctgatcccggaaaccaaaaacgtcaccctggagcatattgaacgcaggctgatgtccggcgagaagctgcgcaatatcggcaattaa

SEQ ID NO: 185697 - DNA, 297 bp, Klebsiella oxytoca
atgaaagagattgagctgacaccaaaagcagaagaggatctggaggccatctgggactacagcttcagagagttcggggttgttcaggcggatgcatacatcggccgtatagctgcagtgtttgatgtgctggccatgcatgatatcggcacgcatcgtgcagagctgggagacgatatctgcacactgccggtggaacagcacatgatctattttgtatcatcacattctatggttacggtcattcgtattctcagccagtctcaggatacggcgcggcatgaaccctggagatga

SEQ ID NO: 185698 - DNA, 261 bp, Klebsiella oxytoca
atggcccgtacgatgacggtggacgtgggtgatgagctgcgtgaatttatcgattccctggttaaggccggtgattaccgtacccagagcgaggtcatgcgtgacgcgctgcgtctactgcgcgagaagcaggctgaatcacgccttcaggaactccgcgatctgctggccgaaggaatcagcagcggcgaggcgaaaccatggaacaaggatgcattcctgaagaatgtcagggccagggtggcaaatgaaagagattga

SEQ ID NO: 185699 - DNA, 1413 bp, Klebsiella oxytoca
atgctgactctgacagtgattcggattctgacagcgattcggattctgacagtgactcggattccgacagcgactcggactccgacagcgattccgactccgacagtgactcagactctgacagcgattcggattccgacagtgactccgattccgacagcgattcggactctgacagcgattctgactccgacagtgactcggattcggacagcgattcggactctgacagcgactccgattctgacagcgactcggactcggatagtgactcggattcggacagcgattcggactccgatagtgactccgactctgacagcgattcggactccgacagcgactccgattccgactccgacagcgactcggactcggatagtgactcggattcggacagcgattcggactccgacagtgattccgactctgacagcgattcggactccgacagcgactccgattccgactccgacagcgactcggactcggatagtgactcggattcggacagcgattcggactccgatagtgactccgactctgacagcgattcggactccgacagcgactccgattccgattctgacagcgactcggactcggatagtgactcggattcggacagcgattcggactccgatagtgactccgactctgacagcgattcggactccgacagcgactccgattccgactccgacagcgactcggactcggatagtgactcggattcggacagcgattcggactccgacagtgattcggatagtgacagtgattcggattcagacagcgactccgactccgacagcgactcggattccgacagcgactccgactccgacagcgactccgactccgacagcgactcggattccgacagcgatgccgattccgacagcgattccgacagcgattcggactcggacagcgactctgactctgactctgacagtgactcggactccgacagtgactcggattctgacagcgactcggactccgacagtgactccgattctgacagcgactctgacagcgactccgattccgacagcgattcggattctgacagcgattcggattcagacagcgactcggattctgacagcgactccgactctgacagtgactccgattcagacagcgattcggatagtgacagcgactcggactccgacagtgactcggactctgacagtgactcggactccgacagtgactcggactccgacagcgactcggattctgacagcgactcggattcagatagcgattcggactctgacagtgattccgactccgacagtgattctgacgctgacagtgactcggattcggacagcgatgccgactctgacagcgactcggatatcccgcaggccaatgcggataccaataccgcgctga

SEQ ID NO: 185700 - DNA, 369 bp, Klebsiella oxytoca
atgaaatatcaacctgcaacacccctgcgggcagcgaagccatgcctgtcgcccgtggctgtctggcaaatgctacttacacggctgctggaacagcattatggtctgacgctaaacgatacacctttctgtgatgaaaccgttatacaggaacatatcgatgccggtatcactctggctaatgccgttaactttctggtagagaaatatgagttagttcgtatcgatcgcaatggatttacctcacaggtacaagcaccttatttgactgcgaaagacattctttatgccatgaaagcgtgcgggctaatgagccggtgctcttacagggaggtaagtaatattgttcttagccgatcacggctgtga

SEQ ID NO: 185701 - DNA, 822 bp, Klebsiella oxytoca
atgcgattagccagccgctttggccgtataaaccatatacgccgtgaccggcctctgacccacgaagagctgatgagtcatgtgcccagcgtgttcgggagtgacaagcatgactctcgttcagaccgttatacccacatccctaccatcaccatcctcgaaagcctgcagcgtgaaggttttgagccgttctttgcctgccagacaaaggttcgcgaccagagcaagcgggagcataccaaacacatgctgcgcctcaggcgtgaggggcaaatcactggtaaacaggtccccgaaatcatcctgcttaacagtcacgacggctccagctcataccagatgctgccgggcctgtttcgtggcgtctgtaccaacggcctggtctgcggccagtcatttggagaagtgcgggtaccgcataaaggtaatgtcgtcgagaaggtgattgaaggggcttacgaagtgcttggggtgtttgaacgggtggaggagaagcgtgatgcaatgcagtcactagcgttgccagcacccgcccgtcacgcactggcgaatgccgcgctgaagtatcgctttggtgaggaccaccagccggtcacggtatcacagttgctgacaccacgtcgccgggaggactgcagcgatgacctgtggaccgtataccagcgcgtacaggagaacctgatgaaaggaggtctgtcagggcgaaccgcgcaggggaaaagtagccgcacccgtgctgttaccggcattgacggcgatgtgaaactcaatcgagccctgtgggtaatggcagaaaacatgctcgcgtttttcgggcgttaa

SEQ ID NO: 185702 - DNA, 474 bp, Klebsiella oxytoca
atgcgtttatctcatgccgccctggcggtcgttatgctggcctcagcctccgttgcacaggccatccccaatatgtggagcagcggcttcgctcagggggtgaccgaatacatcatcaccagtccggagaaagtggtctttaatcttaactgcactaccagccccgatgagcagaatgtgttgcagcacagcgtatacctgaccctgcccgacggtaccttgctgaattctcatgatgacggaaccgacatcaccgtggtgatggatgacagccagtatccgttaccgtcatccctgggctggcgaaacggtgataatgcctgggtgtcatttattgacgcactggggcaggcagcaaatttcgatgtttatgtcagcgataaaaaagtaggcactttcagtccgggtctgaagaatacgcaaaaagagctgtctgacctcagtgagtgccggaccacccattacagcgattaa

SEQ ID NO: 185703 - DNA, 465 bp, Klebsiella oxytoca
atgaaaatgaggtttgcagttcttgcgctggtcttcagcgtcagtctcagtaccgcggcccgggaacgagccgatattccggcgaacactatctggtcgtttaaggaccctggtggtcgggttttatgggatgtctgtggcggaaaacaaagctcctgcaccatcgtgttggcggcaacgaacagggtagccatcgttaatcgtaaatccactaacggctgcgccctgggggatttttacgtggtgggcaaacccgaaaaagcctggaaccagtacgacacggggacctgcagcagcaatgcttacttcagtcaggggaccatgaacaacgggcagtaccggactatcgatgtccgtctcaacggggaactggtaaaacgattcccggtggaatactggtcgatggtgaaatccttttcgggtagcaaccggccaaaatggaaggacaagacgacagaaagataa

SEQ ID NO: 185704 - DNA, 282 bp, Klebsiella oxytoca
gtgaaaatctactggaccctaaaaagtattaccgaactaaaagacctatcttttcgggagcgcggaagacggtggcggaatgcgtataaatcggccttccgacactggcagacctggggcggactcgtcctctgcggggccttcagcggcgcgggagcgcactttggcggcatggccggcacagtaatatttgctgggctgggtggctttatttacggccagatcgttacacacgttgtcctgaaacattatcggcaccgactgcagggcgaagccaactga

SEQ ID NO: 185705 - DNA, 336 bp, Klebsiella oxytoca
atggaactgaacttcgctgcggcggtactgaaagagcttgggcacgcgacaaggctcgagatttataaagccttaatcaaagccggatatcagggaatgcctgtgggtgaactgcaaaaaaaactcggtatccctgcatccacacttagccatcatctttcatccctgatttcagtatcgctggttcgccaggaacgtcagggaagaacgctgttttgccatgcctgctatgaaaaccttgctgagctgatggctttcctgactgaagagtgctgctcaggaacggatgaccgcctggccacaaaattccctcgggagaaaaaccatgaaaactga

SEQ ID NO: 185706 - DNA, 1752 bp, Klebsiella oxytoca
atgaaattcttagagaatatcccgtcttacctgtttttcaccggtaagggaggtgtaggcaaaacttcgatttcctgcgcaacggctatacgtctggctgaactgggaaagcgtgttctgcttgtcagtaccgacccggcttctaacatcggtcaggtattcgatcagactatcggtaacactatccagcccgtgactgctgtgtctggtctttcggctctggagattgacccgcaggacgccgcccagcaataccgcgccagaatcgttgaccctattaaaggtcttttgcctgatgacgttgttaacagcatcagtgaacagctttcaggagcttgtacgacagagattgctgcgttcgacgagtttactggcttactgaccgacgcttctctgctgacccgcttcgatcacatcatttttgatacagcgccgacgggccacacgattcgccttcttcagcttcccggagcctggagcagcttcatcgaaagtaaccctgatggtgcttcctgtcttgggccgatggcggggctggaaaagcagcgtgagcaatatgctcatgcggttgaggcgttatccgatcctgaaagtacccgcctggttctggttgcacgactgcaaaaatctacgctgcaggaagtcgcccgcacccatgaagaactcgccgcaattggtctgaaaaaccagtacctggttattaatggtgtgctgcctaaagccgaagctgaacatgacgccctagccgctgcaatatggcaacgggagcaagaggcgctggcaaacctgcctgctggattgtctgagttgccgacagacagcttatacctacagccgctgaacatggtgggtgtgtccgcattgaaaggcctgctcaacgaacacgctgagataacatcgcttcctgaacaaagcataccgaacaagccagagaatatgtcgttgtctgtcctggttgatgatatcgcccgcagtgaacacggtttgattatgctgatgggcaaaggtggtgtgggtaaaaccacaatggctgcggctatcgccgttagtctggcggataagggttttgatgtgcatctcaccacctccgatcctgctgcacatctcagtacaacgctcaatggcagcctcaaaaatctgcaggtcagccgaatcaaccctcacgatgaaactgaacgctatcgtcagcatgttcttgagacgaaaggcagggatctggatgaggccgggaaacggctgctcgaagaggatttacgttctccttgcacagaagagattgcggtgttccaggcgttctcacgcgtaattcgtgaagcaggcaaacggtttgtggtcatggatacggcacctaccgggcatacgctattactgcttgatgctaccggggcttatcaccgtgagattgccaggaagatgggggataaaggtcattttaccactccgatgatgcagcttcaggaccaggaacgtaccaaagtcctgctggtcactctgcctgaaaccacacctgtactggaagcggcaaacctgcagtccgatcttgaacgtgcggggattcatccctggggctggattatcaataacagcctttcgattgcacagacgcattcaccactactttgccagcgcgcccgacaagagcttcctcaaatcgaggctgtgaagaaccagcatgcaagccgcattgcattggtaccggtaatggctgctgagcccactggcatcgagaaactcagagagctggccatttaa

SEQ ID NO: 185707 - DNA, 189 bp, Klebsiella oxytoca
atgtcgattttgcagcagcagctcatgctgagcaccggcgaaatcaagagatacgttgagtcagggaaaataaggggtgtcacgatgaaaatgcttaaatcgcgaaagctgaaggctgcggaatatcactttcagctatctgcggaaacgctgttcgcccggcgcaagatagttctgacacatcgttaa

SEQ ID NO: 185708 - DNA, 324 bp, Klebsiella oxytoca
atgacgcaaaccggaaagttgttctggcagggtatgcgtcgtgaaagtaacgatcgcatggccgattttgccgtggcggatgtgtctctgttctggcttctcaatgccctgaacagtgcagaacccgtgctcgaacaatttcagtgtcacccgaaaagtccaccggagcgtctgtatcctgaactggcacgccttgcgggcagcctgctgactttctcgctggaacaccaggtgagtgccattcctgtctggcagcatgagcagctgaataaccgatgccggtggcacagctgcaggaacagttcccgcgccagtgcaaggtag

SEQ ID NO: 185709 - DNA, 270 bp, Klebsiella oxytoca
atgccggtggcacagctgcaggaacagttcccgcgccagtgcaaggtaggcagtccggatcatgtcaggagtatcgtcaattcttcacgggtgggggtgccgctgacaccgctgcgtcatgtgccggccggtctggaaaaccagtatttcagccttgatgtctctcatcctctggccaccgaaatgctccagggtgggacctgtatgttttacgttccgggcatgctcggcgagcctgaacttgaactctttgcggtactgagaacatga

SEQ ID NO: 185710 - DNA, 297 bp, Klebsiella oxytoca
atgagtgagcgcaaacgcggcgcggccgcgtccattgatattgatgcccttttgcaggacacctggctgcaggtgataagcctccgtcacggtccgactttccaggatggagaagggcgcacgttgtgggagcgccgcattgctgatgttgagcgtgtacagcgtgagctgaaagcgagtgaactcgatgaagccagctgtcagcacattctcactgcacagtgtgcgctgcttgatgaagccgtcaatggtgcaggatttcgggtcagggtcacttttctgaagagcgaggcatga

SEQ ID NO: 185711 - DNA, 2577 bp, Klebsiella oxytoca
atgtttgattttgccaccgcctggttgcttcagaataaggtcctgctgcccggagcaaccacacttgtacgtctcgtcagtgaaatacgtgaacgggcaaatcagcaactttggaagaaactggccgcgttgccggacagctggcagaccgcccgcgtgactgagctgctggacattcctgaggggcagcgaatttcaccgctggagcaactgaaaaagggacctgtcaccgtcagcggtccggcatttaccgaagcgctggagcggtatatccggctgcgaaacctggagttttcccgactgagttttaccggtctgcccgctatacaactacgtaatctggcccgttacgcaggcatggcgtcggtaaaatatatcgcgcgaatgccacagcagagaaagctggccgtactcaccgcattcgttaaagcacaggagactgcggcgctggatgaagccgttgatgtgctcgatatgcttatactggatatcactcgtgcggcgaagaaaacggggcagaaaaaacggctcaggacgctgaaagatcttgaccgtgctgcgctactgctggcgcaggcatgttcattgttgctagctgagcaggctgacgatgctgaactgagggagaccatattcagcagcataccgaaaagtaggctggcagaatccgtcagcaaggtaaatgagctggcccggcctcagaacaacaatttccatgacgaaatggtggaacagtacgggcgggtaaagcgttttcttccggcggtattgcgcgacctgcatttccaggcagcgccagccggagaacatacgctgtccgccattcattatctgaccgaactgaacggctcgaaaaagcgcatcctggacgatgcgcctgaacatattattaccggcccctggaaacgcctggtatacgatgcggagggccggatacagcgtgccggttactcgctttgtctgctggagcgccttcaggatgcactacgccgacgggacatctggctcgaaaacagcgatcgctggggaaatccccgcgagaagctgttgcagggggaagaatggcaggttcagcgggtccccatctgtcgggcgctgggacatcccactgatggacataaaggcgtgcaacagctggcggtccaactggataaaacctggaaagccgtcgcatctcgctttgaaggaaatgcggaggttaatatctgccatgacggtaaatatccttccctgactatcagcagcctggagaaactggaggagccaccatcgttgcatcgtctcaacagtcgggtaaggcagctactcccgccggtagatttgacggaactgttgcttgagatagatgccagaacgggctttacacgtgagtttacgcatgtcagtgaatccggggcccgggcgcaggatctgcacatcagcctgtgcgcggtcctgatggctgaggcttgcaatatcgggctggaaccgctgataaagcacaatataccggcgctgacgcgccaccggctcagttgggtgaaacagaattacctccgggcagaaacgctggtcagcgccaatgtccgcctggttgattttcagtccacactggagcttgctggccgctggggtggcggcgaagtggcttcagctgacggcatgcgctttgtcacgccggtgaaaaccgtcaattcaggacctaacagaaaatattttggttccggacgtggcatcacctggtacaacttcgtctctgatcagtattctggattccacggcatcgttgttcccggcacattacgtgattccatttttgtgctggaaggccttctggagcagcagacagggctgaatccggttgagatcatgacagacacagccggtaccagcgacattatttttggcctcttctggctgctgggataccagttttctcctcggcttgccgatgccggtgaagcagtattctggcgggtggataaatcggcaaattacggtgcactagacgaactggctcgtggttgtgccgatctgtcgaaagccgagtatcagtgggatgagatgatgcgagccgccggttcgctgaaactgggtaccattcatgcttcagaactcattcgctctttgctgaaaagctcgcgcccatcagggttggcacaggcgatcatggaagtggggcgcgtcaacaagacgctgtaccttctaaattatattgatgatgaagattatcgtcggcggatcctgacgcagctaaaccggggagaaggccgccatgctgtggcgagggcgatctgctacgggcagcgcggtgagatcagaaagcgctatcgtgaaggtcaggaagatcaactgggtgcactgggcctcgtcactaacgcagtggtactgtggaacacactttatatgcaggaagccctgagctggatgcgcaggaatggagaagaaaccgggggtgaagatatcgtccggttatccccactgatgcacgggcatatcaatatgctggggcattatacgttcacgctaccggaggatattttgaagggggaactgagagaattaaattttaatttaaacaatgaattaccttcttag

SEQ ID NO: 185712 - DNA, 732 bp, Klebsiella oxytoca; identical to SEQ ID NO: 179304

SEQ ID NO: 185713 - DNA, 192 bp, Klebsiella oxytoca
atgacgctgctgattgcggcgatctcactgtggaatacggtatatatagaaagagcgataaattctttgagacggaaagcgataccgattaatgagcaactgattacccatttgtccccgctgggatgggaacatatcaacctgagaggcgattacgtctggcgaaaaaaaactcaaactgggacagagtaa

SEQ ID NO: 185714 - DNA, 468 bp, Klebsiella oxytoca
atgaatcgttatctgaaatccatggcagcaggcttcatcgcaaccatcgtgctgtctgctctgatggtgatgaaaagttctatgggcatcatgcccgaactcaaccccgtcggcatgctcagcggtatggctcactccatgatgggtatttctgcggggctgaacattggttggctcgctcatttcatgatcggcacggtactctgggggctgctttttgcgctgttgtataaccggttgccggggcaaagtgccacaaagaaaggactaatgttctccgtactggcctggttgttgatgatgttaataccgatgcccatggccggtgccggattcttcggcataacactgggtattatggcgccggtgatgacactaatactgcatctgatttggggggctgtccttggttacacttacggacgtatgacaacttccccgttaacgcagggacaccctgccgaataa

SEQ ID NO: 185715 - DNA, 141 bp, Klebsiella oxytoca
atgaaagacgaaaacactccaaaaatcggtgcctactgcggactggatggacaaaattgccaaccctgcattgtctccagggtattgctcatcattgtcgtgggatatgcacttttttacctttttgccgccctgaagtaa

SEQ ID NO: 185716 - DNA, 297 bp, Klebsiella oxytoca
atgaaaaaacacaccgctgctgtagttgccctggcgctggggagcgtactggcttccgcatcgacgacagcctttgccgccgacaaaccggctatggagaaatgttttggcgtagccctgaaaggaaaaaatgactgtaaggcaggggcaggtacgacctgtgcaggaacagccaaaaacgattatcagggaaatgcattcaaaatggtacctaccggtacctgcctgaaaactgactcatccacatcgccaaccggtaaaggtcagttacaggcctttaccgaaaaagcgtcctga

SEQ ID NO: 185717 - DNA, 888 bp, Klebsiella oxytoca
atgactgccataaacccgatgccagctctttatgatggtcaccctgccagggcgataaaccatcatctccccctgcgcgcaggaactggcctcaaaccccagcatttttcaacaataattgatgaccagccggatataggtttttttgaggtccatgccgaaaactatctcgttgcgggcggaccgcttcaccactatctgcaacgtattcgcagacactacccgttgtctattcatggtgttggcatgtctattggagggcaggcccccctgaacagagcccatctggaggaagtttccaggttggtccaacaatatcagccggccgctttttcggagcatctggcatggtcaacacatcagacacattttctcaatgacctactgcccttgccatacaccaaagaaacactcctgcgtgtgtgcagccacatagatcaggtccaggagaagctgaagcgtccgattttgttggaaaatccggctacttatgttgagtttgctgcatcgacttggtccgagactgcttttttaaccgagatcctcagccggaccggatgcggcctgctgcttgatattaacaatcttcatatttccagcattaatcaccattatgatgccgttacaatgttacaggaacttcccactgagcatgtgggggaaatacatctggctggtcacacccaatctctggacagtatgggggcaccattgctgatagacagtcatgactgtcaggtatccgacccagtctgggcgctttataaaacagcactgcgtcataccggcccggttgccacgatcattgaatgggacagcaatattcccgcattttcagtactgatggaggaggttaagcgtgcagactatcacctgcgatccctctga

SEQ ID NO: 185718 - DNA, 801 bp, Klebsiella oxytoca
gtgcagactatcacctgcgatccctctgagcctgattatgaatcagccttcggctatccgttactgaggccagaacttgaagcaccactaggattacggacctggaatggcagcgatccggcacagcgttatggaatttatcgtaataacgttatggtttcactgaccgaagcccttgcggataatttcccgacgatacgtactcaggtcggggaggccttttttaccgccatgtccgcctgctatatccggcaacacctgccagactcaccggtactggcgttctatggtagcaacatgccggcgtttattgcggcctttgagccgctgagagattatccttggcttagcgacctggcgcggatggatatggcatttattcgcgcctcgcatgccggggatgcggctgcaccggtgtattcttctctgccggaagaactcatgatgcttaaggtcgtactgcatccatctctgcagctgatgtgctcatcctgggccatcttttctttgtggatgcgtgaccgcgacggggaccagggaatggaaactgaatttgttgatcctgctcagccgcagagtgtcatgctgtttcgcccgcacctggatgttatggtccagccaatacagttggccagtgcccgattcgttgatgcactgatggcaggtaaaacgctaatgaaggcactggaggacggtctggactgtgatgcagcttttgaacccacactcattctgcgggggctgatacatcgcggactggttttgaatttttcacacgatgttaacggagagactttatga

SEQ ID NO: 185719 - DNA, 504 bp, Klebsiella oxytoca
atgaagtgggctgcacattgccgcggatggcgcacctccctgcagcaaggaactgcgcgctatgccagtgaggtcgttgcgatactcgccagacttggactggcggccaccttctggttgtcgggacaaacaaaggttgacggactgcatatcaatattctgggaggcgagcccctgcaactgggatggccgcatattacagcgggtaccttggctttgttccgcaatgaatatcgtctgcccgtcctgcctcccgagattgcggcagtcatggcggctagtgccgagcatatactgtcattcctgcttgtcatcgggctggcgactcgcctttccgccgccggtattctgagcatgacactggtgatcgaggtgtttgtgtaccccgatgcctggccgacgcatgccctctgggcaacttcatctctttttcttataacaaacgggtccggtcacctgtcactcgactggttgatattccgtgggattaatcgccagaagtga

SEQ ID NO: 185720 - DNA, 2145 bp, Klebsiella oxytoca
atgaatttaggcaagggattattattggttgccatatttattttggccgggctttttctattttactcatcaggccacattctgagcctggccggaataaagaatagccaggctgcattaaaccactgggtggttaacagaccgctgctatcggggtgcttgttctttctgttatatgtgctgatcacagcactttccttacccggcgcagtgctgatgactttgttggctggtgcactatttggtttaacggtcggaactctactggcttcctttgcttctacattgggtgccacattggctttactgatgagccgattcctgctacgtggatggatacagcagcgttttgcccgacgcctgatggcaattgacacgaatattcatcaagggggggcttcctacctgtttgcactgcggctggtaccgatatttccattctttctaatcaatttggcaatggggctcactcgattgcctgtttcaacgttttggtgggtgagtcagttaggcatgttgcccggtacgttggtgtacgtcaatgcaggacgggctctggggcaattagaatcgctgacagatattatctcccccgggataattggcgcttttgtcttgctggggctactcccgctaatttctcgcagggtaataaatcatttaaatgcccgtaaacgtgacaaaccatggccaaaaccacgtcatttcgaccgtaacatcattgtgatcggcgcaggttccggtggattagtgtccgcctatatcgcggcggcagtgaaagcaaaggtcacattgatcgagaaaggacctatgggcggagattgtcttaataccgggtgtgtaccttccaaagcattaatccgtgcggcccggctggcgcacgacctgacaaaggcatccgcattgggattccggcatgttgctggcgaagtggacttttctgcggtaatggaaagagtccagcaggtggtgcagcgcatagagccacatgattcagtggaacgctatactcagcttggtgtggaagtcatctcgggggctgccaccgtgacatcaccttggcatgtcacggtgaacgggcggcagttaagtgcccgctctctgatcattgccaccggcgctcgaccggttattcctgttattcccggtatagaacacatcgcgccgctgacgacggaaaatatctggatgctgcgtgagaaaccgcaacgactgctcattctggggggggggccgataggctgcgaacttgctcaggctttccagcgtttagggtgtgccgtaacgatggtggtcagaggtgaacgtctgctcaagcgtgaggaccgattggccgctgaagtaatcatggatagtttgcgggccgacggtgtggatctgcgattggcacatcaggcacagcgtttcgtttgtgaagggcataagcaatggctggaatgtcgtaataaggttgatggtagtgacgttgtgctgccattcgaccgggtgttactggctctgggccgccgggccaacgtgagtggcttcgggctggagacactgtcgttgaaaattcgggacgacggtacgcttgaaaccgatgactttctggccacccgttttccgcatatctttgcagtcggagacgtcactggtccgtatcagttcacccacgcggctgcacatcaggcgtggtatgccgcggtgaatgccttgtttggctcattcaaacgctttcccgtggattaccgaattatgccgcggaccacgttcaccgatccggaagtcgcgcatgtagggcttaatgagcaagaggctcaacaggccggtgtggcctatgaaaccacgtgttttaatctggctgagctggacagggccattacagaagatgcagcccacggctatattcaggtgctgactgcacctggaaaagatcgcattttgggtgcgactatcgtgggggagcaagctggtgaacttatcaccgaatacgtctcagccatgaaacagggttatgggctaaataaaatattgggcactattcatgtttacccaacgctgagtgaagcaaataagtatgtagccggagagtggaagcgcaatcatgcacctcaacgcgtgttgagctggttagcgcgttttcaccaatggagtttagggcgatga

SEQ ID NO: 185721 - DNA, 1071 bp, Klebsiella oxytoca
atgaaaacctttgggacgctgctgattggtgccggtcatgctcatttggaggtattacgccactgggttgacgtgggcgcgccgttcggcgatgttgctttactgtcaccttcgcccgatgcctggtattcaggcatgctcccgggattacttgctggacgctatcagtccgaacagtgtcgtattccattaagccctctttgtctcgcagcaggagtgacgttgatgcaggggaagatgatagcactggatgcgcagactggccgcgttagtttggaagatggacgtttactacagggggaatgtgtgtccttgaataccggcgcggcattgcgttctccgcacaatctttcatccgtaatggacgtattgccggtgaaaccctttgccgactttttgattcgccttgcacactggcagcggcatccgggatccctggcaataattggcgggggcgccgcgggtgtggagctggcactggctatgtcgaatcagacgccgtcactgactctgttctgttcagatatgctgttaggctcgcatgctcccggggtacgccaacgtgcgcactaccacctgaaacgggcgggagtgcaagtgcaggaacattgcccaatagatgcaatccagggaaacggtctgttgagtggacaacaaattgtttgggagggtaatcgggtactcttggccagcgggcctgcgcccgcatcctggtggcaatcttccggattatcctgtgatgatcgtggattcattcaaatcactaccacgctacaaagtgcatcgcatccacatgtttttgcaacgggtgattgcgcaacgctccccgatacgcctaaaagtggcgtatatgcggtgcgacaaggggcagtcttggaggaaaatttgcgccgcgcagcacggcaggaatcattgaggcccttcaggccacaatctagagcagtggcactgctggccgatggtcaaggcggcgccataatgagttgggctggtttaagcgcagaagggaaatgggccggggtatggaaagatattctcgaccggcgattcatccaacggcacagtctatga

SEQ ID NO: 185722 - DNA, 1164 bp, Klebsiella oxytoca
atgtgggtgcctatactggcgcttggtatgtcgttacaggcgatagcggatagccgttggaatgaaataaaacagcaggcgcaaggacagaccgtctattttaacgcctgggggggtgatactgcagccaataactatctgcgctgggttgcgacagaaatgaaacaacactatgccatcacagtagaacgggtaccgctggctgatacggcagatgccgtgcgtcgtatccaaaccgaggcatctgctggacggcagcaaaaaggctcgatagatctactgtgggttaatggagaaaattttagcacactaaagcaggccgggttgctttacggcggttgggcagagcgtctccccaactggcgctatgtcaatttgactctgccggttcgtgaggatttttccgttccgacagaaggggctgagtctccctggggaagcgcacaattgacattcattgccgatcggcggcagttatcacaacccgtcagcgatccacaggcattactgactcttgcccgagagcagccaggccgactgagttatccacggccaccggacttcaccggtatggcctttttggaacaactgttgttgtcactcagcccgacaccgcagttattaaaacaacctcccgatgttaaaacatttgccttagtcactgccccgctatggcattatctcgatcaactgcatccctcgttgtggcggcaaggtaaagattttcccgcatcggcagcacgtatggatcgtatgctggccgatggcgtgttaaaaatttctcttacgtttaatcctgcccacgccgccagcctgattgccaacgggcaattacctgattcggcctacacctttggtttcagtaaagggatggtggggaatgtccattttgtcgccattccagttaatgccaatgccaaagcgggcgctcaggtattggccaacttcctgctgtcgcctcgtgcgcagatccgcaaagccgatccgcgttactggggcgatcctagtgtgttggatagcgataaactaccgccagaattacggcggacaatgcacgatatctctccctcggcagggatggttgtccccgtgttgagtgagccgaatgcggggtggtccgccgctcttgaggcggaatggctgaggcgttacggcgtacattga

SEQ ID NO: 185723 - DNA, 1590 bp, Klebsiella oxytoca
atgcccttactacgttctacattcggcagagggatcgcatgggggggggtcagtttgatcttttcccccttgctgccaggcctctggttgatgttatcccccgcttttcacggcgatagctggttggcattctggctcgacgggcaatggcgacaagcactgatcgccacgttgacttcatcgctgatcggcagcgtcggtgctttgctgctttgcttattggtgattgtcggaatttacccgggaaaagcgtggcaacgttatcaacgtcgtttgccgatgctacttgccgttccgcatgtcgcttttgctacgggaagcctgttcctgtttgccccgacgggatggttggcacgattggggttaggctcgttggccgatggggatcctcatgctattggtctgggtatcatactggcgctgaaagagagctggtttctgctatggatagcgggagctctacttaaacgcacggatttacagcgccaactcaccatcgcccacactctggggtatggacgatggcacagcgccttcgtgatccttttgccgcaattgttaccgcagctggcatgggcgctgttggccgtgacggcatatagcatttccttagtggacactgcgattattcttgggcctggcaatccgccaaccctggctgtgttggcatggcaatggctgaacgagcctgatattcagattcaggctaaagggacgatcgccgtcctgttgttgactgcgatattggcagcattatccttgtgcggctacgccttttggcgtttgttgcactattgtccattacccataaccggccgacggtatggtgggacagctaaacgactcttgagcgggttggcgatgatgatgacaaccatcggttatctggtcctgctgttattgttgctttggtcagtggctggtagttggttttaccctcggttattgcctgaggtatggtcagtggtaggttggtcacgaggggattacgcgtcgttactcactacgtttacactaggtggcgtggccagtttgtgtggtttgattattgtggttgcctggcttgaatggggggatgtgcgacgggggcagtttctctggttgccgctattgctgcccgctttacccctggcgatgggccagtacgaggtactattgagattagggctggacggaacattttctggtgtcgtatggagtcatttattgtgggtagttccttatatgttgctgatactggagccggcgtatcggcatcttgacactcgtttgctggtagccgcccgttctttagggttatccgattggcgtgtgctcttaagggtaaagtggcccttactttctcggccactgctcgccgcagtcgcgatcggtttttctgtcagcgttgcccaatatttgccaacgctctatgccggagcggggaggtttgccacggtcacgactgaaaccgtggcgctgagtggcagtggcgatccgcgggcactagccgttcatgctttgctacagctgcttctgccaggctgcgtcttttttatggctgtgtcgcttagccggctggttggccattatcgacgaggattacgctaa

SEQ ID NO: 185724 - DNA, 642 bp, Klebsiella oxytoca
atgttgtctgtcagaaattgtactattcacggcggtgataattgcttattgcaaaaccaatgtttcgatgtggctcccggcgagatattaaccttgatgggcgcgtcgggtacgggtaagtccaccttgctcggctggatgattggtgagttacctccggattttttcggttcaggaagcctctggttaaacggcactcggagagatggattgccaacagaaaagcggcgtattggtattttgtttcaggatgacctgttatttcctcatttgagtgtagggcaaaatctggcattggcattaccggctcagctgaaaggtaaaaggtcgcgcagagaatatattgagaactgccttatagatgctgaactgggtgagttttatcagcgagatcccgcgacgttatccggtgggcaacgcgccagggtgagcgttctgcggtctctgatcgccgaacctgaggcattgctgttagatgaaccttttagtcgtttggatgagcatttacgcgggcgttttcgccaatttgttttcagtcatattcaacagcgtggcattcccgcgttgctggttactcatgacgaacaagatattccaccggatggacgcgtgaaaaagcttgaggagagagctgatgtttga

SEQ ID NO: 185725 - DNA, 645 bp, Klebsiella oxytoca
atgtttgaccgttatttgcttaaaaaaagcagtaacattcgtgaagtgtgcgcagtcacattgcaacgccgtggtgtaaaggctgattggatcagttggtttggctttggcatcgggatgatggcggtgccattgcttattgctcatgcttattactgggcgctgctgtgtattgtgttcaaccgtatggccgacttgctggatggtgctgtagcccggttggatggcccaacggatcgcggtgcatttctggatattactttagactttctgttttactccgccattccactcgggtttgctttggcaataccggcaaataacgccttgcctgcggccattttgatttacagctttattgggaccgggtgcagctttcttgcctttgccgttatcgccgccaagcgggggatggagagtaccgcgtatccaagcaaagggttctactatttaggcggcctgactgaagggagcgaaacggtcttggtgctactgttaatgtgtctgtttcctggctggtttccgctgatagcgtatggtttttcagcgctttgttgcatcactgtagtgactcgggttgtcgctggtgtttcattgtttaagaacaactacggaaaggtcaaacagaccggcgctggcatctga

SEQ ID NO: 185726 - DNA, 528 bp, Klebsiella oxytoca
atgggcaccaaagccacgaaaagtttgattgaatcagcacagagaggcgacataaaagcaatgtctgcgttgcttgccaccactcaggctgatgcccgtcgctatgcccgccgacactgccatgcaagcgatgtcgacgatgctgtacaggagtcattgctgataatttcgcgtaaggtcactgcccttaaagtcgcagctgccttttcctcgtggttgtttaccgtcatcaggagggagtgccaaaaacttcagcgaatgatgttccggcatgtcgctctggatcacgatattgctgaaactctcctgcaggaaagaagcccggactcacttcgcctagacctggccagagctcttaggtctttgcctgctcattatctcgacgtgattctcatgcgagattttgaagagttaactatagccgaaatatcttcccaactaaatgtaagtgttggtgctgttaaaagtcgtttgcatcgggcacgcgagctcattcgtgaatccctgataagcactgagggctattag

SEQ ID NO: 185727 - DNA, 552 bp, Klebsiella oxytoca
atgaaagattttactttacacacgccggaaaatgcaccgggaaagagcaaggtgttacttgagaacataaagaaacgtgcaggcttcgtaccctcgctctacgcggtaatggccgagtcgccggagttggtggaagcttatcttaagctccatgaattgtttctccataccagtttcaataatgacgagaaaaccgtggtgtggcaggcaattaatgtagagcacaactgccattattgtgtgcctgctcatacggcaattgcacattcaatgaaagtcagtgatgacatcataaatgcattgcgggatgaaacaccgcttcaggatagccgccttgaagtcctgaggtcgttcactcttgcggtaatacgcaagcgcggtgaggtcactgagaatgatgtggaaaccttccttgcagcagggttcacccgtaaaaatattcttgaggtcattctgtgcgccgctcagaagacaattagcaattacacaaaccatattgctgacacaccactagatgcacctttcagtaagtatgaatggaagaagaaataa

SEQ ID NO: 185728 - DNA, 708 bp, Klebsiella oxytoca
atgacagacgatagtgacacgccagaaacgaaaggaattctcttttttgatgtgaatgaaacccttctggatactgcttcgctcaaagagtatgcaggaaagaggcttgccaacaggcaggaccttaccgacgtctggttcacctctttgttacactattcacttgttgaaaccgttaccggttcctggcaccgctttggcgatattgcagaggctgtgcttgagatgactgccgagcggtacggcatatctttagctgaatctgacgagccactttcggcagtgcttgcttcattacctgcacatcctgatgtagccaggggattatcagcactgagccaacagggctttacactggtcgccctgaccaactcatctgctgaactcgctgagagccaactccgttcagcctgcatcgatggctatttcagtaagaccctcagtgttgaagagttgtgtaaatacaaacccgacctgagcgtttacaactgggcagtccatttgatgggaagaccggcctcagaatgtatgctgattgcagcacatggctgggatgtaggaggagcaaaacttgcggggatgaaaaccgcatttatagccagaaaagggcaaactctctatccccttgcacccaaaccagactttgttgccagagatattttcgccctttcgcaaatcattaattcgttaactggagagaatatatga

SEQ ID NO: 185729 - DNA, 642 bp, Klebsiella oxytoca
atggcaagaccaacattacatgacaagtcggaaacgttaggcagggcaattcatgtgttctggcgtaaaggtttcagcaacacatcaataaaagaccttgagatggcactggatatgcgtcctggaagtatttatgcctctttcgacagcaaagcaggtttgtttacgcaagctctgtcagtctatgcgacacaccaggcagataaaaccaggtctgttattcaggcgcagcagaacccgctggacggccttctgacgctactctgctgctttgcacaggaaaaaccagacggccagccctcttacgcctgttttttggtgaaaagcctactcgaaatggagaacgacgagggtgaaatgaaaaacttaataagacagcatttgctgacaatggagagtattttcagtgatgcttttagcgatgcgatttcgatgggatatgtcgcggatcctgacaggccagagcatgctccgtcgcgcctggctcgcatgctgcaaaccaaaattatcggtatcagaataatgtccctacaacttgcacaaaatgatctgctacgagaactgacagatgactgcgcccagtttatagaagaacttaaaaagagtccggatactgagatacttgtaaatgatggcctttag

SEQ ID NO: 185730 - DNA, 270 bp, Klebsiella oxytoca
atggcggcaggcgtaagatttgggcggaaacctcatcagaaatcttccgccgcactggagcttatccggcatgaaacgcctattaaaatggtgatggagaaaaccggtatatccagggcaacttatttcaggttaaaaaagctcatgcgtcatctttttcgttttatgcttcataacgcttctcaccttacgttcggtgcgctgctgatagctatgtccagctttggacagacctattttgtgtcactttacgggcaagattttcgctag

SEQ ID NO: 185731 - DNA, 195 bp, Klebsiella oxytoca
atgagcgccatcacgctgatctgggccggacggatgatcgactacaccacgaccagccgcttcacgctggcagtcacccttctgttactgacggcctgcctgctgatttctggcgcacagtctgcgtggatgctctgcatcgggttttactttctgcgcctcggcggtcagggactgatggtacaaccgcactga

SEQ ID NO: 185732 - DNA, 330 bp, Klebsiella oxytoca
atgccacagtccctagccatgttggcgctgtggctcagcaacggtctgtgggtaacgcctttttacctgattatgatcggcgtatcgtcggctattgcctcaacgcttgccaccgctctctgggtgcagttgtttggtccggcgcagctagccagggtgcgctcagctgttggggcaggtaccgtgattgcccgcggggcatctccggtaagcatgggcgtcctgatagataaccatgtcaccctgcatctacaggcgttgttctgcctggtctacattcttggggccagcctgctggccaccgatatcaggactgatgcaccgcaataa

SEQ ID NO: 185733 - DNA, 828 bp, Klebsiella oxytoca
atgaataacaccgttattgcctgcgtcgacggctcgccgtcaacccgtccggtctgtgagtatgccgcctgggcggccgctaagcttggtacgccgctggcactgctgcacgtactggagaagagtgagactcccgccgtgtttgacctgaccggggccattggtattgacagccaggagcgtctgactgaagaactggtccgcgtcgagggtgagcgcagccggctgctgatggcgcagggcaaagccgtgctgcgcgactgcgcggagcggctgaagcaggccggacaaacggacgtacagctgctgcaaaagcacggcgcactggacgatattctggctgagctgggggaagtccgcctgatggtgctgggtcgccggggtacgcaaaatcaggtggggagccatctggagagcgtcattcgcctgcagaaaaaaccggtgctgattgtgccggagacgttcatgccgccggcacgggtgatgtttgcgtatgacggcagcagtgagagccgtaaaaacctgtcgcgtctgacgatcagcccattactaagcggccttacctgttatattgtgatggtcaacggtgacactttagccctgcaggatgcgcaggctgttcttcaggaagctggtatcacaacggaggcccgcctgctggaagacgagtccgtgaccggcgccctgtgccgctacgcggacgctaatgatatcgacctcatggtaattggggcctatgggcattcccggttacggcggttctttattggcagccacaccacagaaatgctgtcagaaagccatcagcccctgctgatgctgcgatga

SEQ ID NO: 185734 - DNA, 1479 bp, Klebsiella oxytoca
atgttgctgtcctcgacgcgtaaggactggctgggtaacgtccgtggtgacgtactggccggtatagttgtcgcgctcgcgcttattcccgaagcgatcgccttttcaatcatcgccggagttgacccgcaggttgggctctactctgcgttctgtattcccttggttatggccttccttggtggccgcccggcaatgatatcgtccgctacaggcgcgatggcactgctaatgatcacactggtaaaagaccacggcctgcagtatctgctggcggcctcggcgctgaccggcgtgctgcaactggcggccggctacctgaaactgggtagcctgatgcgctacgtctcccgctcggtggtcactggtttcgtcaacgcgctggccatcctcatatttatggcacagttgccggagctcaccaacgttacctggcacgtctatgcactgaccgctgcgggcctgggcatcatttatctcttcccgtatctgaacaaaaccattccctcgccgctgatctgcatcatcgtgctgaccgccatttccatgtggcttcacctggacgtgcgtactgtgggtgacatgggcaagctgccggacagcctgccggtgtttctgatccctgatattccgcttaacctcgacacgctgatgattattctgccgtactctgcggggctggccgttgtgggtcttctggagtcgatgatgactgccaccatcgtggatgacatgaccgacacgccaagcgacaagaaccgcgaatgcaaggcacagggtgtggccaacatctgcacctcgtttattggtggcatggcagggtgcgcaatgattggccagtcagttatcaatgttaaatcgggtggacgcggacgactttcaacactgaccgccggcgtagttctgcttttgatggtggtattcctgcgtgagtgggtctccaaaataccgatggcagcgctggtcgcggtgatgattatggtttccatcggtaccttctcctggcggtctatcagcaacctgcgcagccatccgctgtcaaccagtgtggtgatgctggcaaccgtagtggtagtggtggcaactgataacctagcgtttggtgtactcaccggcgtgctgatagcctcgctgaacttcgccactaaagtagcccgctttatggcgatctcttctgaactggaggacaactcccgtacctacactgtagctggccaggtcttttttgcttcatccgatcgctttatgagctacttcgacttccgtgaagccgttgagcgtgtggtgattaacgtgacgcatgctcatttctgggatattacctccgtgagtgcgctggacagagtagtcatcaagtttcggcgcgaaggcacggaagtggagattaagggtatgaatgacgcgacccgcaccatcgttgaccgcttcggggttcatgacaagcctgaagaagtggaaaaactgatgggcggccattaa

SEQ ID NO: 185735 - DNA, 585 bp, Klebsiella oxytoca
atgtcacgagtttttgcttactgccgggtatccactctggaacagaccacagaaaaccagcgtcgtgaaattgaggcagctggtttcgctgttaaacctcagcgacttattgaggaacatgtcagcggctcagtggctgccagtgaacggccaggatttgccaggctgcttgaccgtatggaaaatggcgatgtgcttattgtcaccaaacttgaccgcctcggacgcaacgcgatggacatcagaaaaacggtagagcaactggctgtttcagatattcgggttcactgcctggctcttggcggtgtggatctgaccagccccgcggggaagatgaccatgcaggttatttctgcagtagcggaatttgagcgggatctgttgctcgagcgcacgcactcaggtattgccagggcaaaagcagctggaaagcggtttggtcgtccttctgctctgaatgaagagcagcaacttactgtgattgcacgtattaacgcagggaacagtatcagcgctattgcccgggaatttaataccacccggcaaaccatacttcgggtaaaggcaggacagcattcatcctga

SEQ ID NO: 185736 - DNA, 2985 bp, Klebsiella oxytoca
atgccacggcgacagatactgagcagtgaagagcaggaacgcttactggttataccagatgatgaaattattctgacccgaatgtgttttctgaacgaaccggatattgcgctcattaataagcaccgacggccagcgaatcgcctgggctttgctgtattactctgttatctgcgtggacctggatttattccggacaaaagcagtgctcctcacaatggcgttgtatccagggttgcttcccgactgaaacttcagcctgatttatggccggaatatgcatccagagagcaaacccgctgggaacatctgaccgaactttatcgctacctggaactatccccgttcagccggtcaatgcaaaaagactgtatccgccatctgcacccctatgccatgcgaactgacaaaggatttatgctggcggaagaaatgctcagctggctacataacaataatgttattttcccttctgttgaagtgatcgaacggacgcttgccgaagtcgtcacgctcgctaacagatcggtattttcgacacttaccgcgcaactggaaaagcagcataaatcagcactcgacagcctgctcatatcagagggtgaacaaccttcccgtctggcatggctgctacagcctccgggtaaaataaacggtaaaaatgtgctgcaacatatcgaccggcttaattccatcgctgcgctggggttgcctgatggtattgcactttccgttcaccagaacaggttgcttaaactggcgcgtgagggccggaaaatgagcagcagggacctggcaaaattcaccgatgtcagacgttacgctacgctggtttgtataataacagaggccagggccaccctgactgacgaagtgattgatctgcacgagcgtatcctgggtagtctgttcagcagggcaaaacgcacgcaggccgaacggctccagcaaacgggaaagcttattcagagcaagctgaagcagtacgttaccgtcgggcaggcgttacttaacgccagagaatccggggaagatccctggactgcaatagaagatgtccttccctggcaggaattcatcaacagcgtggaagaaacgcggtttctttcccgtaagggcaatttcgacgcgcttcatctgatcaccgaaaaatacagtacgttgcgtaaatatgccccgcgtatgctgtcagcattgcagttcatggcgacacctgcggcgcaggcgctcagcgatgcgctggacaccataacggaaatgtaccgtaaacaacttcgtaaagtgccgccatcagcgccaacagggtttatccctgaaagctggcgaaaactggtgctcacgccttcaggcatcgaccgcaagtactacgagttttgcgtactgaatgaactcaagggtgcattacgttccggtgatatctgggtaaaaggatcgcgccgctacaaaaattttgatgattatctcatcccgactgctgagtttgagaaatcccgacataatgaccagttacagttggccgttcagaccgatagccaggcataccttcaggcccgtatgactcttcttgcatctcggctggaagaagttaacgcgatggcgcttgccggtgatttgcccgatgtagatatctcagataaaggcgtaaaaatcactccactggagaacagcgttccttcaggtgtttcgccctttgcagatttggtctatggcatgcttccccatccgaaaattacggagatactggaagaagttgatagctggacgggatttacgcgtcacttcgcgcacctcaaaaataataacgtcagaccaaaagacggaagactgttgctgaccaccattctggctgacggcatcaaccttgggctgacaaaaatggcggaatcctgccctggggccacaagatcgtcactcgaaggtattcaggcatggtacatcagggatgaaacttattcagcggcactggccgagctggtcaacgcacagaaagagcggcctctggccgcattctggggcgacgggacaacatcgtcgtcagacgggcagaactttcgggtaggcagtcacggacgttatgccggtcaggtcaatcttaaatatggtcaggagccgggcgtgcagatttatacgcatatctcagaccaatacagcccgttctacgccaaagtgatcagccgggtgcgcgactcaacccacgtgcttgatggcctgctgtaccatgaaagcgatctggaaattaccgagcattacaccgataccgcaggcttcactgaacatgttttcgccctgatgcacctgctgggattcgcttttgcgccaaggatccgtgatcttcatgacaagcggctgtttattcatggaaaggccgagcgctatccggggcttcagtctgtcatatcaacaacctgcctgaatatcaaagacattgagtcgcactgggatgaggtattgcgcctggcaacctcgattaagcaggggacagtcaccgcatcactgatgatgaaaaagttagccagttacccaaaacagaatggacttgccaaagcgctgagagagattggccgcatcgaacggacactatttatgctggactggttccgtgatcccggtctgcgccgacgcgtgcaggcggggctgaataagggtgaggcccgtaatgcccttgcgcgagcggtctttttgcaccgtctgggtgaaataagggatcgtgggctggagaatcagagttatcgcgccagcgggctgacattactgacagcagcgatcacgttgtggaacacggtatatatagaaagagctattgagtcactaaaacgaaagggtatcccgataaatgagcaactggtctctcatctttctcccctgggctgggaacatatcaatctgagtggagattacgtctggcgtaataatcttaagctgggatccggaaaataccgctcattacgtacagtcgataccgctttgtacaaaaaacagtcttag

SEQ ID NO: 185737 - DNA, 291 bp, Klebsiella oxytoca
gtgcacagcgatcagggcagtcagtatggcagtgatgactggcagcggttctgccgggccaataatctggtaccgagcatgagccgtcgcggcaactgctgggataatgcagtggcagaatcgttcttcagttcactcaaaaaagagcgcatcaggaagcggatatacaaaacccgggacatggcccgggcggatattttcgattatattgaagtgttctacaaccgggcccggcgccacagtcatctcggcggcgtcagcccggaggccttcgaaaaggcctcgcagtga

SEQ ID NO: 185738 - DNA, 567 bp, Klebsiella oxytoca
atgcgcctcaataaaataagcagtatcgaagaagccaatgcttggctggaaacgtttatcgtaaacttcaaccagcgcttcgccaaaacgcccaaatatccaaaaaaccttcatcgccctgtggcagaaacgattgtggatctggatgatattttctcatggcaggaaacccgtaaactctcgaaatcattaacattccgttatgataagatgatatatctggttgaacccacagaagaaaacacccgaattgccggggagaatattaaggtctttgattaccctgatggcaccctcgccttcaaatacggccaccgcgccctctcctatcaggtattcgataaactggactgtatcgatcaggggcaaattgtcgataataagcgactcggtgcagtgctccgattggctcaggataaaatggatgaattggatcgtaacggcaaacgtgagcgaagcacaaagatgccgaagcggcgtgctcaggctcgtatacaggaacagttacgagcaattaatccagttctggttaatccaaaagaatttcgtgcgagcttgaaaagataa

SEQ ID NO: 185739 - DNA, 819 bp, Klebsiella oxytoca; identical to SEQ ID NO: 125556

SEQ ID NO: 185740 - DNA, 171 bp, Klebsiella oxytoca
atggcgggcgaggctgccgtgtccgactccatcagcctggcatgggcagcctccctggcatcgatcgcggtggcggtcgtctacaagcgtgatccgcggtcggccacgccgtgggggctgctcatcagcggcggcactgccctcccgctcgctggccatccgtttgcgtga

SEQ ID NO: 185741 - DNA, 567 bp, Klebsiella oxytoca
atgagtatagaaaaaagaacgacccgtcaaaccccagccagccggtggtggttgcccggactgctcagtctggcgctttacacgccagtgccggcagtcaacgccgcgtccatcgagaccggcttttccccggaaggaacggccctgcagctggtcctgaagaccatcgattcagcgcagcaggaaatccgcctgatgggatactccttcacgtcgccggaggtgactcgctcgcttattgcggcaaaacggcgtggagtggatatcagggtagtactggaccagaaggcgaataccgggaaagccagcgtggccgccatgaacgtgctggtcagcgcgggtatccctgtccgcaccgtcgacgtatatacgatccttcatgacaaagtgatcgtcgcagacaaacgcaataccgaggtcggctctttcaatttcagtcgggctgcggaccgttcgaattcagagaatgtgctggtcgtgtgggatgacccggttgtcgcccacagttacctgaaccactgggcatcccgctgggcacagggaacggactggcagagtacgtactga

SEQ ID NO: 185742 - DNA, 600 bp, Klebsiella oxytoca
atggcaaaaatattaatgatgacgggcgccatcgtcatagtactgggtctgctgggttttcttgttttgcttgtgaagggacgaacaacggggaagacctctccggtactgcaggcactgaaagcggcgggtattcgcaccaccgaggcggaacagcgactgtgtcgtcagcgggcctgggtgagcaatgacatgctgatgacgccacgggaacagcatttttaccgggcgttgctgaagcacaccgaccagaaacgctggcttctgtgcccgcaggtgcgggtggcggatatcgccagcctggcacctcatatccggcctcgctcccggacctggtggcagctgttccggatggcctcacagtggcactgcgatgtggtggtggtggatatcacgacctttgccattgtggccgctgtcgaactggatgatgcctcgcacctgaaaaaacatcgggtacgccgggatattctgctggaagaggtacttcgccaggccggcattccgctgttgcgggagcgggattcagagaaactggtcaggtgtgtgagggattttctgaagcaccgacacgacatcactgaatgtcatcaggagtga

SEQ ID NO: 185743 - DNA, 138 bp, Klebsiella oxytoca
atgcggttttttattgcagcaaagaaatctccggggaaaattctttcagaagggctgagtggaatgctgaacagagtaaagaaacacatatggattgatatggttataaagcgaggcccggaatggcaaaaatattaa

SEQ ID NO: 185744 - DNA, 585 bp, Klebsiella oxytoca
atgaagcttgatgctgtgaagactgttcgcgatttaatgcgctattgtcatatgcccgtatggtgtcagcgtgaagtcagagatatgagggtcggtgacatctattttttagggaaatataaagaggtgatgttttccggggaactaaatgaagacgtcgattttgtaggggaggcatggatcgaaaaggagagagggatatacaaataccatgcgacatggacgataccagtaaaaccctcccgggcttttgtcatgacttcggggcaatttaaattactgaaaggtggtgtcgtggatttcaacggtgacttttcatcgtttcgttcatttgctctggtttcacgctatctcaatcgactggtgatgaaaatgagcaatgaagaacggcatgaattctataaagtcggttccaggccactttttcgtggcatttgtattgataaggagtcaataagccgaaggccgcactatatcaaagacggagaagttttacgtcgtgtctggctaaattacagcaatcaattaccgatgcatcccctgcaggctattgtgacagcggcaatagcgctgaaacaaatttaa

SEQ ID NO: 185745 - DNA, 147 bp, Klebsiella oxytoca
atgagccagcatggcatcgagcagttcgtcattgctgaagcggtcttctgccaggccgagctgttcgtacggttcggtatttttgcgcagcaggtcgcgcacgccgatgcccatatccgcaatcagcttcttcagctcatcgcgtga

SEQ ID NO: 185746 - DNA, 1473 bp, Klebsiella oxytoca
atgtcccgaatggccgaacagcagctttacatcgacggtggttatgtttccgccaccagcggtaaaaccttcgagacgattaaccctgccagcggggaagtgctggcgaccgtccaggccgccggccgcgaagacgtcgaccgggcggtaaagagcgcccaaaaagggcaaaaaatctgggcggcgatgagcgccatggaacgttcgcgcattctgcgtaaagcggtcgatattctgcgcgatcgcaacgatgaactggcgcgtctggagactctcgataccggcaaaccgctgagcgaaaccgccgccgtcgatatcgtcaccggcgccgatgtgctggagtactacgcgggcctgatcccggcgctggaagggagccagatcccgctgcgcgacagtgcattcgtctacacccgccgggaaccgctgggcgtcgtcgccgggatcggcgcctggaactacccgatccagatcgccttgtggaaatcagccccggcgctggcggccggtaacgcgatgatctttaagccgagtgaagtcaccccgctcaccgccctgaagctggcggaaatttaccgcgaggcgggactgccggcgggagtatttaacgtgctgccgggcaccggcgccgaaaccggccagcatctcaccgagcacccggacatcgccaaaatctcctttaccggcggcgtcgccagcggcaaaaaagtgatggccaactccgccgcctcctcgctgaaggaagtcaccatggagctgggcggtaaatcgccgctgatcgtctgcgaagacgccaacctcgacctcgccgccgacatcgcgatgatggctaacttctatagctcaggacaggtctgcaccaacggcacccgggtattcgttccggcgcgcctgaaggcggcgtttgaagagaaaatcctcgctcgcgtggcgcgtatccgccccggcgatctgtttgctgaaagcaccaacttcgggccgctggtgagcttcccgcaccgcgataacgtgctgcgctacatcgcgatcggcaagcaagaaggcgcgcgcctgctctgcggcggcgaggtgctgaaaggcgaaggcttcgaccgcggcgcgtgggtcgccccgacggtgtttaccgactgcgatgaccagatgaccatcgtccgcgaagagatcttcggcccggtgatgtcgattctgagctacgacgatgaggaagaagcggttcgccgcgccaacgccaccgaatacggcctcgccgccggcgtcgtcacgccggatttaaaccgcgcccatcgcctgattcatcggctggaggccgggatctgctggatcaacacctggggcgaatccccggcggagatgccggtcggcggctacaagcactccgggattggccgcgaaaacggcgtgcagacgctgcacagctacacccagataaaatccatccaggttgagatgggtcagtttcaatccatattttaa

SEQ ID NO: 185747 - DNA, 873 bp, Klebsiella oxytoca
atgtccagcgtaaaattatccggtactgcgacgttaggcgatcgtcaggtttatcgtctgggatacggggcgatgcagcttgcggggcccggcgtcttcggcccgccaaaagatccgcaaaccgctatccgcgtactgcaggaagcggtcgagtcgggcgtcaatcatattgatacctccgatttttacggtccacacgtgactaatcagctcattcgccaggcgctgcatccctattccgccgatctgtgcatcgtcactaaagtcagcgctcgccgcgacgataaaggcaactggctgcccgcgatgtcgcccgcggagctcactgcggcggtggaggacaatctgcgcaatctgggcctcgacgtgcttgaggtggtgaacctgcgcagtatgctcggcacgcatggcccggttgaaggttcgctggaggggcccttaaccacccttctggagctgaaagaacgcgggttgattcgccatatcgggctgagtaacgtcaccgccagacaggtgagcgatgcgcaaaaactgacgccaatcgtctgcgttcagaaccaatataacgtggcgaaccgtcaggatgatccgctgatcgacgagctggcggcgcaaaatatcgcctgggtgccctttttccccctcggcggttttaacccgcttcaggcccgggagcttaacgaagtcgccgcttcgcttgacgccacgccgatgcaggtggcgctggcctggctgctccagcgctcgccgaatatcctgctcattccgggcacctcctcgctacagcatctgcacgagaatctggccgccgcgcaattaacgctcccaccagaagcgttagccattctggataatctccagccccgctcctga

SEQ ID NO: 185748 - DNA, 174 bp, Klebsiella oxytoca
atgcaggtcggtgagtccgtggtgaacgcgatagtggaataccacgcacagggcagtgaggaggcgcatgcagaggaaaacaggatgttcctgcgttatctgcgcgagttaacgggaacacagcgtgtggcggttgaggtggccaggaaatatttttctccggtgaggggctga

SEQ ID NO: 185749 - DNA, 222 bp, Klebsiella oxytoca
atgcaatttgataccgctgccgaactggccgccctgcaggcgcagacccgccgtatccgccaggtccgctaccgtccctcccgccttgaccgctataccggcgaactgctgagcctgtaccaggccggggccagtgcagcggagctgcaacgctggctccgggcccggcgaatcaaggtggtgttgtccacggttacccgctggctggaaaaaaatggctaa

SEQ ID NO: 185750 - DNA, 888 bp, Klebsiella oxytoca
atggctaaattcgccagcgctgcccgccaggcaacgggcgtgataaaaaccctccagggcgatattcttcgctctgtcggtacggcccggaattacgagcagggcctgacccgcgtcgcagaatggatgaaagccaaccggattaatcacggcgatttacgcacactgacaccggcgcaggccatcacctacctggagcagcgcggggagcaggtcggccagaaaacgctcgatatggaacgccaggccatccaggccatgatgatccacgtgacgcagaccctccctgccggcgaacacctgccggtggtgaaatcggagcaggcacagatcctgagcagccgggcctacagcccggaccaggtggtcctgattgccgcagcacaacagcccgccaacgccctggccaccgcgattgccctggccgccggattacgcgcccatgaactgctgaccctcgcgccccgccaggagcgtgcaccggatccccgtccggcagcggacagtaaatttgccggtcgggagggtgtgatttacaccgttcagggcaaaggcggcctggtcagggaagtcctgataccgtcccccctggctgaacgtctggagcatgtcaggctggcgagcccggtccgggtgaccgatcgcggcgtgttttaccagagtcagtacgccattggcggaggacagcgctggtcgaacgccttcagtgccgcctccatgcgtaccctgggctggtcacggggggcacacggcgtgcgtcacagctacgcccagcaacggatgcaggagctgcaaaaactcggtctggttcgtgatatagccctgcgtaccgtgagccaggaaatgggccattttcgtccggaaatcacggagacatacctgcgatga

SEQ ID NO: 185751 - DNA, 699 bp, Klebsiella oxytoca
atgacaagaacgtttattttattgtgtaccggtgttttcgccatcgcgtacgccctgtatgagctgaaacatatgggcgtttactatccggatgccagcaatccgcagctgttcactggctggaaggcggtcaccgaactcggtcccgcaatcctggcaacggggatcgcagccacagcgttctcgctgtggctgttcattttgtttttcagaggctcagagtcccgccggatacagcgcgagataagcggatatcagcaggcactgagggaggcagaagaggctcacagagccagacaaaatacccttattcagaatcacaacctggagacagcggccctgcgaagccactacattggtgctgaggatgtactgcgggaagcgtttgcgcaaaaagaaagcctcttgcttcaggcggtgcagaatgcccggaaagaagccagaaaggagctggaagaacagagggaggcactgaatcagcgcgaatccatcctgcagaaaaaggagctggcgctggaaacaaccctggagaaggcccggaaatatgtggccggggagcggcataacaccgagctggcccgtctggaagcagagaaagcagaggaaagacggagaaatgcctgcgcgacggcggaacggcgcagacggaaactggaaaaactccaggccactggcggaacagcagggcaaaaacactga

SEQ ID NO: 185752 - DNA, 399 bp, Klebsiella oxytoca
atggcgacagtgtcgatcagtgaggctgcacgcctgacgggtaagagcaggacaaccctgcacaggttaattaaagccggtgagctgtccacctgtcggggtgaacggaatgcgaaaatgctcgagacttcagagcttttgcgggtgtttggtgcctttgcgtctgtacccgttgaacagaggggtgaacaggtcagtggacagcgtgacacagtcacttctgaccataatgaacaggtcattcatactctgaaacaggaaattgaacacctgaacacacttcttgcctcaaaagattcacatatcgacagtctgaaacaggcgatgttgttgctggagaaccgggaagatcagcggcagaacacgacccggccctggtggcgtttctggcagtcctga

SEQ ID NO: 185753 - DNA, 135 bp, Klebsiella oxytoca
atggctttcgatttcgagcgcgaaacactaaaatttaacaatttttttaaaaacataatgatctttatcacacatttcgttttctttagttttcgattccgcgcgaattcgctagtcttcatcgataatacttaa

SEQ ID NO: 185754 - DNA, 507 bp, Klebsiella oxytoca
atggaacactatgacatttacagaaaattaggaaatgcttttgaactgcttgcatattcagaacttcataaggattattctgttgaatacctttatcgggagatatatttacctgcctcgctaaaacagatgtatgtatattatgatgaagatgaattacctgtaggttttatcacttgggcgagcattaattctattgtcgaaggaaatattgagaataattatactgggttatctatcaaagaatggaattgtggcgagcgtttatttattaacgatttagtatgcccctggggtggtagtcgttttatagttaatgatataaaaaacagactattccccttggtgaaatacggtttaggattacgaagaaaaaaagatagcccacctcgactggctcgtttttttaccaataaaactaatgctagtattatacaaatccttttccctgaaattggaaatttcttacaacattattctgatctcgtgacctgcccccacgattag

SEQ ID NO: 185755 - DNA, 411 bp, Klebsiella oxytoca
atggattacgaacaactgcctagggcggcactggtccgaatgcttcaagagcatgatgcggcactagtcgacgccggtaaaaatggcatcgttatgaattacaccggccgaacagctccgtggcaaataatcagacaggtgaagcctaagctcttcagtattataaaaaaatattcttgtggtgaagagcttgctcaggctgaaaatgagatttgggatggagaaaatctttccgcaatggtcactctctataaatatagagggcagattgatctcgtactgacagaccctccctacaataccggagaggatttccgttataacgacaaatgggataaagatcccaacgaccctgatttgggcgatgtagttcctaaagacgacggttcgaagcatagcaaatggttgtga

SEQ ID NO: 185756 - DNA, 1005 bp, Klebsiella oxytoca
atggaaaacattgcgctcattggtatcgatctgggtaaaaactctttccatattcattgccaggatcgtcgcgggaaggctgtttaccgtaaaaaatttacccggccaaagttgatcgaatttttggcgacatgccccgctacaaccatcgcaatggaagcctgtggcggttctcactttatggcacgcaagttggaagagttggggcattccccaaagctgatatcaccacaatttgtccgcccgttcgttaaaagcaataaaaacgactttgtcgacgccgaagctatttgtgaagctgcatcgcgtccgtctatgcgttttgtgcagcccagaacggaatctcagcaggcaatgcgggctctgcatcgtgtccgtgaatccctggttcaggataaggtaaaaacaaccaatcaaatgcatgcttttctgctggaatttggcattagcgttccccgaggagctgccgttattagccgactgagtaccattcttgaggataatagtttgcctctttacctcagccagttattgctgaaattacaacagcattatcactatcttgttgagcagattaaagatttggaatcccagttgaaacgaaagttggacgaagatgaggttggacagcgcttgctgagcattccctgcgtcggaacactgacagcgagtactatttcaactgagattggcgacgggaagcagtacgccagcagccgtgactttgcggcggcaacagggcttgtacctcggcagtacagcacgggaggtaggacgacattgctgggaattagtaagcgaggtaataaaaagatccgaactttgttggttcaatgtgccagggtattcatacaaaaactggaacaccagtctggcaaattggccgattgggtcagggatttactgtgccggaaaagcaactttgtcgtcacttgtgctctggcaaacaagctggccagaatagcctgggcactgacggcgcgacagcaaacttacgaagcataa

SEQ ID NO: 185757 - DNA, 912 bp, Klebsiella oxytoca
  misc_feature (73)..(82): n is a, c, g, or t
atgattagtaatttcagtgttactgttgttattccgaccattggtcgtgaaagtatatatttatcaattgacnnnnnnnnnnacaaagttacaaatataataatttgctatgatgggaatgattttgaggattttatcttagagttaagctcatactattctgatttaattgacaagaaaatcattataatattaaacgttggaccattttctggtggaaatgttgcacgacaacgtgggattgaagtatcgaatagtcgatttatagcactacttgatgatgatgacatatgggagcgtcagcatatagaggatttattttctttcattacacctgatacagaaaatgttttgctctcatcatgtgctactataattgaagaggggaagaaagatttaagtgtcccgccgcgaatgattaataataatgagtcaatacctgattatctttttcgtgtaaatggaattaaactggattgcggtttcattcaatcttctttaatgatctttacgcgtgaacttgcaatcaaagtaccatttgatatttcattgaagtatcatcaagatatagattggcttttgagattatcaaatagtaaaataaagttttcgtatatacaatctcctaaccatactgtgagatatatgtcgacaccttttagtgtgtctaaaaaaatatccagtaaggattccatttcttgggcaaaacgtagtttcaaggactcacgattgcttggcgattttgtgctgacgcaatcatataattatgcaaagagtaatggctctattctcgatgaaatcaatgtcttgtggtggtcattatataatgccaaaccttcattttatgcagtaacacgattttttttgaagtttttccgaatcgattctattttgagaaaattcgcccgatga

SEQ ID NO: 185758 - DNA, 1209 bp, Klebsiella oxytoca
atggacgaaaaacagttgcaggctctggctaacgaactggccaaaaatctcaaaacccctgaagatcttagtcagttcgatcgcctgctgaagaaaattagcgttgaggcggctctcaatgccgaaatgtctcaccatctgggctacgataaaaatcagcctaaatcgggttccaatacccgcaacggctactcgacaaaaaccgtcgctactgctgatggcccgcttgaactgcgtactccccgcgatcgcgaagccacctttgaaccccagttgctgaagaaaaatcagacccgcattaccggcatggataaccaaatcctgtcgctgtacgccaaagggatgaccacccgcgagatcgccgccgcgttcaaagagctgtatgacgctgatgtctcgccggcgctgatctcaaaggtcaccgatgcggtcatggagcaggttaccgaatggcagaatcgcccactggatgcagtctatcccattgtttatcttgactgtatcgtcctgaaggtccggcaggacagtcgcgtcatcaataaatctgtgttcctggcgctgggtatcaatatcgaaggccagaaagaactactgggtatgtggctggccgaaaatgagggcgcgaagttctggctcaatgtgctgactgaactgaaaaaccgtggcctgaacgatatcctcatcgcctgtgttgacggcttaaaaggcttcccggacgctattaatacggtgtatccggatgctcgcatccagttatgtatcgtgcatatggtacgcaacagcctgcggttcgtctcctggaaggactacaaagcggtcacccgcgacctgaaagccatctatcaggctcccacggaagaagcaggtcagcaggcactggaagcgttcgccgctgcctgggacaagcggtatccgcagataagccggagctgggagtcgaactgggctaacctggcgacgttcttcgcttacccggcagacatccgcaaagtcatctacacaacgaacgcaatcgagtcgctgaacagcgtgatccggcatgcgacaaagaaacgtaaggtgttcccgacggatgactcagtgaaaaaggtggtgtggctggcaatccaggcagcgtcacagaaatggacgatgccactgcgggactggcgtatggcaatgagccgttttattatcgagttcggtgaccgcctggacggtcacttctga

SEQ ID NO: 185759 - DNA, 264 bp, Klebsiella oxytoca; identical to SEQ ID NO: 127147

SEQ ID NO: 185760 - DNA, 831 bp, Klebsiella oxytoca; identical to SEQ ID NO: 119722

SEQ ID NO: 185761 - DNA, 825 bp, Klebsiella oxytoca
atgtgcgaggctaagggtctgtcgcaacgtcgtgcctgcaggctggcaggtctgtccctgtcaacctgccgatattcggctcagcgtccgcctgctgacgcgcagctgtctctacgcatcacagagttggcacttgaacgccgccgttttggttaccggcgtatctggcagcttctgcgacgtgaaggtctttgcgttaaccacaagcgggtttaccgcatctatcaacttaatggcctgagtgtaaaacgcagacgacgtcgtaaagggctggcaacagaacgtctgccgctgctccgcccgatggcgcccaatctgacctggtcaatggatttcgtcatggacgcactggccacaggtcgcaggatcaagtgcctgacctgcgtggatgatttcacaaaggaatgcctgacggtcactgttgccttcgggatttcaggcgtgcaggtcacgcgtattctggacagcattgcgctgtttcgcggctatccggctacgataagaaccgatcagggcccggagtttacctgccgcgcactcgatcagtgggcttttgagcatggtgtggagctgcgacttatccagcccggcaagccaacgcagaacggatttattgagagttttaacggacgctttcgtgatgaatgcctgaatgagcactggttcagcgatattgttcacgccaggaagatcattaatgactggcgactggattataacgagtgtcgaccacattcatcactgaattacctgacgccggctgaatttgcagcgggctggcgaaacgggaaatatgaagaaaaaccaaccgacattactaactga

SEQ ID NO: 185762 - DNA, 264 bp, Klebsiella oxytoca
atgaagaagcgtttttccgacgaacagatcatctgtattctccgcgaggccgaagccggcgtttctgcccgtgagctctgccgtaagcacgctatttccgacgccaccttttacacctggcgtaagaagtatggcggtatggaggtgcctgaggttaagcgcctgaagtctcttgaggaagagaacgccagactcaagaagctgcttgctgaagccatgctggataaggaggcgcttcaggtggctcttgggctaaagtactga

SEQ ID NO: 185763 - DNA, 330 bp, Klebsiella oxytoca
atggaatatttggagttcgtagaaaccagtgtattcactaaggcttgcaagagcctgtttagtgatgacgagtacaaagaatttcaggcttatatgctcacagacccggaagcgggggctgtaatcgtaggaacggcaggatgccgtaaggtcagatggtcaagaccaggcaccggtaagagttcaggggtaagagctatatactactactataacgaagtaggaagactatacatgcttctcatataccctaagagtgagaaagacagcttaaccggggcagaaaagaacatgctcagatctgttgtagaatcatttaaagaggagtaa

SEQ ID NO: 185764 - DNA, 357 bp, Klebsiella oxytoca; identical to SEQ ID NO: 101071

SEQ ID NO: 185765 - DNA, 435 bp, Klebsiella oxytoca
atgcgaatccatgaaaatgttaatctcaattactatgaacagataggtgtaatggttgacttacttaacagtattacagtgaatgagggcgtctctaaaatatacttatccagggttttaatccctgcagtacgtacacaaaatgtatgtattattaacaacatcaatgacgagccggtcgcattctttatttggggatattttacacaaacagtccataatttactgttatcaggaaacgattattgttttgatatttatgatttaaacgaaggagataacctttggattctggattgcaaatgttcaaaaacatttcctttggctattctaaaattcgtttcggaaaaattcacaaaaaaaagaattaatttccgtattgcttcgaagaactattctctctttgactataaattccacaaggagaaattatga

SEQ ID NO: 185766 - DNA, 195 bp, Klebsiella oxytoca
atgctgtcggcaacgccaacaaagccgaccttcaccgcggtaaccgagctgccgcagggcgacagcacgatacgaaacggcaccagcggcgtggtcgccccaaccgcatggaactgcttcgcggcgttatccatcaggtcgacggtaaaatctttcgactcacccgccacggcgcaggcattatcccgaacgtag

SEQ ID NO: 185767 - DNA, 267 bp, Klebsiella oxytoca
atggatttagaaatagatgaagatgattatagtgatagtgaaaacaatgaaaccattaataaagaaattgatgaaatttcaaaagtagcaaaaagagaaaacacaaataaaggtaataaaaataaagaagttgcagacattttctcagacatgttaagtgtgttagataaaggtaaaggaagcgatttattaaatgttgttgacatgagcaaagcgaaaagaataacaaaggaagagttttcagtgatatttccagaagctaaataa

SEQ ID NO: 185768 - DNA, 168 bp, Klebsiella oxytoca
atgagcgagataaaagaaatgaatgaatacgaaataatgttggaaagtctcactgtcgatgaaaaaggtgaatttgttcatacattatcagaattaaacgaaaataataaacatgcaaaactaaacaatttaatgataaaaagacatggaaaaatgattaagggttga

SEQ ID NO: 185769 - DNA, 174 bp, Klebsiella oxytoca
atggtaaatatagcagcaggtatttttgctttcattggtgttattattattttagcatttgtgtttggtggattattggaagcgcaaagagaaaatgattataaggaaagaaagataagtgaacttgaagaaagagtgtatgagttagagagaaaaattaaaaaaaggaaatag

SEQ ID NO: 185770 - DNA, 1239 bp, Klebsiella oxytoca
atgactgctatagatcagtttgctgctcatgttggtctggattgggcggataaaaagcacgatgtctgcgttcagtttaaaaacggtgagcgcacattccatgtgattaaccatacgccggaagcgcttgatacctggctcaatgagttgcaccagaaggtcaaaggcaggatcgctatcgcccttgaactgaagaaaggcccggtagtatatgctctccagaagtacccctttattactgtctttcctgtacacgcgttatcattggcccgctatcggcagaccttctggccaagtggcgcgaaggatgatcctcaggatgccgagttggcgttagatctgatgctacgctacccccaaaagattaaagccatcgaacccgacaatgctgatatccgtttacttctacaactagtcgagcagcgtaggctgctggtagaagacaaacgccgctttgttaatcggctcattaacacgcttaagcagtattatcctcaacccctggaatggttctcgcatcgggacagttcattgttctgtgagctcataatccgctggccaagcctacaacagctcaaacgtgcccggagtaataccgtccgtcattttatgaacgcaagaggtggtcccgctgttgcgtatacagaacagcgggttacaagcattgccaacgcgattcccctgaccactgataaaagtgtcatcgaggcgaacgcgctaatggcaacagctcttgcatcacaaatcaaacttgtaggtgaacttatcagaacctacgacgaacgaatcgaatcgttattcgatacgcttccggatgcagagctgttcaaatcactaccgggcatggggccgtgtatgggcccacgtatgcttgccgcactgggtgataaccgcgaccgcttcaacagcgctgaggaaattcaaaactacgcaggtattgctccggtgactgaacggagtggccagaaatcctgggttcactggcgatggcagtgtgccaagttcgtcaggcaaacctttgtcgaatgggctgccaagacggttaactcatcatactgggccaagctgtattatcaggggctgcgagaaaaaggaaaatctcatcaatcagcgatccgagctctggcattcaaatggataaggattatttaccgctgctggaagaccagaacccgttatgacgaagcgaaatatttgctggcactggaagcgcgaaaatcgcccttactaatgccgtag

SEQ ID NO: 185771 - DNA, 123 bp, Klebsiella oxytoca
atgagtgaagagaaacaaaaaatgattgccggcgaactgtatctggcaggtgacgccacgttgaaagccgatcgtctgcgggccagacagctgctgcaccgctacaatcattcggcgccttaa

SEQ ID NO: 185772 - DNA, 2088 bp, Klebsiella oxytoca
atgagtgatattcgtaacccgaagtttttatcggtgggggacatctgccgtccggtagattcaggaaaaatgctggtgcaggattgtgaagtggagtctcccttaccctgtatcgtgattctggttcacggcgtcaatgatgtgggagaggcctatcagaaccaggacgaaggtatctgtcaggggctgaacgaacggctgggccgggatgatttacatccccacgactggaaagcacatgaattcatgataagcgacccggacggcaatatctccgccaccacctgtccacaggaaaaacagacctgtatcggggtggtgaaccgttcaccaacgatcccgttctactggggatacaaacccgtggataaagccacctgggaagccgaccagaagcgctatcgcgatgaactgcgggaaaagcgggataagacagacctggcttacgatacgtatcaacaggatgataaaaaagtccttcatgcccataacggtgaaaatgtcgataacctgaacaactggctcgatccggcgttcgccaaagggggcggcactttcgccaacgccaccaccaacatccccgatatgttcgggccgggcgctaacggtgcagcgctggagattgtcggggcgctgtcccgctcgaagatgaatgacggcgactggagccacccgatttatgccaacccgcaccgcatttaccaggcattcgccgcgcggcggctggcggatttgattctggctatccggcagaatgaatcaactaaaaaagacaccatcaatattgtcgcccacagtcagggcaccattgtcaccatgctggcgaacctgtgggtgaaggcggaaggttttaaccccgcagattgtgtaatcctcaataactccccttattcgctggaaaaccgctggctggagaacgcccagccgggcaaccagcagacggataaggcacgtcagcagacgctggcacacttctgcaaagtaatggcggataaccctcagtataacggcggtcagtcccataatgcgggggatactgaaaaactgtacgaccagctttgcctgtcgcgcagcggacgggacaaatggagtgctgaagcatacaaccgcaacaactttggcctggtgtacaactatttctgcccgaacgaccaggttgtgtcgatgctgccggtgcagggcatgggctggcgcggcattccggacaaaatcagcgcgcagatgggggagaatttacgccagcgggtgttctgcaaggatgtgatggtaggagataaaaccggttattcgtttgtcatgccgcaggcgaaagcaaatgacccggaaatccccaagcaagatgtgaaatacacttaccaggatgtcaccatcaacggcgcggtactgcccgcccccttcgtctttgagcttcaggggcaaaaagacggttacgaaatgtcgctcactggcaatgacccggcaatcgctaaggcagcaagaaaagccgaggattttccgcaggaggtgctggaggtgccggatacggcgacgttccgctatctgcgcgacggccagtcgctgggtacggcgcaactggcagaattgagcacgcttcatcagatggaagctgtcagcggcagggtggagggtggatacggcccgtcacagcggctgaaagtacggcgctatatgacgaaggaagagctggagaaagtcgctgccaacaagaccacctacagtcaacactcgtcaattgtgtgtaacccggatgtgccggtgaaagccgtaccctatgacctggccattggtcgtaatgaagcgtttgagaataaggcgttctgggacagtttgctgttacaggcggactggcgcagaccggggaatccagagcctaaaatcaagaaatactatcaagagggaatattgccagatgaattcaaaaaattaatgaacaaacctgaaacaggcgaaaagccaatgcccacgggggagtctggcgtggtgaatgactatggccctcgtcaacgcgttaaaccgggcagtaaacgtgataccgaaaacgagatggtggaggttttacagtgggatatgccgaagccacaggtttga

SEQ ID NO: 185773 - DNA, 759 bp, Klebsiella oxytoca
atgaaaaagatacttatacacgtacttgttgtcggaaccggtgcattgaccgcctgtagtgcgggtacggccagacagacacctcccactcaggtggtatatcgttttgacgatcaccgttatctggaattggtgggcttcaactgtgaaggggcgctctggtatacggatacacagcgtaatatccataccgaagtgacgtctcagttttaccgtctctttaccaaaaaatacgtccatccttccgaaaagtacattgcgatcacctattacgatgtatcaggtgtaatggtttctaaagattatgggaaaacatggcacgatgcccactttatgccgggtggaggcgcaaagcaatatggagcctcgggtcctgaaagtgatgatattctgtctttcacagtagtaaacgatcagggatttatacaaactaaatccggcgatatttatatgagctcaaaaccctttgacgatccgcgtcttcaaaaggggggggaaggtattccttactcatatcataattcgcggggagaactggaacaggatcgtttaatgcccggaagctcaggacttgactggggaagagaatacatttcgtggaacgcagttgctggcccagaccactggagtatttttgctcacaaacccaactggcagggcatccccaataaagtcccggaagttaaaaattacaccggctgggaccatatgcgctgcgacccggatttagggctgactgcatcggaacagggaaaataa

SEQ ID NO: 185774 - DNA, 462 bp, Klebsiella oxytoca
atgatgttactgtcaaaaaacatactgggttcactgttgttaatggtgcctgtttttgtttatgcctgcccggaacttcaggggagctataaagtcgagcagcgtgcagacctgtatattcagaagcaaagcgatggcagttatctggcaatgattaaatcagaagaccatcaaccgcaatttttatcggtcatcaggccagaagccaaagagcttaaagaacagggatataccgaatgcacggctattattaaagggctggggttattgatgccttctgataaaaataaaacctatcaggtcacttctgagtcacaaaattaccagaccgggaaaaagccaggaacaccgtttgtcatcatgtatatggccggttttcagtcggacgttttcggcgtggataaaatatctgagactattcctcaggctgctgttgaccgctatcaccagggaggcaattaa

SEQ ID NO: 185775 - DNA, 258 bp, Klebsiella oxytoca
atgcgcggcgtaattcgactcggcgacagccattctcacggcggcaacgtcatcaccgcatccggggccatgttcgatggcaaacctgtgatgctggcgggcgataccgtgagttgcccgcaacacggcaccgtgccagtaacccagggtcacccaacctggacgatgaatggccgggcggtgattgttgacggctgcacggcacagtgcggatgcgtgctgagaacatcgttgcccaatgccggagcggactgctga

SEQ ID NO: 185776 - DNA, 1410 bp, Klebsiella oxytoca
atggactggcgtttaccgcaaatggagcgtaaatcgctaccgggtttccctgcctggtgggtatggttgttactgccgctggcgtgtgtactggcggcggctgtggtgctgtttttcacctggccggtggcgcggggtttcgccgaccgccgtttctggttctggctgctgcttattcccctgctgacctccgtggcgctggagctgtttctgctaagccatgtcctgcatcagcggcgggaaatccgctggcggcatctgtttatcgacagtaagcaggcacagtggcgacagtggggacgccagtcgctgacgctggctgcatggcatgttctgacaccggaacccgaccttgcactgcgtgtactggggctggaaggcgtcgtgccccaggcaccagcgaaggcggtattactgccccgtccgccgcaaagtgagctgggcatgtcgccgttacgggacattctgacacaaacgctcacaccactactggcggttctgcgtccgcagccggtggtggatatctggctgtataccggcagcgtggaagacgaaagccgccaggcgctggcacagtgctggcttgcgttgctgagccgccagttgccggacaaccgtattcactggcaggcggagccgcctgatgcccgcctgctgtatcagtggtgcgatgaagcgtccgatacgccacggctgctgctctgcacacagttgctcagcgcagatgcggcaggcagtgaattcagcgtggcgctgttgttcacggcggctcgccagcgtttacctgaaaacacgggttttcgtccggtatcggtatttcgcccgctgtttgcacccgccactgaaccggaagaggctctgacggacctgctggcggtggagcagatggtaaaggggcagcgccgccacctgtgggatgccgggctggatacccgcgcgcgtaataccgtgcttgccgtactggatgcgcagggggagacactgccgtctgacggacagcacctgcttgcccgccatatcggggagccggataaaaacagcttctggctggcgctgggactggcggcacaggccaccgacaccgggcagcgcggccagatggtggtggcaccgttaccagagcaaactgcctgcgtacagttaaacgtccatcccgcgcccgcgacccagtggccggaggatagcatatcacgctacccgctggcctggacggcgggcgtctgctgcgtactgctgctgttctttctgctgatggactcaacggtgcagcagacgctgtggccgtggctggcgggcggcggcgtactgtatgcattgttaatgctggcagcggtgccgctggccctgattctttggcaacgcaggctgaatgatgagtggcagttgcagggcgggatacgccatgagtaa

SEQ ID NO: 185777 - DNA, 3327 bp, Klebsiella oxytoca
atgagtaaagcgcttcatctgatgttattgctgctggcgatactgttgatggcgctgtgccagacgcaggcacaggcatggtttgtggatgaatccaccctgcggattgcccaggcgggcattctgctgggctattttctgctggcgcgactgggttttgcctttcagctactctctttctcccggccagcggataaaaaacaggaagaaagcgaacgggtattctggcgtctgcacaatgaacaccggcgtcaccgtcagccctggctgctggtcacctggcaggcgcagaccgtggaagccctgctgccgggtctgaccagtgaacgctggcagcgcagcctgtccgccactctgctgtggtgcggcgagccgggaaacattgctcaggaagacatcgccctgttccgccgtctgcgcgggcggcgggtgctgaacgcggtgctgtgggtgacggacattacgccgccttcgggtatggcgcgtctgccagggctggaaaacagcagccctgacgagtttaacgacggagtcatgcgcacgctctggcagcagttacgggatattgcccgcacgctgagctggcggcccccgctgtacaccctctgcgtgcgcgacagcgtgcatgaccagtacgaccgaccgcgccagagtgtgggtattgccttgtcccctgcgcaggaaaccaatattcagacgcaactgcataccctgctcccgcaactgaccggacagggaatggcgcaactgtcccttcagccgcgctggaactggctgttgcaggtgtcgcacgatatccagcacgccaccggcagcagaattaccacggccctgcaaccgttcgtccggcgcgggagcgaaaccccactctgcggattgtttttcatgccccccgccctgccgggtcagcatatgggccagcacgcctgttcactgtctgcggcctggtcagagcctgtggcgcagatacgtcacgccaggggagaacgcgaccacctgattgcaggcgactggctggtgcgtggcaccgttgcatttctgggactatggggagcgggaatgctgctctcggcactgtttaattaccgtctggttcaggcagatatggcgttgctgttgccggagaaaaaagcgcgaccggtcgcggagcaggtgcgtcagcaacaggagcgtcaggcacgcatggataccctgttataccgcagtcgcgaaggtgctccctggtggtatcgcttcggtctgaaccagaatgatgcgctgctggcggccatgtggccggtctggcaacagcaaaaccagacgctgctggttgcaccactggcggaacagcttcgcagccatttacgccagtatatggcgctgccgcccggctcggcgcagcgccgcacgctgacagcagaaacttatcgccagttgaaggcgtatctgatgctgacgcaaccggaacgggcagagccggaatttctgaaaaaggtgttgttgccgttatggcagaacccggcccgcggtataacgcccggtgaatggatgatgctctcgtccgatatgctggatttttacgcgcgcgaactgcctgcgcacccggcctggcgactcccggcatacagcaccatgattgcgaatgttcgtaccctgctgcgcagtcagaaagggatacagaacagtgagaacacgctttatcagcaggttctgcaacaggttgcgcagcgtcatgccgatatcaccctcaacgacctgccgggggacgctggcagcggcgacctgttctacagcaatgcgtcacttcccggtatgtttacccgcgaagcctggcggcagaatgtcagggaggccatcgatcaggtggcagccggacggcaaatccacaccgactgggtgcttgatgataccggacgaacctccccggtgttaagtgaagaggcactgcgtacccgtctggcggaacgttactttaccgactacagcaacgcctggctggaattcctcaacagtctgcgctggcgtcaggcagactcgctctcttcggccattgaccagcttaccctgctgggggacgtacaacgctccccgctggtcgcgctcggtaaaaccctgcgctggcaggcaggtatcgggcaggaagagacgacgatgggcacttcgctgctggaatcggtaaaacaacgggtttccggtcaggaaagtacggatgcgcgcacggcaaaaactgccgatccggcctccgtggtgacgcaaacttttgcgccgctgctggcggttttaccccctgacgagaatcaacctggtcagacgaaaaacagcgcaacgcccgtcagcgggctgacattacaggattatctgattcaggtgacgcaggcgcgtctttcgctccggcaggtcagtacctcaccggatccgcaggccatgacgctggcactggcacaggacgccttttcccggcgcgacaacccgctgacggtggcgcgcagccagggtgagctgctggcggccagtctcggccaggactggagcggcttcgctgatgcagcgtttgtacagccgcttgcgcaggcatggcagtcggtactggccccggcgcagcaggcgatgaatgaagcctggcgcacacagattgttcagccctggcaggatgcattctccgggcgctacccctttgcctcttccgaaaatgatgcctccccggcgctgctggctcattttatagcaccgcagcaaggcgtgacggagcagtttcttcgtcagcaactgggcggcctgctggataaacagggcgatgtctgggtgccttccgcactgaacagccaggggatgaaattcagtccggcgtttctggatgcggttaatctgctgacacaactggggcaggcgttttttatgcagggcgaactgcatacggaatttgatattcagatgtacccgatgcgcaatgtggtggagacggatttgcagatagacagcgcgatgatgaagtattttaaccagcaggcggaatggcagacattcacctggccggataaacagagcgcgcagccacaggccgtgcttagttattcccgcaatcagggggagaacatcggaccggtgcgtactgcttttcaggccgacggcccctgggcgctgttgcgtctgctggagaaagcgcagcgcgagaagactgacagcggccgctggcgcttaagctggcctgctgaggacggcgtcggcctgtcgctgaacctgcgcgcccagcgctacaacgggccgctggatttgctgaaactgcgccgttttaaattgcctgagcaggtgtttattcaggatgacgggggtaatgatgatgtccgctag

SEQ ID NO: 185778 - DNA, 531 bp, Klebsiella oxytoca
atgatgatgtccgctagctggcgtatctgcggcgctttactgacagtcctctccctggcaggctgtggtctggcacagcgcgccggacaaggggcaacggcggtgacagacgccattttttaccggaaggtggataccctgcatctgacactggccgcccgtaacgcgctgaacaccgatgaagacgggatgtcgtcgccggtggaggtgcggatctggccactgcgtaacgccacaacgtttaacctggccgattaccgcagcctgctcaaacaggggcctgaggtgctgagcaaagacctgagcgcgccataccaggcaatacgccttacgccagggcagcaaacacatctggatatgccactcgctgacgacacgcagtttgttgcactgacggcattttttttctggcccgatacggtgcgtaacaactggaagctcatcattccgcgtgatgccctgaatgtcagcgaaccaaccgtggtggaactgaatgaccgccaccttgtgctgcgtaaagaaggggactga

SEQ ID NO: 185779 - DNA, 1788 bp, Klebsiella oxytoca
atggaccacgattttttgcgctattacgacagtgaaatacgttatctgaaagaggcggctaaagaatttgcgcagaagtttccggacgtcgccagacagctcggcatagactcagtgtcacttaaaactgatgagtcggtggaacagttgtttcagggattcgcctttatgatggcgcaggtacgccgtaagattgatgacgatatccccgaactgaccgagccgctgctttcccatctgctgccggtagtgaaccgcactctgccctccacggcggtggtggagttgacaccaccacaaccggaaaaccatctgcgtgagcagacgctgcctgccggaacggaactgctgagtctgccggtcagcaccatgcagtaccagcgcggcaaccgctgcccgtaccgcaccgtcagcgacctggtgattcacccgttttctctggctaccatcagccgctacacgcgaacggagggcggccatgcgctgcgcctgcgttttaacgttatcccgcagacggatgagcagcaaatctccctgaatgatatcccgctgtacctgaacggcgaacgtccgctacaggcggcgctgtatctggcgctgagtcagcatgtcagtcgtgtccgcattcgttacggcggtgagacggagcaacatcctgcggatattcatttctccccgcgctggcatgctccacaatctgccctgtggccggagagcgacagcccggcgctgtgcggcgaggtacgcccgtggcttgaatatttcagcaacccatcgcgctttttctttatgaccctgcacagttccacgccgttaaccctgccaccggaatgttcacacttcgaactggatattgccttaagtgcgctgatgccgactaacctgcccgtccctgaagaggccatccggatgcactgcgtcccggtgattaacctgtttcgactggcgggggagccactggtgacgcaaccggcgcaactggattaccgcctgcgcccgcaccgcctaatcgacggccataccgaaatctacagcgtggacacggtaagccagaaagatgaagaggacgaaacggaatatccgtatgtgccttaccatcattttcgccataagggcggtatgctgcaatacgagcaggagtggccggagcgtttcttccacacccgcacctggcgcggcgtgagcgggatgcatgaaacgttgctgatgctcggcggcagaacccatgaacagcttcccggtgtgcgtctgctgctgaatctcacctgcaccaatggcgcgtttccgcgtatgtcgctccaacaggcgctgtttgacacggattactccaccgggaacctgagcctgcgcgggcgcacccgcagcctgccctcccgtccctgttatccgccgaccacgccgcgttatcagtgggaggtcatgtcgctgctacatccccgtgcgctgagttttctcatcaacaacgttgaaaacctgcgctttgccctgggactgttcgactggatggggggcaggaacaaccggcggcgtatcgacggcatcaccggcgtcagttatcgccaggcatataacgcatcgcaccagtggcacggtgtgcgtattcatgtggaactggatgaagcgcagttcagcggtctgggggatgcccggttattcagcgaactgctggaacagtttttcacccagtacgccagcatcgcccgttttacacaactgacggtagtactgagccaatccggaatcgaatgggcctggccggagcggtgtatccacagggtgctgatgtga

SEQ ID NO: 185780 - DNA, 1071 bp, Klebsiella oxytoca
atgggcctggccggagcggtgtatccacagggtgctgatgtgatggacgacaacaaacccggactccctccgttctggctggacgctgaaggacgcgaccgcacgccagcgtttaatttttatcgtttctgccagcttgtcgaacgactgagtgatacaaagctgggtacgggtcgctcgccagaaaacgacccggtacgtttccgtccacatccgggggtgggtttcccggcaggcgaattgcgcaccaccgaaaccgacccggagctgccggatgcaccgcccacagtcagaacaaacttcctcgggctgtacggcgtggcttcgccactgccaaccgcgtttatcgacgacattacccgtggccgggaaggtcatgaggcgatgatggcgtttctggatatattcaaccaccgcatcatgacgcagttttaccgtatctggcgtaagtacaactacccggcaacctttgagccgggtggcacagatgccacatcacggtatctgatggcgctggccggcatcgcccgcccgcgcgaacaaccggcttcacacctgcttgcaatactgccgtcgctgctgcattccacccacaccgcagagggtatcgccgccgttatccgctcacaggcgcctttcacgctggtgaaggtgaaacctcattacccggtactgatgccagtggatgagcacgcgcagttgtcgatggataacagcagaacacagggggagcatctggtgctcggcgatgaaatcagcgacgtgaattactgctccgctgtggagctgtacaccgacgatccggatgagtccaggggctggatgccggacgggcaactgaagaaggatgtcttcacgctgatgcgaacgtatctcggctgcgactacgatgtgcgactctggctcacgttgcccacagggctgctaccccgcccgcgtctgggcgacctggggttgttttccggttacaacattatgctggggctagatgagcggccgcccgcggaggatttgccgcagaccgccagaatacatgtggggcggttaagggagcgcaacgatgctggctga

SEQ ID NO: 185781 - DNA, 276 bp, Klebsiella oxytoca
atgctttccgaaatgtcttcctcggaatggttcgaatggattgaatattaccaggaacgttgctttagcgacgatcttcttgattcccatttcgctaatttaagctacctcgcaatcagtcttttcaccgatccagacaaacacggtatttccgccctcgattttagtttacttacaacaggtagggaagaaaacgaggacatttctgacgagcagcttatgtcaatagccgagagcattcccggaggagttcgctatgtcccagccagtgggtga

SEQ ID NO: 185782 - DNA, 693 bp, Klebsiella oxytoca
atgttaaagaacagtgtggaaatagaatcctgcaggtttgttttagaaccatcttacaaaaaagatggttctattcattcttgggaaattctcacgaaaagtgttaaaaaaaagaacgctaatgattatcatgctaatgaaggtcttttttgcttcagttcgctaagcgataaagaaaaaatcgatgtgtttaagagacagatattgacaattgaaaagcttgatgcatcaaaattgaagttcaagccagtttcgttgaatgttgacagtcttattagcgattgtattttgaacgataaatatattggtgattacttaaaaaaccaaaaaaacattgcttttgagattaacgagtattttcatgaattcaatactaaatgctgtatggttgacttaaagtgtctttcaaaattgtgtccagtatggctggatgattttggaaggggcttaacaagtttaacaattattgatatgtttaattttgaatgtataaaaattgataaagattatttctgggaaatacagagtgagagcgaattctttaaaagaataaataaaataaaatcatactgcaatttcgtgattgttgagggagttgagacaatagaacaaaaaaataaagtacattctgttgttgattgcgcttgccagggaaggttgtggatgagtgattactattatgttgagatttaa

SEQ ID NO: 185783 - DNA, 255 bp, Klebsiella oxytoca
atgctcaagcgcaaacagctgcagcgcgtactgctgccgctaatctctctgatactgttagccagctgcggcagcaggcaaaaaaacttgccacccgcctggacgccgcaagccacaccgcaagtcttgccgctaccgtcagaagcaaaacaaccggcgccaccgctggagtgctcgccgacatgcttggcaaccttgcagaagaagctcgacggtatgctgcaatcgctgacgaacgctacacagcaggaatga

SEQ ID NO: 185784 - DNA, 522 bp, Klebsiella oxytoca
atgaacaaaattgcaaggtttcttttaacagcaagttcgatagctcctgtaggtatcacgctgatatttataggatatatgaaaaacaagccatggcttatttggtggtcgttagggatctgtcttgctagttttatatcagttatttttttcctacactatgcaaataaaaacctcccttctctttataagaatgttgagaccatatctcctgcaaataaagaggttaccaattatttcttgagttatctattccctttattagggacagattcaatcgccgataaatggcaatatgcagtatttttctatatatctcttatcgtttatatatgtttctctgagaactataatttcaaccctcttatctccgctttaggatttaaattttatgaagcagaagacgatactggcgttggatttgtgttgatatccaaagaagttattacaaatttaaaaaacagagattttgaagttattcaacttacagactacacatttatgcatgtaacaaggaaataa

SEQ ID NO: 185785 - DNA, 642 bp, Klebsiella oxytoca
atgagcctttttgcaatgatgaataaaaactctgctgtgaaagtgtatcgtattgataccgacagacaaacagacatcaaaatcaaaaaaatatttgatgaccaattatctctttttgaaagtcatcacaatacggaacttgttttcgaagccggatatacccctagctataatgaatgtagttatatagataactttgatgaaggaaaaatacttcttgatgcagttcagcgtagcaccgcaatgcctttgtggacaaaaaatgttgggcttaatgatataacagctttttttatggctcctgcgtatcctcaagtgaaagacaaaatagcaatccaaaccttttcaaaaaaacagatacttaacgagtcaagatacttatggctcagtaaaaattcatttacgatgtcagatcttttgggtttcaatctagacgataaattagttgcaatccttgaaggagataaaataaagttcaggaacttcaacaacctgagaagcatatttgatatgagttcttattttgctgaagcaacaaagcaagagatttctgactttgtaaaccaaccagtttttaatataccagtggggtttgatcttccagcccttgcagataacgtcataagaaaaaagtcacattaa

SEQ ID NO: 185786 - DNA, 345 bp, Klebsiella oxytoca
atgagagatatgtacgaaatattggaccgttggggagcttgggcggcttctgacaatagtggtgttgactggcaacccattgctgctgggtttaaaggtttgctacctcatggaaagaaaacacgccagcaatgcgatgatgatgaaggtatcatgattgacggttgtgtagcgcgattgcggaaatataagccagaagagtatgagttaattattgctcattttattatcggaatctccttacgtagcatcgctaagaaacgtaaatgctctgatggtaccatcaggaaagaattgcataaggccatggggttcattgatggtatcatttctatgatactatag

SEQ ID NO: 185787 - DNA, 315 bp, Klebsiella oxytoca
atgaaaaagcttctggtatgttgtttgtttggtaatacagcaaattctctcgccaaaaggatgcagttgctggcagaaaaaaaggactacaatctcattattagcgctgtgggtctggataattttgccagtgtagctcccgcttttgacggttttctgattgcaccacacattcagtacaaggtctccgagattgaaaaaattgtcggggactctcgttcaattgcaattattgaaagtctgccctatgcgtcactcaacgcggagaaagttttagcgtttgtgatggaacagatgcctgaactgacattctga

SEQ ID NO: 185788 - DNA, 555 bp, Klebsiella oxytoca
atgcaaaccatctcttttgaaaattatacccaagacatggcggtgcaactgaaaaccaaaaatcactattcgccgacgcgccgcgatagccagaagtgcagggccattcttgccgctgttcaggaatgggaatcttttttacctggccgtgcacaggaccacatcgcgcagctggtggctgagcaatggagaatacaaaacggtcgcggaattaacgtcaataaacagaatctgtaccgctacctgaaaaacgaatccggttcagataagtacgccagttacgttatgcagctttcaggagcgatcgctgatgcaatgcctattgagattgcgcgcaaacacggattgaaacgtggattgactgaaagcgagctggtggctcaagcaatcaaagagtgtagcgaagcgcaccaggcaaaattgcttggcgctccgttgcaaaagttagagcgtgaaattcgggaggcagcaattgcactttttaacatgcttcctgcagatgcggcgggaccactactggcgagcataagcgccgtagcgccacagtttttttaa

SEQ ID NO: 185789 - DNA, 123 bp, Klebsiella oxytoca
atggataaagcatatgaagactattttgaaagcctctctgaaggtgaggaggcgctgagtttcagcgagtttaccgcggcgctttcaggtaagccggcagactgcgcctcttctgaaatgtaa

SEQ ID NO: 185790 - DNA, 822 bp, Klebsiella oxytoca
atgggcgtgtcgcgtgcgcagctgtcactgcgaattaaccgttctgccgactggcaggacaggcgctgtaagcggcgtaatgatgaagcagacgctgaaatactgtcagggctcctcgatatcatcagcgatatgcccagttacggctatcgccgtgtgtggggcatcctgcgtaagcaacgtcgcacagaggggctgacacccgtgaacgccaaacggctttacaggataatgagcgagcataatctgttgttattgcatgacaaaccagagcggccaaagcgtgaacataagggcaaaatagcggtggcagaaagcgatatgcgctggtgttcagatggcttcgagttcggctgtgacaacggagaaaaactgcgggttacgttcgcgctggactgttgcgacagagaggccatagactgggctgcaagcaccggaggctacgacagttcgacggtgcaggatgtgatgctgaggtcggtggaaaagcgcttcggcgacaggctgccggaaacaccagtgcagtggctgacggacaacggttcagcatataccgcgcatgaaacgcggaggttcgccaaagagctgaatctggagccgtgtacaacagcggtgagcagcccgcagagcaatggcatggccgaacggttcgtgaagacgatgaaggaagactatatcgcgttcatgccgaaaccggatgtgagaacagccctgcgaaaccttgcagcggcgttcacgcattacaatgaaaaccacccgcacagtgcgctgggatatcactctccgagagaataccggcggcaacgtgcatcgttaacctaa

SEQ ID NO: 185791 - DNA, 1392 bp, Klebsiella oxytoca
gtgcgctatccattttcgcgactgaccgtactccacagcttctttcaggatctcaacttccatcgtcttcttgcccagcaggcgctgaagcaaacacgcctgcgtgaaccgcgccatcttgagcaactgatccgttcattggatcagattgactggttcagtgcgcagaaagatggtctgggcgatctgtatgaaggtttgctggagaaaaatgccggtgaaaccaaatccggtgccgggcaatatttcactccacgcgtactgattaacagcatggtgcgctgcattaaacctcagccgggtgaagtgattcaggatccggcggcgggtacagctggctttctgattgcggctgaccagtatatcaagtctaaaaccgatgacctttatgatttgcccgccaaaggtcagcagtttcaaaagaacaaagcatttgttggcgttgaactggtgccctctactcgtcgcttagcgttaatgaactgcctgttacatggcatggaaggtgatgctgaaggtgtagtccatcaggggaatgcattaggtatggccgggcaggcgctgccgaaagccgatattatactggctaacccaccgtttggcacagcgaaaggcggtgaagccagtattacccgtgatgacttgacctatccaaccagcaataagcaactggcttttttacagcatatatatcgcaacctcaagccaggtggccgcgctgcggttgtgctgccggataacgtgttgtttgaggctggggtgggtaccgatgtgcgtcgtgacctgatgaacaaatgtaatctgcataccatcctccgtttaccgaccggtattttttacgctcagggcgtcaaaaccaatgtgctgtttttcaccaaaggcactgaagccaataaataccaagaagaaaactgcactgaaaatgtctgggtctatgatctgcgtaccaatatgccaagctttggtaaacgtactccatttggcgatagtcatctcaagccgtttgaagcagtttttggcgactctcccgatggtaatgcacctcgtcagcaaggagaatggagttttaacgctgaagaaattgacgcgcctgacacggcggaaaacgacaatgttgatgatcgcctgataaccagccgctggcgggtctttacccgggagtggatccgcgataccaaaggtgattctctagatatctcctggctgcgggataacagcagtgtggatgctgccaacctgccagagccatctgtgttggccagtgaagcgatgagtgaactggtgcaggctttgggtgaactggatgcgttgatacgtgagctgggagctggggaagaggcggataagcagaaagttctgctgaatgaaatgctggacggagtgaagggatga

SEQ ID NO: 185792 - DNA, 1479 bp, Klebsiella oxytoca
atgaatgaaaataaattgcctcgggaatgggttaatacaaaattagggaatatagttgattatggtcggtctgctaaaaaaactttagttgatgtgactgaaaatacgtgggttttagagcttgaggacattgaaaaagactcatctaaactcctttctaaggttagagtaactgagcggccattcaaaagcacaaaaaattgttttaataagggagatgttctctacgggaaattgcgaccatacctgaataaagtcatcatggctgatgatgaggggggttgtaccacggaaatcatccctattaatgcagaacctttttgcattaataagtatatatttttctggctaaaaagtccgttctttttacggtacgtcaatgaggttagttatggcgtgaatatgcctagactaggaacaaatgatggccgaaatgctcctttttatttggctcctttagctgagcaaaaaattatatccaataagctcggtagtctttgggctcgagtagagagcattaaatcccggctggaaaatatccctgagcttttgaaaaaatttcgtcactcagtattactttctgcagtaagcggaaagcttactgcagaatggagaaatgaaaataaaacatcagaatcggcaaaggaactggttgttcgctggattagtcttagaaaggaacggttttctatatatcagaatgaattgttggcgcttggtgatttaaagagaactaaaaaatttatagaaccacaccttcctgatatagaaactggaggagaattggttgttcctccatcctgggaaatagttagtgtttctcaaattgcagactgtctggatagccagagaataccggttaaaaaagaaaaaaggattaaatctgagggcctctatccatattttggtgctaatggtgaagtggaccgagtagatgactttatatttaatggtgattacgtactagttacagaggatgaaacattctatggaagagtgaagccaatagcctaccgttatacagggaagtgttgggtaaataatcatgttcatattctatctgccccaacaaaatcagcaaatgattatttatgctatgcattgatgtattataaaataatcccttggttaactggcactactgggcgggcaaaattgacacaggcagcattaaatgtcttgcctattggacttcctcctgaaaaggagattgaagaaatagttctgcgtattgaccaatttctttcctatgctgattccattcaaagggcggctaataacgcattagcacgaatcaataatctcactcaatccatccttgctaaagcattctgtggtgaactcactgcccaatggcgagaagaaaatcttgacctaattagcggcatcaacagcgctgaagctttattacaaaaaatctctactgagaaattagcgtcaggtacctcaaaaaagatagttaaaaaggttgttcgataa

SEQ ID NO: 185793 - DNA, 918 bp, Klebsiella oxytoca
atgtacaggaaaactttaagtattattttttgtataccattatcttcatatgcagatgatcccggaggttttgttaatagacagctagcaaaagaccccgcgttagattatggaataggggatgtccatggacctgtaaaagaaatcattgagaggactacgaggtcagaagaaaaaaggatgattcgatatgatccggacgaaaacatttattatataaaaacacccagtaaggcgattcatatctcatctggttatccaaatcctcttcctgtaagagtggatatcgataatgcgtacaagcattcctcaccatcaagcaacttgatgaagtttgattattctttatatgacagagataaatatgggaatataaaatccattagatcatatctttatgataaaaataataaagagacaatatatcaaacaaacttgatatatcgaaagctagcatcaggagatatcgaggtttcatatgataaaccttctcctatcttgggtgaaataaaaaggtattataggaaaggatttgtaataaaggaaacatttataaatgccaagggagtgaatatttcaaactatcgttctgaaaatgtccctatggaaactgttatatatgaatatgagtttggaaaagataaaaaaactccattgtttattttgaagaaaagatatgttgataataaaagggtgacatataaaagttgggagaagtattcagaaagtggtaatcttataaagaccttttcctcatccttgaacaaccctgaagtcggagatggtgtcgagtatattaattataaatttgacaaatactctaactgggttgaaagaaataaatgtgctgttgaagacaagtggggtaagtactcatcatgtactctagagaaaaggacaattaagtatcattattga

SEQ ID NO: 185794 - DNA, 552 bp, Klebsiella oxytoca
atgaccagaaaaaaacctgaagtaatatttactttttctgtaaatgataaaaacttcaaggatgttatgagttcttatcgtgggttagaagtcattgttgaatattatgaccataggattgatactttcaacagagaagtttcgcattggtttaaacctacatttggtacgagtagtttttcaaccgcaataatcaattttgtgaagaaagaatatcctgagattgatgcagaaaatattgaagtaaatcctatacttgatgaactgccctttgataatggggactataacaccttaggtttgcttcaaatatcaggactaacgatctgtgattggaaaaaaatcgctacaaacgttcagatcgacaccctttcagcatggcatggaactgaagacgagattgttttacacttttcacgtgaggttcccggtgagattatgcaatacgtgaaaaatttacatgggtggacatcttatacggggatcaccgttagtgcattggatgagggcatcgtcgaaaaatatggacttttatcgtatatcgataattaa

SEQ ID NO: 185795 - DNA, 708 bp, Klebsiella oxytoca
atggataaaatattagatataataaatggatggatcactgctgctgtatcaagcggatcattgcagataaaacagcttcttctctttattttcattgcagggccattggctcttatcatctggaaaatacggggaataatagaatttattaatgaagtcaagaactctagattaaacgagttgcaacatcttctggataaccataaactatcaaataaagttagcacctgcataaaggaggatattcagagaatagtcagctatcgtataactggaatttctgatgtcgctactcagaaaataattctacgcctattgatagaaaatagagagttaatacccacaggattctttaaaaaatttagatcgtttttattggttaaaaatggttctcttatattcaagaaaggattttctttctggttcgagaacagtatgtatgctttgttttcgttgcaattcatttttcttgcaattttatctttgatattatccacttacaggcatgaccaaattcctatctgggggcatctaatattatattcagttgctgcaattatgttcttgttctttattgcctttgggagaatgataccgcagcctagagaatgtaagttgctaaataagatactacagacccaatacaatgattcatctaactattttattgatggtgaaacagtcgtgcctgtcagtaactctgtatag

SEQ ID NO: 185796 - DNA, 783 bp, Klebsiella oxytoca; identical to SEQ ID NO: 105097

SEQ ID NO: 185797 - DNA, 1620 bp, Klebsiella oxytoca
atgcgtatcgattggctatggattggtgaatataagaacctgaaaaacctgactattgacttcgctcaggggcacctgattactgtattgattggcagaaacgggactggcaagtcgaatgttctggaggcagctacagttcttttccgggacctgatcatgggtgaggatgggaaggggaacaaaaacaaaccgtcctttgcttatcgaatttgctatcagatcaaggataaatgggttcgcattgatgccgatccagcaggcaaagaaccatatcgcattaagctcgcaccatatgatcccgatgctgaacctccttctgctgtcatcacctttgaggaaacccctggcgaagcaatggctctttccaagttgcgagatccagatgacggctatctgccgaggtttgtatttggctattattcaggccaaagtgaaaggatggaaaaggtatttctcaaatatctcgaacgatacgatagagacctgcgggctggaaaaaatcctggcttgaagcgtctgttctatgcgcttccagttcatagcaattttgttttgctgtctttcattgtgaataacgccgagttgacagacaagtttttgcaggaacagctcggccttgaagaggggggaatagaatccgttctctttgttcttagacagccatcatggacatccaatgacggcgatccacgcttctggaatgcacgtggcgtcgtatccgatttcttagcgacactttacgacatatctcttgcgccattgcggatcacccgcaaggaaaaggtcagcctgtggaactggcgaaaactggagttcttgtatctttttgtgaaagaccttggtgcactgcgcaagctggctggaggtaagagcaccgcccagttctttcaagatttggaaagtacgtatgtttctgagttaatcgacgaggtacgaatcaggatcaagctacggaaaaacgatggatctgttacgttccgtgaattgagcgaaggcgaacaacaacttctaactgtactaggcttgcttcgcttcacagcggaagaggaaagcctgtttctgctcgacgagcccgatacgcaccttaacccaagatggagcgtcgagtatcttcaacatatccgcaattttctgaatgtgaatgggacagaaaagcagagtagtcacgttcttctggcaacgcacaatccagttgccgtagctgagcttgagaaggagcaagttcagattcttacgcgcgataaggatacgcaggcgatctcggctgcggagccggacacgcacccgcgtggaatgggctatgcgggtgtgatgaccagtgaaatgtttggactaagtgcggccctagacacccatacccaagatctgcttgcgaggaagcgccatctcagcggacaggatgtgctaagtgaagatgacaggaaaacgctgaaggaaatcaacgaagagctccaaacttatgggttccgctatgaggtgcgcgatcccgaacttaaagaggcattacgaaggctggatcaggaggcgatgccaataagtgaaaggaaagagctgcctgacgaggctgagaaagctcgccgtctaattcagaatgccttgaataagaagggggattga

SEQ ID NO: 185798 - DNA, 1587 bp, Klebsiella oxytoca
atgagtgatttaccaaaggggtgggcgtctacgacactgaaaatggttgtcgagccatatgagagtattgatcccaggcggcaacctgagaggcaatttcgatatgtcgatatcggctccattgataatcggatacagaagataacagagccaaagaaattcctcgggcgggaggctccctcccgtgcacgtagagtgatcaacactgacgatgttctattcgcaacggtaagaacatatctgaaaaacatcgctctagtaacggaggatttagatggcgaattaacgaccactggaattgtaccacttcgtgccaataacgcgataacaccaaaatatctgttcaattgggttcgttctgaaggctttatcgcatctatttcaaaatctcaaagtggaacgctttatcctgcggtatcggaaacgcacattttagacgcaaaggtctctgttccccccctcgcggagcaaaagaggatagttgccaagcttgatgagttaaattctcgaacggcctccgctcgcgatgcactcgataaaatcccagcactgattgaaaaattcagggcgcgtgttttggctctctcttttaacggcggattgatcggaaagatggagagcgaaacaaccctacccgaaagccgatgctggaacttaccagcagactggcgctgggtaagatttgaggaggtagctgctgttgccgccaatttggttcgcccggatagcattcttgctttgccgcatattgcacctaacaatatccaaagcggcacggcgaagcttctgtcatatcagacgattggagaggacggcgtcacaagcgccaaacaacgattttatccggggcagattttatattcaaaaattcgaccttatctccgaaaagcggttcttgtcgactttgacggcgcttgcagcgcagacatgtacccaataaatgttggttcgcaattagaagcaaaatttttgctttattggcttgttagcgaggatttcgcgcagttctctgccttgcgtgaaggacgaactgtactaccaaaaatcaataaaaaagagctcaacagcacgccgttgccgttaccaccaaaagagcaacaggcagaaattgtccgtcggattgaaatcgcttttgcttggctagaccgggtatctaacgaatacactgccgcatcaaatcagcttcctagacttgacgcgtctattcttcaaacagcattcaagggaaagcttgttccacaaaatctgaatgatgagcccgcctcaatcctgatcgagaggataaaaacagaaagcgcgccaataaaagaaaaaacaagctcaggacgcaaggcggcagcgcatcccaacaagccaattaaggaaggggcgaagatggcgaatttgattgaggttatgaaatccaaaaaaggttgggtttcagctagtcacgcagcacaagcgttgggcattggcgatggcgcgacatcggatgcggttgaggagttctacaacgagctgcggatacacctgcaaaatggtgaccttgaggtcgagcgcaggggaaatgaagactggctaaggctgatgccgatcagtgaggagtga

SEQ ID NO: 185799 - DNA, 144 bp, Klebsiella oxytoca; identical to SEQ ID NO: 105094

SEQ ID NO: 185800 - DNA, 1416 bp, Klebsiella oxytoca
atgaaaaatgagaatatagttcagaaaatttggaacctttgccacatccttcgtggtgatgggatcagctatcaccaatacgtgtctgaattaacgtatctccttttcctcaaaattgcagaagagaatggtgttgagcgtcttctgccatctggcaaccgctggaaagacctcctaagtcatcctaaagatggcttgctgggcttctatcaggagatgctgacccaccttggtactagcgcagaaagtgaaacgatacaggcaatatacgcctttcccactacagtgttttcgcacgacgagaaccttcacgccgtagtaaatggcatcgccaaaattgattggaatgatctgtcgggtgatagatttggacacatctacgaggggctgatcgaaaagagctcgcaggatgtacgttctggagcaggtcaatattttactccaagagcactggttaattccatggtgcgagccatgaaaccaaaattgggagagataattcaggacccagcggttggaagtggcggatttttaattgcagcggaccggtttgttcgttcggagaatacgaaacaggcatatgagaaaacgcccccgaaatatcaaggcgttgaaattgaaaaaaatacccgtcgaatttgtttgatgaatacgtttcttaatggcctcgatgccgaggtcatatacggcgatgcgctgacggatgacgcaaatgggctcaagcccgccgatcttattcttgcgaacccgccatttgggagcaaggccgggagcagacgatcgcttcgcaccgatctcccacacaacaacgccaacaaacaattggccttccttcagcacatatatcttggcttaaaaccgggtgggcgcgcggcggtcgttttgccggacaatgtgctatcagatgatggcgttggcagaatagtgcggcgcgatctaatggataagtgcgatctacacacagttctgcggctcccaacgggaattttcgcaagcgcgggcgtcaagacaaatgttctgttttttagccttggcaataagaaggataataatacggagtctgtttggctttatgacttgcgttcaagcatgcccgtattcgggaaaactacgccgttgctcgatgcgcacttctctgaatttgagaaatgcttcggaaatgatccgcaaggtaagtcaaagcgcgtagatcaaggagaaactggccggttccgttgcttttcgcgacgggaaattgctgagcgagatgatagtttggctatttcttggctgcgcgatgaaagcggtgatgccgaggatgctgcggaaactccagaggagattgccgctctgatcctctctcatcttcaatcggcaatgaatgaaattgaagccgtcgtcggagagctcattgaaccttctgaggttaacgaatga

SEQ ID NO: 185801 - DNA, 498 bp, Klebsiella oxytoca
atgaactcccgaatgacctgcgcggcgggacgatcttgctcgcggcatatcttgagaaattcatcgcgaagctcccgctcgacacggattcgcattccggcatttttttctttcatggctccaagtgtagcctttggatacacatcaagccaagtcgaaattccgcttggagtcgaaattatccggaatttcgctagcgggcgttttgcggcatatgaacgtctgagccgacgcagtcggtccggcagcttcgttggcggcttctcgctgtttaagaaagggcttaccgtcgtcattaaggatgtttttaacgatcagattggccttcagggaatatttggaatgaactgtgtcaaagttgtttttgttcagattaacttttccacgctcttacagtggcacagactcctgaccgttactaatgtttgttaccaacggtacgaaagtgggtcttctgcaaattgcggtggaagaaaatcaatgaaactttttatttaa

SEQ ID NO: 185802 - DNA, 966 bp, Klebsiella oxytoca
atgcctttagatttaagtaacactttagttatcggcatcagcgcaactgcgcttttcgacatgagcgaatccgatcgtatgtttcgcgaaacctatgcgaccgatcctgatagcgccattgaaaaatatcgcgcctatatgctggaacacgaaaaccagcctttacagcccggaacaggctaccccttagttaaagcgttgctgggtctgaaccagtaccgccagccggatgataaatcgccgttggttgaggttgttgtgatgtcgcgtaacagtcctgatacaggtatccgcgttttgaataccattcgccatgacaaactcgatattacacgttcagcttttaccgcaggcgaaaccgttgccgattaccttgatgcctttgatgtggatctgtttttaacaactaacgttgaagatgcgcaaaaggtgattgattcccgattctgcgccgctgcaatcctgaaagatcccccttctgatgcatctgatatcccggaagggcaagtgcgcattgcttttgacggtgatgcagtccttttttcagatcaaagcgagctggtttataagactcaaggaatggccgcttttcacgcccaggaagatgcgcaacaagatatccctatggaagaggggccatatgccactcttttaaaaaaaatagccaagcttcaggaacgattgccaacccgcgttgaatattctcccgtccgaattgcactggtgacggccagaaacagcccttcggaaatgcgcgtcattaaaacgctcagaagctggggagtttatgtcgatgaggctttttttctgggcggtgtagagaaaacaaaagttctaaaggcgtttaagccacacattttctttgacgatcaggatgtgcatttgatcgcagctgcaaaggttgtaccttctggaaaagtcccttatgccagtaactccgaacttgcagaacgtgaagcatcgtaa

SEQ ID NO: 185803 - DNA, 513 bp, Klebsiella oxytoca
  misc_feature (501)..(510): n is a, c, g, or t
atgggtacatatatatcagataaaacagaaacatgttttgatgaatattctttaatcgaaaaagtcgaggatggctatgagattagtgtgtactcatttaagcttcatgcaggaaatccttaccaaccacatatatcagaaagttatagtggtgatatttttattagctatttgtactatggaaatgattcttactacgagcgtaggcgtcaggagtacagaaaatatttatcattaaaagaaatccatcttgctattctaacgatatttccagatgagcgaagaatcgcgataggtataaaaaaagaaagctatagcatcgttaaaatatcttatgtggcagcggatgaagtatatcttcttgatattgcaaataaagaaacgttattgttagataatatattgtgccttcaaaatattatttccaagcatgaaagcaatattaataaattggaaggtgaattagcaagtggtaaaaaagaattccaaagtatgaagttnnnnnnnnnntaa

SEQ ID NO: 185804 - DNA, 1167 bp, Klebsiella oxytoca
atggtaaaattaagcgatgtttgtgaaataaatatcggaaaaacccccagcaggagtaatagcagatattggggggaaggtcatagatggttatctatagctgatatgaatcaaggtaaatggatctcgaatacaaaagagcagattaccgatctcgctatccaggagtctggaataaaaaaaattccagcaaatacagtattatttagttttaaattatctattgggaaagtttgtttatctgagacggatatttatacaaatgaagcaattgcggcccttccaataaaaaacaaaaataaattagatactatctatctaagccatgtcatgaaatcattagcgttttcagatatgacagataatgctgtgatgggggccactcttaacaaaaagaaacttgctgaggttcgtattccccttccatcgattgaagaacaaaaacgtattgctgctatcctcgacaaagccgatggtatacgccaaaagtgcgagcaagccattaagctggcggataattttttacgtactacctttttggatatatttggcgatcccgttaaaaacccgaagaaatggggtgttacctctttattagaatatggttcatttaaaaatgggatgaatttctcgaagggtgaatctggaacgatgcttaaatgtctaggagtcggtgatttcaaatcactagcaacgattaccagtatggacaatatcggtgaaattgaattaaacacgcctccttccgctgagtatcttttgaaagatggtgatattgtctttgttcggtctaatggcaataaagccttagtcgggagatgtcttactatttatccggggaaagagaaagtcacatttagtggattttgtattcgatacaggatagaaaagcctgcaatcaccccagaatatcttaactttctcttccgtacaccttcaatgaaacagcaaatgttaagtggggggcaaggggcgaatattcaaaatattagccaaggtaccttatctgtactcaggatacctgtacctccattggataaacaacttgcttttgccagattggttgatttccatgcatctattgttaaaaaacaatatgataaaacggctgaaaccgaaaaactcttcaatgccttgactggcggttttttcacatttaatgagtga

SEQ ID NO: 185805 - DNA, 1635 bp, Klebsiella oxytoca
atgatcaccggtgacttaaaaagtaaaatcgacggactatgggaagatttctgggtgggcggtatcactaacccgctgaccgtaatcgaacaaatcacctacctgatgtactcccgaatgctggatacccaggaacagcgggacgagaaacgtaaacaaatcgcgggtattgattttaaaccgcgctttgcgcctgagcagcaggagttccgttttagtcactacagtaacctcggttcagatgaaatgatggaagtagtgcgcgacggcgtattccagcatttccgccagctcggccaggccgatgcgtcgaaggtgacactgctgggcaactttatgaaagatgctcgtctggagatcgtcaaaccttctctgctgaccaaagccgtggaagtgatcaaaaacctgccgctggatcgtggcgacaccaaaggcgatctctacgaatacctattaagcaagctgaccaccgccgggatcaacggtcagttccgcacgccgcgccacattatccgcacaatggttgaaatgatggagccgaacccggcgcgtggtgagacgatttgcgatccagcctgtggtacaggtggttttctggcgaccagctatgagtacctgctggagaaatacagctcgctggagtccatccataccgagattggcagcaacgaacgcggtgagctggaagagcaaaaaatctttaccggtgatctgctgacgccgtggcgtgaccatgtggataacaacatgttccacggctacgactttgacactactatgctgcgtatcgccgctatgaacctgattatgcacggcgtggaagagccggatatccactatcaggacaccatgagccagagtttcagcaccaacttcccgcaggctagcaaaaatgctttcaacctgatattggcgaacccaccgtttaccggttcactggatgaggaagatatcgacgccacgctgtcggcgatggtgaaaaccaagaaaactgagctgctgttcctggcgcgcattctgcaaatgctgaaagtaggcggacgcagtgccactatcgtgccgcagggcgtactgtttggctccagcaaggcgcatcagtctctacgtaaaactctggtggaagataaccaactggaagcggtgatcaatctgccttccggtgtatttaagccttacgctggcgtggcaacggcgatcctgatctttaccaaaggcggtcagacggatgaggtctggttttacgatctacaaaatgatggctacagcctggatgacaagcgcaacccgataaaagacaacgacttgccgcatttgctggcaagctggaagcattaccgtactttgcgcgggctaccggttgataactttatgggcgagaaattagcctcgttgctgaaacagcagcaaccggaagggattgatgctggcgttgattttaaagatcgcactcaggcggcgtttgtggtgccgaaagcggatattgcggcgcagaagtatgacctctctatcaatcgctataaagaggtggtgtatcaggccgaggtgtacgaagatccgaaggtgatactgaaacggttgaaaggtctggaaaaagagattctggcggatctggatgagctggaggggatgctgtga

SEQ ID NO: 185806 - DNA, 3414 bp, Klebsiella oxytoca
atggagcagtctctcaattttgaaatgttgcgcagccagtggccggaactggcagaactcgcgtgtatggcggaacgatatgttcactccgatccggaaagctgtctggtcaagctacgcaactacaccgaattgatggtacgttggttataccgccaggaacggctccctgaaggcatcaaagcaaatctgtatgatttaatgaacgccgatgtcttcaccagcatgatgccagaagccatcatcatgaaaatggatgcactgcgtatccatggcaaccgcgccgcgcacggtggacgtattaaagctaaagatacctattggctgctcaaggaagcgtatttactgggaatttggctctatgttcgttatgcccatggtaatgttgataactgtcccaaattttctcttcctccgttaacacaatcttcaggtcgtgcagatgaaaaacgtctggaagatgcaatcagggctcaggatgaaagccgtgagcgcgaactggcgttacaacgcgcactccagcaagagcaggaaaaagccgaacacctcacccagcgcctgaatgaagccagagctcgcaaccagcatgttgccgacatcctctctattgatgaagcggaaacccgccgccgcctgattgactcccgcctgcttgctgctgactggaatgtaggcgaagaacttaaaaataccgatcaggttacgcaggagcatcctgttaaagaacagcctactgcaactggcgacggttatgcggattatgtcttgtgggatgaagcgcataaaccgctggcggtggtggaagcaaaaaaaaccagcgtcaatgccgagcaaggacgaattcaggctcggctatatgcagactggctggaaaaagaatacggtcaacgcccagtcattttctacaccaacggctacgatatctggctgtgggacgaccataaaactcatggttatcccccgcgccgagtatttggtttctacagcaaggaaagcctgcaatatcttattcagcagcgtgaaacccgtctgccactgaacagtgtgccgcatgtaaaagacaacgaaggtaaggccgttgccggacgtttgtatcagcttgaaaccattgcccgcgtcagcgaacggtttactaacaagtaccgacaatcgttaattgttcaggctacaggtacaggcaaaacccgcgtggcaattgcactaagcaaactgatgattgatgctcgctgggtaaaacgcgtcctgtttctttgcgaccgtaaagagctgcgtaaacaggcggcgaatgccttcaatcagttcaccaatgagccactgtatgtggtcgggaaatcgaagaaagcagacaggcagaatgccaggatctacatcgccacctatcccggcatgatgaaaatcatggaccattttgatgttggttatttcgatctgattatcgccgatgaatcccaccgctctatctacaacgtctacggcgatctgtttaagtattttgatgccctccagattggcctaacggccacgcctatcgacatggtgagtaaaaccactttcggtctgtttggttgtgaaggacgcatccctaccgccaattacagcctggaagatgccatcgctgataacaacctggttccctatgaggttgttacgcacaccactgaattcctgcgcgaaggcatcaaacgggagaaattaagcgacgcacaaatccgtgagctggaagaacagggtatcgatcccaatacgctagaatttgatggcaaggcgctggatgaagcgatctacaacaaagacaccaaccgctatatcctgcgtaacctgatggaaaatggcctgaaagatcaggatggccagctgccaggtaaaaccatcattttcgcccgtaaccacaaacacgcgctgctgttgaatgaattgttcgacgacatgtacccgcagtttgccggacgcttctgccaggtcatcgacaactacgatccccgcgccgagcaactgattgacgattttaaagggctggatgaaagcaccaacaaagagctgaccatcgctatctctgttgacatgcttgataccggtattgatgttccggaaattgtgaatctggtctttgccaaaccggtcaaatcgaaagtgaagttctggcagatgattggccgtggtacacgcctctgttcggggctatacggtaatgatgaaaacggcaaaccgctggataaacagaaattccgcatcttcgatcactggggcaactttgagtatcacgagttgcataccgaagaggccgaagtcacagcgacaaaatcgctggcgcaaaaacgcttcgaagcgtgggttatgctgggggctgctgcacagcgtaagttcgacaaacaggcggtggatttagtcgctcaccagctccgcgagcagatcaacgcgctggatgaaaagtcgattgccgtacaggaaaagtggcagcaaaaagcgcagtacagtgatgaaaaagtgctgcgccagctttccccgaaaacacagcaggatctgctatctgtcctggccccgctgatgcagtggctggacgttcgcgggcaaagcgatgccatgcgctttgatatggatattctggcggcgcaaactgcccgttataccaacccggaagagcttgatgtgctctggccggtcatcatcgagaaagtggaacgtctgccgccgcatctgacccaggtgcaacagcagggacagcggattaatcagcttcgtgatttgggctggtggaagcaggccagtctggaagaactggaagatatccgcattcatttgcgcggtataatgcacctgatggagaaagatgcgacgccaaaatttggctcgatacaggtggatattaccgaagatgcgaacctgatccagacggagacccgcaaaaccaacatccgctcgattgatttcaaactctatcgccagcaggttcaaggggcgcttgagccgctattccagcaaaacccggtactgaaaaaaatccgcaacggcgagccagtgacgcaaagcgagctggatgagctggcaaagctagtgctgatccagaacccgaacgtcgatatccgggcgctaaaagagttctacccgcaggcaaccgccagcctggataaattattacgtaccatcattgggatggacagcgacgcggtggaaatacgttttgcgcagttcgctgctgacaacagcctgaccagccagcaactacgcttcctgtcactgctgaaaaaccatattcgtgattatggcaccattgagatgcggcagctctttgagcagccgtttacacatatccacaacgaaggcgttaccggcgtgttccccgacatagagcagatcgcccggttgcaaaagatagtcgaagagctgggtgttgtgaccgacgcagcaacggtataa

SEQ ID NO: 185807 - DNA, 600 bp, Klebsiella oxytoca
atgaataacagtcaccaatataacccatcatggaatccaaactggtttctttcaataattctgaataatcatatcgatgcaatggtagccagatattcttgtttactaacattacgcctagacttcttttataaaaaaaatacccgccactacttacatcaagatcatcatgcacttgagcgtgacctgcgattattgatgaataaaatgatgaaaaaagctgcagttgtgggctatttctgggtcattgagtggactgtagaccatggcttccatgcacatacagcatactggctggatggacataaaacgcaaagatcctatccttttgcgctgcaggcaggagaactctggaaggaattaacccaacaggggggctattttaatatctgccaatttaaagagccttataaagccgatatcaatattcccgtgcgttacaatgagcccaccagtattctaaatattcgtcgagtattgagctatctgacaaaagaggagcaaaaagaggggctctgttcatacggatgcaatgaagtcccacaacgcccaatgtcagggaggcctcgtaaagcgatggacactatttctgaaaattag

SEQ ID NO: 185808 - DNA, 1089 bp, Klebsiella oxytoca
atgaataagaatgataaggatagtcatttagatgcttttgggaaattattctctaatgaattatcacagaaagaaatggtttcgactgaggggccatcaacttctgccagtcctgaaaataacaaggaaggctctttattgcaggcatcagaggtgaagcaacttcctggcggtgatagtaagcatgagtgcgcagatgtagatctttctcttgctactctggtggctgaaggaaatcaaaatgaccctgcgatagaacgtgtaatgcggcagatattggctcaggaaaatactattcctaaaaagcaagtcttaaatggaggtcaagatccctaccttagtgatgttgattttaggtggttaaaaggagatgccaatgagcgagctattttctggttttggatatatatccgcactgcatcaaatagccgtctcaatttgccagaattaaagttgcaaaatggctgggattcagaggatcattgtttatattctttttttagacttccggataatcccgtcagctccgctgaaaggagtcggttaattattaccttcttcaataaactctcgggtttcttcaatcctatccaaattaaagagtcattcgaacatattcgtagtatctggcttcacttgattagccctgttcgacaatttaaatggttaaagaaaaaagactctgagggtattgaatgggtgtgggattatttattaaaaaggaaggatgtcaatgataacatccttttttggtttaagcccgcagatgcaaatgagaaatatattgcgatcatgggggcaattgattgctgggttatacgggggaataaaattgattgtcaggataaaaaattacttctggataacatgaaaaaagcgtatcagcagcgcgggcgacgagataaaaagaaaagcttcaatcttaatactgaaatttctataaaaacccgtagagagctcaaagagctggttaaattgcatagtgttaatataaataaatttattgaaaggctgattgatgatgaatatgggaaatataaagacaatcctaatgaatataaaatatctttattaaagaaaaaacaataa

SEQ ID NO: 185809 - DNA, 891 bp, Klebsiella oxytoca
atgtcccaaacccccgaatcgcaggataccagtgatatcatgcgtacctgccttaatttcttaccccaacaaacgactgaacgtattatttcccgtctgcaacaggcaattcactacgagcccgtaattggcattatgggcaaaagcggggcgggtaagagctcgctttgcaacgccctgtttcaacaaccggtatgtctgaccagcgatttgctgggctgtacccgtgaaccccagcggatagtgctcaccgtgggcgagcgcagcatgacactggtggatttgcctggagtgggcgagacaccggaatacgatgcggaatattcggcgctgtatcagaagttgctgacggagctggatttgattatttgggtcctgcgtgctgatgatcgtgcgcgggcgatcgatatcgtcacgcaccggtcactgcttgcttatggcgcggatgcttcccgtttcctgtttgtcatcagccaggcagaccgcattcctccgttgccagaacttgccggacaggttgttccttcaacggagcagtgcctttcacttgcggttatcagttcgcagattgctggtcagttgccgtcctctttcccggtgatggctgtttcagcacataccggctacaacctgcatgctctggtggaactgatgatacatgcgttacctgtacaggccagtagcgctttttatcgccagttaaagccagaaaatcatacggaggagggtgatgctgctgtacgtcagcgttttggtgaaatagccggttcggcttttgacacggtgatcgcttctgagcatctgccttctggctggagcttgttgctgaggaggttgcgggaaaaactggtacagctcgcatcggaattatgggagaggatttttggctga

SEQ ID NO: 185810 - DNA, 690 bp, Klebsiella oxytoca
atgaaaaccagaacaataattgctctttttctctccgccgcctctgtctctgcgcaagcaggcaactggatggtgaaaaacggatggtgccagaccatgacggaagacggtcaggcgctggttatgctgaaaaaagacactattggtatcttcggccagttgcagggttgccccaacggtcagcaggaactgatgggaagccgtatcagcattaacgggaatctgatccccacctctcagatgtgtaatcaacagaccggctataaagctgttgaaatcgaaggtgggcaggctcccgccgcagccaggaaagccattgaatcaattgccggtcaggatatttccagcgtgcaggtctttggcacacaaatgaaatttagtcgtggcgatatgctccaggtttgcccgaaatatgtcagcgcccttgcaggggtatcagcagaagtcaccgggaacaagccgctgaaagtaaacaaaggttcggtaatgaaagcggccagacaggcgtacacgaaagaatatgaccgtgaaacggcagacgccgctgattttggcagctatgaagtgaagggaaatacggtggtatatgaagtctacaatgccgcttaccgcacctacgataaaatcgttgttactgtaggatctgatggtaacgccaccggggcaaaggtggagttcatggggcaataa

SEQ ID NO: 185811 - DNA, 447 bp, Klebsiella oxytoca
atgaatactgcaattactgacgccaccttatcgtcagacactattttcgccacgcctgtcgcagatgaacagcgccccggcttctggccgcggcactttggcacgattccacagtggatattactggaaccgcgcatcttcgcctggatggaccgtttctgtgcggattacagcgggggtatctggaatttttacactctcagcaacggcggggcttttatggtgccggatactgacagcgatgcgcaatggcaattctttaacagcatgaacggaaataacgcgcaaatgagtgcagaggccgccggaattaccgtctgtcttatcgagtacagccatcatgcctgccgtaccgggtgcgatgccatgacagcgcacttttatcgtcttcgtgagtatgctctgcaccatcaggaatgctccgccatcatgcgcattatcgactga

SEQ ID NO: 185812 - DNA, 996 bp, Klebsiella oxytoca
atggataatctaactaggaatcaacactttatatctcaggtagagcagcgcagtaattgcattgacgagagcagaccaaaagataagcagcgaatctacaaatttgaaattgcagatagagaaaatagcgttgttcgattgacaaatattgaaggcgttaagataaaggctaacctctcttttgatgatctatttagtttcgatgtgaaaagctcaagggtaagaaaaaatttagaggatttctttcaaaaatttgaaacggacttagccccagcaactggtctccttatctccgagtcaaacgttaactcaggaagcgatgttttgaaggacgcagctgaacgagtattcaaagcaaagttcatggggtggattagaaacccctatttaattgctcgaacaatagatatgtttaagggattagaggggatgcatccaactgatcctcttttactgagacacttctccgacatacgctcgggagcaaaacctcacttggccgaggtttgcgcaatgtttagagtgacgagtgagcagtatttccagtggctggagattctttttctggcgttaatgacttcacccggagccacaaaaagtatcttagagtcgacagttgagatgattgttgagtcacagggattaatgggccatgtgatagtagcaacctttgacgacactccgggctgcagagtcgctgtacctgatacaggttaccttcaaggcactaatgatcccaactgtaatatgtttctttttaatttgaatcgaagcgcgtttgctgcatttagtgtggtggacttgtcaaagcagacccttgtagagattcagccgcagatgaggaggcaagtagggttgtacaatataaaattctcagcacagcaccatcacaatgatatgaaactacttgaattttttaacgtactagccgcgtatcaagctcattctcatattttttgtgccgaccctaagatcttcggaattactactatttaa

SEQ ID NO: 185813 - DNA, 801 bp, Klebsiella oxytoca
atgttgccgctggaacgtcatcgtttgattgttgaactgctgggccaacgcggcgtgatgcgggtgaatgagattgcgcaagcgactcgggtctccagggaaacgattcgccgcgatctgagcgagctggaacggaaagggattttaaatcggagccatggcggagcgctggcggcggagaacccgctgccggcgatccgagcggcgtcgcccgccctgccggtcgaagatagccagggaagctttcagcagagaacgctgctgcacagcgaaggaaaaatgcgcgttgcccgcaaagcgctgcagtgtctccagccgggacagaccatcgtcctggacggcagcagcaccagctggtttttggcccggcagatgccggagatgacgctaacggttatcacgccctctatccgcatcttgcaaacgctgatgagcagacgctcgttgcatctcgtgggactggggggcgatttttccccgaccgaggaggcattcttcggtgaaaccgcctcacgaacgctgcgcgagtacgccgtcgatacgctctttttctcctgccaggggctggagcgcgatagcggtttatatgcgggtacggaagcccacgccgccctgttgaaacagatgatgctggccgcccgtcagaccgtggcattggtcgacggcagcaagctggggcgaacaggcgtcgcgcggatcggcggattgggcgagctggactgtttaatcaccgaaaagtttgtcgatccgctgctggaaaaagagatgacctggcataacgtcgggctacagatcgcctga

SEQ ID NO: 185814 - DNA, 1602 bp, Klebsiella oxytoca
gtgagcagcaaatttatcgacgcccatcaagcggcccagcgggtcgccagcggcgacaccgtctgcaccgtcgggatgacgcttatcggcgcggcggagtccattttaagcgctatcgaagcgcgctttctgaccgcgggcgaaccgcgcgacctgacgctgctgcatgccgctgggcaaagcgatcgccagcgcggcatccagcacttcgcccacccgggtatggtaacgcggcttatcggctcgcactggggcctggcgccgcgctggatggcgatgatcaacaacaacgaagtggaagcctggtgcctgccgcaggggcagatcgtccatctctatagcgcgatggccgccgggcttaccgggcggctttcccccgtcgggctcggtacctttgtcgatccgcgcatggaaggcgggcggatgaacgcccgcacccgcgaacggcccgatctgatcgagcacgtgacgtttcgcggcgacgaatatctgttctacccggccattcctctggacgtggtcattgtgcgcggcacccatgctgatgaagagggcaacctcacgaccgatgaagaggtgatgaagctggaagttctgcacgcggttctcgccgccagacgctatggggcgaaggtgctggcgcaggtgaaatatcgcgtggcgaaaggctcgctgcatccgaaaagcatcaccgttcccggcaacctgatcgacgccattgtggtatgcgaagagccgcagatggatcaccgccagacctccagctgggacttcgatccggcgctgtgcggcgatatccagctgcccgccgcgcagaacgcgccgctgccgctcgacctgcgcaagcttatcgggcggattgcctgccgctatctgacgcccggctgcgtcatcaatctcggcaccggcattcctaacgacgttattggcgccatcattcaccaagaacggctcggcgagcaggtcaccatcaccgtggagtctgggatctacggcgggcagcaggcgggcggcgttgatttcggcatcggtcgtaacctgagcgcgatgataagccaccaggatcaaatgctctattacaacggcgcgggggtcgatatcacctttatgggcgccggcgagatggacccgcacggccacgtcaacgccacgcggctcggcgcatcctgccccggcgcgggcggttttatcgatatcacccagaatgcccgccacgtcgtgttctgctcctcttttaccgccaaagggctggagatcgcctgtgaacaaggggccctgcatatccgccgcgaaggcgaggtacgcaaattcgtcgccggggtgaatcaggtttcctacaacggcgagctggcccgcgccaaaggacaaaccatgcattacgtcaccgaacgggcggttttcgaactgcgcccggaggggccggtgctgacggaaatcgcccccggtatcgatcttgagcgcgacatcctggcgcatatggattttcgtccggcgatcgccgcggatcttcaggttatggacagtcgcttgttcaccccgcagccctgcggcctcgcggaacatctgtcccggaattcatcctctgactcacaaggaaattag

SEQ ID NO: 185815 - DNA, 357 bp, Klebsiella oxytoca
atgaacaatcgctcagaatccggtgccataccggagaatcccgcctgccagcaatgggggctgaaacgtgctatgaccccctgttttggagcacgtctggtgcaggaaggcgaccgcctgcattttctcgcggaccgcgccgggtttaacggtgctttcagcgacgagcatgcgttgcgcctcgaccaggcctttccgttgatactcaagcagctggagctgatactcaccagcggagaactctccccccgccatcagcactgtgtcaccctctatcacaacggactcacctgtgaagccgatacgcttggtagttgtggctacgtatacatcaccatttatcccactcaacgttaa

SEQ ID NO: 185816 - DNA, 876 bp, Klebsiella oxytoca
atgcaaaaatctgacggccttctggccattgagaagcctctggcttcactgccccatactcttcgcagtctaattcttaaacgccttcgtagtctcacacagtacgagccggttattggcattatgggcaaaagtggggcaggcaaatcgtctctctgcaatgccctgttccagggagaagtcacgtcggtcagcgatgtggaggcctgcacccgcgatgtgctgcgcttcaggctccgcaatggcaatcacagcctgatgattgttgatttacctggtgtgggtgaaagcgagcaacgcgatgaagaatacactgcactgtatcgccgcatcctacccgaactggatttagtgttatgggtcatcaaggctgatgatcgggcactgtcagtggatgaacacttctatcgcaaggtgatgctggcgtatcagtaccgggttttgttcgtggttaatcaggtcgacaaggccgaaccctgtcatgaatggtgtaccaccgatagcacgccttcacctgctcagcagttaacgattgagactaagagaatcgcgatgcagcagttgttcctgccgcaccatcctgtctgtgtggtgtcagcccgcacagggtggggcgtggaaacccttgtcgatactatgatgcatagcctgcctgaccgggccaccagtccactgacaacacaactgcatggaaggctctgcaccgagccggtaaaaaagcaggcacgtgagcgctttggtcatgcagttgatgaaatgattggcaatgtggagtcatcatcttttctgccagcgcctgtaagggctgtgattcgaaccgtgcgggaagccgtggtgaccgttgcccgtgccgtctgggactggattttcttctga

SEQ ID NO: 185817 - DNA, 777 bp, Klebsiella oxytoca
atgatcctgagagaccttaataatgaatttaaaaacactcatgagtacaataagttcgtacgggaaatgaaaaatggattattttccagcatcatcccggagacaaattttgaatggataaaggactatagctccgcttattttgcatggaatatactttcaaccatgggccctaaggaaattaatccactagaggttgatttttaccgtgaacggcctccggtcattcagcataacttattgcctgttattccggaaacgtataaggatgccctttcagtactctacacctgttttgatagctgggatgtcgatttattctttaagatcaaaacactctcatcattaaaaaatatctggattcagcgaaatcgagagttaccagaaccatttaaatggattgaccttaaaaaccataaacaatgtgcatgggcttttaaatatgttatggagcatatcaaacccgattacatgccttcatttatgactgaaatcagacaacaacaagtgattacttttctcacagcagtattgtattcctggcctgctcaccctgacactcggcgtctgatgattcaacggatgaaaaaaacatacaaccagaatttgttccgggaaaacattgctgacaaaaaagtgattaacacttatgtccagaaggacattaaagaaaagctcgatatgctggcaaagaaaaatggtcgaaaaattaacgaagagctggaagttatcattatgaatgcctggcacgatgccagatatacagaagataaatag

SEQ ID NO: 185818 - DNA, 207 bp, Klebsiella oxytoca
atgaccacgcatcccttacttaccgaagaccagttgattgacatggcatttattaccagcctgctgcagatgacagacaagtggatttacaagcttattaaggacggatccttccccaaacctatcaagctggggcgaagctcccgatggcggaagagcgaggtggagtcctggcttcaggaacgtgtcgaccagtcccgtaaataa

SEQ ID NO: 185819 - DNA, 570 bp, Klebsiella oxytoca; identical to SEQ ID NO: 113401

SEQ ID NO: 185820 - DNA, 429 bp, Klebsiella oxytoca
ttgcaacgcccggagattaaagcgctcgtcgaccaaatcggctgcgtccattttgaagtgaccgagaattcccataatcttttgaataatgctctcgcaacctggaataacccgcaaagcactacgctctggctcgatgattttggctctggcaacgccggtattcacgctattcgcgactatcatttcgattatgtcaaaatcgataaagacttcttctggcttttaatgcaaaaagattccggtcgtccgttaatggatgccctcgtcactttcctttcccgcaaccaccataatgtgattattgaaggtgtagaaagcgaagcgcataaggcctggttgcagggcatggaatggtttgctattcagggacactactggaaggaagtgagcattgaacaattggtccaggaagatatcaccgcataa

SEQ ID NO: 185821 - DNA, 342 bp, Klebsiella oxytoca
atgggattaatcagaacagtggtttatgtgggtatcattggtggtatttttgcgtatacacaaacaaaagatagccttgaaaatatttcgtttccggatgcggagtttccttcttcaatcaccagaaataactttatgcaatcatcatggttaaacgatcattacgcttcactaaagaatggcggaattgctgacggtatatccggtgttctagatgatgctcaggatatcaggggggctgtcaatagtgttgtcatgactgccggtaatgtcgatatccagaaggctattcaggatgcagtggatgaactagacagcaatagccgtaaatccagtaagtaa

SEQ ID NO: 185822 - DNA, 501 bp, Klebsiella oxytoca
atggatttaaaaataatgaaaccaacagaagcatacacaatgcttatggagaacgtagcttcagtgttagattgccgagaacagggcatacaatctggtgtcttgctagaggatatggaagacctggaagcaatcaattggttgaattctttaacattatggcaaggtggatacgatagagttttctcacctggcatctttaacggttttcttgtggaatactgtaagcccgagtatgccatcggccttcaacacttttaccctcaactcgcagcgcgagaagggattgaattaactaatgaaatatgggactcatcaatcgatattctaatagacatttatgattatgctttaagaactcgcgaattagatggtaaacagcattggggcgtagtcttcagagatgactatttgcagcaatgggataatgcattcctgaataagagaagaccaggtcttataataccaaatttcttaaaaaaatggttgaggctaagctaa

SEQ ID NO: 185823 - DNA, 1062 bp, Klebsiella oxytoca
atgcgctgcaaaattagcaaaacctctatctcacttatttgtctgatgctggtggccacctctgcggaagctgggtacaaatccaatcggtcttcctacaaatcatccttccgcccatcgaccattaccaagtcgtacacctcttcaaccagaagccaggcaagccgcacggttaacgatacgccagcaccggctagcaccaaaccactgaccaccagccagaaagcgatgattgcaggttctggagccgcattaacggtcggggcagtttccgcgtcctcagggaataaaccgtcagagagcacctccgggaaggtgaagaaccaggctggtgggtatgctgttgtcagtagtcgatctcagaccaagggagataacgaaggcgctgctgcaggcactacgccaaagaaatcagtgagcgggtcggagctggtggctaagaaagggactatacctgcatcaagtccaacctccgaaaaatcgtcgtcaatcgcgccaactcagcacatcccgggaacctccgggcgggattatagtaacctgcgtcaggcggctccggataacgtacgcactgtcattcgtgaacgtgagcgaagtgggacagactggacaactcttgcacttatgtactggatgatgagcagcaacaacagccatgcatcctcgcttacatccagtgataaagggtggattcagcaacagatagaagagcaggaaagtagcggtgcaagccgcgaggcagctatcaatgagctcaaagctgccggggtagatacctcatcgatgacggttgcggataacagccaacacgcgtcgactgtctccttctcctacgatatgccgacagaattaaaggcgggtaaggtctggacgttcgttgtaaatgccacatggaatgataaaaaacaggctccgtcatgcgagttgcaaggcgcaaaatttatggcagacaaagacaaattatacggcatgtggaaagcacctgaaactgttgggcagaaaacgcaaatgaagtgcaaagcgtttggtgtggaagaaattaaaacgctggtgtctgtctga

SEQ ID NO: 185824 - DNA, 375 bp, Klebsiella oxytoca
atgaaaaagcaggcaggaatgttcctgatttgttttatttttctactatcactgaagcaggttaaaggagcggatgaaacgcgtaatcactctcccgatgaagctagagtgttgcacgccagcgcttcgatagaagttgcgaacgccgacgagcccgatgatgaggacacggttcgtctgacaaaaaatgagtatgacgagctggtctggaaggctaaaacctatcaagagctaaacccgatgaaaacaagcaatcctcgggagagacacggcttttcatgggatttcttttggggttgggtgggtggtgcttttacgacaaccctcatctattttttctgttttggcgacaagaaaaatggaaccaagaagtaa

SEQ ID NO: 185825 - DNA, 213 bp, Klebsiella oxytoca
atgtcatctgaaatcgcgtatgttgcaacattcacgcttaacggcgaggttcatgctgacaggctgggagcattgtccgagcctgtcccaccgtcatccttgattgaaccgatgtctcccggaagtctggcgctggcggatattatcaataaggctgctatcgttgatcctgactctccaagaggtgcgggaatcctcaataacgctgtttaa

SEQ ID NO: 185826 - DNA, 393 bp, Klebsiella oxytoca
atggacatcaaaatacatgtcaaatcgtcaaggtctcaagccattgtcagttatttgacgtgcggcctccgtggacttaaggcaatgacactcttcttcttcgcaacattaccattatcccttttattcacgttgtgcgcatttcatcaggcgatagatgagggtaagtatattcatctactattatgggcaatgggattgaacgtgatctggctgctggtgcagatgttgaagaacgaggacgattttttcacaccatttaagcagcctgtaagctttccatttcatcaggaaaaagtaactcgtcaggaaaaagtaactttcgccaatatatcgttgacttttatctttctggatgacggttataaaaatgggaggggcaaggactattag

SEQ ID NO: 185827 - DNA, 1032 bp, Klebsiella oxytoca
atgagaactttaaacttcaacggtaaaatttcgactctggaaccactgactgtaaccgttaaaaatgcggtctcaacttccggccatcgcttgcctcgtaacggtggattcaatgcaaccccgtactttccaggtaccagcattcggggaactcttcgtcatgctgcgcataaggtcattgtagatcgtgtgggtcttaaggcagacggaaaatcacctttcgacctggcagaacatttcatgctggcccagggggtggatatcaatggcgaagctgaaaccttcgcgccaggtgaaatcaatgctggtgctgaactacgtagcaaaaacccgttaatcagcttgtttggacgttggggattaagcggcaaagttggtatagggaatgctatcccggatggtgataaccagtggggaatgtttggtggtggtgcccgctcaattatgtttcagcgtgacgaaagcctgatggaatttcttgagacagaccaggttgatcgtcttcaacgcctgctcgaagaacaggcagaggcaagtgtggatatctctcagatcaaaacagagcaggatgcactcaaaaaggcgatgaagtcggctgataaagacaccaaagctgagcttcaaatcaaagtacgggagctcgatgaaaaaattcaggcccgcaaagatcagaagcaggaatctcgcgagtcaattcgccgcccgattgactcgtatgaagcgtttatcaccggcgcagaactcagccatcgcatgagtattaaaaatgcgactgatgaggaagcagggcttttcatttctacattaatccgctttgcagccgaaccacgttttggcggtcatgcgaatcataactgcggtctggtggaggctcactggacagttacgacctggaagccgggtgaactgagaccagttacacttggagaaatcgtcatcacaccgaatggtgttgagattaccggggacgagttgtttgctatggtaaaggcattcaatgaaaatcaatcttttgatttcagtgcccgctaa

SEQ ID NO: 185828 - DNA, 708 bp, Klebsiella oxytoca
gtgttaaattttaaaccgtatcgggtcatcatgtcttctctgacaccggtggtcatcagtgggatagccccatcgctggacggcattctgtatgaagcactgtctcaggcgatacccagtaacgagccaggagtcgtattggctcgtcttaaggaaatacttctattcaacgatgaactgggtgttttccatgcttcatctctacgttttggcataacgcccgaacaggggattggggcgacaacaagcgcgcgttgcgattatctcagtcccgaaaaactgagcactgcaatgttctctcctcgtatccacagggggctgtttacgcgtgtcctcctgacagggggccccacgaagagaaggatgacaacccgtccagcttattctgcaccctatttaacgtttgattttgtcggctcttctgaggctgtagaaatactgcttaaccatgcccatgttggcgttggttatgactatttctctgcagctaatggagagtttaacaatgtgacaattcttcctctcgatatcgacacgagtatatccaacgagggtatggcattgcgtccggtacctgttaattcgggtctgaatggtatcaaaggagtatcaccacttattcctccctatttcgttggtgaaaagctaaacattgtccacccagcaccagttcgtactcaattgatttcttctttattgcgagactaa

SEQ ID NO: 185829 - DNA, 1875 bp, Klebsiella oxytoca
atgaatacatcagcgatatttgagtctgccggattgtcgttacgtaaggtccaacaggattatatcgaggctgcagctggtgcactgactcaggatcataaacttgcactgattagtgctgagacaggtgtaggaaaaacgctgggctatctggtaccggcgcttctgattctgatgaaaaaccctgaggcaaaatttgtgatagccacgaattctcatgccctgatgcaccagatattcagaagcgatcgtcctctccttgaacagatagctgaacaatgcgccataaaagttactttttcccggcttatgggtaaagctaattacgtatcccaggagaaagtacgtggactgttactcatggacgagtttaccgatccggatacgattaaggtccttgaaacactcgctaattggtcaaaacctctggttgagtttgaagatgagtatggtgaactgtcagcgcagatcacgccagagatggtcacctactccatatgggatgatatacaggacattgatgatattcggctgaatgctctcagtgctaactttattgttacgacccatgcgatggtaatggtcgactgtatgtgtcatcaccgcatcctcggtgacaaagaaaatatgtacctcattattgatgaggcagacatttttgtggatatgcttgaggtctggaaacagcggcgcttcaacctcagagagttgaccagcgcgttcaatgaacatattccacgtaatggcgtgcatgtcatcgaccagttaatgaacgacgtgactgcgatagcgggcgatctgcatttttgtagtacgcctgcagcggttgccttgtttgacaatagctttaacgccttatcaaaggtagggcggaaaataaaaaatgaagcggcccggaaagctttctttgactgtatctacagctgggaaatgctcggattgtccggggggcaaaagggcgtaggcgtttccaataaacgtcgtgaaccagccctgatcgctgtaaatccgtttatcgggatgaatgtgggcagatactgcactcagtggcgtagtgcgttactgacgtcggctacgctctctattaccagtaccccagagaccggaatggagtggttatgtaaagctctggggttaaccagcgatacgatttcaatcaggaaaatattctccccagacgtctatggctcaatgaagctgaccatcgccggtgctgattttccaaaggtgttcaatgacccgaaagaacagatattttcaggtcaatggttaaaggcagtagttgaacaattgtcctgtattcaggggccagctctggtattaactgccagccattatgaaacccggatgattgccaatcagctgggtgaggtctcgcaaccagtttatattcagaaagcaggtcaggccctgtccggaattattaaacagtatcaggagaaaccagggattcttatttctgccggtgcttctgttggtgtgagcccacgaggcgagaatggggaacagattttccaggatttaatcatcacccgaatacctttcttaccacctgacagaatgaaggctgaaagcctttatgggtatctgcaggaacgaggctatagtcgtacctttgaggcagttaaccgtaacatctacctggaaaatttgcggaaagttattcgtaaagcaaagcagtctgtagggcgggggattcgtagtgaaaatgataccgtcaggataattatcctcgatccgcgtttcccggaaccgactgacctttcgtctaaacatcggtcgcttgaacacattattcccgttcgatttcgtcgtgaatatcgttcgtgtgaaattttatctccggcgtattgtgaagaggatatccagtgttaa

SEQ ID NO: 185830 - DNA, 567 bp, Klebsiella oxytoca
atgattttctacgataatgcgtttcggttgcgtatccctcacacaagtgtttaccggatccaccagcacctggattttttcatgcaggaacgtaagggagagaagctgccgtactcttttaaaatttttcccggtaccgggaatgattcgttactcctggtccgcacagccacagctctggagctgccaggggagaaaaaaagagagcttattctctctgagggcgatgaaattaagttcattacgtcaatggccatctttcataaaggaacaaagtcagaaggccatggccgacgccagtttgctccatctaatgaagcgagttatcagatggccctcaccaaattagcgaaggctggtcttgactcccgtcaaatcgtcgtgagtggcccggaattcgtccatatcgacaagggcaatgctcgccgtggttttatgcttcctgtcttcactgttcaggggaccgccattatcagcaatcaacaggaagctgaaatggccatcgtttatggcgtcggccctaaacgcgtttttggttgtggtttcatgcatctggcaggggagtag

SEQ ID NO: 185831 - DNA, 159 bp, Klebsiella oxytoca
atggttctttttttaaattatcttacaaagaacatgcgaagattttttgatattgttctgggtaaagacccacatcgctttatcgtggtgttaatcctgagccttacactcgcctttgtttataatttactcataagatataatgcaccgctggattag

SEQ ID NO: 185832 - DNA, 768 bp, Klebsiella oxytoca
atgagccacgaaagtaacaaagccctactcaatatagagacccacactcttccggatgattatcccttttcagtcgatgaactggaccggatcatcgctggcgaagtggtttcaccccatcaggcagcaataatggcccgagagttaaaaaaacgacgtcaggccgaaacttctacgccagttgaggatgattacctggcgaacatgctctggtatgcggaagaatcggtttgtcaccccgacccaaattatcaatgcgagtttggccgtctggctgcgcctggtgttattgccgccgttatccgcgaactcctgcagcatcgcgggtttgcgaaaaataataggccggtggtatacacatcccgcactgagcttcagtgcgaagatggttttggggaaatctggcctgaacccatattagacggttctgatatagcactctatctctatgcctctccatctcctgaacgcgaccagatccgccgtgaccacgccgagtggtctcaggatacattcggcgatgttggcccgactggcccgctgaagcatctcagtctcgaggcgctggaaaccgcagaagcgcccggtaactatgctgaatgggctgatatgcaatttttactctgggatgcccaacgccgcgccggtatcactgacgagcagattacccgggcgatgatcgaaaagctgaaagtgtacaaatcccggaactggcctgaccctgaagatggagaaccacgctttcatattcacacaccggcggaatag

SEQ ID NO: 185833 - DNA, 525 bp, Klebsiella oxytoca
atgaaacagaatttaaatcacctgaaaccgggtctctatgctgtctggtatttcgattgctgggatgttgatggtgatctgtatcataccctcgcgacccaggacgccaaccaactctggcgtgaagagggaacaggcctcgatatgttgcgacaccaaggcgatacacttttaaaagcttgggcgctggatgatgcctcaaatctgctggcacagagcaacaataacctccagctcacccagcaaagtctaaaaccgggcctctatgcaatccactatttcgacaacggggatcctggcaacgaaccgacgcatatcctcgtgacactggatgataatcagaaatggtacaaccatgaaaatggacgggtaatgtttatgtctgaaggcgatatggtgttaaaagcctgggcactggatgatgcctcaaatctgctggctaaggcggttgaccccagccagctggtggacatcattcaaaaaaatgagattcaacaacgctttctagcagacctggatatttaa

SEQ ID NO: 185834 - DNA, 288 bp, Klebsiella oxytoca
atggaccaggatgacgttttatcaaaaatatccagtgaaaatacgacagcacatgagctgttaagcgaagctatgccaaacgcagcctcacgattctaccggaccgcaaaaaacctctcccgacttctggacgaggtccgcgagcacttcccggatgcttcgtattatgcggcgtctggaagtttatgcctgttgcttggggaaagtcataataaacatgaccagccgcagcaggagttactagctcatgcggcaccggacctaagagtggagggcggagactggtaa

SEQ ID NO: 185835 - DNA, 207 bp, Klebsiella oxytoca; identical to SEQ ID NO: 95455

SEQ ID NO: 185836 - DNA, 198 bp, Klebsiella oxytoca
atgatgccctccatcgaagaaatgggcaagcgagcagcactgctaaaatggaagcgccagtttgggccattcgaaaaatgccctgagtgttacggccttctatccggttgtatgttatgcggtggtaacggcagggtgattcaggaagatattgatgcctggaataaccctatttcgaagatgaggcgacagatatga

SEQ ID NO: 185837 - DNA, 336 bp, Klebsiella oxytoca
atgagtaatgtatctgtaccaaaaatacctctatcaaattttgagtgcgttcattgcggtcgcatttatcatgacgcagacgtttgttcttcagacgattgcccaggtaatgacatagctatgccagaacttctgaaccactggacagtggatgaagtagctgaatgtctcgatggggtggggaaagaactttacagaaaattatggtcatatatagaagcaaaaactgatggcgaagcgcctctggctaaagttgcctggggggatttaacccgcgagcaaaaggttgagctggttcgtgctgtccagcaagagtttcccgacgacgaaaattaa

SEQ ID NO: 185838 - DNA, 810 bp, Klebsiella oxytoca
atgatcagcaaattaaccagactgactgacgaagaactggctgaactcgcgttttatgctggcgagtcaacgagtcactcagacccgaattacctgcttagttttgaaagcctggcaaccggtagttctgtcctcagtatcgtgatcgaactacaggaacgccgcaaggccgacagcgagccggtggctacactggacgtgcaaagcgggaggccggacggtcataagttctcactggcttattcatctgtggcacataagttgccggatgacgtctatttcctctatcgccacgcgcagcaagcgccagtagtgccggatgatgttcgccaagccctctgcaaaatggacgatgaaattattgccgagctggacgctgaagaaagcgcccgtcgcgccgccatgctcaacggaggaatgaaaaccatcgaaccaaccccgacagcggcgctggatgatctgctgagtatggcggcatcagcgatagaagacctgttggagcataccgatcctaacactaattattattctggcgtgtgggctgatatgcctagcaaattgcgcggcgccatgcttcaggctagcaactgtcggggaaactcgaattcgtcaaccatgcgctctcgtgagcacttcatctccctatgcaatgagttctggaactggtcagaaatggacctgatttgcgctgatgagaaaggttacgagccaacaatggaatggaatggcaccgagttcacccatcgcgtaacgcaggctctgtggcgcatgtaccaagtcgttcctaccggtatcccaattatttcataa

SEQ ID NO: 185839 - DNA, 228 bp, Klebsiella oxytoca
atgaccagcaaaacacaaatgaagttggcaaaccgcgcatggcgcaccgagacgaaatccctgggctggcatcggggatggaagactggccgtaagggatggaaagcattttgccgtgagaatgcggcaattacggtcgaggaacacttgaaaactgatccgccttttactgaccaggcggaagctaactggcacgtagctgaagaattgacctactggacgaattaa

SEQ ID NO: 185840 - DNA, 288 bp, Klebsiella oxytoca
atggtcaacctccagcttgctgttaagggtgagtatttcgacgcgatgaagcgaggcgagaaaactgaagagtttcgcctggttaatccgtattggggccgtcgcatctttgggcgcgactatgatcgcctgattattacgcgaggataccccaaaaaggacgataccagccgccgcattgatatcccgtatgacggatttgaaataaaaaccattactcacaaacagttcggcgaccaccctgtgaaagtattcgccatcaaggtgaatataggaagtgacaactaa

SEQ ID NO: 185841 - DNA, 183 bp, Klebsiella oxytoca
atgaaaatcaacgtaactcccgcccagcttgaggccatcaaacaacttactgatgattgtgattcgatgattggcagcggagataatgaagttgataaggtctggtcgcgccacataaaactgattgaccgaatgctagaaagtaacggtcactcccgtaattataaagtgggggatgaatag

SEQ ID NO: 185842 - DNA, 522 bp, Klebsiella oxytoca
atggcgataaaaaacagaatacgtgaagctgaaatattccgtgcccgtacgggtgagtacccaattgatatgtacatccagtggattaaaagcggagcgctgaattttggtgctgaatatcagcgggactatgtctggggccatcaagaacaacaaaattttttgcgggtactcatttcagggtttccggttggtagtgtagcgctggcaaaagcgccagactggggtgttagcgacggcccttacatagaggtggtcgacggaaaacagcggctcacaacgttaaaaatgttcataaagaatgaaatccccatcattattgatggaaaagaaatattctggtttgaattgagcaggagtgagcaactgacttttggccgaccaacactaagcgctgtaattcttgacgacgcgactgaaaaagaccggctcgcgtatttcgtcgctgtcaattttaccggtgtccctcaaagcgaagagcaccgcctaaaagttctgaaattgcaggagcgtgcagcatga

SEQ ID NO: 185843 - DNA, 504 bp, Klebsiella oxytoca
atgaaagaccatgaaattcgaacactggtgaacaagttgcatgagattgctatccagtttcacggctcccagcagttaagagagcagatagctcatacagttagctccgaaattaccagacaggagaacgatatagggtctaacgaaccaatgttctacgtgaaaggtgatgcagcaatccgtttgctaaaaggtgaaagtcgctatgcgataatcactacagaaccaaagccaggagacgtattacccctatatatcagacagcaatcagcgcagaccgcaagagcgccaaaaggtaaaagacttcgtatcgctgaagaccggtacgcagcatatttcccacaggaaagaccgcttgacggggcgcgtctcatcgcctgggatgaaaacgggaacctgttaggaatcggtttcggccgctatacgcgagaatctgggatagtgatagtcgttggcggccgagaatacgattcgaatcacgtcatacattgggattgccagtag

SEQ ID NO: 185844 - DNA, 216 bp, Klebsiella oxytoca
atgaatgatcccaccatagtcaaagaatatcgaaaagcaaagttacgtgctgctactagtgcaattgagatagccatcattgcaatggaagatttgattaacgactacgatcgcgaaaatacccattttagcggggggcatcccagacagggccatgcaagtacgttgcggcagatgcagcaaattaataaggcattgaagcgggggcgagtatga

SEQ ID NO: 185845 - DNA, 645 bp, Klebsiella oxytoca
atgacaacagaaaccttaagcagagagtggttacagcatcaaatttcagcgattgaaggcgctggcatcactgacagcaacacattggcagctttcaagctggcgctggccgcgatgagtagcaagccggtagtgccggatgaggtcgagcgtgttgccgctgtattagagcttatcggtagctttgaggctaatgatattgatagcgacacagtagatttacgttttgaggtcgctgatgtcgacgcaggttctgacgtatccattacggaatatgccgcacgcggtgccgcgatgatccgcatgctggcgggcaatgcacctgtaaacccagacggttgcattctagaagcgctggagaacatacaaaacgaaaataaagtttcacgtgaccagttagtcattctccagctaacgctattaaagcagcagagaaagattgcagagttggagtcccgcaccgtgaagctgccgaaacctaaagattctgacccgggctggaaaatagatccggaatttatcagcaaagttcagaacgagatagggtacgatgaccaatgcgaatgttgggaaggtaccccttccatggaggtagtagaggccgttttgctggccgccgctggtgtcaagatggaggctgaatag

SEQ ID NO: 185846 - DNA, 498 bp, Klebsiella oxytoca
atgaaattatccaaattctttgagctgataactgcaatatgggcaaacagactcaaccagcgccgcgatcctgaagtcacgatcatcatccactctccgggaagtgtcggagttacaccagcagtagaagttgagtccatcgaggccgggttcgactggaatgccggtcaggtgttgatttacccggcacagccattgaccacgcttacgccataccaggtagcagacattaccaccagcgtgcgcaaaggccagtcctggcatgcctatgaggcttacaagaagcataaagccgaaatggataccgccgcgattgagtattcgaaagtagcaggacagcgtgatgaattattgacagcccttgaagcactttctgatgcttgtgacactggcgaacgtgaccgggatggaaagcaaataggagtagttattcctgacaaacatgctgtatgggctgcgcgtgaagccatcgcccgcgtcaaaggtggtatagtatga

SEQ ID NO: 185847 - DNA, 219 bp, Klebsiella oxytoca
atggccactcacattcgtaattttggctggaaccgggtaaagctttcgacgctcacatacgaccagttagaacaactaaaaaagaaagttgaagaagaacacgcctgtaataatgggatcttcctttatgacaaggctgggttgaaaaaactggatgctttgagctgggctgtatatcacaaaatgaaagcagacaaaaagtccggccaggtcagttga

SEQ ID NO: 185848 - DNA, 252 bp, Klebsiella oxytoca
atgtttaaccaaactgaaaagtctattgcccagattgcggaatatattccccgtgcctgtcgtgatatgaagttaatagaagccaaggcccggcttgcaacaaaaatcgcgctttatattactgatggcagtgatgccgaggtgcttaatgcaaccttcgctcgtgcacttaacagccacacccgggaggcgttcttttctaacgtatctgcatctatttattataaggatccatcattacaatcaaagtaa

SEQ ID NO: 185849 - DNA, 315 bp, Klebsiella oxytoca
atgggtatagcaaatggatgtagttcagtacagcaagatgttcctgcaaccgataatgacgttcgacatgaagtaattgtcaccggctgtgtgacaaaatacggaagagggattcatttctgtaataatgagctcctaagtggtgctaatcataatctctggttcccgttgagcactgaggaagactggttttccggcattgagcgtgtgctgatgatgaatggtctggcggagaatgtcgtcaaactcagtcctcttaatgacggggaagattatcacgactggaaagtgacgtataaccgccggaacgtctga

SEQ ID NO: 185850 - DNA, 321 bp, Klebsiella oxytoca
atggctattgtaattaaagaaagttataccaccgctgtgatcagcacagctcacattgctaaagatgacgtcgagttattaactgatgccagttataatcctcgttctgagagtggtcgtaactggattcacgcaaatgagtatggctacattattcggataacttgtgaaaatcccggatggaaacaacttttacgtgatgatggtatatcctggcctacaatcgaaaatatcgaaaaagtaattgccgctgggtacgaatgtgtacattttgatcgtgacgcagatattgtggatgaacttaatacgtgggagtggtaa

SEQ ID NO: 185851 - DNA, 870 bp, Klebsiella oxytoca
atgtccatcgaaaatacattgattgatgaattaaacacatcagagaacacaggagatattattccctctgtacctattgatttaatcattgctcaacgtactgctggcattgcggcgtttatggaaggtttagagaaactcagagaagcagaaatgttgtttgcagctgctgctgaaacggattggttctcagggctggatgagattgtggcgtcaggtaggcgttgccgtaaagaaaatgaaatagaggctttacgacgccgggtggctcgttgtgttgatagcagtatctggacacgcctgatgacccagacagggatgtttacgtttatgagtagtgagcaacatgacaaatggactgaccaggtatacggcgaagaatgcccggaagtgactctggacaatgtcatcagtacgtttcagcatcttcatgcctcaaagaatgaaacgtttgttactggtattattgatgttttccgtaagctgtcctgggactataaaacaaataatccttgccgtctgggcaagaaaattatcctcgaaggtgttttatccataaatgtctctcgaacccgatacgcttcggtcaggactaatgcgcagaactggattaacgatctcgctcgtgctttctgcctcatcgacaagaaaaacgtgccagattcacggatagcagaagggagccagtacagggattttatcaacttaaacagttatacgttaaacggtgtgtttacctgtgagtggttcactattaaatctttctggaaaggttccgctcatgtgacgtttactcgtccagacctcgttgacaaaattaatgatattgtggctactcgataccctgatgctttaccatccagggtctga

SEQ ID NO: 185852 - DNA, 582 bp, Klebsiella oxytoca
atgtatctgcatcttgttccaacgctataccacaccatttcaaataaatgtcgacttgagtcagtgacgatcccggaactggagtttgagattaaaggtgatgccctttcatgcggaagaccgtttcctaataaacggcttactgtgggtatgcataaaaatcgtaaagccatggttggcttacttcttgagtatgaaaagaaagtaagtcattttacaacgcaatataaatggtacataggagagattggttttgttcagcacaatattaaaactatagtgatggattctgaatttgaccttatttcacaatatataggcttaaatattggtcttgatgaatttaaaccaaggctccatccttcttatcacaaagtcgcgccggttaaaatacaaccaatgatggaatcatatcgaaccggcgaagcggttaatactttgcagcatgatgtatgggagaataatgttttattgtccagaacggaaacattgctcttgaatactttggagtctgacaggctttccagatatagttttttaaccgacaggcttccccagccagactctgcaatttgcatttga

SEQ ID NO: 185853 - DNA, 294 bp, Klebsiella oxytoca
atgtgtgacagaacggtttttttgaatttcctatcgcaagatacgaccccttttattactgaggttgaaatgcttattggtggagttccacgactcatgtatccagatggcacggaacagtttgcggatgatgaaaccgatacactcctgatttactcccctcgactgactgaaaatgaacttgaagctttttgcgaattgaacattgagcattaccggacttttcacgatgccaatgtaaagcaactgatcaggggagaccgcgtaccattaaccccgttctgggctgaataa

SEQ ID NO: 185854 - DNA, 582 bp, Klebsiella oxytoca
atggtacacacaggaataaccgatcacgccagactcagacttatgcagcgatctagacttcctctgcatgtgctcactgatatgatcgacaaaagggaatatgttgatttgggttcgaaacccgggatattaaaagaacacattctgatttatagtcgactggatgagaggtggtacgttctaatcagggacataacatcaggatgtatcgttacggtgttaccagaaaacttccatgattcttcatttataaaaattaaagaatcagataagaaatctgcatatgatttagcaaataaagtcagggctcctcgttctgaatttattagtataaatctatgttataatgatttcgatggttatcgacattcaaagaagatttattcgataccactttcacaaattgatgtatcgcaagatacatttttaaagtccaaatttatcaaactgcttaaaagacagattagggaaaacattgcacgagggctttcatttgatgaacagatgattgagcctggttatacaccgctcttcctgaacgtaaagttcagcccggatacgtacaaaatactctatttttga

SEQ ID NO: 185855 - DNA, 480 bp, Klebsiella oxytoca
atgagtaacatgaccgtgtcgttttacagcaaaaagcatcatgacaccgtagcaagcgctattaaggcccgtgcaacatcatcaattgagctgctctgttctcctacgctgaatcagcttctggatctgacaaattcaatctgccagtgcgcaggtattgaaaatcaggttggcatttttgttgccgactcagacactgacgaatccgctcccggtgaacaggtatctaataaccatgctgtctggctatataaccagaaacggcatagtgctgcccgtgatgcgatagtgaagaaagacattacggaagttaagattgatgagccgctgacgcttaatgagcttatggcgatcatcgatgtggtcagctgttgtgcaggtattgatgatgacgtagtcggtattgccgagccgatgatgacggttattggtactggacattccgggcaatctacagctcaggaattgatgctgcattaa

SEQ ID NO: 185856 - DNA, 204 bp, Klebsiella oxytoca
atgaaaaacattaaacgcgaagcattactggtacccatcatcgggttgttgatcctctcctatcacatgggttatttcctttccgactggccattctggcaggtatacgcgatcctggcgctggcctactttgctggccgttttggactgaaaaaaagggcgtcgaaagaggaacctgaggaaggcaaaacagccggccagtaa

SEQ ID NO: 185857 - DNA, 531 bp, Klebsiella oxytoca
atgaaaacctctattccaccgattctgtatggaagaaatatatccgatatttcggagaagcattttgccccatggttttgtcatgacgatcaatacccttctttggtactggcttcaacgaaaatagttccggagtcgccttccctggactggtttcttggcgaagaacaatgcggagggcacagttgtaaccagtttccggcagcggtattaccattgcagatcatgcctcaaaaacatgggacgctggagctcattgccgatgaggaatttgagccacgctcgctcgattattttaacagcgcatgcgacgaggaacagaagcgagtacggctgaattatcagtcattcgtaatttctcacggtttaacctgctcggatgaaaatgctctcctgctgacacagacgctataccccctggatgcgactgatgccaatctcagggccttaaccacagaacagatcaatctcagaagcctgaatgtcgccactgggctggtcctttttgtagtgggggtgaactgcgactag

SEQ ID NO: 185858 - DNA, 345 bp, Klebsiella oxytoca
atgattaatatgaaacattttccacttaaggatatccttgttgtggggactcctgttctgttgtttatgactttgctgtactcgcttaaaagtcactttccggacgtagtcaatgttataggtacattagtcgtttttattcttgcaccagctctggttgctctgttgaccatgagccggggagttttcatgttctttgccggagcgctcgttacacaggcattaacagcttttctggtttatcttgtttcaacccgagatattagcgcatcggtaggatttggcgcatgtgctatcgtgatttacgtgatttgtttatcgaaatatgaagatccctgctcataa

SEQ ID NO: 185859 - DNA, 1089 bp, Klebsiella oxytoca
atgactgtgaacaagaaaacggatgtaattaacaatgaaatcaaagaacaagcagcattctcattcgatgtcgtaggtggcacgggcaaagttactaactttacccctggtaacaatggtaccgttcaacctgttgctttgttgcggcttggggtatttgtaccagcccctccgggagtagcaaagaaaagtctcccggaaggggttgttacgatggatgtgtcccgcgatttacagcatatgcagatcgcatcaagtgaaggatacaaagaaatatcgctatccagcccccgtctggacatggggacagatttccgtgtatggcttggtatagtccgttcaatacatgaccacggccattactcaggaaggattaagcttcctttcagcaccttccttaaaaattgtgggtttgacccctcaaggtcgaataagcccatgaaacaacgtatcgatgcttcgatgattaaactgaaaatggtcacttttcagtttagaaatgaagattcaaccctcactaccggtctcattaactgggcacggtacaacttaaaaaccaatgagattgagatagagggagatcctcggattcaggagctctatcagattgactataaggtatatctgcgccttaaggcccttgataatctgcaaaggaaagaaagcgcgcaggccttgtatacataccttgccagcttacccaaagatcctgcaccgatctcgatgaaacgttttcgcgaccgtttacggctaacgtcaccagtagcctctcagaacatgatcattcgccggtcgttgaaggagcttgagcaaatcgggtacttgcaatacagagaagagaagattggtcggtcaataaagttccacatacttaaacgtagcccctctttgggtgccaaaaagagcatcctggtcccggctgaacaaaacccagcagctgacgatgcactgatacataaacttaaaatgctgaaggccgcaggttactcagaaacggagattgctggcgttctggatgctctcgataagttgcagagggaaggaaaggcggctcccgaagtcgaggatgctgattttgaggagctttaa

SEQ ID NO: 185860 - DNA, 1434 bp, Klebsiella oxytoca
atgaataaaataaaaatcacaattccattactttttgtagtaattgttaccggctgtgcagaaacacaagagccagggatagtagcgcaagagtgggcaaaaaataccaggcagttaaacatatttcctttgttccctcctagggagagattttatcccggagatgtatatatattcccatttatttctcccaaaatggtagataaagttccaacgaaattttacacaataaaaccgataagattcacaagatttgatgtttctgacctactggaacaagaacaagctattccaacgatgccagaaacaaaggaatgggaaaccctgggcaatgctcagtcacgaataggcgcttttgtaagttacccctcagccgaatcccgacagaatggtataatagcatttcctggctactcatttgcttcagtgagtgatgtgagtctaggtcttggaactgtgaccagtgcgatcgcacaaaaactatcatttgctagtagctctaggcgaaacataactttcagcattccatatgctgaagttatcagtcttgattttagctcttctatggataaatttttattgtacaaatcaactgtggatggatatgagacgtctaaattgcagtatctgaagaagagaatggagttactgatcgataatttacttgatggtgcgaataataagtatggcattactccaggtattgtttttgtaaccgatgtgtattatgcaagatcaataaatgtcacaatcacatcagccgacggttttagtgcttcagaatcggcatcgctggcaaaatttatcgcattatcctcacgcagagaagcattagtcacgaaattaaatgcaatatcagaacaaaatagaagtttattagcaaaaccgggaaataaagaagaatcaaatggcgagccatcaacacctgatcaaaatgccacaggagtaacacctccagaaaagacaaattcgacaccagaaatggattctttggcgagcgaaataaatgcactggacttacagcttaaaatactctcgcaatccgtagctccagataccttaggatttactggtaatgttacgagagtttctggaaatagtcttacaataaaccaggtatttaaatatcctgtcgccattggctataacggcataactatgcctgtacaagattttatagagatgaatgtaaaggttacaccaccgtcaaaaactaaatttcaagccgaaaatcaggataatggaataaagcaaccagttaataagacagtatccaaaaaaccaattaaaacaatagataaagccccgtcacaagggaaaccagttgctgattggcccaataaaccaagtagccttattggagagcctgctttgcatcaaatgacctctgggctagagatagattttgaagatagtaatgatgcaaaaaaataa

SEQ ID NO: 185861 - DNA, 3381 bp, Klebsiella oxytoca
atgcctgacattatcccgcaccaacaacagccggaacgtcttcataaatttcactccctcaagggagggcaatactggcgtgcaaaaaacgcgattcctgaacaatgtattgaacaggatgaagtgttgctgattgagtcgctccgctgggttgataatgcactccatacagtgatcctccgcacccatccgtcaaaattcggcaaagactttgttttcaaatttaccgatgctgctggccgtagctgcagcaccacgaaatcgtttaaagagcatcgatttctgtttaacgactttctggacaaatttgaatttgcagatgatgggcaggatatccggagccaggaactgcttgcagctcaaaaccgggttagccagctgactcagcaaatgaccgaaactatgtctgatcctgatgctctgcgtacggaactcctcggcagggttgaagcaaagaaagccagttcatcgacgtcaggcgatgacaaaaagcaacttcctatggttatggggctgtcttcatcaactgacatagcgtctcttggcacagctctgtcatcaggtatcgatgaagccaaaatagcacagctccagcaggctgttgagttcagacatgaaatcgcacaggcgcaaatcgactggattaaagaaaagaattatgcgatttcgagagccgtcatggctattacaccctatctggaagagtcggccgccgcccaacttgccattgccgaagaaagtcgtgaaacgctgaataaactgatggacggtataaagtcccttgacctctacatcgggaaagatgtggtggtgaacactatcagggagggtgaatcagcaccgccacacattcccttgacgttcgtacagcgtaagctggccgtcgatgaggaaacggctgtttttctcgatataggagaatggtttgattttgaaaagttgccactttttttccatgcattaaacaaccatccagggctggtggagcagatcttcccgtcacagcgctgcgtggtatgtatgaccactacccgtcgctatattgattatcaggaccgttgggctaactgggagctcaatgcaaaaaaccagacggtctttctgatggttcgggacggcgaacggctgttccaggtttactctggagtagagtctcacctcggcgctcatacacttttcccaaccaccgatgaacagggaaatatctttcgaggcattgacggttcgcaggttacgttcaatgacgtgtcatacaccgacaagcttaaagcccatgagatggttgctctgcattattaccggtttcttatcctgtgctgcgggctcgaccaccggctaaagctgtttggtgagttctacgaccctcaggaccgcttaagtttcgtctctatggcgttccaggagaagtattgtcgattcatttatgatcatgatggtactggccttctggacgatcctgatgcgaaagtgcgcccctctattgaggagtatataacccaggccaatagccatttgcgctcaggttcaagggtgttctgcgagtggagagctgtttgtacaccaaataccgcgccgggcgttgtgaaagtcgatactggtaccagttaccgatcctattattttaccgccgatttcatcaatgatgagggaatggcggtggcctttacccgcaacaatgagatttgcgtggaggttccggtcaaaaaagatatctaccgtcgcactcgggctaatgatgtacgtgaatttaatgcgaaagtatccctcacgaattttcagcgtgatccgtgggatgacgccagcagcgtgggattcctctgtctggacgctgtaaaagccgatgatcttgattattacatccacagccgctccagtcgtaggaattttatgtactacataaagctcttcaaacgcctttcagctgtcctgagaacggaagaagagcaggagatgccctatcggcaaaagctcatcagagcgctggtggatggcaatataggcactaaagctaaccgtgctgaaatcgtcgacaagacagtcatcacctggcgggcggacaaaaaaggtcagccgcttagtgaaggaatagacaacgagaaaagctggaaagcattacttggcatgatggacctgatcgcctggcgcggtttgagccataaagaggctgcagtggagatggctatctcccggggtagcaaaccgttacgtcttatagtcacgacaaatgccagactggctctgtatgttacccctacagccgaggaacgtgacgatcgcgcggaaaaacataagtgggccatgctcctgacctttaaaatgtcagcaaaagggctgactcttgattccagcaaacctgcgttgctaagcaaaaatagtgtttgcgaaacaaccatctatgaatggccggaggccaatgagtggaaagggttgaaatcagtgttctccagctttcacgaaaagcaaagagcgtttgaatatattgagacaggcaaagaggacctccgaaaactgtctccagctaacccctcagaatttgaggctggggtaggtgaatggatgacggcctactgcgaaatgaatgattaccgcaaaaccgggggccaggtgcagcagccgagattgatgataccggtaggcatctacattaaccggggagactggcagtatatttacgtcactacagagagtgaggccgctgggtatttttatcacaacagcagcgaacgcctgaaaaaggaactttttcaggaatatgtttcacgctttgctcacccggaaggtaagctcgaacggcttgaaacccgggggaaccagttggcattgggcatgacgaacaaaactcccgacatcggaatattctgtgcagatcgcaatgttgaaatggataacgtgaattatggacctttatcttacagcgcctacagtcagcttcagcgaattgaaaaccgattgatttttgtcctcgctgaagcggaacgcgggttacatcacaggatttatattgccgataaccttaaaagcgacaatggtgagttcatcatagatgaactccttggttcctcacatctacaggtacagtctgccgttgatgtattcgaagtcattttacctaagtcgttgtcagaaggcccgctgccggtaatgaaatcgagtggtgaaatctaccgtattcaccactggtttgatatctgcccaaaaggcgctgacgctaatgtttcattgagcaatatcgaggcaccagtaagtaaggttaccagacacagtttcgatagcagggaagcggcaattatgcatatcctgatgcagaaagaaacggttaggaaaagtatctccggagacagattcaacacgccagaaggcgtagacgaaaggtggtattag

SEQ ID NO: 185862 - DNA, 483 bp, Klebsiella oxytoca
atggtgccttttaatcctgttaatttgcttcaaattatgtcatctcacaagatggagacagatgatgttgcgctaatcgccggtaccgattctcttgcagtggagtcctggttcaaggatggggtcgccagtgagacagcactgcacaacatcacatgtgcggtcggggtatcgatggaatggattcggggctttgtctccggtaaggacgaaacccttaaggcaaacagtgaaggcctgacgaaagaattgcagaatcttccccctgaagaaatcgccgttctggcaaaaagcttcagtttgcgtttgaaagaaatcagcgaagccgggtcgttcggctcacttaatgaggtttacaatagtgataccgaagagctcctagctatttatcggctaatgactgaaacagaaagacaaaatctatatcgtgtggtttgtttgagacacaaagaactagcacgactttacgaaaaatatatttaa

SEQ ID NO: 185863 - DNA, 318 bp, Klebsiella oxytoca
atgcaccatgtagctgatcgtcctgaggaagaagtccgggctatcgagttgtatacattgttgggccgggaaggcgtgcaggtacgtctgaataatatctctgttaaggcaacatctcgttgggagcaggcaatacctttgcctcctgattatacggggacacccattgattttctgacggatgctgaacgcgaagaaaggcatcttctgttaatcggacagatgctctgcattgatgagcaagcagaggcccgcgatcgtataaaacagcgtttagccagtcgtaggaagggtagcagccagcagaatgctgactga

SEQ ID NO: 185864 - DNA, 447 bp, Klebsiella oxytoca
atgagtgttaattcaagcattaatgaggggaaaaacactgcttccctttcagtgtcagttaccacattggaggagtatgaagaaattcgtgatatgatacgtgacatccgcttctatagagccgtagccggttcggaaaaatttagtgatctctatactgattttgagaataacattgatgccgtgctctcgaaatttgaagaaaaaaaccctcatcttattactgcggcccatgaactcaagctgaacaatgcaaaaaaagaaagtgctaaaaacttcataccgatggttttactttttaattttgctgccgtaatctttcttttcgcaatggagtatatgaacacacccagtaaaatagcaggcttggtagtcttgttgggtatattcgtttcaatctttcgctgttatgccaatgttaaagagattaaaaaccaaaataaataa

SEQ ID NO: 185865 - DNA, 156 bp, Klebsiella oxytoca
atggaacttgaagttaacaaaagctggcagacccgttctcgtggtgataacgacagcgaatatcagatttacctagcctgtgcagataatggtaagggtattgacgtaaccaccggtaaaccgctaaaaacgtacgatgaatggtgtaacagctga

SEQ ID NO: 185866 - DNA, 579 bp, Klebsiella oxytoca
atgccatctcagatcccccttgacccaaaactcccggccaattttgatgacacccctaatagtgaacgaagcaaaaaacagctggatgaatggtgggaccatccttatgggatcactaaaccagacggttcaattacggtcaggtgtctcaacggcggagcgtgggaccgctcatcggtgcttggaaatgcaagtagttacgaagaggcttgtgtcctggctcacgacgcccaggcaaaatgggtcaatacccgtcagaaacctatcttcatgtactctaacgaaccgcctttcaggctagtggttcagtcccagcgaccggactacgaagaaagaatcattggtgagttcaatactattgatgaaatgaatttgttcttgttaaagcaacaaccccccgaactacttaaactacctccgaccatcgacacaaaactcattggtcttgaggacttggcctggtatgggaacgagcttgatctggctgcatccagacttaaagctgagcttatggccatttctgttttgcgtgaggaggtcagtatggccgttcggaggaaaaaaggagacgccagttag

SEQ ID NO: 185867 - DNA, 462 bp, Klebsiella oxytoca
atgttatttgaaaatagcattaaaaaacaaataaaggcaaaaagaaagaaggccaataaaatttattggacgtgccattacatcgaaaagaaatatccacgccctatttttatagcccttctttggttagctagtcctttaatggcatatattaagctattcccgcaaacttcaactttaactgcattgctgatatacggatttgggattataataataatctctgtatggttctatttggatcttcctaaaagctggattgattcacttgaccgtcaaattttgaagtaccgatcagatacgtcattcattggtgagctcgaaaatgtgcacactgaagactttattgaccatggcaagataatagtaccaattctcgacattaaatattgggctattaaccaagaattccaactgattagactgcttaggaaagaaattagcgtcaaaatcaaaaagtag

SEQ ID NO: 185868 - DNA, 402 bp, Klebsiella oxytoca
atgaaagaacattaccttgaaggtaataatatatcgatggtggttgaggtctgcatctttctttttctcatcggtgttatatgtattttatcggtttttcttctatatcgtaaaattaaaatgcgtgtgaatgttgattatcttctggcttttggagtaattattgctctagcttcaattgtctcagctgtcatgttcacaagccgctcattaacgatggaggacctagagctcggaagacactggaagcaagactgtaaattactggaagtaaatattccaactggtacgtttaccgacccagtcaatagactaggttgttctgacgttatcgttaatgttcctacaaaccagtatgatgagtatatcagacagtgggatttgtataaggctaaaaactaa

SEQ ID NO: 185869 - DNA, 786 bp, Klebsiella oxytoca
atgtgtatttcaatgtctggagagcgcgtacctaacgtccttccgacttctttggttaaaggagcctgcatgaattgttctacccacaaagccataccgctgaccttttcttctgaagaaatagtctgcctccagaacggacataaaacgcagttccgtcgcgcagtgaaaggtcgcactgctttctcaaagagtctaaccacctcggagacatcaggacatgcaataccggtattaaaatgtccgtatggtcagcccggggacagaatctggatcagagaaacagcaagagtggagtggcagcaggtacaggagtccccgttaaaggtgcagactggtgtacgttaccgggttaataacgagtatcgggaatggaccagcgatacgcattgcagtttgttccctacaaaacgtctaacatcacaaggcgttcctgcatgggcaacaccggtaagcatgccacgatgggcgagtcggtttttactcgaggtttccgactcccgcctggagaagctctgtgacatctctgaaactgatgcttattgtgaaggattgctcacagaagtgtgggaccaggtggttgttgccagaaattaccgtactccagatgcgttctttcagtactggtctgaagatatggatcactatgttgaaatggatgagctgtaccgtcgttctttccagagtttctgggatcagatatatggctcaggtagttgggtctctaacccgctcgtttgggttgtcacatttaaattactggacttcgataaggggggcgagtga

SEQ ID NO: 185870 - DNA, 417 bp, Klebsiella oxytoca
atgagatcaaaatacgttgtcattagcgcggaacatccgattgccgggaatctgtacctggaaatgatcccggatagcgaggtcgggttttcagatatctatcagataacagacagtctttttcgtgcagacgttctgccctctgactggcgagagcaaaagtggaagtggggtaaggaatttctgggccacggttcatgggatgtgtactacatcaagcagcatgtgaaccggattaactggtttgacaatgacgtcattaaaacaatcgaggccagtaacagcctgtccattaaagagcttattgactgggtttccgaccccggccgttggatagatattgccgtcgaggtggatgattccagcggctccagacctatggccgtagccatggtgaatcaggacacgctcttttag

SEQ ID NO: 185871 - DNA, 678 bp, Klebsiella oxytoca
atgcgctgttccaaaaccagaatcgccctgattgattatgaaaatatcggaagcctagagggtgtttcccttcatgactttgacaaagtgcttttcttcacgggcgctaaacaggaaaacattaaaattcctgttacggccctgagctcgacgatttctgtacgcatcattccggcgactgaggtatccaaaaacaatgtcgatttccatctggttctggaactcggccagctgaccgcgttagccggggatatgtcacacttctctgttatctcccgtgacaagggttatgacggcattatcacccgtctgaatgcagcagggatcagctgtacaaggttctctccagccctgcccgctccgcacccagttaaagacacggcttcaacaatgaatgtgatgaaagccaaagagcatgacatgggctactggattaacagattgaagcttgcctgcgcatcctcccctaaatcgctcccggcaacgccaaaggccttacaaaattacctttcaaatttgacggggcaaaaggcctgttcattgctgaacgaacggattaagcaggagctaattcgtcttggtttcattacgatttacgaaaaaacgctggtctggaatcgctcattacactcaccagcccagaagagcaggcgtgctgttctccagcaggtgaaataa

SEQ ID NO: 185872 - DNA, 2400 bp, Klebsiella oxytoca
atgaaattcaagcttttggcggcactaatactcggcaccctttcattgtccgtccattcccgtgtttatgagtacaccatcaaagatatctacggtgtggagaaatcagtcagcgccgattcagcgaagctgaacaccacggaaaaaatccagcttagcctgatttcagggctggacaggaaaatccgggtgacggtgaaaaaaggcgacgtgaatgtctacagcacgacgacagaaagcgtgaaagttgccgatcgcatcaaatcatcatcagatgaagagttttacgggaaagtgataaccctgcccccgttaagtgatgggctgtataccatcacttcggaaatattgaatacccaggatgcccttattgattcgacaacccagtcattcctgattgatacgtctggccccactgccgataacatgagtattgaccagcgtccgggatatgacatggtccttaccggaaacctctgggagctggggttgggggcagaagcaaaactctatgtcaccgtcaaaaatgtgaaagcgacggccggttttgataaagccactatccagatcctaaatcctgataataccgtctattccaaaatggacatggtttacgacagcggttctgcatcgctttctgttccgtggaccaaggggagcgcggttaaagccgactggatgccggtgtccaatgcggatacagaatatcgctttcgtgtcacgctatacgacaaggccggtacccgaaaagtcctgccggatcagaagttcctctttgactcggatttaggcgaatacacgctagtcgcggtgtatgaccctacagctgaaaccagtgttatacccggattcagtaaaggctatgttgaatataaatcggggatgacggttaatctgaaccccattacatttgtctaccgtgtcccttctacgaaccgcagggagtacagaaaaggcgggctggccttcgggaacataatttctgaggcgaacggctacagctatgtgtcggtcacgaccccttaccagacgctctctgttatccataacggttatcagtgggggggagccagtgttacctacaatattaaaatgggtgcagatgcgccggtaagcccaactactcctgacgtgtggattacctcggacaagaaaagcgcggtaagctcatatgattacatctggaaaacatccgatctccctgtgacatttcttactgcccgcgtgaaagcgtcggcacgaaattacatccaaaaggctatgtctaataccggcgatttcttgtgtgacattcctgtcggcgagctggagtgtgaagggaaaattatagggaatattaaaaaaagtggtaacggccatatggggtttttcttcaagatgaccaacgccgatggctcccttttctcacaatatgctgaaaggcggcaatactggaatgctgaccagttacccagaattactggctatgattaccaggaagacaaaaaaaaggttctgctatttgtgaatctgccggggaacggcagtttacggtacaaattgcagcttaagtctgctgttctgattaatgcagattcaaatgtccaggtgttaaccggtaccaatacagcgattgctggtgatgattacacctacacgtttgatttgggagctctcccggaaggcaaatataacctttccttccttgccaaagacaccttcgataatgaatcgtcttccccgttcatcacgctggtgaacgatatgactcccccggacgtcatatttaattatgaaaatgcccctctcgcttccggttctaccgtgtacgggctggagaacatcgcgatcagcctgaatgacgcgctgacaaagcctgttctcgaacgtcttgagctgaaaggtggccctgcatctgatagcgtgatccttggcttcaaccagaatgccgatggctcctatacgccagattatccccgtctgttccctacccttgacgaaaataccgataaatacaccctgacggcgtatgcaacggataccaaagggaacgccacgcagaaaagcattcagttcgcctactatccgaaaaatctcgtgaccctggaaaaactcaaaacgctgggtgtggtgaaggcgctgaaaaccagtgacaacacaccgctggccgtcatgcgtaccgggcagttgaggcgtaacgatggctccctggttcagggtgtacaaacggccaacatcacgctcaggactgacgctaattatgcgatcaacattctgggtactgtcattcagccgggcgaaaccaaagaaatccagatagacctcggcgctggtgtaaacgccaccgtcccaattttcccggcgacaaacggcgctaccgggcaaagcgatttcatcattgagtttccgcaaattaaatag

SEQ ID NO: 185873 - DNA, 2406 bp, Klebsiella oxytoca
atgaataccaaaataaaactgctgacaacgttaatcctcgcgaccctctccttttcgtcgtattcgcgggtctacgagtacaccattaaggatatatacggcgctgagaaatcagtcagtgcggaaaccggtattcttaacactaacgaaaaaattcagttaagcctgatttccggcctggatcgcaaagtacacgtatctgtccggaagtcaggtacggaggtctacggcacgacaaccgatagcattaaggtaagtgatcgaattaaggcatcaacaggcgaagagttctacgggaaaatcatcacgcttcctcccctgagtgatggtccctatcaggttatctctgaaatacttaacacgcagggcaatcaggtcgactcaaccacgcaggatttcatcatcgatagtgttggcccaacctcggacaatctcagcattattcagaaaccgggttatgaaatggtcactcagggagaacgatgggagctcggactcggggcggaacaaaaattatatgtgaacgtaaataacgttaaggccgcgaccggttttgacaaagcaaccctacaggtcataaatccggacaatagtgtctattcaataacggacatggattatgatagcggatcttcttccttgtcagctccctggacattaggggataggaaaaaagcctcatggatgccgaactcggatgcagacgtagaataccgtttccgcgtgactctttatgataaggcggggtcgcgtaaagtgctgcctgaccagaaatttgttttcgataaccaacttggtgaatttaccctatttgcaatacgcgaccccgaatcacagacaagcgtggtcccggggatcacttcaggttacgtagcgtataaagcaggcatgacggttaatcaaaatccgattacccttgtctaccgtttgccgactaataatgtcaggaaatataacaaagctggcttaagttttggcaccatcatttccgaagccaacggttacgtctatgtggcggcaacaacggcttataacatcagatacgatatacataacggataccagtgggggggagctgcagctacttacaatctgaatcttgggccggataccccagaaagcccggagacgcccactaccgtctggctcactacggataaaaagggggaaataaactcgtttaattatttgtggaaaaccagcgatctcccagttaatttcatttcagcgagagtccgtacctctgcgagaaactatcttcagcgagcgtttacagggaaccaggaaatttgtcagatcccgccaggcgaaattgagtgcagcgggccggtaacatggacaattgccaaaagcggtaatgggagcgtgacctattcatttaaaatgtataatgaggacaagacgttatcttcaataaatcaggaaaggcgtaaccactggaacacaaatcttcttcctaaaatcaccgggtacgactatcaggaagataagaaaaaagttctgttatttgttacgcaacccggtaacggaaactttagggaccaactccagctcaagtccgctgaactgattaattccgataccggcgtccaggtactgaatggaaccaaaattgcgctttcaggcgaagattacacctatacatttgatctgagtaaactggcggaaggaagatacaatttaggcttcttggcaaaagacactttcgaaaatgaggctacatcgccattcatcaccctcgtgcatgacatgacgcctcctgaaatcagcttcaactacgaaaatgccccgctccactccggttccacagtatacgggcttgagaatatcaccattaaccttaacgatgcgctgactaagccaatgcttgaccgccttgaactaaagggtggcccagcatccgatagcgtggtcctcggttttaacctaaatgctgatggcagctacacgcctgattacccacggctgtttcctacactggatacgtcgacggataaatacactctcactgcatatgcgacagatgctaaaggtaattcgtcccaaaaaaccattcagttcgcctacttccctaaaaatcttgttaccctggagaaactgaaaacattaggcgtggttaaagcgcttaaaacgagtgacaacacacctcttgcagtcatgcgtaccggtcagctgcgacgtaacgatggctctcttgcccagggtatacagacggctaatatcacggtcagaagcgatgctgagtatgccatcaacgttcttggaacggtgatccatcccggtgaaaccaaagaaatacagcttgacctcggaactggcgaaaactccacagtaccgatttttccggctattaacgggtctacggggcaaagtaacttcatcatcgagttcccacaacttaactaa

SEQ ID NO: 185874 - DNA, 1026 bp, Klebsiella oxytoca
atggaagagttctttttactgtttgctagagataaaagtggcatgttatacgatacctataatgccaggttaacttctgatattgaattatattgcactcaatgccgaaaccgaattggctataataaaaaccctgcaatcgataacttcaaacaacaaaatttttttaaacacgctgctattgatggcaagcacataagtctatgtgaggatcgataccttaatgaagcaattaaggatattatccacaacatcctatcctctgaagctagcatttatgtaagtccaatttttactccgggtttaattctagcgccggataagatattcgcaccgtttaaagccatgatatcacgtgatgacctcttaggctctcagcgagttgatttcagatggacaagctcaaaaggaaaatgcatgggtttagttttaatagatcacagtgaggtcattgaaaacaaagtatatgatgtttccgactcaaaggctttcatcgcagaaataaacttggctatacttaaaagcaaactacggtcgaagttaaaatcaaacgatggattagagtttggattaatcaataccataaaaagaatcctaataaacaaaaacatatttagccgctgggtcagttgggaaggaaaacaagcgaatttgagaatttcgccagcattttttcgcaccattactccctatgggtatgactgctatctaaacataatttcattggaaggttttttttataatgaaaatgaaggtattgaacgaaatgcaaaatatattctgaagatgacaggcagggaattaaattaccagataaaagagatgatttaccaattcagcctagtgcgcgaaagtttcgcagatacgttctatgttgccatctatgagaaagaaagtgttttgcttgattatgtgcaaaattcagttccagttaatgacaacacattcagtcaaattaaagcagcatgtttaaggctcattcgcatatatgaatctgctatgcgtggtttaagcataattaattag

SEQ ID NO: 185875 - DNA, 723 bp, Klebsiella oxytoca
gtgattcacattcgtaatttacacaagcgcttcggcgacagccacgttctgcgcggcatcagctgcgacattaagccgcaggaagtggtgtgcattatcggcccctccggttccgggaaaagcacctttctgcgctgcatgaacgcgctggaaaccgtcagcgaaggcgtggttgaggtgaacggcttcgctgcccacgatcgcgccaccgatctgaataagatgcgggaaagcgtcggcatggtctttcagcgctttaatctgttcccgcacaaaacggtgctggaaaacctgattatggccccgatgagcctgcgcggcacggcgcgcgcggaggcggtgcgtctggcggaagagctgctggcgaaagtcggactgagcgataagcgcgacgcctggccctccagcctctccggcgggcagcagcagcgggtggccatcgcgcgcgcgctggcgatgaagccgtcgattatgctgtttgatgagcccacttcggcgctcgatcctgagctggtgggcgacgtgctggaggtgatgaaaaacctcgccagcgaagggatgactatggtaatcgtaacccacgagatgggctttgcccgcgaagtggccgaccgggttatctttatcgaccagggcattattcaggaagaggggaaaccggcgcagatctttagcgcgccgactaacccgcgcaccgccgcgtttttaagtaaagtgctgtaa

SEQ ID NO: 185876 - DNA, 474 bp, Klebsiella oxytoca
atgcgttggttcgtttctctgctggtgctgttggcgggcgtcgcctcggccgccgatacgcaaaccttcaccgatgatttgggtcgtacggtgaccgttccgctgcacccgcagcgcattgtgtcgctgcacgatctggatatcaccatcccgctgatcgagcttggcgtcccgccggtggccagccacgggaggacgcgtccggacggcagccactttttacgcgccagcgcacagctgaccggcgttgatttcgataacagcgcgattcggtttatcggcacggcggatatcgatctcgaagcggtggccgccgcgaaaccggacctgattattaccgagcccagccgccacgtttcggtggagcagctggagaagattgcgccaacggtcagcatcgaccacctgcagggcagcggccgcgcatctaccgtaagctggcgcagctcaccggcacccagccgcggctcttaa

SEQ ID NO: 185877 - DNA, 1023 bp, Klebsiella oxytoca
atgagcgcctccgcgctgctgccgccgcgccgacaatcccgcccccggctggcgctggtactgctgagcctgctgctgggcggctcgctggtgcatctcggactcggcgcgcgctggattgcgccgcaaacggtgctgcaggcgctgctccattacgatccgcgcaattttgaccaccgaattattgtcgatttacgcctggtacgtctcgcggcggcgctgctcaccggcgcggcgctcggcgtggcggggctgctgctgcaaaccgtgatccgcaacccgctgggcgagccgcatattctcggccttaacgccggcgcttcgctggcggtagtggcgacatcggcgctgggaatcagcctcggcggcgtggcgttagccagaccgctcaccgccgcctgcggcgcggcgctgctgtttggcggcgtgatgctgctgtcgtcgtccgggcggggcggcgtcacgccgctgcgcattaccctgtgcggggtggcgctgtcggcctttgcctcggcggtcaccgcggcgattctgatcctcgatgaacaaacgctgctggcgatgcgcacctggctggcgggcgatcttgccgggctgaactggcaaacgctgcgcgctgcgctgctcccggcgctggcgggagtgacgatcgcgctggtcatcgcgccgcgtcttaacgtgctggcgctgggcgataaggtcgcgctggggctgggggtaaagattgttcagacccgcctgctggggctgaccgccattgcgctattgtgcggctcggcggtggcggtggccgggccgatcggctttgtcgggctggtggtcccccacgcggtgcgccggctgattagcgaagatattcgcctggcgctgccgctggccgctccggttggcgctctggtgctgctgctggcggatatcgccgctcgtaccctggttgcgccccaggagctggcaaccggcgcgatgaccgcgctggtgggggcgccggtatttatttttatcgccgcgaggttttttaaatga

SEQ ID NO: 185878 - DNA, 1053 bp, Klebsiella oxytoca
atgctgactctgacagcgactccgattcagacagcgattcggactctgacagcgactccgattcagacagtgattcggattcagacagcgactcggattcggacagcgactccgactccgacagtgattccgactccgacagcgatgctgactctgacagcgactccgattcagacagcgattctgattctgacagtgactccgactcggacagcgatgctgactctgacagcgactcggattcggacagtgattcggactcggatagcgattctgattcagacagcgattctgactctgacagtgactcggattcagacagcgattcggattccgacagcgatgccgattcagacagcgactccgactccgacagtgactccgattccgacagcgactcggactcggacagtgactcggacagtgactcggattcagatagtgactccgactccgactcggattcagacagcgattcggactctgacagcgactctgactctgacagtgactccgactctgacagcgactcggattccgacagcgactcggattcagacagcgattcggactctgacagcgactctgacagcgattcggattctgacagtgactccgattccgacagcgattctgattctgacagtgactccgattctgacagcgactcggattctgacagcgactcggattctgacagtgactcggattctgatagtgattccgactctgacagcgactcggactctgacagcgactctgactccgacagtgattcggattcggacagcgattcggactcggatagcgattcggactccgacagcgactcggattccgacagtgattccgactctgacagcgactctgactccgacagcgattcggactctgacagcgattccgactccgatagtgattccgattctgacagcgactccgactcggacagcgattcggactctgacagtgattcggattcagacagcgatgccgactctgatagcgactcggatatcccgcaggccaatgcggatactaataccgcgctga

SEQ ID NO: 185879 - DNA, 1317 bp, Klebsiella oxytoca
atgtttaaaatcaatggattatataatgggtcgctaatgaacataacaaaaattgcagagttttcctatgatttacatagcgctttaggtgagtatgaaacacctgaatttgattatctaaagaaacttggaatggcagcaactctcgcggttcatattagagggcttggcactataccatacgatgttttaaagcaggtttcgtaccattattttaaaattccatcaatggctttggatcaagttttaaaaattctagatgatcttgagttcattgagcttataggtacacgttccaaaacaactgctgtaattcctaagattccacattttaaaagtgtttatgatgtgattggtaattatgcagaggaaagtgacctgagcgagacagaatctgtaatgctcgcaattctgagtgaggtttataataaacctgagaataaacagaagcttataaatacgctgggcgccgatagtaatacattcgatatgtgtatgaggtatagtgaggaagggggcttgctacgaactcacaaagcaagaggtaaagatattatccttagtccgtactattttgcagataaccttgatggattagctgatttaacagcgaaatccggctcttcgaatataagccgcgttttgaataaactaaaagctaaccaaggatggcctctttcaatggttgtcaataaccaggaaattggagggaataagatggatcccgttgaactttctcttgtacaggtaatggcttctgaaggtatattaaaacctccgtccatacgatttggtaatggggtgttagagcaatttgtttttactccaaatcctggggctatgcgcttaaactcggctaatagagagatatatgaacgtgcaatggctttagtatcttgtgtacggaaaggacaacttatgcccgctcagtatagaataagatatcctttggcaattttacgggctcttcgggataagggatatcttaatagtaattctgaggcaagcgatcaatataaaaatctcgtttttatgaaggttgcatatctcaaacccatatctggggacagatgcgaattagtattgataaaaaccgaagagaattttaatgctttagatatagcaattaagctactgtctactggagaattggctaatttggaagtcaacgctgaggcgagactatctttttctagagatgaatcttacattcagtctattatctcatcttcagacatgagaaaaagaaagcaagttcaaatagtggctgaagctaaacatgaaatggatcagttgctactaaatttgaatatttaa

SEQ ID NO: 185880 - DNA, 1119 bp, Klebsiella oxytoca
atggctgctttggataaagatacatctcaaaaagagaaagctatacgttattgcatatcgaacggaattcttccttatcttgaggttgttgttaataacgtcagagagatttcagacattcgtacagtaattactgatcttgacgttttaggattggaggtttctaggcgggggggaatccaaaaaaccctgtttgattgtaaaaccgttggtaagatgagtgcaattaacagagcgttctgggccgctggtgtaatggcatatattggttgcaacgagtcgtatgtcattttagcaaagaaagcaactgaagcgcatcgtgttagtgcaaagacattaaatgtccatctttttcaggaaagtgattttgaaaaatatgctgaatctgcaaatataaattatttggataggaaaaattactccacacatatttcatcttggcattcctattatttgatttttgaaaaaaatgatcatcttaaaagtttaggagagtacgttaatactcgcattccactcgaagttgattttgcaaaatctcttagagagttattgggtattgttaggctaaataaaggagagctgaatcctgagaaagatgaacacatgtcggtttacagctctatcgttctaagttttttattagttatgattccaattacttctcaattagctgatgtttttgatgttcaaatgaatcagtctgagtatgagaaagttttgcgctattatgtttggggcggccgtgatagttatattcagcgcagagaccttaaaaatgcagttcaggaagtttctggaggaaaaaaaggggagcttgagttaccaggttgggaaagatttgttgatgtttccagaagcttgttagaggcacctgtagacataaaagaggcactaataccatgccgagagctttcattaagatatgtgtctgagagtgacggatataaagattttcagctatccatcttattgagaagatcaaataggattgttcaatttatgatagcagcgtcaggatatttatactcatctgccggtttacccaaagactttcatgataaatttaaacaggatgtatccttacttttggacttaaaaacccccaacactctttaa

SEQ ID NO: 185881 - DNA, 957 bp, Klebsiella oxytoca
atgagcacttacattactctgtcttcgattatcaccgctgctgaaaggattaaaaaatcggtcattcggacccccacggttttgtctccgggattgtcggatatgctgggaagaaaggtgtttctcaaactggagaatttgcagacgggtggctcttttaaagccaggggagtactgaacctgctttccgctttttccggtaatctgagagattaccgtttcgctgccgtcagtggcggtaactttggtatcgcagtggcagaagcggccaaagcgtttgatataaacgtgaccgtgattatgccagaaaacgccccggcctcatccattgaaaaaatacgccattccggcagcactgttattcttgaaaaagatgtcagctccgcgtttgaacaggcaaggacgcttgcagagcagggataccacataattgatgactgtatcgatacactggttgcggaaggatacggaacccttgcactcgaactgatggaagattgccctacactgaccgatttatttgttgcggtgggtggcggtgcaatgctggcaggcattgcgacggtactcaaatcccgtaacccagacatccggatatggggagtggaaacggagggagccagttcgatgtaccaggcattgagggcaggaaaccccgtcaacgtggatatcacttcttccatttcaacccttggcgtccctgtgattgaccgccttatgcttgaacacgcgcagcgctacattgaaaaggtcatcaccgtatcggatagcgacgccatacaaggcatgatttcattcggcgagcaagccaggcagtgggttgagccagcagccgggacgcttattcccgcagctgtcgctgtaatccccaacctccccaaagatgcgatcattgggctcatagtatgtgggggcaacgttacgcaacgagaaatgaatatatgggcaaattgttga

SEQ ID NO: 185882 - DNA, 1029 bp, Klebsiella oxytoca
atggctcaaatgatgaaacgctggcagttgtcgtctttcggcactgaaaacctccacctggcagaagtacctttgccggaaccaggacataacgagttgctggttaaagtctctgcggtctcccttaactacagagataaactggtgctggaggggaaactgctgcctgacctcccggaaatgcctttcacgcccgtttcggatatggcgggtgttattgtcgcaacggggccgggtgtgtcccgtttcactacaggaaaccgggtcactggaaatttctggacgcagtggctggatggcgatgcgccggaagatatggtccatcatggccgctcactgggcggtccgctgcccggaatgctggctgaatatgtcatactccacgaagatgtggctgtcgcctctcctgactcgctgagtgacgaggaggtttccactctgccggttgcggccctgacagcctggttcgcgctggtggaaacaggaaatctcagaaaggggcagcgggtgctggtccagggaaccggcggtgtggcactggcagggctccagctggcgcgggctctgggcgcggaagtgaccgttctctcccggagtgaagaaaagctacagcgtgcaaaggcgcttggggcatcaggtttaatcaacaccagtctgacaccggaatggtcattgcgggttgctgaactaaccgggggatgtggatttgaccatattctggagcttatcggcggggataatttgcgccagtctgcggatgcccttgcgccgggaggcaggattgctcagattggtttccttaaaggcaatgagatgattcttcctgccttccccctgatgcttaaaagagcagttattcaggggattaccgtgggccaccgtcgggctcttgaagatttatgtcagactgttgaccgccatcagattaaacccgtgattgataaaatatacaatttcgctgacgcgcaggcagccttcacacatctggaagaaggaccattcgggaaaatcgtcatccgaatcggttag

SEQ ID NO: 185883 - DNA, 924 bp, Klebsiella oxytoca
atggcatttatcctgcattctcagttactcagcatggccgcttttgtgcataccgtggagacaggcagctttacagccgccgccgtccggatgggcgtatcaaaatcggctaccggcaaacatgtcgcccgccttgaacaacggctcggtgttaaactgctgaaccgtaccacccgaagcatcaacctgaccgaagagggagaactgtattaccggagctgcctcaacgttttggatgagcttgatgaagcagaatctcttctggcgtcccgcaaaaaggtggtttcaggtacgctgcgcatcagcctccccgtatcatatggcaggatttgcgtcatgcctgtccttgcaacgctgtgtactgagtatccggagctcagactggatatcactttcaccgatcgccgggtagatcttatcgaggaaaatatcgatcttgctgtacggctcggtgatacaggaaactctgccagtctttccgggcgaaaaatcgccactcagcgttctgtcatttgcgcttctcctgcatacattagtcgtcacggcctgcctggcagcgcagaagaactgcttttacatgcctgcctgggcttttccagggatggcagagtattaccctggaaagtgctggatgaaaatggccgtctaaccctgattgaacccactattcgccacattgtcagccacggtgaagctctgcgggatgcggctgtcagtggtatggggattgccttcctgtcaacatggctggccggagacgaaatcgctaaagggcaactgaggattatacctgttacgacccccgagtatgatgccccggttacggcgctgtggcctgtttcaagaaatctctcaccccggatccgggcggtggtggacagactgtacgctgcgttcaatgaggagactgcccggacccggtag

SEQ ID NO: 185884 - DNA, 162 bp, Klebsiella oxytoca
atggaatgcggttatatgagttttaacgggcaacgctgcaaggcgctgactgaggcggaacgcagcacagcgagtaccgaacagtctgcgcctcgcagtggaataaaaatcgtccgcctggcggtaagccgccaggccgatgaggccatcacgatggcctga

SEQ ID NO: 185885 - DNA, 303 bp, Klebsiella oxytoca
atgaaaaaagtaataccctccgcattattattctgcattatggcgtcatattcaacctccggcatggccgctgacgcctgtgaagtggtgttatgcatgtacggtaaagccaccgggaacggcggcgacaacgaatgccattctgctgaacgcacattctttaatatcgtcaaaaagaacaagcacggttttctgccagaccatactgccgatgccagaaaatcatttttacttgagtgtgactcggcagacccggcaattatcagccagataatcagtaaatttggccgcatgcgtggttaa

SEQ ID NO: 185886 - DNA, 1029 bp, Klebsiella oxytoca
atgaacgctgaaaacttgtcgctggattttatgaaaaaccagctgtttggtgattttattgcgcaggacggcctgacggaaattgccgttaaccggccgggtgaactgcataccaaaatacgggggaaatggcgaacacatgaagccccgattacgctgcgccagtgttacgcctttgccagagcgctggcgtcctggcaggacgataatatcgacgacacctcgccgatcctttccgccacgcttgaatcaggcgagcgcattcaggccattattcccccggcctgtgagcgtaataccgtgtctattacgctgcgcaaaccctcattcgggcagaaaacgcatcagtcatggattgatgcgggattttataaccgggtgaccggtaaggagcggacggaaggcaaagatgttgaactgacgcgctactatcagagtgaggatattccccgctttatggaaaaagcggtggaatacggcaagacgatttttatcgtcggtgaaaccggatccggtaaaaccacctatatgaaaacgctgctgcactatattccccggcacctcaggctgaccaccatcgaggataatcccgaaatccggttctatcaccacaccaactatgtccatctcttttatccggcagacgccggggataatgccattgtcacgcccggcagactgatacgtgccaattatcgtatgaaccctgaccgaatattactggctgaaattcgcggacaagaagcctgggatgcgttgaaaatcgtcggttcagggcatgagggattgatgacctccctgcatgcgggcagcccgaaagaatgtattgaagggttaattgaccgctgttatgaaaatcccgactgccggaacattcctttcgacgttctgttacgcaaggtgctaaaaagcattgatgtgatagtcagcattgatattcacggtgacatacgccggatgagtgatgtttattttaaaccccttcatctcaatggcatgagaggtctattcaccaaaggactccaataa

SEQ ID NO: 185887 - DNA, 888 bp, Klebsiella oxytoca
atgctgaaaaacatcctgctcctgacgggcttactcgcgtcatacgcggcatggagtgccgccaccccgcgcggtagcggctatgacagccggatgcagaacgtatcgtataacagtcagaacgccacggtcgtcaatacccgccctggctacgtcaccacgctgctgtttgacgacgatgaagctgtgattgatgcgcaagcgggctttcccaaaggctggacggtaacgaaaagtgataaccgggtgggcgtcagcccgaaccccatcacccagccggtgacggacgccagcggcaacaacatcagccaggtgttcctgcccacggcgaaggactggaagaccaacctcttcgtggtgacctcaaagcgtgattacagcctggagctgaacgtgctggaccacgattcccccgcgcaggcgttcgttatccgttaccactatccggccgaggttcgccagcaatccgccgccgccagcgccgcaagtcagacgcagcagcgtgaaagacaggagaagcagcagatagcagcggcattcggacaggccagcacgccgcgcaactggcgctacaccaaacgggtcgccgccggttcggcctccatcgcaccggattttgcctgggacgatggtcgttttgcctatatcggtttttcccccatcagaaccctgccttccgttttccgggtggttaacggacgggagcaggcgttcacgccccggacagttaagcagggtaattacaccgtgatggtggtgccggcagcgccgcaactggtgttgcgttacggcacctcggtggtggggatcgaaaacgacggattcgggcgcatcccgataacccgcagcgacaccgtttcaccgtccgttacgctggaggccagatga

SEQ ID NO: 185888 - DNA, 720 bp, Klebsiella oxytoca
atgcggttcagagatatcatactggcgttatcgctgtttatttccacccaggcgatgagcgccggaataccggtattcgacgccgtacagaataccgaatccatgaatcagtggatccagaaactccagcagtggcaggaaaccgtcacccattacagaagcgaacttgatgcctacaagcagcaattagccacagcaacgggcgtgcgggacgttcaggcatttctccgcgaggccaaaagtctgaaaaccgatattgataatcttcgtcaaaacggtatttcactggatgacctgctgagcaaccagagcgggtcatattcttctgaacttaatagcttgtataacaaatataaaacattcgatacctgtaacccgtccagctcttcacaacgctatctggacagctgcaaacagatgatcctgaatcaggccgtagcgatcgaaaatacgtccgaggttgaaaacaagatcacgggtacgctcggcgatatatcagatttatcagaccgtattgctaatgcgcaggattcgaaagagtcacaggacctggctaacgccatcgcggccaaaagcgtacaattgaatgcgctgaccagccagtgggagatgtcagtcaaacaggctgaacagcgagcaacgctgctggaacagcaaaaacagaaagcctttgagcaacagcaattaactgcgcccgttgccgatctgaactctctatag

SEQ ID NO: 185889 - DNA, 648 bp, Klebsiella oxytoca
atgttttccacctccgtgtttctggcggcggccatgcagtgcgccgccagcgttcacccgtctacggcactcgatgtggcgcgggtcgaatccggtttgaatccgtatgccattgctgaaatcctgcccggtggcaaaggcgtgatttcacatttccccgccagcaggaatgaggccgtccgcctcgctggacggctgaaggcacagggtcgacgctattcggtcgggctgatgcaaatcaccagcaccaatttccgtcattacggcgtgaccgcccgcgaccttcttgccccctgtaccaacctgtccgtctttgaacgcatcctcaccgactgctaccgccgtggcggctccctgaagcgtgcgctcagttgctactactccggaaatttcacgaccggccaacagccggaatccgcgtttaaccagaccagctacatccagcgcatcggctacgccttgccgtcaacgcgggaagaccggcagcgacctcccgccgaaaatctcatgctggcaatccattaccccgccgccgtcatgcgtggcgagcttaccgataacgccacgccagttctgacatccctgcgctaccccaatgccgtgatacgcggcgcgttacccattcccggcccccaggaggaacattga

SEQ ID NO: 185890 - DNA, 210 bp, Klebsiella oxytoca
atgccggatgagatcgaccgcgatcaggaatttaatgagcaacgactggtggagatgattgaacagagccgttttaagccagggtctacgccatcattattccattgtcgcgtatgcggtaagcccattcctgaaaagcgacggcaggcactgccgggcataaccacctgcacggaatgtcaggaaaagcttgaacgccgaagacgttaa

SEQ ID NO: 185891 - DNA, 981 bp, Klebsiella oxytoca
atgaaagcaatcacttttgaacaattcggtccggccgatgtacttaatatcagtgaagtcgcagacccacagctgcgccccaatgatctgctggttcgcacgcgggcagcgggggtcaaccgggccgatctaactcaccgacgcggcgggtatggccgccctgattttggcgactcgacgattatggggctggaaatcgccggtgacgttattgccgtcggggagaatgtaaaaggctacaacttgggtgaccgtgttatgggtatcgtcgggggcggggcttacgctgaaatggcccgcattgattaccggatggctatgccagtgccggaaggtatggactatatccatgcggcggccattgccgaggtctttgtaaccgcgcatgaagcgcttatccatctggggaaactgaagcccacggaaacggtactgatccacgccggggccggcggtgtgggaggtgccgccgtgcaactggcgcatgcgacaggcgcgacggtaatcaccaccgcgaatgctgcagcacacgatctcgttcgccgtctgggtgccgatcacgccattgattacgtgacagaagacttctccgaggttgtcgccagcagtacggataacaagggggttgatcttattctcgattttattggcgcgccttattttgaacgaaacgtgaatgcactcaactttggtggacgtctggtgcagattggcatcatgggggggattgaaaacgcgaagatcccgctggatcgggtgttgtaccgccatctgcagattatcggtacggtaatgaaatcgcgttcgcaagaagtgaaacatgagatgtcccgtcgctttaaagagtgctggttaactcgcttcggtaaagatgggctgagcccggtgattgacagcgtatttccgctggctgaagccagcaaagctcaccagcgtatggaagacggcctcaatgtcggaaaaattgtgttgacgatgtag

SEQ ID NO: 185892 - DNA, 327 bp, Klebsiella oxytoca
atgaaagctgttgattttactcgcccgcgtgaagctgcacgcgcatttactcctaaactgtccggcttcgttgagcaaccactgtattccgatgtctggacagatccggacctggcaccacgcgaccgtagtctgattactatcgcctgtcttatcgcgctgaatcattccaatgagctaccggcccacctgcgtcgcggcattgaaaacgggctgaccaaaacagaaatttccgccctgattacgcacatggcgttttatgcaggcttcccggcagcgattaccgcttctggttatgccaatgccacgtttgaagaacaggcctga

SEQ ID NO: 185893 - DNA, 1440 bp, Klebsiella oxytoca
atgcaaaatcatcaatacgatcccctttatctattcatcgacggtgactggattgaagcgggcaatcgcgacactgtcgctgtgattaaccccgcaaccgaagccactatcggccgcttgccgctcgcgaccgccgccgaccttgaacgtgccctgtcagccacccgttctggctttgacatctggcgccgtaccgtgcctgccgaacgcgcccgcatcatgaagaatgccgctgccctgatgcgcgaacgcgctgaacatattgcctcgttgatgacgctggaagaagggaagcccctggctgaaagccgcgacgaagtattgcgtgcagccgactattttgaatggtttgcggaggaagcccgccgcattgatgggcgcgttgtaccgtcaaatcgccccggtgtactgcaactggtcaaaaaagagcccatcggcccggttgccgccttcactccgtggaatttcccggccattaccccggcacgcaaattatcagcggcgctggccgcaggttgtagcgtgatcctgaaacccggtgaagagagcccggcgacggcgctggctctggcacgctgcctggatgatgccggtctgcctgaaggcgtactgcaaattgtgtttggcgtaccggatcaggtttccgccacgctgatcgcctcaccggttattcgcaaagtggcattcaccggttctgtaccggtaggtcgactgctgtctgagcgtgctgccgccggtgttaaaccgattaccctggaactgggcggccacggaccggtgctggtttttgccgatgccgacattgatgcggcggcaactggcggagcggctaaccgttttcggggcaccggccaaatctgtatctcttcaacccgttttcttattcagcgaggtgtttacacacagtttgtcgaacgcttcgtgagtgcgacggagcaactgattatcggcgatggcatagcggaaggcactcaggtggggccgctggcgaatatccgccaactggaaaaaatggaatcgctgattgccgatgctgttgccctgggcgcgaaagtgctcactggagggaaacggctcaaccgtcctggctttttctttgaacccacggtgcttaccgatgtgccgatggaagcacggatcatgcacgaagaaccctttggcccgatcgccgtgatgcgtccgttcgacgcgcttgaggacgggctggcagaagcaaaccgtctgccgtatgccctgtcagcttacgcttttacgcgtgacgcccgtaccgtgctggatgttggcgatggccttgaggccggaatgatcggcattaatcagtaccgcatggtggcgacggaactgcctttcggcggcatgaaagaaagcggacatggttcggagggcggtcgggaaggtctcagccattatctggtgaataaattcatcagccaaatctaa

SEQ ID NO: 185894 - DNA, 735 bp, Klebsiella oxytoca
atgttgctgattcgcgccagacagatcctcgattcactggaggatacgcagcaggaactggcgtcaatgaagggcgaagtaaccggtgtgctaagagtggcgtgttatcccacatttggtaaacgctatgtgctgccggttatggcaaaactctcccgacagtatccggcgctgagcttcgatttggatctgaccgaacggttggcagaccccgtcgctgaacgccttgatgttgtcatccgtattggtaatatggccgacagcacgttgattgccagcaaaatagcaacgcaaatacgtgtgctgtgcgcaagccctgcctatctggaaagcgcggggattcccgcctcgctggacgacatcgcctcacatcggttaatcgataagctgcacggtgcggatctgctttgctggtcgagcgtgattggccatccggccagagaaaactcgggcctgcctatgtttggctgtgatgatttcgaagcaatgcgtcaggcagcggtcgaagggatggggatcgcgttcctgccggactgggtggcgggagatgacattaacagtggcgcgctggtacaactctttccggaaatgtcatcgcaaccacatgtatctacaggaatatatgcgctacgcgcgttacgtcacccacctgccagagtcacggtatttctcgacgcattgcgtgaattcatcgaacatcctgcaaaatggtcaacatttcactgccagctctga

SEQ ID NO: 185895 - DNA, 720 bp, Klebsiella oxytoca
atgacagctgagcacaataaatttgtggaaatgcgcatggctttagcggaggctggctttgttgttgcagcggcagaatacaggacaattccggatactttccctgcgccagtgatagatgctaaagcagcagtaagataccttcgtcaacatgccaacgattatggaattgacccctcacgaattggtgtatttggcgattctgcaggaggatggctggcgcagatgcttggtaccactaatggcgataaatcattcgatcacggcgattttctcagccagtccgctgatgtgcaggctgtggctacgctttacggaatatcagatctgcgtaacataggtgacggttttccggatcaccgacaaaaagtgcatcagtctcctgcagtcgcggagtcactgctaattaatggtgtggctttcaagaattttgcaggtgcctccatcagttctgtacctgaaaaagcgataaatgcaagccccataggacgtctcaaaggatgtaaacctccgttcctaataatgcatggaagtaaggatacattagtatcgcctaagcagagcgcaacgctttacaaagcccttttggaatcggggaacaaaacggactacgtacttatcgaaggtgcagaacacggtgatgatcactggtatcaacccgttgtcataaatagggttgttgactggttcagcgggcatctttgtcctgataatacatga

SEQ ID NO: 185896 - DNA, 954 bp, Klebsiella oxytoca
atgaacaaaacagatcttaacactacgtctgaaaatatcctcgtgctcggtgccggtgagctgggcctccccgttctgcgaaatcttgcccttcgggcaaaagatgtggagggaacgaaaatcagcgtgctgctgcgcgaaagtaccgtaacgtcagatgaacctggaaaacaattcgttatcacggaaatcagaaacctcggtattaatatagtcacgggcgatctcgtcatgagttctgtcgacgatttggccagcctctttgcgcaatttgacacagtcgttggctgcgcggggtacgcggccggcataaatacaccgatgaaactggcgcaggcggccctgcaggcgcggattccacgctattttccatggcagtttggtgccgattttgatgccatcggacgcggcagtccacaagacatcttcgacgcgcagattgacgtgcgtgatttactacgcagccagcatgaaactgagtgggtcatcatttcgaccggcatcttcatgagctatttgttcgaaccagacttcggtgtggtcgatctgcagaacgatactgttcacgcactcggcagtattgacaacaccatgacgctgacaactcccgatgatatcgggatgctgacggcagcgatcgtatttaaaactcctcgcatccggaacgaaattgtgtatatcgccggtgatacactgacctacgcagaggtagcagataagctgcaatcagcgcttggccgtcctttcagctgcacggaatggagcgaacaatatctgatggataaactcgcgctcaacccgcaagacatgatgtctaagtatcgtgccgtttttgcacaggggcggggtgttgcatgggataaaaagcagacattcaatgaacgccataacattccggttaccgacgtggcagcctggataaatgcaaatctgaccccgggcagctcattataa

SEQ ID NO: 185897 - DNA, 861 bp, Klebsiella oxytoca
atgttttcagtggctgctgatgccagaaatttgctgggagagtgcccaatctggtgcgagaggacacgcaggatttactggactgacattgaaggcagcgagctgcttgcccttgaagaagacaccagtgttgtgatgcgctggtccctgcctgaacgcctcggatcgtttgctcttactgaacattctgacgttttattgatgggactggcgtcccgattcgccttctgcgatctgaatacgggtatctttacgccggttgtggcgtcaccgggaggaccgggaacacggacaggggatggtcggtgcgaccgcgagggtaatttcgtcttcgggaccatggatgacggataccccgcgaaaatcataggaagatttcacaggctaaatgcagcgacactcagcattgagacgctacccctgcctgaggtggccatcccgaacagcatctgtttcagtccggacggcagcacgatgtattactgtgactcgatgcagggccgtataatgtgctgtgattacccctccatgaataaccagcgcgtgttcactgcaacagaaggaaagggagcgcctgacggctcctgcgtggacgcaatgggctatgtctggaatgccgaatggggaggaagccgtgttgtacgttatcgtccggacggaacgacggagagtatcctgccctctccaggagttcagagcacttgcccgacactcgcgggagaagcattcacaacgctgtattgtaccagtgccagcgtgggcctttctgtgccgtcaaggcatgatggagcattgctaagagcgaaatcagccgtcttccccggtttaccggagagccggttttcagcgcacacagcgtaa

SEQ ID NO: 185898 - DNA, 516 bp, Klebsiella oxytoca
atgaaaacaacagtatttgttacccatcccaacattaatcagtcccgggtaaactcagccctggcaaaaggtgcagcatcactgacaggcgttgaagtgcgttatctctatgacctgtatccggatggcaaaatcgacgtggccgctgaacaggctgccctggagaagacggatcgtgtcgtgctgcagttccctatgcagtggtacagcacgccgccacttctgaaacagtggcttgacgatgtactgacgtacggctggtcacatggtggagaaacacaggcgctgcacgacaagcaactcatgctggcagtttcgcttggaggtgctgagtctgcctatcagcctgatggcgctgccggacatacggtaggagagtacctgctgtcttttgaaaccatctccgggtatctgggtatgaactacatcaagccgttcattacaggcggaagcgcgacgataactgacgaagaaatcgcagctcaggccggacgatacaaaacggtattagcctga

SEQ ID NO: 185899 - DNA, 573 bp, Klebsiella oxytoca
gtgtctttacagccagtcgaactgaacaaagcatatcgattattgcaggtcggcccaactacaatgatttccgctaagcataatggtaatgccaatgtgatggccgctgcctgggtgagtctggtggggatcaataaagtcatggcgtatatcggtccgcaggcttatacccgtggattggtggaagaaagtggtctgtttgccgtacagatccccgtagtcagccagatggaaaccgttttgtacgcaggtgagcacagctaccgtgacaggcctgacaagaatcataaaataccgacgttctacctgaaagagttcgatgttccgctggtagagggttgtgctggctggcttgtatgtaaggtaatacccaacgcggcatatgagctggaacataatctgtttatgggagaaattgccggcgcgtggagtgacgatcgggtttttcgcaatggacactggatatttgatgaagcacctgacgaattacgaaccatacattatgtcgccggggggcagttttatgccatcggcaaaggaacccggtttgaccatgggccgggcaaagactga

SEQ ID NO: 185900 - DNA, 387 bp, Klebsiella oxytoca
atggaaaaattcaacgactgttttacactggacaacaaagaacccggtaatgttttgcgggaggcatgtcctgcccgtgaagttctcgaggttctggtgagcaaatggacattgctcattattcatgccctttctgacggtgcatcaaggccgggtgatttgcgaagaaaaattcagggtatatcagaaaaggtgctgtcacagaatcttaaggaacttgaaagcaggaatcttgttacgcgcactgtctttcgtgaagtaccgcccaaagtcgaatatgcactcacggaactgggaacgtccctctggcaggcagcgaatgaactcaaccggtgggtagaacaaaactgtcactttctgattaaagacactgatccttccatgtga

SEQ ID NO: 185901 - DNA, 576 bp, Klebsiella oxytoca
atgaaatatcatgtactttctgcttcactgttattttcacttctctttactactgctgcacaggcgaaaacagcgagttataaacttgatgaatcgcatacgtctgtggttattagctggaaccacctaggtttttcgaacccgacggcatcccttcatcatgtagatggcacagttaagttcgatccggcaacaaaaattttatcactggttgatatcaaaattcctgtagccagtattgataccggcgttccagcactgaataaagagtttggtcagccagattattttgatgcggagaaatatccggtcgcaaattttaaaagcaccagcattgaaatgaatggtgataagtatgacgtacggggaaatttaaccattaaatccataacccggccggttattcttcatgcaaccctgaacaaagcaggttttcaggctatggagaagaaaaatgcggtaggttttaacgccaccggtgtgattaagagatcagactttaaaattgataaatacgttccttatgtaagcgataatatcacactgaccgtgtcttcggaggcgtattcagattaa

SEQ ID NO: 185902 - DNA, 126 bp, Klebsiella oxytoca
atgctgcaggttggcaccaattcctttttcagccagcgccagccagacagcatactgtgcaatacctgtgctgtgctcagaccataccgggaaattgtccgcataggccgcaaactgctcctgtag

SEQ ID NO: 185903 - DNA, 1191 bp, Klebsiella oxytoca
atgtcccacactacgaacaagtggtcttcaatcatacttgtgaccggcatcctttttatcgccattaacctgcgtgttccttttaccgctatagcacccgttttagagtccattcgccatgattttgggctaagtatcacagccgttgggttgcttaactcgcttcctttactggcctttgccgccttttctccactgagcgcatcgatttcccgcaagtacggcctggaacgcaccctttttggtgccctggtcgtgatttcagcggggattctgcttcgctcaacagacagcgtctgggcgctttatggcggaacagtgttaattggtatcgggattgccctgggcaatgtcctgctgcctggcctgatcaaacgtgacttttccggcaacgtggcttccgtgacgggagcatattccatcaccatgggcgccgctggcgccattggatctgccattgtcattcctctgacgcagagctggggctggaacatcgcgttagccatgttggttattgcaccgctccttgcgttgcttttatggttgccgcagttgaagaaaaagcatcaactgccagtagcaggtgagaaaaaagcagcgaccgttgcggtctggcgctcgtctctggcgtggcaggtcaccttgtttatgggcctgaatgcgatgccgttttatgttgcggtcggctggctgccagccattctgacagacagtgggctctcctcagctcaggctggtgaggtacatggcatccttcagctcaccaccgccattcccggcctgattctggcagccacgctgcgtcgtcttaacgatcagaaattagccgctgctggcgtcagcctgttaaccgcagtgtcctttattggcatcctttatttgccaaatctggcgatgctgtgggctgcactcctcggcttcggctcgggtgccagcatgatgctgggtctgaccttcatcgggttgcgcactacaaacgctggtgatgctgccgcgctgtcaggtatggcgcagagtatcggttatctgatggcggcgatgggaccgctgttgctgggtaaagtacaggagttgtccggaggttggacggtgccattactgatgaccacagcaatctcagttgcaggagcctgcaccggaatggctgccggacgagatgcgcacctggaacctgtacagcagccgggctga

SEQ ID NO: 185904 - DNA, 183 bp, Klebsiella oxytoca
atgagctttggtcgctggcgtcagcagctgcatttgatgattgccctgagccatctgtctgaaggtcagcccgtgcagcgcgtagccggaacgctgggatatgattcggtcagtgcgtttattacgatgttcagaaaagcgctgggtaaatcaccgacgcaatatttttcttccctggattag

SEQ ID NO: 185905 - DNA, 1230 bp, Klebsiella oxytoca
atgactgcgactaatcaatttgctgcacatgttggtctggactgggcagataaaaaacacgatgtctgtgttcagttcaaaaacggtgaacgcgtattccatgtgattgaacatacggcagaagcgcttgatatctggcttactgagttacaccagaaggtaaaaggcagaatcgcaatagctctcgagctgaagaagggccccgtggtatatgctcttcaaaaatatccctttatcaccgttttctccgtccacgctttgtccctggctcgttaccggcaagccttctcacccagcggcgctaaaaatgacccgcaggatgccgagctagcattagagttaatgctacgctatcccaaaaagataaaagccattgaacccgacaacgcagatatccggttactccagcaattagttgagcagcgccgactgctggtcgaagacaagcgtcgctttgtaaatcggctcatcaacacgcttaagcagtattaccccctgcccctggaatggttctcccatcgggacaattcactgttctgcgagctaatcattcgctggcccagcctgcaacaactcaaacgggctcgcagcgatactgttcgtcattttatgaacgctaaaggtggtcctgctgttgcatataccgaacagcgggttgcaagtattgccaatgctattccactgaccacagataaaagtgtaatagaggcaaatgcattgatggcaacagcactcgcatctcaaatcaaactggcaggcgacctaatcagaacctacgacgaacgtattgaatccttattcggtacgcttccggatgcagaactgttcaaatcacttcctggaatgggaccgtgcatgggtccaaggatgcttgccgcactgggtgataaccgcgaccgcttcaacagcgctgaagaaattcaaaactacgcaggtattgcaccggtgacagaacgaagtggccagaaatcctgggttcactggcgatggcagtgtgctaagttcgtcaggcagacttttgttgaatgggctgccaagacggttaactcatcatactgggccagactttattatcagggactgcgagaaaaagagaaatcgcaccaatctgcaatccgggctcttgctttcaaatggataacgatcatttaccgctgctggaagaccaaactcggtacgatgaagcgaagtatttgctggctctcgaagcgcgacactcgcccttactga

SEQ ID NO: 185906 - DNA, 1269 bp, Klebsiella oxytoca
atgtctcttaacgactcaaaaatccgcaacttaaaaccatccgcaaaaccctttaaagtctccgattcccatggtctgtatctgctggttaatccaggcggttcacgtctctggtatctcaaatatcgtatcaatagaaaagaatctcgccttggcttaggcgcataccctgatgtgtctttggctgatgctcgtcaacagcgtgatggtatccgtaaattgctggcgcataatatcaatcctgcacaacagcgctctgcggaaagatccacttcctcgccagacaaaactttcaagtatgtggcactggactggcataaaagcaaccgaacatggtcagagaaccacgcctcccgtctgcttgccagcatgaacaatcatatattccctgtgattggacacttgcccgtagcagaactaaaacctcgtcactttattgacctgctaaaaggcattgagcaaaaaggtctgctggaagtcgcagcacgcacccggcagcatatgtgcaacatcatgcgtcatgccatacatcaggagttgatagagaacaatccggcagcaaatctggagggtatcatctccccgcccgttaaacgtcactaccccgcccttcagttggagcggctaccggaactgttggctcgcattgaggactacaagcaaggacgagagttaacccgcctggccgtattactcacccttcacctattcatccgttccagcgagcttcgtttcgcccgttggtctgagatcgatttcaaaaatagaatctggaccattcctgccactcgcgaggccatctccggtgtccgctactctgggcgtggtgcaaaaatgcgcactccacatatcgttccactctcccgtcagtccatcgctattctgaaacagatacgggaaatatccgggcatcgcgtgctgatattccccggtgaccataatccgtataagccaatgtgtgaaaacaccgtcaacaaggcgttgcgcctgatgagatatgacacaaaaaatgaaatctgcggccacggattacgggcaatggcctgtagtgccctgatggagtctggcctgtgggcacaggatgcggttgaacggcagatgagtcatcaggagcgtaacagcgttcgagcggcttacatccataaagcagaatatctcgattcccgtaaagcgatgatgcaatggtggtcggattatctggatatgtgcaggaaagcgtatgccccaccttatatttgtgggaaggaaatcagttacacaatgggataa

SEQ ID NO: 185907 - DNA, 657 bp, Klebsiella oxytoca
atgtatcggtataaaccaacagttgaagcttttttagagaggtatgaaaaaaaacctgcaaaaactcaaaagggaatgattggtgaatttctttcacatatcattatcaatgagcttttagataatttcgaaaccgcttcgcctttttttaatcttgaagaaaaaagtattaagaaaggatttgatttgcttttatattcaacatcagatcataaagtctggattactgaagttaaatctggtgagttacgaaaagggaaggatgttaatgagacttctcaacttcttttgagtacagcgtataacgatctaaaaactagattaaatgaaaatgaaatcaatcattgggctaatgcgatgaatgcggctagcattgctatttctcagcatagaaattataaggatgtagtactagatcttcttgccattgaaggtgaaaaaacatctgaaaagaaatcaactagcactgataattatgtattttttatttctagtttattccacgacataaaatttaaaactatcgaaaaaactgttatggattttcaaaaaagtatggtcgaaaaagctgaatttgcagatgttttttgtttttctattcaaaaaagtactttaaataaggttgtcgatttcttgattgaggaaagtaaaaagtga

SEQ ID NO: 185908 - DNA, 789 bp, Klebsiella oxytoca
atgtctcaggacacagtttttcagggccagagtgaaactcagccaaggcttaatcctcccatatatcgctggcaggaggatatgccggagaacaaccagcctcagctggtgcctccccagctgatttggttaaatacaaaaaatactatctggatggaaattcctcgttatgaaggtgtgatgtggggaggggcgttgtttatgatgtttatatttatatttatatttatatttatatttatatttactgaatccctttcaatgctgcttgatgattttgattatactttgctggttattttggcatcctataatattatgttaataacatcgattatattattctataaattatattttgttattcctagagatcagcctattcgtctgaacagaaaatgccagaaaatctacacctttgactataaaagaaaatggtggaatccctgggccagatggccgacgaccatcaaagcttaccgctgggcagatattcacggtgagatgcgtttttccagcgaccgctataccggaggttttcagctgtttgcttccgtctgtcagcccggaacgctgaatgtggtggagcgcttccagattgccagtggctctcctgctcagttgcagcagctctggagctatctgtgcctgtatatgaaaggtgaacctgtgccggatgaggcagtaaataaaggtcgccctgatttctggtgcccgcgtaaagcagataaatggcctcaagcactggaaattgaatcaaccaccgctgtagaaaaagttcttccctga

SEQ ID NO: 185909 - DNA, 834 bp, Klebsiella oxytoca
atgtctcaggacgcagtttttcagggtcagagtgaaactcagccaaagcttaatcctcctatatatcgctggcaggaggatatgccggagaataaccagcctcagctggtgcctccccagctgatttggttaaatactaaaaatactatctggatggaaattcctcgttatgaaggtgtcatatggtgggggatgttgggaggcgcatttattgtgtttcttttcatcatttttgtaaccccttttttttactctattcttggcgattttccggatatgttcgcagtaattaactgttcaggtatgttctttgtattgatttcgtccttatttgtttttttaaaatcatacttctgggctgcgagagatcaacctattcgcctaaaccagaaaagaagaaaaatctacaccttcgattataaaagaaaatggtggaatccctgggccagatggccagccactgtcaaagcctatcactgggctgatattcacggcgagatgcgtttttccagcgaccgctataccggaggttttcagctgtttgcttccgtctgtcagccaggaacgctgaacgtggtggaacgcttccagattgccagtggctctcctgctcagctgcagcagctctggagctatctgtgcctgtatatgcaaggtgagtcggtgccggatgaggcggtgaataaaggccgccctgatttctggtgtccgcgtaaagcggataaatggcctgcagaaatggaatgtgaatccaccactgcgccggacagtgaactttcacctccccgcgcctgtagcgaactatctgataagacggttaatcgccagtgctaa

SEQ ID NO: 185910 - DNA, 2643 bp, Klebsiella oxytoca
atggaaaatcccgccattttgttacgccgacttaacccttactgcgcccgtgcgatggaaggcgctgccaccctgtgccagacccgggcgcacgcggaaatcctgcctgagcactggctgctgaaactgctggagcagggcgagggcgacctgacggtgctggcgcggcgctacgaatgggatatggacgcgatatggcaggatttgctgacctttatggataagctcccccgttcggtgcgcggccgcccgcagctttcagacgctattcagactctgatgcaggaggcatggctaagcgcttcgctggccggggaggagcatatccgtagtatccacctgctgatggcgctggtggataaacagagtctggtgcgctgcgacggcctgtggccgctgctgaccctggcgcagagccagctggcgcgcctgcgtccgctactggacgcgcagtccgaggaacgcccggaggtgcagcaggaagcagagctggcgcagggcgacgaggtggcgtttgtcggccgtccggttaatgcgggcgtaaaagaaggggatctgaatccggccctgcagaatgcgctggataagttcaccctcgacgtgaccgcccgcgcccgggacggcaaaatcgacccggtgttcggccgtgataatgaaatccgccagatggtggacattctttcccgacgccgcaagaacaacccgatactggtgggcgagccgggcgtcggcaagaccgcgctggtggaaggtctggcgatcagaatcgccgaaggcaatgtcccggacgcgctgaaaccggtaagcgtgcgcacccttgacctcggcctgctgcaggccggagcgggggtgaagggagaattcgagcagcggctgaaaaacattatcgacgcggtgcagcagtcgccgctgcctgtgcttctgtttattgatgaggcccacacccttatcggcgcgggtaaccaggcgggcggcgccgatgcggctaacctgctgaaaccggcccttgcccggggcgaactcagaaccatcgccgccacaacctggagcgagtacaaacagtattttgagcgcgatgcggcgctggagcggcgcttccagatgatcaaagtcgatgagccggacgacgacaccgcctgcctgatgctcaggggcctgaagtcccgctacgcggagcatcacggggtgcacatcaccgatgaggcggtgcgcgccgccgtcaccctctccagacgctatctgaccggacgccagctgccggacaaggcggtggatttactcgacaccgcctccgcccgcatccgcatgagcctggatacggtgccggcaccgctgacccgcctgaaggcgcagctcaccggcctggcgatggaaaagcaggcgctgctggaagatatcgcggcgggcaaccatacccacggcgaacgcctggcggccatcgaacaggacgaagtccgtattatcctgcagctcgacgagctggaaacgcagtacggccaggagctgaagctcacggaaaacctgctcgcctgccgcgccgatatctcccgccaggcggaaatcgcggacctgcaaaaccagcttagtgccgtgcagcaggggaacccgctgctggggctggacgtggacgcgcgcaccgttgccacggtcatcgccgactggaccggcgtgccgctctcgtctctgatgaaggatgagcagacggagctgctgagcctggaacagcagctcggtagacgcgtggtgggccaggacgcggcgctgaacgccatcgcgcagcgtctccgtgccagcaaaaccgggctgacgtcggagaacggcccgcagggcgtgttcctgctgaccgggccgagcggcaccggcaagactgaaaccgcgcttgcccttgctgacgcgctgttcggcggtgagaaatccttaatcactatcaacctctccgaataccaggagccgcataccgtctcccagttgaaaggctctcctccggggtacgtcggctacggccagggcgggatcctcactgaagcggtcagaaagcgtccgtacagcgtggtgctgctggacgaagtggagaaggcccatcgggacgtgatgaacctgttctaccaggtgtttgaccggggttttatgcgcgacggcgaggggcgggagatcgactttcgcaacacggttattctgatgacctccaacctcggcagcgaccacatcatgcagatgctggacgaacggccggaggccatggaatccgacctgcatgaactgctgcgtccgctgctgcgcgaccacttccagcccgcgctgctggcgcgcttccagacggtgatctaccgcccgctcacgcgggacgcgatgcgcacgattgtcggaatgaagctcagccaggtgagcaaacgcctcagtcgccactacggcatgaccactgccatcagcgacagcctgtacgacgctctgacggatgcctgcctgctgccggataccggggcgcgcaacgtggacagcctgctcaatcagcagatactgccggcgctgagcctgcagctgttaagccatcaggcggcggggcagaagccgcagcacctgatgctgggccgggatgaagagggggggattgtgatggagtttggcgcaggggcgggcgtatga

SEQ ID NO: 185911 - DNA, 1335 bp, Klebsiella oxytoca
atgacgactccttctgaatgttgcctgaaaaccggcggcgacccgcgtacgcttgcggattacgcgcgccttcgcgatgaaatgaacaaactaacccatccggcgcgcccggatgtcaactggcggctcgcggaaaaactctgcctgtcgctgtttgagcacaacggcgtggagctacagactgccgcctggtatacgcttgtccgcatgcatctggcggggctatacggcatgaatgaagggctggcgatactggtcgcgctggtctcccggcagtggggcaatatgtggccgcagccgacgactgcgcgaatcaaaatactcagttcgctcagtcaacggctgcagcaggcgatgcgcacgctgtcgctgacctatatcgacctgagccagctttaccaggcagaagcgcatctgacggcgctggatgacgtactgcagcgtctggaactcaaacatgccggccagcttgatgccctgtctatcctgctgcacaacgcggcggtgcggctggagagcagcgaaaataaagaggagaccgcgccgcaagcggccgcgcctgatcctgccccttccagcctccctgaaccgaccgcgcaggtgaaatgggtctatgtcgccgaaccggcatcgcggccgaatgctgacgttgtgacggcattcccggcgcccgcgaagccctggaagccgtttgtcgccgggatgctgactatgctggcgctggccggggccgcggcgggaggatggcgggcaacgtacccgtccgattcggggcagatgcggtttcccgcccggttctctccgttacccacggtgctttccgctgagcagttacagacgctacgacaacaatccccctcggcggagccggggataaaacagactcagcagcagctggcgcagcttttacagctaaaaccggactgggctttgagttatggtactcatctggcgcagcaggcgctgacgctatggccagagcaggcgaaaccgctggcgcggcaatggcaacagcaggtcagcgccgccgcgcttcccgtggagaatctcagcggctggcaccagggaatgacgcagctacagcagttgacgaaccggcttaacgcactggatgaacagaaggggcggtatatcacggtgagtgagctgaagtcagcggtgtttgccataacgcagtcgttcagccgtaccgttccggcggaagagcagctgcgacaactctccgcacagccgcgcaatcagccagggtctgcggcgcagcagaaccagacggagcagcatctgcaacaactgattgcccgctatgctgcgctgaaacaaaaaacggcggaataa

SEQ ID NO: 185912 - DNA, 129 bp, Klebsiella oxytoca
atgactgaatgtacaaacaatgagatgcaagggataccaccttttcctgaaaatggggaacctgttgcagtactggttcccccggtaattatgaataattttccggtagctaacccggaagaagattaa

SEQ ID NO: 185913 - DNA, 786 bp, Klebsiella oxytoca
atggggcaatacatactcgttatgaatcataaaaagaatttccaagagatagggcttttacaggatttctttagaaaaaaccataaatcttcctttaattgtaatcaaaaaaaagttgagatcacttccagtgatatcaccccacttctcgtaaaaggtaaaagtggctttcctcagggtacgatttcattatccggcccggtgatgcatttgcgttatcaacctttgtggtttgccattttgttgggtttgaacgcgagacaaccaatccataaagaatttcagttcaaaatttcacttattgatattctagaaaagtcggggcgtgtttgtcagggattaggtattcgacaagtcaactatacactcgctgaagtttcatactttttgttgttactcatagagttcaggttcgagattcaaacaaataatacctttaagacctgttcggtttttactgaaatcagtcacgacatagaattgcagtctattagcatggcttatgttagtatcaatcctaaagtggtcgacaaactatgggagctgactaattcggtgtctgtttttttgacgacactctttttcgccaaacgatctgagctatacaacctcctgcaaaagttactttcaaaaactgaccctgtttctcttagcgacattgcacctgcaacgaatcaacacgtacagttgttgcgccattacggcttcgtcacatacacaaaaaagaagcaattacttgatattcataatgttagcgttttgattgaaggactcaacccattgtga

SEQ ID NO: 185914 - DNA, 669 bp, Klebsiella oxytoca
atgtggatcacaaaagataacgaaattatctcagacgctgagccggattcagacggttttctagaagtcagccgtccgtgccccgactgtttaggttcaggtattaactgcctccagtgtgctggttctggttcattgccacctgttatggaaaaagtttttcctgtgtatgagtgggcagctaaaaactctctgaagatgccgtttaaatcccctgaacaaacccttattaaacaatttctgaacactatattggctactcccaatcaagataaaagtaatctatacgcagcacttgttcaaaaattggataaaagttactttcctacaaaattgcaatttcgatgtctgaaacctgctgtgtcaagaacaagatcagcatctaaaattcaagtacggccgtttaatgccaaaatcgggactagtttgtatttggttttcaccgtaattaaaattcaagtgctcactagaaaatgttcctctgagaatttttcttccttacttttagaaacctctgatcaccggcattttattgcttatgattctcacccatcagggcttaaggttggagacattgttaattgcaatgttcgagttgtaaaacgcctctggattaataacatgagtatattgcaggtgaaaatggtctcatcttctctgatcaaatga

SEQ ID NO: 185915 - DNA, 315 bp, Klebsiella oxytoca
atgaaaagtcggatggtagaggtcgctggtttaaatcttaaaatttccttacataacaatatgttatctttgagttgtaatattgacgggctcagtgtttacaatacttgtcgtattattcgcaactcaaaactaaccgaatctgagattttcgcaaaaattgacgctgattgggttagcaaggtcttctccctaaatatcaggcagataaacaacatcgtccattccaatgtcagcgtaatacctgtactgactcaacctaaacaggtaaacgtatcgtctggagcaatggtgtcctgtttcaagaatttctga

SEQ ID NO: 185916 - DNA, 519 bp, Klebsiella oxytoca
atgagaaagaaaagtaacttttcaatattcacttggggcattttgttcagtgttggtttaggggtaggaatttttataggaaattttggaaaggaacgtactgcgttggtacaaattgttccatcggaatatacagtgcaaaaatcctcccctcctaaatttgatgattttaaggtatatgactctgacaaattgctatctgaaaaggatatcacaagaaaggacagctttgcttcaagacaggatgatagttttgatgaaaaaaacaccatcttaattgagcagaataccaatgaacagacaatagagttgcctcaaattgaaccggagaatgaaagtcagttttatgagcatctcgaaaataacgttttcaaaaatttgcgggctgaaccaccttactctgtaccgcaaatagatgaaaaggtcaggtcattgagggtaaagagatatttacccccaagtaataaaggtcaacataatgaaaactttgaaactgaaggaattgtgggcagaaaataa

SEQ ID NO: 185917 - DNA, 465 bp, Klebsiella oxytoca
atgactcaaccagtaaaagatgaagatcaaaatgacgctgattttgaaaaagtggcaagcgaacagaaaagcctgacattctctctgtcttattctttcgtcgaaaaggctattaaaatcatcattttcgtcgctatcctggtatgtatttcagtgtatattgggaaaaaaatggatgtaggtgtaggtctgtttcacaagagcgtcaaaatagccgttcttaatccttcggctttgaatgagcagtatttaaagtcacacaatgggaataattccggttacatcccttatattcgcaagttgatggcgctgtaccgggctcgtgatttccttgttcttgatatgaattacgttattactcggccatcaacagtagatgaaattgcttacataaatgaatccgatgtagaaagggaactaactgaatatggtatagaccctaaatattatgagggtaaacagtga

SEQ ID NO: 185918 - DNA, 501 bp, Klebsiella oxytoca
atgttaaaaaatagcctgatgtttatgatggcagttattcttacagcttgtcatcaggtgcctgggtggcataaaacgctacccgcaattaactttaacccagaaaaaacaattgaaatgccagggaaagttacagggaaatattctgttcgcgtagtcaatgcaggtatcgatgtatatgttataattgacaatggttataatgagtttatgactgtagataaactttccttatacggtaatcgttgcggatatgagtctcaggaggagttgctcattcctcccgctgcagtcagtacatatatggtacctaatgttgcattattaggtctgtgttatacagatgatatcaagatgattttcattaacaataaattcaatggattgtccaaagataagaaggatacaactgtccctgttgaagtgatgatgcagtttaagcttacttctgctgaagaaaaagaggagtttaatgatgttatttatagctcgtggaattaa

SEQ ID NO: 185919 - DNA, 717 bp, Klebsiella oxytoca
atgacttttaagaatatagcttgtatttgcttattgtttccaactgcaggctacgtaatggcagactctcaactccagctaagttcggatgttatggttgaacagcggttgaaaaacatagatgtcaaaaccagtttttttaaaaacaaaattgacgatactaaatatatacgaatcaccaatctgacagtgtcattcccattaatcctttccttgcctgagattaaatattctgtcattgctaaaaatggccacggtacactgccatctgatggtaaagatatgatttgggtagaaccgggaagtaacgtaatactgaagataaaagaaggttcaaaattctatgattttgttccaattgtctacattacagggaaaaatgtccccaaaatacttactgttttaccaggtaaagaaataagcgcagcaaaagagacaatggtaattgactataaaaacccgccaactccaaaaaggctatccaataatgaaaggattgttaacttatcaaactttaacaatataaacaaactgaacaaaggttattataagattcaggtaaaccaatttacatcactgagctttgataaggaggtttttattattggacgaaacaacatgctggctgggtcacaatattttactaaaaatcttattgcctacccacgcgaaaaaataattataaacataagtggagaaactcatgttaaaaaatag

SEQ ID NO: 185920 - DNA, 141 bp, Klebsiella oxytoca
atgacgagattcaacggtctcaacaaagtgctgacgtttataaaaaacatgcacctcatcaataacaagatcaagccattgacttactttaacagcacccagcttggtcagtttatctttaccgaagtgaagagactctga

SEQ ID NO: 185921 - DNA, 399 bp, Klebsiella oxytoca
atgacgatggtgagtattaaaaaggctagtttcttcatagttccactaataatcctgctaggtatttattctcaaactatgaataaacctagcctctcgagctttatgcaaaaatcagttcacgccgtaagtctggcgggaactgaaaccaatatgaattttaaggtggttgatgaaaaaacaataatgattaacaatatcccttcgattgttaaaaaggagtacactaaaagccttagctctacagaggttccacctggtgccccctctggagactatctaatgctagagaccagtgcttatatctttgcgatgaagcaatctggggggaatacctacattggtttgattaaaaatttaattaacgaaggcgaaggaaaaatttggtggaaaatttaa

SEQ ID NO: 185922 - DNA, 219 bp, Klebsiella oxytoca
atggactacaaacatgagtgctatgacctagaaaagttacttttggctgatgatgagtttctgctctacctttttgggggggacaattcagaagctttacgcagggacctacaaatgcgttataacgccggtgagcgacttataactactcatgaatgccctgatttttcacctatcaggggctgcccaggccacgattgcgagactatcgatgagtaa

SEQ ID NO: 185923 - DNA, 609 bp, Klebsiella oxytoca
atgagtgatctcattgcctcactgaacggcggcgaccgggatattaatgccgataccctgttcggtgtatgcgaccggttcttcctggtcgagatgaaatcgtataaaagaaatgttcgtgatgaagcaaaaaagcctgcagtctgccttctctgcaatgcattacaaaaaagccctcaggttctcagctggcacagagcatgtcacttcatcatgtgggggcgtcttgttaagtattcgcttgatacctatttcaccatctaccaggacagtgtatgtcgggattccgtcctttcgaactgtggtggtctcggggaaccacctagaccaaccatttaccggggggaggacctggcaaggaacgcagctttaggtactgcgggcttatcaaaaccagatttttttaattacctgtggtggttgttaaatggccgggctgtagatgtagacgaatttaaaatcgcgcccggtagcaggttaggtttcagtttgtttggtacatcagatactactggtacggtaatcagtaaaacgttcaaaacttacgctgaccttgaagagtgggctgataatgcattaaggcgattaattaccaaccggggaaaatga

SEQ ID NO: 185924 - DNA, 237 bp, Klebsiella oxytoca
atgggactccagttaattgtaagagccgattataagaagatagagaaagtgctgggggagctgatgtcagaatgcgaagttttcccagtggtagaaggccttttgggtctctcaatttctgagcacaccctttcatcccggggggaagatgccgttctaagcaaacttgaacgactgaagcgttttgacctctggaagggttcctggcaatcagccagacgacgctggctctcgtga

SEQ ID NO: 185925 - DNA, 1458 bp, Klebsiella oxytoca
ttgaacgtcaccgccgcattacgccagtccgtcgaacgcacgtcctggtttaaaaaacgcaagagctatcgcgtcctctactggcgtgaaatcagcccgcttgcggtccccattttgctggaaaacgcctgcgtattgctgatgggcgtgttgagtacttttttggttagctggctcggtaaagaggccatggcgggcgtaggcctggccgacagcttcaatatggtgatcatgtccttttttgccgccatcgacctcggtacgaccgtggtggtggcgtttagcctgggcaaacgggaccggcggcgggcaagggcggcagcgcgccagtcgctggcgataatgaccctgttctcgattattctcgcggcggtcatccatgccttcggcgcggaaatcattaattttgtcgccggggatgcgacagaagaggtaaaagctctggcgctgacctatctggagctgacggtgctgagctatccggcggcggcaatcgccctgatcggcagcggcgcgctgcgcggcgccgggaccaccaaaattccgctgctgatcaacggcgggatgaatatcctcaatattattatcagcagcatcctgatttacggcattttctcgtggcccggcatggggtttgtcggggcggggctgggattaacgattgcccgttacattggcgcggtggccaccatttgggtgctaatgatcggttttaacccggcgctgcgcatttcgctgaagagctattttaagccgtttaacttcgccattatctgggaagtgatgggcatcgggatccccgccagcattgaatcggttttgttcaacggcggtaagctgctgacgcagatgtttgttgccgggatggggaccaacgtgattgccggtaactttatcgctttctccgtggccgcgctgatcaacctgccggggaacgcgctcggttcagcatcgactattatcaccggccgacgcctcggaaaagggcagatcgctcaggcggagcgtcaggcgtggcacgtcttctggctgtcgaccatcattttgacggcgatcgcctggggaaccgcgccgcttgccggcctgatcgcctcgttctataccagcgaagaggacgtcaaagtggtggtgaaagagctgctgtggctgaacgccttctttatgccgatctgggcgatggcctggacgctgccgtgcgcctttaaaggcgcgcgcgacgtgcgttacaccatgtgggtctcaatgctcggcatgtggggctgtcgcgtggtggcgggctacacgctggggattgtgctgggcatgggggtgatcggcgtctggctgggtatggtgcttgactgggcggtgcgcggcgttttgttttactgccggatggtcagcgggcgctggctgtggaagtatccgcgaacgaaagcgcaggccgacgagacccgcgcgcaggttgaagaaacgtaa

SEQ ID NO: 185926 - DNA, 291 bp, Klebsiella oxytoca
  misc_feature (55)..(64): n is a, c, g, or t
atgaaagttaaagagttgatagccatactgaacgaaagagaccctgaggcaattnnnnnnnnnncaattgttctgatttccggctatgaaacgataggcggcacggaagtcgcagaagctgatttgctcgttgaaatgcagtcaatatgcttagaaaaggctgataatcttacaggaaaccgtaaagttgtttcttccggaggtgaagattcagtttggttaggctggaaagatgattaccgtacaaagatgtttttagaagatgcccaaatttctgataaagatgaatga

SEQ ID NO: 185927 - DNA, 270 bp, Klebsiella oxytoca
atgatccagttggtcgcaaaccagattgtaaatattcaggaccatgggcaggacgcctatggacgtatgcttggtacaatctatcttaaaagccaggatattaatgccgtcatggttgcagaaggaatggcctgggcttatcgctatcaggatcgattaactgtacctgaatatgggactcttgagcagaacgctcgcaatgcaggtaaaggtctgtggtcggacccgaactcgattgaaccacgtcaatggcgcaaagcgaataaataa

SEQ ID NO: 185928 - DNA, 1989 bp, Klebsiella oxytoca
atgagtcatagttatgatggtgcctgggatgaagaatgggagctgattgcgaggctcaactacgagcccggttttgcccaatacactgatgaaccaagcctggcctggaaagcatttgagcaggggcaaatgcccaaaggcttgcgatctgctattcatgcgtcatggctacgtagccacgccgatggtattgatgcttatcgcttcgagtatcagttttgcgaacagagtgagctgcgcagaataatggcgcgtaattcactgctgatctccatcgcgcgcgatatcatgcgcaacctgctggcctataaccctgacgggcatatcaacttgacggatgccaatggcgtgatcgtgcatttttgtggtcaggatttgacgccaatcggtagcattctttgcgaggccgtacagggaacaaactgtaccgggcgctgcctgaaggaaaacaagctcgtttatttattgagcgcggagaactacaaagaagcgctgcgcatacgaggtaaacactgcgcggcagccccgatacgagatgaaaacggtgtgatgctgggagtactaacacttacggctaatcccggctgcttccactatcacacgctgggtacggttcaggcagccgcggaagcaatatcacagcaattgattctgcgtcgtttagtgaatgagcaggaatcagtaatggaattgcttaacgagggtgtattggtcatcagcgagcatggttcgattcgccagcttaattgttatgcccgtcaggtgttgggtattcaggaagatgtccgttttcgtgatgcagatgaagtattgcgaccggacggatgttctcttaaagaactgccggcctgcaaagatcgtaatatcacgttctgtcccgtcgccgattcacgtatttcatgtgttatctctgttgtcaccactcctgaaggtggccgcgtgatctcgatgcgtgataaccgacgcgtgcgtgatatgactcaccgtgttattggcagcagcgccagctataacttcgatatgattcttggccagtcacgtgtgatgcaggatacgcgtaataaggcgcgcagcgtcggacgtagcgatagtaccgtactgctgaccggtgaaagcggaaccggaaaggagctttttgctcaatctattcataattgcagtcatcgtaatgcaggaccgtttctcgctgttaactgcggtgccattccgcgcgatctggtacagagtgaattgtttggctatgaagatggagcctttactggttcaaggcgcggtggtgccgcaggtaaatttgaactggctgatggcgggacgttatttcttgatgaaatcggggatatgccgcttgaagcgcaggctagcctgctgagagttttacaggaaggcgaagtcatgcgcattggaggcaagcgtccgttgaaagttaacgtgcggattatcgcagcgaccaaccgggacctgaaaaaagatattgaacatggttccttccgccgtgacctctactttcgtctgaacgtaatcagtctgccaattccgccattgcgagctagaaaagaagatattaaagagcttacggactggttctgcgaaaaaatctgtcgggcacttggccgaaatcttgcgttgttttctgagtccgccctgaaattgatggaaagctacgactggccgggcaacgttagagaactggagaacatagtcgaacgcactataaatctcaccgaggtagaggaaatccgggacaaagatctgcctgaagaattacaccttcctgcctatagtgatttgagtataccaggtgggagcacaaataattactgtctgaaagatagtgaaaagacacttatacaacgctgtctggtggaaaaacatggtaacctgcgtcaggttgctatcgcgcttaatctctcgcgtggagcactttacaataaattaaagcgttacgatattgtggtaaatgaatatcggaaattcaatcatgaatattga

SEQ ID NO: 185929 - DNA, 1452 bp, Klebsiella oxytoca
atgtctacacgaaagcacaatgtgccttatctcatattcatatgtgccatcgcatccattagcgggatcgtccttggttacgatgcctccgttatctcaggcgtcatcgatccgcttaccgaacatctgtcgctcacaccagcacaaagtggttgggcagtttctaacgttattctgggatgtattgtgggagcctggggtgtcgggcgctttaccgatcgttttggccgtaaagcaactctgatcatcacggccattcttttcgccatttccgctatcggatcggcactagctaatgatctcacctggtttgttgtctaccgtatgattggcggactggccgtgggcatggcgtctgctgttactccactctatatcgcggaagtatccccaaaagaccttcgtgggcggatgctgggcatgcagcagatgctgatggttggtggccaattagtggtttatatcgtgaattacttgatcgccagaggcatggcacatgagtgggtagtatctatgggctggcgttggatgctggcatctgcacttatcccctgcgtgctattccttgtgatggctttcttcatgccggaatcaccgcgctggtatgcgatgcgcagccagaaagaaaagtcactcaaggtactgacctctctgtctaacccgggacatgccgagcgcttatatgctgaaattcgtacctccatcgccatcgattctgctttgctgagtacaccaacgccacgtggcattctgagggataaaaaatcgtgttacatcctgtggataggttgcgctatcgccgtattacagcaggtttccggcattaatatcctgatgtattttgcgccttcacttctgcaaaacgttaccggaaacactcaggattctctgttccagagtattttcctcggcctcgcactattggctggagtgagtattgcattggttgcctttgatcgcgttggacgaatcccgttgctgcgctggggggcattaggctgtgccgccttcctgttattcacctcatgggccttcatgaatgaagcgaaaggttatctgccggtcgtcggcttagtcggatttatctttgtatttggtatgtcctggagcctcggagcctggctgctgatttctgagatcttcccgaaccgcatccgggctgttgccatgggttatgcattttgctccctgtgggtttcgaacttcatcgttactcagagcttcccgatgatgaatcgtaatcctgtattgatggagcacttccatggcgctttccccctgctgctatgcagtggattcagcattatcgctttctggtttgttggacgtttcttaccagaaaccaagggcgtttcgctggagaatattgaaccgctaatgctttcaaaatcccgtcgttttggccgtgggcagcagatgcccgtcaccccagaatctgtttcgcaaaaatga

SEQ ID NO: 185930 - DNA, 1008 bp, Klebsiella oxytoca
atgtcagtaaaaaacattgttcgtgttggtcttattggtgcaggtcgtatgggcacctttcacggtgagaccgttgctcagcgcataccgggggcaatgctgattgctgttgccgatccggttccgggcgcagccgagaagctggccgcaagactaggggcgaaaaaatcttataccgaaccacaggctctgctgaacgatcctgaaatcgatgctgttgtgatcgcatctccggcgcgtactcacgctgaactggtcgtcgccgcagccaaagccggtaagggcattttttgtgagaagccaatggcggtcactctggaagatgcagataaagccattgatgcggctaaaaaagccggggttgctctacaggtcggcttcaaccgccgattcgtgagcggttttgctgccgcgtacgaggagatcaatgcaggtaaaattggcgtaccgcaactgttacgttccacaactcgtgaccctggtttgggcgatccaacaccgatcccgcactggactatttttcttgaaacactgatccacgattttgacatcctgctgcacctgaatccaggcgcgaaacccacccgcgtttatgcggttgctgatgcattagtgcgccccgattttaaagatcgtggcctgctggacaccgcggttgtaaatatttgtttcgacaatggtgcattcgccactgctgaagctaacttccaggcagtgtacggctatgacgttcgcggtgaggtcttcggtagtaaaggtatgctgcaggcaggaaatatcaatgtgaataactgtgtgcgttacaccgctgagggtatctctattgacaccgcgcgtcgtgataccgatctgctgcatgatgcctatgttgcagaagtgaccgatttcgtacattgcgttgcaacgggcaccacgccgaaagcgaccggtgaagatgcgcgtaatgcgctggaagtcgctctggcatgtatcgcatctgttcaacagtctcagccgattaagctctaa

SEQ ID NO: 185931 - DNA, 780 bp, Klebsiella oxytoca
atgtctacttactcactttctgtctgcgctgaaatggtattccttgatttgccattcattgagcgcgttgaacgcattcacggcatgggcttcggcgtagaaatttgggactggacccaaaaagatattgatgcgctggcgaaaaccggtgcccgatttacctcaatgacgggctatatctcgggcaacctgaccgatgatgaagaaattgatcacctgctttccagcgccagtcagtcacttgaagccgctcgccgtctcggctgcccgtctcttaacttgcacggcacagggctgaacaatgttggtctgccggtgaagcctgttgaaattgtgacaggtgacatgtggctgaaagctaagaagacgttggatgcccttgcggctatgggggagacggcgggcaaggtattcactctggaaaatctgaacaccgccgttgatcatccgggaacacctttcgctaaagcagaggaaaccatggccctggtgagcgcggtgaacagtccatacctgaaaatgaacctggatatttatcatgcgcagatcggtgaaggcaacctggtcgagcttatccgcaaatgtgagaaacatatcggggaaattcaggttgctgatgttccgggccgtaaagaaccgggtaccggtgagatcaactataaggcggtagcccgcgcattgaaagggattaactatcatggcgtggtcgcgatggaaggttgggcatcgggtgattctgttgtcgcgcttaaagctttccgcgaagcgtttacgctataa

SEQ ID NO: 185932 - DNA, 897 bp, Klebsiella oxytoca
atgagcgtatcaacacgtattcatgttggcgttagtccgctctcatggactaatgatgtactggaagatctcggtggcgatattccactggaaacctgtctggcagaagcggcggaggcaggctatgaaggaattgaacttggccgaaaatttccacgaaccatcgacacacttgagccggtgctgattcaggcaaagcttaagcttgtgtccggttggtataatggcctgatggctgaacgaagttttgaggatgagttagcagcggtgcacgatcatgccatgttgttaaaatccctgggggcaaaagtcatggtatatggtgagtgcggcgcgatgcccggactcacgccactcgatgagcccctgtcgaaatctcctaccttaggagagattgatctgccccaatacgctgaaaaagtgaataatttggccgtgtctttactaaagaactacggtttacgtctggcttatcatcaccatctgatgatgattgttgaaaccgacaatgaattgaaagccttcctgaaagcgaccaatgacttagtcggcatcgtcctggactgtggtcatgcaaccgtggcaggcgtagatatcgaatgggtgcttgaaaattatggcaaccgcgtggcgcatgtccatctgaaagatgtgcgcggtgaagtactcaataacgtcattaacaataacctgagcttcaatgatgcagtaagagcaggtctgtttactgtgccgggcgaggggatagttaattatgctccggttattcatttccttaaaaactcaacctacgaaggctggattatcattgaagccgaacaggatccagaaaaagcaccacctctggagacagtaaaaaaagcgcgcgcatgggttaaaaacgaggtggggatttag

SEQ ID NO: 185933 - DNA, 654 bp, Klebsiella oxytoca
atgagtcaagcatcagaggtcgaaaaccagctaagaaaaatgatcctcagaatggatttaggaccaggggaaagactgactgaacgatgggcagaggctagttttaacgcgtcgcgaaccccggttcgtgccgcattacaaaaattagaatcagagggacttgtctgccgggatggattgcgttggatggtggcacccatcgatattaaagaggtagagcaattgtgtatttaccgtgaagtgcttgaagtagctgccgtacgcctggcggccaacctgatatccaaagagcaactggacagtctggaagcactgttcgtggattgcgatcaagatgatttggaaaaagatcttaatgaccccggaagtcagtttcacctacaattggcaggtttctgtggtaatacctttatcatagaagggattgaggattctcttagacgattatcccgcgcgcgctggttagataaagagcccactaatccagcctggaaagagcacgtagagattgttagcgccctcagggatcaagaaacagataaagcggcagtattactttcccgacatctgagcgaaagccgtaagcgtcttctggaatcaattaatttaagccgtcgcagccttcgggccagtgggatcgttattacaagctag

SEQ ID NO: 185934 - DNA, 588 bp, Klebsiella oxytoca
atgactcagctcaacaataccgaaaaaaatagtgctctgttagtgatggactttcagaagataatcattaataactttttgcaacaagaaagcgccagaaccgtcatccgtaacacagcatcactcatttctactgcacgcgcagcaggcgtaccagttatctatgtcagtgttggattccgcaatggctatcctgaggttagccagaacaacacaatattctcgtcgattaaaaacaatggaatttttattaacgatagtgaagaaacggccattcatgaaggtgtcgcacctgctgaaaatgaggtcgttattgttaaacgcagagtaggggctttctcgtttaccgagctcgatatggttcttcgagcgcagggcatagaaaatttgatcattactggggtaactactagtggcgtggtactttctacggtcgggcaagcttttgacctggattaccgtctggtagttgcgagtgattgctgcgctgactctgaccatgataagcatttatttttagtcgaaaaaatcttacctcaacacgctattgttacctgttcatctgaaatatcagctaattgggcgtaa

SEQ ID NO: 185935 - DNA, 1524 bp, Klebsiella oxytoca
atggaccatacgatgacgaaaaacaccgggagtataccacatatcatctggtcggcggaggcgctacggcgagcggaaaaagaggcggcggatgcccttgggctgacgttgtatgaactgatgcgtcgtgcgggcgaagcggcttttgagcttgcgcgcgtccagtatcctgaaagccagcactggctgattctctgcggccacggtaataacggcggcgacggctacgtggtggctcgcctggcacagtcgcgaggcattcaggtcacgctgctggcgctggagagcgagaagccgctgccggaagaggccagcctcgcgcgtgaggagtggctcaacgccggcggcacgattcatgccgccagcatcccctggccggaagatatcacgctgattattgacggcctgctcggtaccgggttacagagcgcgccccgggaaaacgttgcggcgctgatcgcgcgggcaaacgcccatccggctgcggttgtggcgctggatatcccctccggcctgaatgcgcaaacggggacgacgccgggcgcggttatccatgccgctcataccatcacctttatcgcgcttaagccggggctgctgaccggaaaagcccgcgatgtcgttggccgtttgcatcaccacgccctggggcttgagggttggctggcaggccaaacgacggcgctcagtcgcttcgatgcctcgcagctccccggctggctgccgccgcggcgtccaacctcgcacaaaggcgaccacggtaagctggtgattattggcggcgaaccggggacggcgggcgccatacgaatgagcggtgaagcggcgctgcgcgcgggcgccgggctggtgcgagtactgactcaccgggacaacattgcccccattctgaccgccaggccggagctgatggtccatgagctgacgtcccgttctctcgaagagagtctgcactgggcggatgtcattgcgattgggccgggtctggggcagggcgagtggggtaaaaatgcgctacgccaggcggagaattttcgcaaaccaatggtctgggatgcggatgcgctgaacctgctggcaatcaatcccgataaacgtcacaatcgcgtgctgacgccgcatcccggcgaagccgcccgcctgctgaacgtgagtgtggcagaaattgaaagcgatcgcttacattctgcacaacgtctggtaaaacgttatggtggcatcgtggtgctgaaaggtgcaggtacgatcgtggcgagcgaaacgggcgaaatggctattatcgacgccggtaacgctgggatggccagcggcgggatgggcgatgtgctgaccggtattatcgctgcgttgttaggccagcgcctgacgccgtatgatgctgcctgcgccggatgcgttgctcatggcgaagccgccgatcggctggcggcgagacacggcacccgcggaatgctggcgaccgatctttttttcacgctcaggcgtgttgttaacccggatgtgattgacgtagaccatgattaa

SEQ ID NO: 185936 - DNA, 1677 bp, Klebsiella oxytoca
atggcactaacagatcgcgctatagtccacgccaagccttgtggcaagccgtataagctcagtgactcgcatggactttacctgctggttaaccctaacggttcaaaacgctggtacatcaagtaccgctttgtaaaaaaagagaaaaagctcgctttaggcccttatccgcttttgacgcttgcacaggcaagacgcatgcgtgaagaggcccaattactgctgatttccggcatcgatccgagcgcacaccgaaaggctgaacgccttgctgtaacgccggaacatacgtttgagtccgtagcacgcgaatgggtctccagcaacgtgaactggtcggcggaacataagaagcgggtgctgcgttatttcgagctttacgtattccccacgaacggcagttgcgacatcaccaaaatgaaggttaaagacctgctggtacccatcaaggaggtggagaaagcgggtaaactggatgttgcttcccggcttcagcagcgcactgcctgcgtgatgcgctacgccgtccagaacggtattatcgatcataaccctgcatcagatttaaccggcgcggtttccacgcccaaagtacgtcaccaccctgcattagatttgaatcttatccctgatttcctggatagaatcgacgattacaacggccgtcaactgactcaactggcggtaaagctggcgctgctgctgtttatccgctccagcgaactgcgctttgcccgctgggatgagattgatctgcgtaacgccatgtggacaatccccgccgagcgtgagccgatccccggcgttaaatattcagcgcgtggggcgaagatgcactccccacacttggtcccattgtcacgtcaggccatcgaactgctgcacgaggtgcggcagcattgccgaccgggaactgaactggtattccccggcgatcataactaccgcaaaccgatgagcgaaaacaccatcaacaaagcgctgcgggtgatgggctacgacacccagaaagatgtctgcggtcacggttttcgcactatggcctgtagcgcgctggtggagtcgggcctgtggtcaagcgacgcggtagagcgccagatgagccatcaggagcgcaagcgcgtgcgggcggcgtatatccacaaggcgcagcacctggaagagcgccgggagatgatgcagtggtgggcggattatctggatgcaaaccggttcaggcatgttgtgccgtatggcttcaaaaaatcgccgggaggcgcactcgaccatatgagcttccaggagcgcaatgaccgacaaatggaggagctgaaagcccggatactggccgactcggaatggctgacggcgtctgagttatcggcaaaagcgggtttccgttctgccgatcctgaggcaggcccgaaaggctggaaagccgccgggaagatattctcgctgaaggtcgatggtgaggatttatacccggattatgttctggatgagaaaatgcggcccctcaaggttgtcaggctgattctctcgctgttcaaagaacgcaaaacgccctggggactggctatctggttcggttcggcaaaccgcaggctgcgaggtggaaggccgaaagatttgctgacttcgaagtcagagttggttctgatggcggcgcaggatgaggtggaatcgggggagtag

SEQ ID NO: 185937 - DNA, 453 bp, Klebsiella oxytoca
atggtgcgagtgaaccacacagcgttggatggaaaaatagcaggtaatttgtgcactttgattgatgaggaagcactggcgcaggccagagggcaattggttgcacagggctggctgacagcagatgaaatatccctgctgacggattttactcctgaacagttcgctaagtggaaacgcgagggctgtattttctcggtacataaaaatggtgtaggggaggcatttcctggttatgcgttagatgaaaacttgcggccattaccggtgatgaaatcgattctggatattctgacaaaggtgaaaacaccatggggcatagccgagtggtttgctacctcaaatgatttattggcaggcaagatgccggaggagatgctatcgcactatccggccaatgtaattcaggcggcggaagctgaagcatggcaactcattaatggtgctgaatag

SEQ ID NO: 185938 - DNA, 873 bp, Klebsiella oxytoca
atgatctctccagaaacgctgcaatccgccatctctaacgtctctgtctggcgtcagggtgacgtatgcgcgccgcataaaccgctgctgctgttgtacgtactgtcgcagtacaaagcaggccatccacgcctgtttaactacggcctggagatccacgaaccgcttactcgcctgctgaaagagtttggccccaagcgacgcaccgactatcccaatatgccgttctggcggctgcgaacagacggcttctgggagatcgctcacgcagaaggttgcaaaccgcgcaagggcaatactcagccgacaaagaaagaactgattgataaccaggtggcgggcggcttcgatgaggcggcttaccaacaattgctggcccaccctgagatgatcgaccagttggcccagaagatcctcaccgatcgcttcccggaaagtattcagcggatcctggccaaccaactgggattcgattttatcgatcgctccaggaaccgcgatccgcgtttcagggatatcgttcttcgcgcttaccactcacggtgcgcgttctgcggttacgatctcaggctggatggcgcgctggttggtattgaagcggcgcatattcactggaaagcgtatggtggcccttgcgtggtgaacaatggactggcgctctgtacgttgcaccatgacgcgtttgatatgggggcattcgggctggatgagagtatgaccatccgcatctccggcggcgtcagtcgtagtccggtggtcgaccatctgttctggcaccgggacggccagcagttattccttccttatgacaaaacgcagtggcctgctgaacagtatgtcggctggcaccgtaaacagattttcaaagcctga

SEQ ID NO: 185939 - DNA, 954 bp, Klebsiella oxytoca
atgaaacttattcgctacattgtggcccttacgagtgtcatcatgttttctctgccagtgatggtctgggcgtcatgcgcctttacgggcggtgcaacctcagaaattagcggctatgtcacatttggcaatgtgtctgttcaacgcgatgcgccgataggcagcgtgcttgctacggcgacaaccgggacttataacggtgggcaggcgattgccggatgttctgaatcctggacttatcgctgggaactgagcaaatggagctcgttgagttcccaggggaacaaagtctataacaccaatattgcaggagtggggctccggctaacaaacactgcatctggaaagttgcttccctatgaccaaagtatgggaacgggcagcgtcattattaatgctgatggtattaaagctgaattaatcaaaacgggcgatattacgggcggaaccctggataccggtatgctggcgcgggcctcggtggcaaaccagttttattttgccaatgtcaccctgaatggcacaaataccattacctctgaatcctgctccgttaccactaacctggttaatgtcccgctgggggatcatgacaaaagtgagttcagcggtccgggtaccggaacggcctggcagacattcaatatcaatctgagttgtgttcagggcgcgcgaattaatgtgcgtattgacgccacggcagatagcgacgcaggcgtacccggcgtcattaaactcgacagcgatcccgttaatgccagcggtgttggtgttcagctctggtatcgctatgaagacagcccggtacagttcggtcaggagcggtattactacacctcgccttcaggtggtaacgaatatgttcagcttcaggcgcgctattatcagactacgcagagcatcacggccgggaaggcgaacgccacggcaacgtttacgttgacgtataaatag

SEQ ID NO: 185940 - DNA, 957 bp, Klebsiella oxytoca
atgacccaatattggtggaaagatctttttgatcgcaataataactggcagggcctggagctgacacttaagagcaaccagaggaccgacgtggcaatggaaatgctaagtggtcgttatgggcggatggcgctgcaggtctctggggagacattattctgggcatcgatgttgaaagatcattctggtgtctggttggtgtttaatgccgaacattccgcttgccagacattattaccggctgtcacatctgaagatattgaaggaattaaaaacaaaggcgaacgggcctggacaggtgaatggtgtcgctatttttcccggcaattaatgaatgcgccagtgcctcttctgtctcctcgccgatggctgataaggccgatggaggccaaatattcattaccgaaattatccggacagcgtgttcctgcaaatggctggcgttttgatgccccagaaagcagcgggaatatcggctgtagctggacgctctacggcgaagattttcctgatttggtcaatcctgacaaagtcagattagtggactggtggtggagaggtagcctgctacttgggcgttatccgatacaacctgatgccggaaggttgaaatggtggcgtaaaaaatgccgggagggtgcgctgcctccagtacttgtctggtatatagcagggctgggatcatttgttattcttgatggtcattatcgtttacaggcagcgattgcagaagaaatcccaccttcatttctggtgctcagcgaattgcaggaacgggattttgctatcgatcaagaaaatatccgcatcccccttgaagatagcgaccacatttgggacatcgtgccaaacattgtgcgccgcccttattatagccagggcggtgcgcgggaagttccattgtttttagctggggcactcataacgacaaaaggcaccctttcggatgccctttaa

SEQ ID NO: 185941 - DNA, 279 bp, Klebsiella oxytoca
atgatcaataaagtgaactacgaaaaagcaatcaacctcattatcgcgcagggtgcgagccgtcaggctctgtttgccatgtgtaatgatatggtaaacgccaacgggcgtgatggtggccatcttgcgtatgaactgttgaaccatgcgttagatagtgatctcccggctaacgttgaggatgtggtactggatgtactggacgcgctgagcggccactgtaacccggtcagctacattggttcgggggattatcacgtagctgcacaagccgcataa

SEQ ID NO: 185942 - DNA, 528 bp, Klebsiella oxytoca
atgaatgctttcgttcaaaaatggggcaagaaaattggtgtggccgtggttgtaatgtttgcggctaaaggcgttggcatgatgctgggcaaatcaatggcggagtcaaaccgctctacctatagcgtgaacgcaccaaagacggtggaagaggcttatcgaatcggtgagcaaacaatgatggcggcaatgaataaacccgcatccgagttttgtaaaggccaggcgcaggattcctttaccgaactgtcgaaaacaatcatctttcctgatccggctgctatgaccgactatctggcgaaaagctgtaccggcggctctgatatagctcgaaaaatgcgggacgagtggggtagcagtgcccagaaaattaaatcctccgctgctgatttatcagagagcacgcaaaacattgcaacaaaacttaaaggtcagggtatcgatgcagatctagcgctgccgatagcaattcagtacatccacatggtgcaagttggctacgaaatcgaagccctgaaagcacattaa

SEQ ID NO: 185943 - DNA, 360 bp, Klebsiella oxytoca
atggaaaaagcaatgaaactgattaaaaccctgatcgccgcactgctgttgactgctggcgtagctcacgccgacggcgttgatctgacccctgccgattgtacccacgctaaaaaagccatggaggcctataacgcgaaggtcactaacaacccggaataccgccggacgtttgaagacaaggccacgtatgcgtatgcactggcgtgccagtctgctggattgattgacatcccgatgtacctgacgcaagcgccggaagcctccaaagaggtgcgcgaatattgtgctgataacgctcgctcacgtggcgaggcagaacgttgcctggtatcaggcaagctggactctgaacagtaa

SEQ ID NO: 185944 - DNA, 423 bp, Klebsiella oxytoca
atgaaaacttataaaaaagtaattttgggcatcttgatgcttctctccctgctccctctgatgaacatcttaacttcttacagcgctggctatgtggccgtgatgtttctcctgattggtattgggttctggttcaactggaattatgccggcggcgaatggccgaacatgtcctatctacaggcgtgcggtattgcactggggctggccgcaggcggagtgtatatcagcgttgtagcccttgcggatcagtatcatcgcagcgtaggtgaagttgtgcaggtgctctttgaaagctctccgcaggtctatttccagccttttattatcacaccgatttcgctgctgatctggcgctggttgttcaaagagcctcggctggctcgccagagcgccgtaaccaccatcaccaccactaactaa

SEQ ID NO: 185945 - DNA, 222 bp, Klebsiella oxytoca
atggccgatatgcctgttataagattcgtgtgtgaccagtacccaggtctgctgccgctgggcggagcgcttgcaaatcaagcggtggtgcattccaatggccatcgagatatggacgagatacgggttgagcgtgcggtgtactcgctgcggcgtaagctgctgtttgttgagcactatgcagatctgccgctgcaacggtacgcgccgcgccagctgtag

SEQ ID NO: 185946 - DNA, 264 bp, Klebsiella oxytoca
atggaaaatacgggatcaatcaaaaaggtactgggcaacagaatcagggcgctacgcaatgagatgggactgtcccaggaagcttttgctgataaatgcggcatcgatcgcacctacatgagtggcattgagcgaggagtaaggaaccccacgcttgttgtcatttgtgcaatttcagacggtctggggatggatctcagccatttatttatgttcgacgataccgcagaaaaagacggcgaatcaacggattgtgactcatag

SEQ ID NO: 185947 - DNA, 996 bp, Klebsiella oxytoca
atgaaaagaaaactaaaaaagaacacaaaatttatagatgcaaccgaactgacgcttgaagaatggcttaatatgatttcggttgatcggagggagcgagattatgatataatggattttcaattcccaaccaccaaacatttagaagaatacattatcaacattgataaatattcagaagacgatgtaaaagatctaatttacaaatttataattcccactgcatttttaggcggtgatgatatcatcagaaactgggtttttgatagtggaaaatttaacatcagagaaatattcaaccatgaatcatttcttaaaagattaatttcagtaaatgaaaaaaatccaccatggcaatctatctcttggattcttgatttactaccccaaaacccttatcaagcagtcagtgtcgttaatgcttatgtgacagcgcacattaggtttctgtctgacaatggattttatcgatgtgaggatattatttcattaataaatgcaaaatttatcaatcatccactgccaactaaagatctgataagaaaaatatcctcacgtgattttgaacttctttgtggttatttatataataaaaaaggatatgatgttaacatcactaaaaaaactagagacggtgggtatgatatcattgcagaaaaaggcaacggaagggaacacgaggtgctttatattgaatgcaaacaaaaagaaactaaagtcggagtagaaatagctcgaaatgctttgggtttactaaatataaaaaacgccacaaaatcagtaattataactagtaattatttcacaaaagatgcactaaaagcttcacaagaatcaaagcgacttgaactcattgacatagataattttgataatgatatgcgagaacatgttgatccaagatgggtttatcgtatcgatggatacattaaagaaatgaaaaacatttcaaataaaaacttaatccccaatattaccaatcaagaatttatttaa

SEQ ID NO: 185948 - DNA, 1602 bp, Klebsiella oxytoca
atgacgaacgcagcaatcgcggtaaaagactcaaaaaaacagtcgatggatgattcgacagaaaagaaatccatcgatttcataagatcaaggcagtcaaaaactcttatcattggtatatgtggtacagttggttctggatttagatctctcgttgagactgtaaaggcagaattagatatttatgattatgatactcatactattagagttagtgacataatcattgacctctccaagaaacatccaaatcttgttgaactacttatccgcaatgcggcagaacgttacctacaattacaaagccaaggtaacttaattagagataaaatagaaaccacttatttatcccaagcagtgattagcgaaataactaggataaaagctgaaattaagaaaaagaacaatattgatcttgaaaaaaaagatattggtaaagtcgcatttattattgaccaactaaaacatcctcacgaagttgagttactcagattaatatatccgcataatttttatttatttggaatgcttagaagtgaaagtgaaagaattataaatttaagggatgagggcatatcaacaaatgatatatacaagatcatcactgaagataaaaaatccgagaagaagacaggtcaacaaactgaaaaaacaattttagactctgatttttttataaataataactctggtaataagtcactacaaaagcaagcaatttcacgatgcattgcactgattcatggtaaaaatggtataactccaacccgtgatgaaaaaggcatgtatacagctttttctgcttctctaacatctgcttgtttatcaagacaagtcggagcagcaattttaaacgatgatggcgatattatagctactggacgtaatgatgtccctaaaccttttggcgggctatattatgaaacagggaacattgcagatgatcatcgctgcatccataaaggaggccactgtttcaatgatgaacataagaataaaattagagagaaatttgaatcaatactaaaaaactataacattttcactcacgaagaacctaaatcatctgaagatgaactaacttcttctccaaaaccggtatcacctagcgagattgctaatctgttattcaatgagacacctgtgtcttctataatagagtactcaagagcaatccacgcagaaatggatgcaattacttcattagcaagaaatcctagtgaaagcacaaaagataaaatattatattctacgacatatccctgccataattgcgcacgacatattgtagcatcaggaatcaaaaaagttgttttcatcgagccttacgaaaaaagtttagcattgcgattacataatgatgccattactgagctaaatgaagcttacaaggtaaattttgtgttatttgaaggggtatcaccaagacgatatcaaaaatttttcttggctactggagatagaaaagacaaaaatggaaaagctaaactattaacatctaaatatggaaatcatatagatatccaatttcttgatgctccagatgattatgaattgaaaattcatgaagatttcacgaaaagtttctcgacatctgattaa

SEQ ID NO: 185949 - DNA, 189 bp, Klebsiella oxytoca
atgtcagttgaaaacgaaggtgttgtgtacgtcaattttaaatcagtctcacaaagttctgattgtgagaagacggtttttgaaggatatgatatggctatccattcaacgatagtaactatcgaagaatacgaaagaaaaaaaatcatagatgaattagtggaacgggctgaaagtaaaatttggtaa

SEQ ID NO: 185950 - DNA, 633 bp, Klebsiella oxytoca
atgagtgagcaacgggccccaccttcgtctccaccacaaggaccgattggctggctgctgtcgctgtccggaaggttaatcgggttggttattggtgcgctggtgctgcgcgtagtactggaactggcggggctctatttctggtggccacaggagggaagcaggcatgtttttcaggtgatgagacaagagcgggtggaactggttattgcgttgcaatcgcatccgctggggaatgaaattctggtgctgctggaaaaagggacaactcgtgtacttatggccaacaggctcctgcaaaaaccgttcaccgccctggcctatacgctggtgagttttatgcagcgcctggtatggcttgccgctatgctccccctgatttgcctgtgtgttgtaatcgggctaaccgaagggctggttcaacgggacttgaggcgctttggctccgggctggaatcggtttttttccaccgttatgtcatcaggtcaggcagttcagtcgccaccacgctgtgggtggtttatctggctcagccactgtttctgcctgcgatactgcttttattacctgccgccttatggtccgggataacggtatggatggccgccgggagttttaagcgttggttataa

SEQ ID NO: 185951 - DNA, 3516 bp, Klebsiella oxytoca
atggatgaaaatgctttagggtttgcctcatactggcgcaactcgctggcagatgctgagtcaggaaagggcagttttgaacggaaagacgccaaaaatttcactcactggcatgggatagcggcgggacgtcttgacgaagcgatcgtcgataaattttttgaaggagaaaaagacgacgtcgaaacagtcgatgtcatcttgcggccaaaggtttatttccggttactgcagcatggaaaggaccgttccgctggtgcgcctgatattgttaccccgatagtgacgccagccctgttgagccgtgaaggttttttatatccgacgccagcgacctccattcccagagacctgcttgaacctttgccaaaaggggcattttcgattggtgagattgagcagtatgacaaatataaaacgacacatacgtcattctctatcaactttgatgacagcgttgataacactgccgaaacggatgaagaacgagaagcacgatatgcagcctggcagcaggattggcgtcaatatctggatgattcagagaggctactgaagaacgttgtcggcgactggattaaaaatcccgagcaatatgaactcgctgagcacggttatattgttaaaacggcgcaatctggcggcgccagtttccatatcctttcgctttatgaccacctgcttgtttgcaaaaaggatgtgccgctcttcaatcgcttcgcctcgcgggagatccaggcagcagagtctttactcgccccggaagcaaaattcagcgacaggcttggacactccggggataagttcccgctggcaaaggctcagcgcgatgccttaagccattttcttgatgcgaagcatggcgatatccttgccgttaacggccctcccggaaccgggaaaaccacgctggtgctttctattatctccacgcagtgggccagagcggctctcgaaaaagcggagcctccggttattatcgcgacttcaacgaataaccaggctgtaacgaacattatcgaggcgttcgggaaagacttttcccagggtactggtgcaatggcgggacgatggttgccagagctgaaaagcttcggcgcttatttcccctcaagcactcgtaaagccgaggcagccaaaaaataccaaactgaagatttcttcaaccaggttgagtcaaaagagtatgtagagaatgcactgctgttttatctggagaaagctaaggcagccttccctgaaaaagattgttcaacccctgaaaaggtcattgaactcctgcatggccagttagtagcaaaatccgaacaattggtaaggctgaatgcagcatggcaaacgttaagccaggttcgggaggcgcgagagcttattgctaacgacattgagcaatatctcgataatttaaataaattactctccgggcaagaacaaaaagtcactcagctaaagagtgctaaagcggaatggaaaaaatatcgggccagtgaatcactgatctattcattattttcctggcttccagcggttcgcagtaagcggcagtaccaaatacaactgtttctcgaagataaattaggcgcgctgattgcgggaaatcagtggtcggatcctgaaaccatcgaacgtaatatagatggactgctcaactccgctgagcgcgagcaaacaacataccggcagcagattgattccgcccatgaaattgttcttaaagaacagcaggcggctcaggaatggcagaggctggcacttgatttaggacatgagagcgacgaggagctgagcttctcacaggcagatgaactggctgatacgcagattcgcttccctgcattcttactgaccacccactactgggaaggtcgttggctaatggatatggctaagatcgatgatctgcaaaaagagaagggcaagaaaggagctaaaggggtaaccgcccgctggcaacgccgaatgaaactcactccatgtgtggtcatgacctgctatatgcttcccggcaatatgcagataagtgaacacaaaggccaacgtaaattcgagaaaagctatttatatgacttcgctgatttactcattgtcgatgaagccgggcaggtgcttcctgaagtggctgctgcctcgtttgccttagctaaaaaggcattagtgattggtgatacggtacagatcccgccaatatggagtattgctcccgctattgatataggtaacatgctggcggaaaaaattctgtcaggtagtacgcaagaagagattactgagaaatatacggcaatcgcagagcttggtaaaagcgctgcatctggcagcgtcatgaaaatagcgcagtatgcctcacgctatcaatatgatcccgagctggctcgtgggatgtacttgtatgaacaccgccggtgcttcgataatattattggatactgcaatacgctctgctaccacggtaagttattgcctaaaagagggcgtgaagagagcaatttaatgcccgcaatgggttatctccatattgatggtaaaggagagctggcaagtagtggaagtcgatataatttgcttgaggctgaaacgatagcggcctggctgacagataaccagcaagatattgaaacgcattacggcaaatcgcttcatgaggttgtcggtatcgtgacgccttttagcgcgcaggtatcgaccatcaaacaggcgctgggtaaacaaggtatcagcactggcgcgaatgaaacgtcgctcacggtgggcaccgtgcattctcttcagggggcggaaagagcgattgttatattctcgccagtctattcaaagcatgaggatggcgggtttattgatagcgataacagcatgctgaacgttgctgtctcccgtgcgaaggacagtttcctggtcttcggcgatatggatctgtttgagatccagccagcctcatctccgcggggattactggcaaaatatctctttgagtcagagaagaatgcgctctcttttgattataaagagcgtaaggatttaaaaactgccgagaccaaaatctacacactccatggtgtggagcagcatgataatttcctaaatcagacgtttgaaaataccggtaaacatatcacgatagtttctccatggctgacctggcaaaaactggagcaaaccggttttcttgattccatgattgcggcgtgttcacgtggtattaacgtcacggtagttactgacagaagctacaacactgaacataatgattttgagaagcgaaaagagaagcagcagaacctcaaagcggcgctggagaaactgaatgcccttggtattgcgacaaaactggtcaatcgcgttcatagcaaaattgtaattggtgatgatggtttgctgtgcgtgggatcattcaactggtttagtgcgacacgtgaagcgcgatatgaacgatacgatacatcaatggtttactgtggtgataacctgaagggcgagattgaggcaatttacaatagccttgagaggcgtcaggtttag

SEQ ID NO: 185952 - DNA, 1008 bp, Klebsiella oxytoca
gtgacgactaaaatgtggatgatccgcggcgatggcggaaaattgtacgatgactttagggacaaacaggttgttgcaatcggctggtcgcagctcgctccctatgtgaaaccgggatgctcaagagagcagttgtttacccggtatcaggagcttgagccacagactaagccaggcacagttcgttccggtgcttcccaggtctggcgctttgtgaatgaaatgcagaaaggtgactgggctatcacttattcaccttctaatcggacttatttgatagggaaaatcgcctcagattttgagtttcatgccgagtggcttgaagatggcatgggcatcgcccgtaaagtgaagtggaacgcggaagagattaagcgcgatagtctgagtgatgcaaccagaaacactcttggctctacgctgacggtttttcaggttcctgattttgccgtgaatgaattagtgcagggcaaaaagcctgtctcagatgtcgtgccggaagcaattgtttcaggtgaagaggatgaggttgtttcaaatcctctgcgcgacatggagattatcgcttttgaaggtatcaaggatcgtatcaaccgtctcgactgggatgagatgcaaaatctggtcgcaggcgtgttacgtagtatgggatataaaactcaggtatcgcctgctggtgctgaccgtgggaaagatattattgcttcgcctgacggctttgggttcgaaaatccgcgcattattgttgaggtgaagcaccgacgggaacagatgagcagccagcaaatccgtagctttataggtggccgtcataaagacgatcgcgggctatatgtcagtacaggcggattcagcaaggatgcgcgctatgaagccaatcgttctacaatcccgttgacgctatggacgcttgacgatctggttcgtgcgttagtggaaaactatgagcaagtggatatagagactaagctattagttccactcaagaaaacgtatttgcctgcatga

SEQ ID NO: 185953 - DNA, 1350 bp, Klebsiella oxytoca
atgaaacttattgctaacggattaaatggagagttttttagatcatgtttaccccctcctggtaaagaaattgatggtgttgttgccgccattgcttatggagatgataaaaccacgctcctcgagcattgtataaaaaaccatcaccgacttgatatttggatgcgatatgatcatacagttcctgtatcgcctgcatttttatcaaaacttctcgcaaacgttaaaaataatattttttgtaaacttataccagatcgcctgcacagcaaagttatttggtggaagggatatggcgcttatattggttcagctaatttaactgagcgtgcatggtactcgaatatagaagccggtattttcttcactgagagtgatttatacagttctaatttaattgaacagttagaggaattcttcgataacttagcatcacttgactcttgcgttgatcttagtaaagagattattgatgaacaaagacaattattaaaactaaaagtcgaattagagaaaaaagaacgagagcttatcaaaaagcggaaaatacctgaatggggtggcgtgaatttttttgataacaaaaaaactaaagatagaaggaaagagagtttccataaagaatgggaaagcacattttcaatcatcaagagtatctcagaccaaattaatgattacagacctgcatggatatcagaagatactccaaagttttggcaaaccgatcaatttctacacgcatactattataaaaaagttcatcaacaagataatacttatccttttgaggattatcaccgtaccaatagtaaaaacccacaagcagtattgatgaatatgctctcctggtggaaaatccaatcagttcctccgtctaatgaggatattcatcttgggatttacgccccctacattcgcgaacacttgtcaaaaaataatattgactcattgacagaggataagctctatcaaatattctcttacacacatgcaacaatggaccatgtgataaaaatgagcgctgaaacatttggctattcagccaaaacatccttaaataaggaagagcgcgccgttttattcacaaaatggatcatgggccaaaccaatcaaaaaggtatgactattgctgaattgctcaactatgtcctctacggtggaaagccttcattaatgtgggaaaggctctatctggcaggcaaagacgaggagtacaaattccagcattacggtattaactctattgctgaagtggtcggttgggcaaggccagaagatacgcctcccagaaatggcagaaccaataaagccttgcgtgcattaggctatccagttcgcgtgaatatttag

SEQ ID NO: 185954 - DNA, 2598 bp, Klebsiella oxytoca
ttgcaaaatcaggaatttattgccggccttaaagcaaaattcgccgaacatcgcatcgttttctggcacgatcccgataagcgtttcctcgaagagctgggtaatctcgaactggagaacatcacgctgctcgatatgaccgaccagtcacagcttgcggttaaaaaacgcattgaaattgatgagcctgaacagcagtttttgctgtggttcccccacgacgtgcctcccaaagagttcgactggctgctggatattcgtctttacagtacggagttccatgccgatttcgccgccattacgttgaatacgttaggcattccgcagcttggcctacgtgagcatatacaacgccggaaggcatttttcagcactaaacgtcttgctgccttaaaaggcctagtgactgagcaggaaaatgaagcctctcttgataagaagatggttgcggtcatcgctggcgtaaaaacagcaaaaacggaagagattctgttcagcctgattacccaatacgttaatcagcagaaagatgacgacagcgacctggaaaacacgctggcaatgctgaaacgccacaacctggaaggcgtgctgtgggacattctgaatcaggaaatgggctatcaggccgagcatccttcgcttgaaaacctcatcctaaagctattctgtaccgatctctccgcgcaggcagacccgcagaaacgtgaatggctggaaaaaaacgtactgaccacgccgtcaggcagagcctccgcgctggcctttatggtcacctggcgcgccgaccgtcgctacaaagaagcctatgattattgcgcacagcagatgcaggatgcgctgcgaccagaagaccagtaccgtctcagctcgccgtatgatctgcacgaatgcgaaaccacgctgagcattgaacagaccgttattcatgcgctggtgacgcaacttctggaagagagcaccacgcttgaccgtgaagccttcaaaaagcttctgtccgaacgccagagcaaatactggtgccagactcgtcaggaatactacgccatctatgacgcgcttcgtcaggctgagcggctgctgaatctgcgtaatcgtcatattgatggtttccactatcaggacagcgcaacgttctggaaagcgtactgcgaggagctgttccgctttgaccaggcctaccgcctgtttaacgaatacgcgctgttggttcacagcaaaggcgcaatgatcctgaaaagcctggatgactatatcgaagcgctatattccaactggtacctggcagaattaagccggagctggaataaggttctggaagccgaaaaccgtatgcaggagtggcgtattgcgggcgttccacggcagcacaacttctacaatgaggtagttaagccgcagtttaataatccacaaatcaagcgcgtgttcgtgattatctccgatgcgctgcgttatgaagtggcagaagagctgagcaaccagatcaataccgaaaaacgctttactgccgaactgcgttcacagttaggggtgttacccagctatacccagttgggtatggctgcattgctgcctcatgacgagatatgctaccaagcgggtaatggtgacatcgtttatgcggacgggttatccacctcaggtacgcctaaccgcgataccattctgaagaaatataaagggatggcagtaaaatccgacgatcttctgaaatggaaaaatcaggaaggacgggatctgattcgcgattacgaagtcgtctatatctggcataacaccattgatgccatgggtgacagcgcatctacggaagagaagaccttcgaagcgtgccgcaacgcggtggttgaactgaaggatttagtgacccgtgtaataaaccgtcttcatggtacacgcattatagtcacggcggaccatggtttcctgttccagcagcagcccctttccgggcaggataaaaccacgctgcagatcaagccagacaatacgattaaaaaccacaagcgctttattatcggccaccagcttcctgccgatgatttttgttggaaaggaaaagtggcggataccgcaggcgtcagcgataacagcgagttcctgatcccgaaagggatccagcgtttccatttctcgggcggcgcgcgatttgtgcatggtggtgccatgctgcaggaagtctgcgttcccgtattgcaggtgaaagcgctgcagaaaaccgctgccgagaagcaacctcagcgtcgtccggtagatatcgtgaattaccatccgctgatcaaactcgtcaataacattgataaagtcagcctgctgcaaacccatccggtaggtgagttatacgaaccgcgcaccttgaatatcttcatcgtcgactacgccaataatgtggtatccggtaaagagcgaatctgctttgacagcgataacaacacaatggaaaaacgcgtgcgtgacgttacgctgaagctgataggcgcgaatttcaatcgccgtaatgaatactggctgatactggaagatgcacaaacggaaacgggttaccagaagtaccctgtgattatcgacttggcatttcaggatgatttcttttaa

SEQ ID NO: 185955 - DNA, 3678 bp, Klebsiella oxytoca
atgaataccaataacatcaaaaaatatgctccacaggctcgtaaccagttccgcgatgcggtgatccagaagctgaccacattggggattgccaccgataaaaaaggcaatctgcagattgcagatgtcgagatcgtcggcgaaaccgtgcgctatggccagttcgaccaccccaaatccaccctcacccgccgcgatcgtctggtaaaacgcgcccacgagcagggctttgacgtactggttgaacactgtgcctacacctggttcaaccgcctgtgtgccattcgttatatggaaatccacggctaccttgaccacggcttccgtatgctctcgcacccggataatccaaccggctttgaagtgctggaccatgtgccggaagtggcggaagcgctactgccggagaaaaaggcgctgctggtcgaaatgaaactttccggcaaccaggacgaagctatctaccgtgaactgctgctggcgcagtgccacgccctgcaccgtgcgatgccgttcctgtttgaagcagtcgacgatgaagctgaacttctaatgccggataacctgacccgtactgactcgattctgcgcggtctggtggacggtattccggaagaagactggcatgatgttgaggttatcggctggctgtatcagttctatatctctgagaaaaaagatgcggttattggcaaggtagtaaagagcgaagatattcctgccgccacccagttgtttaccccgaactggattgtgcagtatctggtgcagaactccgtcggtcgccagtggttgcagacctacccggattcgccgctgaaaggcaaaatggactactacattgagccagccgaacagacgccggaagtgcaggcacaactggcagccattacgcctgccagcattgaaccggaaagcatcaaggtgctcgacccggcctgcggctccggacatattctgattgaagcctataacgtgctgaaaaatatctacgaagagcgcggctatcgcgctcgggatattccacagctgattctggaaaataatgtttttggtctcgatatcgacgaccgtgctgcccagctttccggctttgcattattaatgatggcccgtcaggatgaccgccggatattcacccgcgacgtgcgcctgaatattgtctccctgcaggaaagcctgcatctggatattgctaaactgtggcagcagctgaacttccaccagcaaaaccagactggcagcatgggagatatgtttgccgaaaataccgcattagcccataccgacagtgcagaatatcagctgctgatgcgcacgctgaagcgctttgtgaatgccaaaacgctgggctcgctgattcaggtgccgcaggaagaagaagcggaactgaaggcgtttctcgatgcgttgtaccgtcttgagctggaaggcgattttcagcagaaagccgcagcgaaggcgtttattccgtatattcagcaggcgtggatactggcacaacagtatgacgcggtggtggcgaatccgccctatatgggtagtaaaggaatgaatagtgacctgaaggaatttgccagaaataatttcccggacagtaagtctgatttgttcgcaatgtttatgcaatatgcattctctttgcttaaagaaaatggatttaatgcgcaaattaatatgcagtcatggatgttcttgtctagttatgaagcactacgcggttggttactggacaataaaacatttatcacgatgttacatttgggggctcgagcttttggacaaatttctggagaggttgtacagacaactgcttgggtgattaaaaaccaacactccgaacgttaccagcctgtattttttagacttatagatggtaaggaagaagtaaaaaaaagcaatctacttctaaggaaaaatatatttgagaaatttaaacagcacgattttaaaaacataccaggaatgccaatagcatattggatagacttgccgagtctattatcttttcgccatcataaaaaacttggagaaaaaatatcattaaaagcaggtatgtccaccggtgataacattaaatttcaaagatattggcacgaggtttcaatagaaaaaactcttatcacaaataaagagtcaaatacaaaaatcgacattcataatatcaaatggtttccttgtagtagtggaggtgaatatcgaaagtggtacggtaataacgaaatagttgtaaattgggaaaataatggatacgaaatacgaaattttaaatttgagaatggaaaaactcgctctgccgtaagaaatgatgaatattactttagagaaggtataacctggtcaaaaataagccaaggtaatttttgcgtgagatatcgtccagaagggtttgtttttgatgatacaggccgttgcggcttttcaaataacaaaaatgagttgctttacgctgcgggactaatgtgcactccggttgtaaaccattatttatcaattctatcccccacacttagctttactagtggtgaattagcctcagtaccatatccagaaattgaagatgaaattatcgaattagtcaccaatgctattgaaatagctaaaaatgactgggactctcaagagcaatcatgggattatgtttgctcaccattatttgaacacaattcaactcaattgctacggaaaatctataaacaaaaaatcaatacaaatatcaagttagtcgaaactcttctcctaatagaaaacactataaataatatttttatagataaattacgactagacaaaactgtaattaaagctgtattgcaaagtgaaataacactattatgtaacccaaactatcgatataaaaatattcaagatcatacagtcctaaccaataagtattacacggatatcactatagatatcttaagttacaccatcggctgcatgatgggccgctactccctcgatcgtgaaagcctggtctacgcccacgaaggtaacaaaggttttactgaactggtcgctgaaggcgcctacaaaaccttccctgccgacaacgacggtatcctgccgctgatggatgacgaatggtttgacgatgacgtcacctctcgcgtcaaagagtttgtgcgcaccgtctggggcgaagagcatttgcaggaaaacctcgactttatcgctgaaagtctgtgtttatacgcgatcaagccgaaaaaaggtgagtctgcgttggacaccatccgtcgctatctttccacccagttctggaaagatcatctgaagatgtacaaaaagcgcccgatctactggctgttcagctccggtaaagaaaaagcgtttgagtgcctggtctatctgcatcgctacaacgacgccacactggcgagaatgcgtaccgaatatgtggtgccgctgctggcgcgctatcaggccaatattgaccgcctgaacgaacaggtcgatggtgcctccggcggcgaagccacccgtttgaagcgcgatcgcgacaatctgagcaagaaattcaatgagctgcgcagcttcgacgatcgcctgcgtcactatgctgatatgagaatcagtattgatctcgacgacggcgttaaggttaactacggtaagtttggcgatctgctggcggatgtgaaagccattaccggcaatgcgcctgaggtgatgtaa

SEQ ID NO: 185956 - DNA, 3642 bp, Klebsiella oxytoca
atgaatattgaacagatctttgagaaacgtctggaccgaaatattaatggcgttgtgaaagccgaacagacggacgatgccagtgcctggattgagcttgatgaatacgtcatcacccgggaactggaaggacatcttcgccatttcttcgaatcttatgttccggcaaccggtccggagcgcgtacgcatggaaaacaaaattggcgtatgggtttcagggttctttggctcaggtaaatcacactttatcaagatcctgtcgtatctgttgtctaaccgcaaagtcagtcataacggtacagaacgtaatgcatactccttctttgaagacaaaatcaaagatgctctgttcctcgctgatatcaacaaagcggtccatcatccgacggaagtgattctgttcaatattgattctcgtgctaacgtcgatgacaaagaagatgccatccttaaagtcttcctgaaggtgtttaacgaacgggttggctactgcgctgattttccgcacatcgcccatctggagcgtgagctggcaaaacgcggccaatacgacgtgtttaagaccgcattctccactatcactggttcaagctgggaaaaagagcgcgattcctactatttcatcagcgatgaaatggcagaagccctaagccaggccacaggtcaaagcgttgacgcctcgcgtcaatgggtggaacagctggataagaacttcccattagatatcaataatttttgccagtgggtcaaagagtggctggatgaaaacggcaaaaatatcctcttcatggtggatgaggtcggccagttcatcggtaaaaatacgcagatgatgttgaagctacagactatcactgaaaacctaggtgtgatctgcggtggacgcgcatgggttattgttacctcccaggcagatatcaatgcggccattggtgggatgagcagccgcgatggacaagacttctctaaaatccagggccgcttttcaactcgcctgcagctttcaagctccaacacatccgaagttatccaaaaacgtttgctggtgaaaaccgatgctgcaaaacccgcgctggcgaaagtctggcaggaaaaaggcgacattctgcgcaaccagcttgcctttgatcctacaaccaccgcttctttgcgcccctacaccagcgaagaagaatttattgataactacccctttgtcccgtggcactaccaaattctgcagaaggtttttgagtctattcggaccaaaggtgccgccggtaaacagttagccatgggtgaacgctcacagttagaagcattccagactgcggcacagcagatcgccccgcaaggtctggattctctggtgccgttctggcgtttctatgccgcgattgaaagcttcctcgaaccggcggtcagccgtaccatcactcaggcctgtcagaatggcattcttgatgagttcgatggcaacttactgaaaacgctgttcctgatccgctatgtcgatgtgctgaagagtacactcgataatctggtcaccctttccattgataaaatcgatgctgataaagtcgatctgcgccgtcgcgttgaaacaagcctgaacaagctggaacgggaaatgttgattgcacgtgttgaagacaaatacgtgttcctgaccaacgaagaaaaagagatcgaaaacgagatccgcaatgtcgaagtcgatttctctgcaatcaataaaaaactggcatcgatcatctttgatgacattctaaaaaaccggaagtatcgctacccggcgaataagcaggattttgatatcagccgcttcctgaacgggcacccgttggacggcgcgatgcttaacgatctggtggtgaaaatcctcacgccaaaagatccgacctatacgttctataacagcgatgccgcctgccgtccttatacttcggagggtgatggctgtattttgattcgcctccctgaggaggggcgcacttggaccgacattgatttagtcgttcagaccgaaaaattcctcaaggacaacgccggacaacgcccggaacaggccagcctgctttcagaaaaagctcgcgagaacagcgttcgcgaaaaaatgctgcgcgtccagctagagtcgcttattgccgaagcagacgtctgggcgattggcgagcgcttaccgaagaaatcttcgacgccgtccagcatcgtggatgaagcctgccgctatgtgattgaaaacacgtttgccaagctgaaaatgctgcgtccattcaacggcgatatcgcacgtgaaatccatgcactgctaacggtggagaatgatgcggagttggatctgggcgaactggaggaatccaatcctgacgcgatgcgtgaagtggaaacctgggtcagcatgaacattgaattcaataaaccggtctatttacgcgatattctcaaccactttgcccgtcgtccttatggatggccagaagaagaagtgaagctgctggttgctcgcctggcacgcaaaggcaaattcagcttcagccagcaaaataataatatcgagcgtaagcaggtgtgggagttgttcaataacagtcgtcgccacagcgagctgcgtctgcacaaaattcgtcgtcacgacgaatcacaaattcgcaaagccgcccaaaccatggcggagattgcccaacagccgtttagcgaacgtgaagaacccgcactggtcgaacatatccgtcaggtcttcgacgactggaagcaagagctgaatgtcttcagagcgaaagctgaaggtggaaacaatccaggcaaaaatgagattgaatcaggtctgcgcctgctgaattccattcttagcgaaaaagaagagtttgctctgattgagaaggtcaccacccaggcaaacgaattgctggatttcagcgaagatcgcgaagatttggtcgatttctaccgcaagcagttctccacctggcaaaagctgggggctgcgctgaacggaagctttaaatccaaccgcagcgcactggaaaaagacgctgtggcggtaaaagcgttaggtgagctggaaaacatctggcagatgccggagccttacaagcatctcaatcgcatcacgccgctgattgaacaggttcagaacgttaaccatcagttagttgaacagcaccgccagcacgctctggaacgtattgacgcccgcatcgaagagagtcgtcaacgcttgcaggaagcgcatgccacatcggagctgcaaaacagcgttctgctgccgatgcagaaagccagaaaacgcgctgaggtcagccattcgattccggaaattctggcggaacagcaagagacgaaagcgctgcaaacggatgctgagaagaagattaaccagtggatcgacgagctgcgtaaaaagcaggaagcccagctacgagcagcgaatgaagctacacgcgctgcagaatcacaacagacctatgttgtggtagaaaaacccgttatccaaccggtaccgaaaaaaacacatctggtgaatgtcgccagcgagatgcgcaaagccaccggtggtgaagtgctggaaaccgccgagcaggtggaaaaagcgctggatacgcttcgtgctgccctgttggcagccattgaggcaggtgaccggatccgtcttcagtaa

SEQ ID NO: 185957 - DNA, 603 bp, Klebsiella oxytoca
gtgatcgatcccgtgcttgaataccgcctgtcacaggttcagagccgcattagcgaagagcgctttcttaaaaacaacggctcaggtaatgagattgggttctggatttttgattatcctgctcagaatgagctgcaggtacgtgaacatctcaagtatctgctccgtaatctggaaaaggaccacaagttcgcacacctcaacatctttcagatcattatcgagatgctcaccgaacgtgggctatttgagcgcgtctgtcagcaggaagtgaaagtcggtaccgaagcgctgaaaaaacaactcgttggcttgttgaatcagaaaaagatcgcggattacatagcaaaaaaagtcgatcttcagaatcaagaatttgtcatcctgacaggcatgggtaatgcctggccgctggttcgtggccatgagctgatgagcgccttgcaggacgtgatgggttttacccctctgttgatgttttatccaggaacctatagcggacacgatctctccccattggcgggcattgattcccgaaattattatcgcgccttcaggctggtacccgaaagcgggcctgcggcgacattgaatcctcgttaa

SEQ ID NO: 185958 - DNA, 609 bp, Klebsiella oxytoca
atgacgatgaaaaacgacaaggcatggattggagacctgctaggcgggccgctgatgagcagggaaagtcgaatcatcgctgagctcatgcttaccaatcccgatgaacagacctggcaagagcagatcgtgggccataacattctccaggcttcctctgccaatacggcgaagcgctatgccacaacgataaaactacgcctgaatacgcttgataaagcggcatggtcacttatttcggaagggagcgagcgcgagcgtcagcaattactgtttgtcgcgctggtactccattcaccggttgttaaagacttcctggctgaggtggtgaacgacctgcgtagacagtttaaagaaaagctgcctatggatagctgggatgagtttgtggctaaccatcttcgccagcagcccgtactcactggttactcagattcatccatcaaaaaaatgggtaacaacctgatcaaagccttggctgaagcgggttatctggatacaccacgccgacgtaatctacagtccgtctttcttttaccagaaactcaggcgaccttgcagcgcctcgggcaacaggaattggtttctattctggaggggcaacggtga

SEQ ID NO: 185959 - DNA, 159 bp, Klebsiella oxytoca
atgagcccgagcattgatgcttaccatcgcctgagtagccagcttgaaaccgccgattggagatttaatactcattttactagtattattcttacggtcagcctcaacattctgagtcagatgagattcaagttccatagaaagacatgcttaagttaa

SEQ ID NO: 185960 - DNA, 933 bp, Klebsiella oxytoca
atgttcactcctgatcagctgcatgctgatggtaagatgaatgatgagctccaagaagttgctgacaatagccatatatacctcatctgtaaaaagccaaaagcaacatgttgtaacgagcaacctataatccacaatggccttgtttctggtaaagtgtctagtcggatcaaaggtaaagaaatagtttctgaatatacttttccatttgaatttgaagataatgaggttagtttgaatgtagcagattacccacataaaaaaattcagacgctcaagtctgatggcttatgggagagatattggccgagcgatgtattggctttatatactggaaatgatatttatcgtaacttcgaggttttatatgtaggtcaagcatttgctgaaggaaagagaaatgcaattgaccggttaaaaagtcattctacactccagaaaattcttgctgaaacaatgagtgactatccagatgaccaagtatctatttttaatttggtatacgatgattatatacttttaacttctttcgatggacgagacaaaactagtattaccggtaaagaagacaatattcgtctcaaaagcataatagacaatcttttatcccaaaaagaagtaatttgcttagccgaggccgggttaattagatatttccaacctaaatataatgccatttataaagaaagttttcctgcttcagatcagaagatactttcaggttgttttgcgctcgatttttctggtttatcagtagaaatcgaattgagccaatcacctttcagattatattctgataaaattaaatcccgttatcatcatattgctgcatttaatttatctgatgaagaggagagacttggtttctttaccttaagtgatggcgttacagaaactaacatacttggtaatgttattaaaatggaaaaataa

SEQ ID NO: 185961 - DNA, 2643 bp, Klebsiella oxytoca
atggaaaatcccgccattttgttacgccgtcttaatccttactgcgcccgtgcgatggaaggcgctgccaccctgtgccagacccgggcgcacgcggaaatcctgcccgagcactggctgctgaaactgctggagcagggcgagggcgacctgacggtactggcgcggcgctacgaatgggatatggacgcgatatggcaggatttgctgacctttatggataagctcccccgttcggtgcgcggccgcccgcagctttcagacgctattcagactctgatgcaggaggcatggctgagcgcttcgctggccggggaggagcatatccgtagtatccacctgctgatggcgctggtggataaacagagtctggtgcgctgcgacggcctgtggccgctgctgaccctggcgcagagccagctggctcgcctgcgtccgctgctggacgcgcagtccgaagagcgcccggaggtgcagcaggaagcagagctggcgcagggcgacgaggtggcgtttgtcggccgtccggttaatgcgggcgtaaaagaaggggatctgaatccggctctgcagaatgcgctggataagttcaccctcgacgtgaccgcccgcgcccgggacggcaaaatcgacccggtgttcggccgtgataatgaaatccgccaaatggtggacattctttcccgacgccgcaagaacaacccgatactggtgggcgagccgggcgtcggcaagaccgcgctggtggaaggtctggcgatcagaatcgccgaaggcaacgtcccggatgcgctgaaaccggtaagcgtgcgcacccttgacctcggcctgctgcaggccggagcgggggtgaagggagaattcgagcagcggctgaaaaacattatcgacgcggtgcagcagtcgccgctgcctgtgcttctgtttattgatgaggcccacacccttatcggcgcgggtaaccaggcgggcggcgccgatgcggctaacctgctgaaaccggcccttgcccggggcgaactcagaaccatcgccgccacaacctggagcgagtacaaacagtattttgagcgcgatgcggcgctggagcggcgcttccagatgatcaaagtcgatgagccggacgacgacaccgcctgcctgatgctcagggggctgaagtcccgctacgcggagcatcacggggtgcacatcaccgatgaggcggtgcgcgccgccgtcaccctctccagacgctatctgaccggacgccagctgccggacaaggcggtggatttactcgacaccgcctccgcccgcatccgcatgagcctggatacggtgccggcgccgctgactcgactgaaggcgcagctcaccggcctggcgatggaaaagcaggcgctgctggaagatatcgcggcgggcaaccacacccacggcgaacgcctggcggccatcgaacaggacgaagtccgtattatcctgcagctcgacgagctggaaacgcagtatggccaggagctgaagctcacggaaaacctgctcgcctgccgcgccgatctctcccgccacgcggaaatcgcggacctgcaaaaccagcttagtgccgtgcagcaggggaacccgctgctggggctggacgtggacgcgcgcaccgttgccacggtcatcgccgactggacaggcgtgccgctctcgtctctgatgaaggatgagcagacggagctgctgagcctggaacagcagctcggtagacgcgtggtgggccaggacgcggcgctgaacgccatcgcgcagcgtctccgtgccagcaaaaccgggctgacgtcggagaacggcccgcagggcgtgttcctgctgaccgggccgagcggcaccggcaagactgaaaccgcgcttgcccttgctgacgcgctgttcggcggtgagaaatccttaatcactatcaacctctccgaataccaggagccgcacaccgtcagccagctcaagggctccccgccggggtacgtcggctacggccagggcggtatcctcaccgaagcggtcagaaagcgtccgtacagcgtggtgctgctggacgaagtggagaaggcccatcgggacgtgatgaacctgttctaccaggtgtttgaccggggttttatgcgcgacggcgaggggcgggagatcgactttcgcaacacggttattctgatgacctccaacctcggcagcgaccacatcatgcagatgctggacgaacggccggaggccacggaatctgacctgcatgaactgctgcgtccgctgctgcgcgaccacttccagcccgcgctgctggcgcgcttccagacggtgatctaccgcccgctcacgcgggacgcgatgcgcacgattgtcggtatgaagctcagccaggtgagcaaacgcctcagtcgccactacggcatgaccactaccatcagcgacagcctgtacgacgctctgacggatgcctgcctgctgccggataccggggcgcgcaacgtggacagcctgctcaatcagcagatactgccggcgctgagcctgcagctgttaagccatcaggcggcggggcagaaggcgcagcacctgatgctgggtcgtgatgaagagggggggattgtgatggagtttggcgcaggggcgggcgtatga

SEQ ID NO: 185962 - DNA, 2169 bp, Klebsiella oxytoca
atgacggataaaaaaaacagtccgtatgctccgcgcatagcttccagaaacgatgtgtcggtgcataaagatcttgggaaagcggcccagacctgcaatgtggcggttccccgccccatgccctgtatcgtcatactggtgcatggtgtgaatgatgtgggtgaagcgtatcagaaccaggaaaatggcattattgcgggtctgagtaagcgccttaaccgtactgacctctacgcgcatgaatggaaggatttcatgatgatgcacaacgaagaggcacagaaaaaaatcgccgcgccgggtcgttcgccggttattccgttttactggggctacaagccggtgacgtatgacgactgggttgcggaccagcagaattaccggaaagaagtggatgtccagaaactgggggacaaagcccatattccctatgatgcttatcaacaaaatgataaagagaaaatgaaggccgttggtaatgatggcgagaataagctgaagtttcagaacgacaactggaacaatgcgctggatatgaattatgccaaaggtggtggaacctttgctaatgccaccaccaacatccccgatatgctggggccgggggcgggggggacggctgttgccgccgcggggtttagcacactctatctgaacggtggtgactatacgcacccgatttttcccaatccgcaccgtatttatcagttttttgccgcccagcggctggcggatttgattattcagatccgaagtgaagatgtaacgaagaatgatgtgataaatatagtggcccacagccaggggaccatcatcaccatgctggcaaatatgctggtcaaacaggcgggatacaatccggccaactgcgtgattctgaaccattcgccgtattcgctggaaagccggctgatggaaaatgcccagtcgggccatcaccagaccagcgcggcgcggcagcagacgttcaaaaacttttgcgccgtgatggcggaacagtacaaaggcggcgagctttccggtgatgacattgaggcgctggaggggagttgcacgctgcgcaggccggaagagaatccgctgcgtaaggacaagaggtatcggcgtaacaacaacggcaaggtgtataactatttttgtccgaacgacggaacggtgtcgctgaggaatattcagggttttggctggcggggaattccgcagaatattgccggaaatatccctaatttataccagagggtgttttatcagcacggcagagtgggtgatccaccagatagcaaaccatttaagatgccttctccgggtaagggcgactttacctacggcgttaccacgaatgccagttataccgcgaacgatgtgatgattaacggtgaagagctgccggagcctttcatttttaagttacagggggaagataatcacccggatgacgaccaggaaacctgtgacataccgtataagacggatattaaccctgacagcccggatgcgtatatctcctactcggcgaaagcgtatgccatcagcagaacggaaacggtggtgtttcctctgggtaaatatgattacccggagatgaagcccggacactcgttaacgccggatgaaataaagcaactcagccgtgagaaaggttatacggttgtgcagggtaaggtggcagggctgggtgatatcagaaacctgatgctggtccgggtgcgttcacgcgaagatcttgaaaaggagtggcaaagatcagatccggtgggttacagccagcactcctctatcgtgatgagtgattttgcgcctgctcaggcgatggcgtttgacctggcgatagggcagtgtaaggcgtttaattataaagcgggagccttctgggaagccctactgcgccgtgctgactggcgggatgtgcataatggaaacccgcaggcgagagagtattaccggaccgggagactggatactgctctcacaaaggattttatgaataaacctgatgaagttgttccttcgttaaaagagtgtggggtggtgaataaatatatgaatgccacaacgataattccttctcaggggtatctggcaaaagactataaagaaataccaaatacgcaatgggacaggccggacacgctgacggaccgtgagctgggtataacgaaagggaactga

SEQ ID NO: 185963 - DNA, 699 bp, Klebsiella oxytoca
atgaatttcactcagatgacaggcagtgtgttagcggcaatgctggtggtcagcggatgcggtgccaaagaaccacctatgcaggtggtttaccgctttgacgaccatcgttatctggaactcaaaggctggaactgtgagggagaactctggtacacggatacgcaaagaggtattcattcacagctatatttccagttttttcggatattcaccaaaaaatttgtgcacccttcggaacgctatcttgctatcccaaattgggacccaggggctttcagagtatctaaggattacggaaaaacctggaccacggcgacatattctcccggagaaaacgaaccgaatggtgactcatcaccgccgagagacgacattctttccttcacagttgtgaatgaccagggctttttgcaaacgaagcaccggttatatatgtcatcaaagccgtttgacgatccgcgcattcttcccggtggtccggggattacctacactcttgatgacggaacggtacagagaattgatccgcaatatccaggctgggcctggggagtggtgtatttcaccaaagaaggattagatggcaaggttgtgcgtcatgaagctaactatcaggatcttcccgacgaagtaccggaagtgaaaaattaccagggctgggatcatatgcggtgcgatatggatgtggggaaataa

SEQ ID NO: 185964 - DNA, 1038 bp, Klebsiella oxytoca
atggattatgatggtttgatgttcaaatatgacaaaaacagattccctgatgtagagttaacagatgatgaaataaataatcaattacatcagaatgaaaaagtagacctgggtgacaataaagtcatggatgatgcggcggtgattcatctcagctcgggttatatggaggtggtggataagtggtatgcggtaaaaggatttttaaccgtaccgtcactggcattacttgtgctttttgcctcaggtgtaatttatataccctgtaatatgtttgttcatttttttttgcagcaggattatgacggatggttttatgtcatcggttttattgctctttttgtgtcaattctggtctctttattctgttatttaatgctaagagttgaatgtttccgctggacgcattatcccgtcagatttgacaggaaaaacagactggtgcatgtattcagcgtggacggggaggtttacagcgccccctgggacgacattttctttacgactggatgttatacaaaaacaagatttaagcggaagaattacgatattcgcggacatgtgctggcggaagatcgcaaaacggtgctgaaaacgttcacgctgtcggtttctgccccgcggcgtgaagacctgtaccgcaactgggaatttgtgcgccgctatatggaggaagggccggaagcggttgccggcgtgctgaaactgatgccgccggtggagggacgccgggaagggatattttttggctactggtatctgatgttcagcgccacctacggggcgccgttttttgtggtgccctttctgatggcgctgtatctgacggcctggccgttccgggtctttgcgatgtacacctgccggatcccgcgctggagtgaggaagtcgaggccagctgtgtgattgcgccggacgatccctgggatatcagtgccgcgcagaatccccgttcgctctggcgctggatgctgggaatggacaaggcgcacagcatggtggataaaaaacgcgccatgatggaggtgaagaaatga

SEQ ID NO: 185965 - DNA, 246 bp, Klebsiella oxytoca
atgactgcaacaacgcaaccgctaacacaacagtgccgcgatagttttaccctggcacggcattgggtcaccgcagccaatgtcattttcctgtttgcaagcgcacatatccgggagccgctggagcggggaacgcccctgaaaaaaaggcggtgggccggtgatatttgctgcgcgcttttccctcactatctgctacgggacagcatactgcgtcgtatgctgccttgccgttcttttcgttaa

SEQ ID NO: 185966 - DNA, 135 bp, Klebsiella oxytoca
atgaaaaacaatccatggttcgtgcgtttgcgtaatacctctattccgcagcataagctgcgtccggcgaaatggctggcgctgattgccctgctgctggcgcagttgacgatagagtttttactcttagcataa

SEQ ID NO: 185967 - DNA, 342 bp, Klebsiella oxytoca
atgaagcgtattaacgaacgtgcctgggaagtgtttggtatctatggaaaggtatgtgaaagctgctctggggcgatcgcattaagcctgttgcaggcgctggcgatgttaggttgccttgaaaaaagagaggttggagggttaactctgtattgcattttgactctaatagccgttgtggcgactatcggtttttttgcctctctgataagtataggaagaactattcatacacaaagcaaaggccataaggtagctgaatacctgatttcctgcgttttttatccggtagttatcggtatcctgcttacggcggttgcgactcttcaatctgtactctga

SEQ ID NO: 185968 - DNA, 765 bp, Klebsiella oxytoca
atgaatctttcactgaaaaataaagttgcgctggtcaccggtgccgcgtccggtattggctttgcaactgcacgagcttatgccgaagcgggcgctgccgttgtgttagcggatattaattcagagctggtaaataaggccgcaaatgatttgatttcccgtggttttgaagctaaatcgtttacctgtaatgcggcaaaccttgatgaagtcgaagcgatggttcagttcactgtttccacttacggccatctggatatcgcttttaataatgccggtgtacagaataaacttgttgaaatcgcggacgccaccgtggaggactttgatcgcgttaatgccgtgaacctccggggcgtgtggggatgcatgaagtatgaacttcagcagatgcgcaagcaggaaagtggtgtcatcgttaactgttcttctatcggcggaattgtgggcggcgcagaacgtgcaaactaccacgccgcgaagcacggtgtgcttggcctgaccaagagtgccgcacttgaatacgccggccggaacatccatgtgaatgcagtttgtccgggtcttatctggacgccaatggtcgatgcgatggtcgcttcgggccagaaggaagctctggaagccatggtgaaagccgttccgttgcagcgtcatggtaatccggaagaaatcgccgatgcggtcctctggttgtccagtgatgcgtcgtcctacgtaacaggtcagtcaatttcgattgatggtggcctgaccatgcgctaa

SEQ ID NO: 185969 - DNA, 1023 bp, Klebsiella oxytoca
atgcccttaattaagatttctcttttgtgtgcttcaatgctgatggcaggttctgttttggctgcacaaaaaatcccttcaactgttgcggagggcgtcaatgttttggggtcgcaaaaagtgacgtttaaaaatggcagcatcaccatggcgggtaatttatatcttccgcctgattatgacagcgccaggaaatatccggcgatcgtagtctctcatccctggggcggcgtgaaagaacagacgtccgggctttacgcacagcagctggcaaagcgcggatttattactctggcttacgatgcctcgcattatggtgaaagcggaggattaccgcgtgacctggaaaatccgtccgatcgcgtacaggatatccgcagcgccataggctatcttgccagcctgcagcaggttgatgccagccgcattggtactctggggatctgtgccggtggaggctatacgctgcacgaagcgcagaatgatttacgcgtcagggctgttgccggtgtcgtcacttacgacattggcgatgcgacccgcaacggtattgaaggcctgccggttacggcaagcgacagaacgaagttaatgcaaagcgtggatgaacaactgaacaaagaggccagcggtgtgccggtgctggttcagcagttgctgccttcccgggataagttaaatgccagtacgcctaactttgtccgggaggcgaccgattattacctgacgccgagaggcgcgcatccgaatgccaataaccgttatgtcgtcacgagcaccggactccatatggcctactatccactggagcatatagatttgatttccccccgtccggtgctgttaattgccggagaaaaagctgaaacaagaaaattcagccagcaagcctatgacagagcgaaagagccgaaggagctggttattattccaggcgcttcacattttgatttatatgacaagccaaaatttgttaaccctgccttaaataaactggcagagttctttagcaaaaacctttaa

SEQ ID NO: 185970 - DNA, 759 bp, Klebsiella oxytoca
gtgcgtcttgtactgcgcagtacacgaagtgttgcgctcacgatggcgggtcagcatctcgtcgatcgtctggtaccggagtttgatcagatcacgaatgagctggaatcgctcaatgacttacgcgacaaacctactggaacactgcgcattaccgccattgactacgtgatacgctcggttctgtggccccggctaaccccttttctgaaacagtatccggacattaccgttgagcttatcagcgagtatgaaagcgttgatattgcggcccggggatatgatgccggcgtccggtttggggccgatctggcccaggatatgatttccgttcgcatcagtacagatgttaagaatgcggttgttggttcagcagagtattttacgcgccacccgatcccgcaacatccgaccgaactgagccagcacagcggggtacgtttacgcatgtccacgtacggcgggttgtatgactgggagtttgttgagggcaagcgtgagttcagcgtcaaaatcaacgggccggtaatatgtaataacgtttacgacatactggaggcagtcagacggggtttcggtctggcttatctaccgctggatatggtacagccattgcttgacagcggagaactggtttctgtgctccaggagtggtgccctctctggccagggctgcacctttactacccaaaccggcgacagcattccagagccatgagcctgatggtggaggctctccgctttcatgctaatgactga

SEQ ID NO: 185971 - DNA, 900 bp, Klebsiella oxytoca
atgtcaggcgaaatattccgggatcttatcgcatttattaccatcgcccggcacagaagctttaccagagcggccgctgagcttggcgtttcgcaatcagcattaagccataccattcgcaatctggaagagcggatcgggctgcgtctgttgatcaggaccacacgcagcgtttccccgacggaggccggaaaaaggttgctggaacgcgtgtcgcccaggctggacacgattgccagtgagctgacctccatcagggatttgagccgcaccattgcgggcacagtgagaatgactgtctccgattttgcctataaggcttttgtatggccacgcctcagcgaaacgctgcgccattatccggacgtcaggcttgagctctctcttgatgcagcgctgaccgatattattacggagagatttgatgccggtatcagggacggtgattcgcttggcaaaaatatggcatctgtgcgtatcagcccggatttacgttattcagcagttgcctctcccggttatgttcaggataaaggactgccgccttcacccggtgctttggctcagtattcctgtattaatacccgctttacgcctgggggaagcacaacgccatggatactgaaggaaaatgaaaccgggcagattttccggcctgcgggccatctggtctttaattcatattatgctgcgatggatgcggcgctggcgggttacggaattgcctttttaccggagatactcagccagccatggctggatgcaggaaaacttctgccgatcctgcctgaatggtgggcagaacgaccgggtttttatatttactatccgggtgaacgtcagctgttgcctgcgctctccatgattgttgaaacgctgcgatatgagccgccagtataa

SEQ ID NO: 185972 - DNA, 276 bp, Klebsiella oxytoca
atgagccgccagtataatgccatttctgctcacaaccgcctgacctgggaagcaatggacggccagtcgctgagatttattctccgttggctttctccgtctgcgcgagggaccatctccggtagggagtgcctgcgaacggttattatcgcgtttatcctgaacaagcttgataaattcaagtgtccgcccgaggtgtttgttgtccacgatagcacccaggtcaatttcctgaaggcgatcataggtggagtagggaaggacgactccgtttag

SEQ ID NO: 185973 - DNA, 750 bp, Klebsiella oxytoca
atgaaaaaggtggttttgttttttgctattgtatctttctctgctgtggctggtattactgacatcacgacaaagccagttgcattaacagcgttgaaaaaaaacagtgctcaatatattgatatttgcaaaacggtcgatgatttctgtaaagacgggacttctatctggaaagaaaaaaattccaatgacatcttttatttaaccacttcacatcttcagttaatgaagataaaaaaagaaggtgatgtgtattctaaaatagtttcatgggattttactaaagaagctaataatgaggatattcctgatgatgaacttaccaaaagcgatgtatatatatatccagctttatatcctttaagtaaagtaaaaacggccgttgcgttagtatcgaaatggtcaacaacttattccggaggtgggcgcgaggaagaatacgcaaatttcataatgattaatgatgatggtacatatcaaccagcctttaaaaatattccattttcatcaagagaaatgataaaagcttgctttaccgaagatgattatgcaaaacaatcacattgtcacgatgagagttggagcatcttaagccttaaaatcaccgatgattcgaaggattattactcatggaagttcataacaaaatcatataattggcctgcatttaaagaaaagtcatcgactcaagtaagtattaacgagagcattgcatatccattccaaccgcagccacaacataacaaataa

SEQ ID NO: 185974 - DNA, 582 bp, Klebsiella oxytoca
atggaggctgcaaatgcctttgctgaagcctatattgctgactataaccgtcgttttggcaaagagccccgacatgactttgacgtgcatcgtgtggttgaacatgacgaagatctggatcttattttcacagtacgggaacatcgcaaagtctcaaaatcgctgacgatacagtacgataaaatgctgtacctgattgaagacagcgagctgagccgccgtgctattggtaaatacatcgacgtgtatcactaccccgatggtcgtaaagagttacgcctgaatggtgagacacttccctactctacctatgaccggctgtcagaagtcgaccagggcgaaattgtggataataaacgacttggccgtgctctggaatttatcagtctggtgcagagcaaacgagataacacgcgctctcagtccgttccttctggtgatggcccttcccggcgacggcccagacaggaagggaaaaaatcccagcggtcactgaataacgacgacatgctcgaagcgcttaagcaactccagtcgcagtcagaggagatttttggcaagagagccagaaccggacgatga

SEQ ID NO: 185975 - DNA, 258 bp, Klebsiella oxytoca
atgagcgcagaaagctcaggagtgtttactttgaaagagatcaaccgggtcaagattatccaggacgttatcgaacgtcgtatgaccacgcgtcgtgcagctgaacacctcggtatcagcgacagacaatgtcggagtttctcggcaaagaaaccgtacggcgtattatggtccgggctggtttatgggtcccccgcaaacaacgcgccgcaaggatccctcagccacgttaccggcgtccgtgtacgggcggattga

SEQ ID NO: 185976 - DNA, 225 bp, Klebsiella oxytoca
atgtttgtcaaagctaagttcagatgtccgggccagggcaaagttaaaatgtccgtgatatttaaaatgatatcctcagcattgtttaacattatgcagtatttgattttaatccacatttttaggggcctgattaatatacaggcaaaccttgaatatgagctttgtttagttcctctgttgataaatttaagttattcatattacccagacgttctattgtga

SEQ ID NO: 185977 - DNA, 960 bp, Klebsiella oxytoca
atgattaatgaattgcgctctatgacgacatttgtccggacagttgagctgggaagcctgagtaaagccgcagatgctcagcagatatcaccccaggcggcgagcaaggccttaaaacaactggaaacgcatctgggggtgaggttgttccaccgcaccactcgaaatatgtcattaacggaggagggacaacgtttctttgaagcggcaaagcctgcattaatggggctgcaacaggcgctggcgacggtgcaacagacccgcgaggagtttgccggaccgttacgtatcgtcggtccccgttcagttgttcagcagattattaagcccgtgctgattgaatacagccgcctctacccggaagttcagcccgatgtgcaacttgatgacgggataactaactgggttgagaagcgagtggatgtcggttttcgtatcagcgtttcaccacaggaagggctgattgcccgtcgcttgttccccctacagttgatcatttgtgcttcgccagcctatttgcgtaaatatggcgtaccgaaaacgctgcatgatctcagtgcccatcggtgtagcgtgtttcgccatgccgcaaccgggcgcctgctcccctggacagtgaagtccggggacaatgtgcaggatcatcatgttaaccctgccatgtcgaccaatgatgagatgctggagttacatgctgtattgatgggcgaggtcattgcgcaggtggccgggccgacggcggcgcaatacatacggtctggtcagcttattccattgttgacagataacatcgctgatattcacagtttatttttatattacggaagccgtatcgcgcaaccactgagggttcgtcgattcattgacctcacaatagaacgtctgggtaatatgaataacttaaatttatcaacagaggaactaaacaaagctcatattcaaggtttgcctgtatattaa

SEQ ID NO: 185978 - DNA, 1149 bp, Klebsiella oxytoca
atggataacttcagtttttataatccgacccggattgagtttggctcagacaaagaaaagcttattggccagattctggctgaacataacgtcaaaaatgtcctgctggcttacggcagcgagcgcatcaaacgcgatggcttgtttgcgacgattagccagaacctgactcagcatgggatccgctatgttgagtttggcggcatcgtcagtaacccgttactctcaaaggtccgggaaggtattcaggcagcgcgggagcatcaggttgatgcggtgttgagcgtgggcggcggctcggtgcttgatagcgccaaatccattgcggcaggtaccttgtatgatggggatgtctgggatctatttattggcaaagggcagatcaatgcggcattaccggtgttttcgattatgacgcttgcggcaaccggcagcgaaatgaacagcggcgctgtcatcaccaatgacgtcacccgggagaagtttgctcttcactctgtacatacctttccgaaggtctctgtcgtcaatccgacgctaatgcagtccgtttcccgtgattatctggtctattccgccgccgacattatcgcccattcgattgaaggctatttcaccgcagcggtacaaccaaaaatccagtcgcgtctcgttgagacagtgattgccacggtgctggagacaacagaaatgttgttaaaagatccgggagattacaacgcccgtgccgaatttgcctgggcgtccacgctggcgctaaatgggctaacttatgccgggacctcgggcttcagctaccctaaccacatgattgaacactcactttccgcgttgtttaacgtcccgcacggggcgggattgtcggtggtcatgcctgcgtggatgaagtggtatcacagccaaaacccgacacagtttgcgcgctttgcccggacgctatttggtaaaggaaccgcagaagaaggcattgccgcgctcgaagcgtggttcgataaaattggcacaccgacccgtctgtcacagttaggcattacagaggccgatatgccagccatactggaaaatctgaaaggaaatacccgctggtttggcctggcggagacctatactcaggaaacactgaccaccattcttaagctggcgttataa

SEQ ID NO: 185979 - DNA, 828 bp, Klebsiella oxytoca
atgaaagaagtcattgttgttattggcagtggggccattgcccaagcaattgcgcgaagagtgggggtgggtaagcatattttgctggcagatatcaaatctgaaaatacccaggaagctgaaaacatcctgtcccgcgccggtttcacggtcagtacagcgattgtcgatattgcttcccgaaaatccgtacaggatctagtcgagatagcgacccggcatggcgaaattaaaggagtcatcaacacggcaggcttatcaccttcgcaggccaaagctcaggatattttgcgtgtggatttgtatgggacagcggtggtgtttgaagagttcggtaaagtcattgcaccggggggctccgccgtggtgattggctctcagtccagccatcgcctgaaaatagatgcgctttcacaaacacaggctgatgagttagcgaccctgtcaccagaggcattgttggagcttccgctggttaaaggaattgatgacagcctgtacgcctatcagatctctaaacgtgggaatgcgctgcgggtaatggctgaggcagtaaaatgggggaaaagaggggcccgtatcaactgtatcagcgcagggatcgttttcactcctctggcatatgatgaactcactagcattgagcgtggcgatttttaccgaaatatgcttgagaaatcacccgcagggcgtggcggcacgccggatgaaattgcggcgttagccgaatttctgttcgggcctgcggggacatatatcagcggcagcgatattctgatggatggtggtgttacggcctcttataaatatggggagctcagaccttaa

SEQ ID NO: 185980 - DNA, 417 bp, Klebsiella oxytoca
atgacaaaatcaaccataaccagagagcgcatagaacagtacgccaacgatccgcgcatgtgcaatgtcaacgacgagattcgcgaaatggcacgcatggcgctggccgcaatggacagcgagccggttgctgatgttgtcgcctggtcacatccaacagaggaaagaacctgtgatattcgctggcgtcgtcatgatgttgagccggggccgctctatcgccacacgcagcagccatctgtgcctgatcgctccatattcgaaaaatggtgggaatcacagaatggagcgcccctcgatggctgggattcgttacggacaactgacggctattgtgacgatggcattgatggtcaatttgaagcctggaacgccgccatgcttgcagccgccccgcaggaggcgaaaggtgagtaa

SEQ ID NO: 185981 - DNA, 321 bp, Klebsiella oxytoca
atgaccaataaccagttaacagacgaaaaaatcaaacgccgcattaacgagattgaagaccgccgttcagctagccgcgatttttggggcggtgataacgaataccaagagaatattgagttgatagcgttgcgtgagctacaggaacgtcgcaaagcatcagccgaaccagtggcgtacttagtatgtaacggcaggctctaccaggacaggtcatttctaagcttgtcagctgcgataatttcagtcaacgataggaatgatggcgctgagattaaggcgttgtgcgtcatcgaaacattgagggagacggcagaatga

SEQ ID NO: 185982 - DNA, 540 bp, Klebsiella oxytoca
atgactgatatcaccgaactggcgcagcgcatgaaggctgcagctgtgttagcgaaaaaataccgcagccttactttaaccttttctgtagacgaaactctggcgctggtagaggcgctggagaaggcgcagcaggagagggaaaactggcgcaccagctttgataacgagcgctttcgcgcggataagttggcggcaacgctgagcgacgaaaaagagcaggcagcgaacgtgagagggcaattattgatagctcaccgcacgctattaaaccagcaggcaaagatttcagagcaggaagacgctgagcaaaaactctgtgtcgctaacgtgacgctcgatgctcgcgcggaattggctgagcgccagctggccgagctggagtcccgcttaaactctgctgacaaattgcaggacagtgcattccgtagcggattgcaacacgggtttagtctcggacagacagatgaccaaaaaggttatgagcatagcatggctgcctatagtcccgccgctggcatcaagtgggaggctgagtag

SEQ ID NO: 185983 - DNA, 471 bp, Klebsiella oxytoca
atgacgttggatttgtctcgcgtttaccgattccatgtctggaaaatggcaaaaatccatcaatggtttaccgaaggtgattccttgcctttttacagagcctggttgcgggccgagcatcttctgaggcttgatattttgcttgctgaacacagagaggccttcggaacaaagtgggagcctcttttcggaagaacagggcttaatcatcttgttttttctcgtactggatggagccctgaccgagtgcagcaactttcattcgctgatattctccttgtgcttcagaaagatctggcaaatgtgaaaattccggaaaaggtattggagctacctgattcagttcgttggagtgatgagtacgaactctatggccagactgaatatcgaattgaattgccaccttgcttggagagcgaatgggattacactcaagccgagaaagcccaaggtctgcgtaagcctgaataa

SEQ ID NO: 185984 - DNA, 1053 bp, Klebsiella oxytoca
atggaaaatactgtaaaaataaacagtgttgagttagtcaatgctgatagccttcactacatcggtaccctcccggacaactccattgatttaatcgttacggacccgccttacttcaaggtgaaaccgaacgactgggacaaccaatggaaaggggatgaggactacttacgctggcttgatagatgccttgctgagtacgcacgagttctcaaacctgcgggtagcatctacttgttctgtggtcaccgtttggcctcagatatcgaggtcatgatgaggagccggttcaatatcctgaaccatataatttgggccaaaccgtggggacgatggaacgggtgcaataaagaaagcctacgcgcttacttcccatcaacggaacgggttttgtttgctgagcattatctagggccgtacacagggaaggaaaacgattacgagaacaaaagcaccgaactcaaacagcatgtaatgacaccgctgattgaatactttcgagatgcgcgtgatgcactgggcgtaacaacaaaagagatagccgaggcgaccgggaagaaaaacatggcttcccactggtttgggctcagtcagtggtcgttaccgaatgaagcggattatcagaagctacaaacgttattcacacgtatagcgattgaaaagcaccttaaacagaggcttgaacatccgcatcatcagctggtggctacctaccaatcattaaaccgtaaatattcagagctgctcgaagagtataagacgctacggcgttacttctctgtttccgcagctgtaccgtataccgacgtatggatgcataagcctgttcagttttacccaggcaagcacccatgcgaaaaacccgctgacatgcttaagcagattatcagcgccagcagtaagccgggtgacatcgtagccgacttctttatgggctcaggttctacagtaaaagcagcaatggaactgggtcgccgcgctattggtgttgaactcgaaactgaacgcttcatgcagacagtcagcgagatagaaaagattaataaaacataa

SEQ ID NO: 185985 - DNA, 276 bp, Klebsiella oxytoca
atgggtattgaaacgattatcgggctggcagcggcggtgatagctgccatcgctggcgctttcggcctgggtcacattcgcgggaccagcaaggcggaagccaaagccgagcagcagcgaaccgaagagaacgccgccgccagcgtcgccgcggcagaacgtaaggcagaagtcacgaaagaggccagcaatgtacagcaaactgttagccatatgcctgatgacgatgttgatcgggagctgcgcgaaaactttacccgccccggtggtggttga

SEQ ID NO: 185986 - DNA, 1458 bp, Klebsiella oxytoca
atggaagtcttgataggcagagttcgttttgttcctgaatgctcagtccatgagcgcatagggatagcgataaccacttacaatcggcctgacgttctgaagcgagccattgatcagcacatgaagcatctaccagctggtgcgctgttagtcgtggtagatgatggttcaaatcctgctgctgttgtcccttctggtgtgcaactgctgaggcaggatacatcggtcggtatcgttgcatcgaagaacgccagcctgaccgcgctgatggatggcggatgcgagcatctgtttttgtgggacgacgatgcctggccgattgccgatgactggcatctgccttacatcgaatctcccgaacctcacctggcttaccagtttctcgatctggctggccgcaataagctgaatgacattgcggtgctttaccgtgacgaacagcatgtggcatataccgggcagcgcggcgtgatgctttactaccgccgcagcgccattgagaaagtaggtggattcgatccggtttacggccgcggcatgtacgaacacagcgaccttgccctgcgcatccataacgccgggctgactacctgggcttatgccgatgtaactggctccgaaaagttgattcattctctcgatgagcatgaagctgtagagcgttcggtaccgcgtccagatcgacaggcgctggtggaacgcaacgttaaaatccacaacgaacggcgtgatgccgggtttactggttacgttgagtaccggcagcagcgcgacgtggtaatcacaacgttgctgaccagtcagcctgacccgcagcgcggtagccgaatgcaacctgacccggcggcgctgaccaactgggcaaaatcaatccggggtgccgatgccgtagtgctggctgaccagctaacctccgctcctgatagcgctcagctggtgacggtcccggatgtcgcaatgaacgtctatttccggcgctggctgcacatctggcagcaccttcgtgagcatcctgaatatcggttcgtctggtgtactgatggtaccgatgtcgaaatgctccgcgcgccgtgggaagaaatgcttcccggtaaagtctatgttggttcagaacctaagacctatgccgacatctgggcaaagcagaatcatccagagagtatctatcagaagttcatcgacgcgcacagcaacgatgtgatgcttaatgctggtcttctgggtggttcccgcgctgatgtaatgtcgttcgctcacggcattatccgtctttactaccggatcgagagttatcgtttctggaagaaagaacaggctggcgcagcggtgggcgacatgctggctttcggcatcgtcgctaagtcatttgctgacaggctgatcaccggccctctggttcacacggtgttcaagactgatggtctcggtaaggagaatgcctggtggaaacacaagtga

SEQ ID NO: 185987 - DNA, 597 bp, Klebsiella oxytoca
gtggaaacacaagtgaagtttgcggtagtagggcaccactcaagagaacgtcaggcacgagcgctggcttaccaaattggaccgaccgcccacgttatgattgaccccggtaatcatggtgcagcatggaatcatcggcgtgcgcttgagtgggctgctgaacaggattgtcgtgtggtggttatggaagacgatgcgctaccggttccaggcttcgttggtaaggtgactgaatggctggttcgtttccctgactcgttgtgttctttctatctcggcactggacgcccgccgcagtaccagttgcagattgtcgagcggttgataatggctgacaagatccgcgccgattacatcacgctgccgcgactgattcacggcgtctgttataccgtaccgccgcagcatatcggtcgggtgctatcccgctgggacaacagtaagcctgctgattatgcagtaggtgatgcatacggcggcagcgtcatctacccatgttactcgttggttgaccatgccgatgctgagccggtagagcgccaccctgatggttcatcccggactgaacgccgcagagcctggaggttacatggctag

SEQ ID NO: 185988 - DNA, 369 bp, Klebsiella oxytoca
atggctagattgaagacattgcagcccaggctgaaagccatcgacacccgtaggataaagccggtatttggcgagcagagacgtgtaagcggcagcgcaagggtaagcctgaaacggcgcatttatgcgcgtgaccgcgggcgttgctgcatgtgtggccgtgtcgttgaccttcacgatagcgaactggatcaccgtgtcgcgttgcagttcggcggcgataacggagagcacaacctctggacgctctgcattgaatgccactcaggtaagtcatcgcgtgaagcctcgacgggccaaccagatggagaggccctgaaccattccatcaacgatgacgaccaggggcctggcatcgtggtgatttga

SEQ ID NO: 185989 - DNA, 492 bp, Klebsiella oxytoca
atgttaacagcgcagaagcggaaattcgctctcgcgctgatgtccggaatgtcccagaaagatgcggcaataaaagcgggatactctgaaaaatccgcgcgttcaaagggttcgcagcttgctaaagacccggaggtcatcgcgtttataaggcggaaaaagagcgaaaaaatagaagttgatgacgagccggagtatcgacggaatgtttataccccagcggtaaacactcccgaagaaaagcccccctcagttacatcgtctcccgatcaatttgaggaccctctcgatttcctcaagtgggtaatgaacaacacggcaaacgaaatcgatgtccgcaaggatgccgccaaggcaatgctcccgtataagcaccccaaaatgggtgaaacaggtaaaaaggacgccaaaagcgacgccgctaaaaaagcagccaataaatttgccgtccagcaaccacccaaactggtggtaaataaccgagggaaataa

SEQ ID NO: 185990 - DNA, 1659 bp, Klebsiella oxytoca
atgcccgaatggactactgcctgccccgactgggctgagcgcttgaaaaaagggcagactattattccgccgccaatctatcctgagcaggctgaaatagcgcttagcgtcttcaggcaattaaaaatcgtagatgcccctggttctccgacctttggagaagcttgtgcgcaatgggtttttgacctggtggcggctctgtttggctcttatgacgccgaaaccgggcgccggcacatcacggaagtgtttgtgctgataccgaaaaagaactctaaatctacgctggcggctgggatcatgatgacggcgctgctgctcaactggcgtcaggcggctggttacaccatcatcgcgccaactgttgaggttgccactaatgcttttaaccctgcgcgtgacatggttaagcgagatgatgaccttgatgatctgtgccaggttcagacccacatccgtactatcacccaccgcggcaccgataccacactgaaagtggtagctgctgaccccaatacggtttcaggtattaaatcggttggtacgttgatagatgaattgtggctgttcgggaagcagcacaactcggacgatatgctgcgcgaggctataggtggtctggcatcacgacctgaaggttttgtaatgtacaccaccacgcagtcaaacgatccgccggcgggcgtgttcaggcagaaacttcagtacgcccgcgatgtgcgtgacggaaaaatagttgatccgcatttcctgcccgttatttttgaacatcctcctgaaatggtggccagcggagaacatctgctggtggacaaccttgcgatggttaaccctaacctgggcttttcggtggatgagaaatttctttatcgggagttcaggaaagccaaagaagccggggaagaggaattccgcggcttcatggcaaagcacgctaatgtggaaatcggtctggctcttcgttccgaccgttgggtcggcgctgatttctgggagcagcaggcgcacaaagtcacctttgaggaaatactccagcgtgccgaagtgatcaccgtcggtattgatggcggcgggctggatgacctgctgggcctgtcggtcattggtcgcgataagacgacccgcgagtggctgacgtggagccacgcctgggcgcatatgattgcgctggaaaggcgtaaaagcgagatcccgaaactcagggacttcgaaaaagcaggtgacctgaccattgtcaaacgtgtcggaatggatgtggaacaggttgttgaatatgtcagccgcatccatgatgcagaccttctggataaaattggtattgacccttccgaggtcgggcagatccttgatgcgctgagtgcggcagaaattcccgccgagtcagtggtgggcgtcagccagggctggcgtctgggcggcgcgataaaaactaccgaacgcaagcttgctgaaggtgttttgatacatggcggtcagccgatgatggcgtggtgtgttggaaatgccagagttgagccgaaaggcaacgccattctgatcaccaaacaggccagcgggaagggaaagattgatccgctgatggcattgtttaacgccgtttctctcatggcccttaaccctgagccagccaaaaaggattatcaggtatttttcgtataa

SEQ ID NO: 185991 - DNA, 1935 bp, Klebsiella oxytoca
atgaataatcgcgcctatagcctgatgcaggtaaaggcggtcaatgaggactccagggagattaccggcatcgccagtacccctgaacctgatcgttatggcgatattgtagaccccgccggtgtgaaatttactcttccgctacctctgctatggcaacactggcatgacgaaccaataggccaggttattgaagcaaaagtcaccgacgccggcatcgagattaaagcaaaactggtaaaaccaggtgcggatatgccatcgcaactggtcgccaggcttgatgaagcctgggcatctatcaaaacgggacttgtccgcgggctttctatcggatttaagcccattgagtacagctttattgacgatggtggcatccggtttatttcgtgggaatggtatgaactttccgctgtaaccgttcctgccaatggtgattgctccattcagaccgttaaatcaatcgatcgcaagtttctcgccgcgtcaggcaatgagaaaccggtagtgaaaatctctaaaaccgctggcgctacagcaaccaataccaaaaaaggaaccaattcgatgaatatcgcagaacaaattaagagcttcgaagcgaagcgtgcagcgctggcagcttcactgagcgagatcatgagcaaagctgctgatgaaggtcgtacgcttgacgcagaagaaaccgaaagctacgacgacacgtctactgaaattaaggcagttgatgagcatctgaaacgtcttcgcgacatggaaagcaatatggcatcgaccgctaaaccggtatcaaaagccgccaatggcgaaatcaccacggttaagacgggtgtgccaggcattatccgtgtcgaacagaagctggaaaaaggtatcgcctttgcccgcttcgcgaaagcgctggccgcggctaacggcagccgctccgaagcgctggagattgcccgtaaacagtatcctgatgatgcgaagcttcaccatgtactgaaggccgccgttggggcaggtaccacaaccgatcctacctgggcgggtgcgctggtggaatatcaggactatgcgcaggatttcgttgaattcctccgtcctcaaaccattatcggtcgatttggtcagggcggcattccggccctgcgccaggtgcctttcaatatccgcattccggcacagacctccggcggttctgcgaactgggtagggcaaggtaaggccaagcccctgaccaaatttgactttgagtcgatcacgttcagctttgccaaagtggcagctatcgcggtactgactgacgaactgatccgcttctccaacccggccgcagatgcactggtgcgtaacgcgctcgccgaagcggtcattgcccgtctggatacggactttatcaacccggcgaaagctgaagttgctaacgtttctcctgcatctgtcactaatggtattgctgcgatcccgtccactggcagcccggatgacgatgctgcagccgcctttggggttttcgttgcagctaacctgcagccgaatggcgctgtctggttgatgtccagcactactgctctggcattgtccatgcgtaagaatgcgctgggccagaaagaataccctgatatgacgcttcttggcggtaccttccagggtcttccggtcattgtatcccagtatgttggtaaccagcttgtgctggtgaacgcaccggatatttacctggcagatgatggtggtgttgcagtggatatgtcgcgtgaagcatcgctggaaatggaaagcgaacccaccggcgatagcatcaccccgaccggcaccgaactggtatccatgttccagaccaacagcgtcgctattcgcgctgagcgctggatcaactggaagcgccgccgtacagcagcggtcgcggttatctctggtgtgaactacagctcaagccagggcagctaa

SEQ ID NO: 185992 - DNA, 1359 bp, Klebsiella oxytoca
atgtggaatcctttccggagaaaacagggaaatgaaaaagccctgcagcagcctgccagtcgcggaggctggaacccgttattcagctttatccatgagccgtttgctggggcatggcagcgtaaccttgaaatcaggcaggataccgttctttcttattatgctgtctttgcctgcatatcgctgattgcgagtgatattgccaaaatgccgccgcggctgatgcggcgcgactcaaagggagtcatgcaggaggtaaaatcaggggacattccggcgttatacaaaaggccaaatgcctttcaaaaccggatacagttcttcgagaactggctgaactctaaactgtgtcacggaaatacggtggcgttaaaaatccgcaataacgccggaaaaattactgaactcaggctacttgactggaacaaggttaccccattggtggcggatgatggctcagtcttttaccagataaaccctgacaatatggccggcattgaatcgtcggttaccgtccctgcacgcgaggtgattcacgatcgcttcaactgccttttccatccgctcatcggtttgtcacccatttacgcagctggtctggcagcgatgcagggtcatcatatacaggaaaactccgcctattttttccgtaacggtggaaagcccagcggtgtgattgaggttcctggttccatctctgaagaaagcgccataaaaataaaggacatctgggactccggatattctggcgagaatgccggcaagaccgccattctgagtaacggggctaagtacaatcccacaacggtatctgctgctgatgcgcagaccgtcgaacaactgagtatgacggcacagatcatctgttctgtgtttcacgtgccggcctataaagttggtgttggcgaactccccactcacgacaatatcgaagcgcaggatcagcaatattattcgcagtgccttcagtcgctcattgagtcgatagagttgcttctggatgaagcctttgacctggaaggcgagacgggtacggagtttgatgttaatgctctgctgcgtatggacagcgaacggcgtatcaaatctctcggcgagggtgtgaaaaataccatcctgacaccaaatgaggcgcgcaggagtgaaaatctccctcctttacctggtggtgatgcgctttatcttcagcagcaaaactacagccttgaagcactggcacggcgtgatgcctctgaagatccgtttgccaaatctggcgccagcagcggcacggcaccaggggaatctggcgggaaagccatgtctgaatctgaactgacagcggcaaaagcgatgctgcgaggattgttagcaaaatga

SEQ ID NO: 185993 - DNA, 1233 bp, Klebsiella oxytoca
atgaatgaacgtgaactttcccttatcagggctctgggcgaggaattctcccagtcgctcagcgagctacgtgaatctttcagaaaaagtctggacgaccacctaaaggcaactgaagagaaactggcaacgctcactcaggaagtggcgatcctgaaggattcccctgtacctgacttcaccgcgatgctggccgatgccgttgcatcattaccggctccagatattccccagttgccggatatcggcgctatggtcagtgaggccgtagcggaaattcccctgccgcaggatggcaagagtgtgacgccagaggatgtgcgtccgctgctgcaggagctagtcacggcggcagtgggagaaatcccggccccgcgcgacggtaaagattacgatcctgcggtgctgaaacaggcggtggacgatgccgtcagtgaagctgtagcggaaatccccctgccgcaggacggtaaaagcgtgacgccggaggacgtgcggccgctgctgcaggagctagtcacggcggcagtgggagaaatcccggccccgcgcgacggtaaagattacgatcctgcggtgctgaaacaggcggtggacgatgccgtcagtgaagctgtagcggaaatccccctgccgcaggacggtaaaagcgtgacgccggaggacgtgcggccgctgctgcaggagctagttaccgcggcagtgggcgaaatcccggccccgcgggacggcaaagattacgatcctgcggcgctgaaacaggcggtggacgatgcagtcgccgcgttgccgccggcgcaggatggacgtgatgcgttgcaactggaaattcagcctttcattgatgaaggtaaaagttatccgcgcggatcttatgccactcacaacggaggcctctggcgtgcttacgagaaaacccatggtatgcgtggctgggaatgcatcgttgatggtgtatcagatgttgatatcagcatgaatggtaaacgcaatttcactgttacggtcaaccgagcaagtggaacgagcgataaaaaagctttcgatataccggctatggtgtaccgcggcgtattcaaatcgggcgatgagtacctgcctggcgatacggttacatggggtggttcactctggcactgtgacgaacagacgcaggataagccaggtgaaacaggctctaaaggctggactctggccgccaagcgcggacgggacgggagggataaagcgtga

SEQ ID NO: 185994 - DNA, 327 bp, Klebsiella oxytoca
gtgattgagcttgtaactttaccccaggcaaaagagcatctgcgcattgacgatgacgcaggtgatgccgatctgctcctgaaaattcaggccggtagtgctgtgctgctttcctacattcagggaagtcgggacaaggtggttgatggggatgggaacctgattcagggtgagcctttattgcgaatgcaggaatcccttctcagactgcttggctatctcgatcgcaaccgcaacggcgaagaagaagaaaaactccagcagggtgagttgcctttctctgtaacgatgctgatttacgatctgcgtcgaccaacaatcatgtag

SEQ ID NO: 185995 - DNA, 453 bp, Klebsiella oxytoca
atgtcatctttgtacgaaaaatcgcagaagactgtgattcaaatttctgaaggtccggttacaccggaaacactggaagcggcaatttttcaggatttaagttgcacattaaagcaggttagtttcaccgccggccagaaacaggacattgatgccacggtgctttgttctgatgaagttgaaaatattaacggattgcctcagccatccgaaatttcaatgtccggcaacttttatcgtaacgccgcccaggacactcttcgggaagcctatgacaatgatggtatctatggcttcagggttgtgttcccatccggcaacggttatatgttccgtgccgaagtacggcagcatacctgggacacccagaccaacggtattgtagccgcaaccttctcgctgcgtctgaaaggcaagccaatcaatattgatgcaattcaacccggtagctaa

SEQ ID NO: 185996 - DNA, 897 bp, Klebsiella oxytoca
atgaataacgccctttataatcagatacgtatctttcagagcattgcgcgcgaaggcaatatttcggcagccgccaggaaacttgaaattacgccgccttccgtcagcaatgcgctcaagctgctggaggagcatattggccatccgctttttgtgcgcacgacccggcgcattgagctaacggaaaccgggcaacagctgctggagcaaaccgccgccgcggtggattcgctggagaaatcgctggaaagcatccgtgaccagaatagggagccctccggcgcggtgaggattacgctctcgcgctttgcctacctgctcattcttaaacccgcaatggcggcattctgtcggcaatatcccggtataaagctggaaatttcggtctacgacggtaccgtgaatattatcgaggagcgttttgacctggggattcgttttggggatatccttgaaggcggggtggtggcacgcccgttgatgaaaccgtttcgtgaagggttatatgcgtcttcagcctatctcgccgaatatggaatgcctgaggcgccagccgatctcagccatcaccggctgattggctatcgtttcatcaccaacaaccgcattcttccgctgatccttaacgatcgcggagaaccattgaccttagaaatgcccggacagttaatcagcaacgatattgacgttatggcagacggtattcgccacgggctggggatagggcgcttgttcgaacccatctggcggttacagcccgatcgagagcagtttatacccgtgatggagagctactggaaaacctatccgccagtttatctctattacccgaaaaacgccggtaaaaccaaaagagtgaaaaccctgatcgactttctgatagccgctacggagtga

SEQ ID NO: 185997 - DNA, 309 bp, Klebsiella oxytoca
atgcgaattttatgtctggatatgcccaaccctggcgcaacgccggaaaaatatgcgccacaccttaccgctgaggccctgcacgcctgggggctgtataaatccggctttatccgcgacatctatttccgtcaggacaggcccggcgtcgccattttcctcgaatgtgacaccgtggaagaagccagtaacgtgatggctgaattcccgctggcaaaggcgggcttattaacgtttgagtgcattcctctcggatcctttattagctgggaaagtctcttctccgcagaatttaaaaatcaaaaatga

SEQ ID NO: 185998 - DNA, 558 bp, Klebsiella oxytoca
atgaaaaatatccttatcgtatccgggcatcccgatgttaaccattccgtcgccaacgcgaccatccttgacgaggtggcgaccgccctgcccgacgctgaaattcgtcgtctggactggctttatccagacggcaaaatcaacatcggcgcggagcagaaaagtctgctgaaggcggatgtcatcgtctggcagtttcccttttcctggtatggcctcccggggctgatgaaacagtggctggatgaggtttttgttcacgacttcgcgcacggttcggcggcgaaactgggcggtaaaaagctgctcctctccttcacaacgggtgcgccgcaggcaatgtatacctctgacggcttctttggtcacaccattgaggagtaccttatcccgttcgagaccacggcaaggctgtgccggcttgacctgctgacgccggtatatacctgcggtatcagctacgccgatcgggatgccgataaaattgcccagcaaaagacgctcgccagggagcacgcttccaggctgatcgcgcagcttaacgcccttcctgaataa

SEQ ID NO: 185999 - DNA, 1020 bp, Klebsiella oxytoca
atgcagtatacccgactcggcaaaagtgacttactggtctcccgcatctgcatggggtgtatgggatttggcgatccgtctacgggccagcatcgctggacgctgaatgaaacggaaagccggaacatcattcgctacggtcttgaaaaaggtatcaatttttacgataccgccatcgcctatcagaacggctcgagcgagcggtacgttggccgggcgctgcgagatatggcaaaacgcgatgagatcgtccttgctaccaagtttctgccgcgtacgccagcgcaaattgcgcagggtatgcgcggaaaacaggcgattacccgttcgcttgaccagagcctgcagaatcttggtatggactatatagacctctacatctaccacctctgggactataacactcccgcgatcgaggtccttgaagcactgcatgccgccgtcaccgccggcaaggtacgggccattggcatttcaaactgctatgcatggcagctggcgaagatgaatgcgcttgccgaacgcgaagggctcacgccctttgtttccgtgcaaagccactacaacctgattatgcgcgaagatgaacgcgaactcttggggctgtgcgctgaagacggcatcgcagtgacgccctatagcgcactggcaagcggccgtctttcccgtaaggaaggccacacgcggcgggccgctgaggatgactatgcccgcgggaaatatgaccgcacggcggaacaggacagcgtcattatcgagcgggtcgctgagcttgccgaacggcatcaggtgcccatgacggaaatctcactcgcctggctgcttaataaggtcaccgccccggtcgtaggcgcgacccaaaaaaggcatgtcgacggcgcggttaacgccgtgaattttcaattgagcgcggaggaaatcgggtatctggaagagtcctatcagctgcattttctgacagggattatggcgcaaaacacaccgcagaccaaagactccaggcaggtatgcacgcgatag

SEQ ID NO: 186000 - DNA, 1404 bp, Klebsiella oxytoca
atggttcagtttacgctcccatccggttcgccgatggcgatgaccgaggcggtcggcgcggacattacccgctatttcatgaccgaggaggaggataacctcaacgtcatctttatggtcaccggcagaaacaacgccggcagcgggcagaacgtcgggatggccttcgccgaactaaagcactggaacgcgcgccccggggagcagaacagcgcgcaggcgattatcgcgcgggcgaaccggtactttttaaaaaacgcccggctggccaccatcagcgtcatgtcgccgcctaccgtacgcggactcgggcagtcgagcggctttgaactctggctgcaggacagttcggaaaacggccgccaggcgctcatcgaggcgcaaaccaccctcctcactgccgccaggcaaacgccgacgctggacgccgtgcgaattaacagtctggaggagaaagcgcagctgcaggtggatgtcgacagacaaaaggcccaggcccaggggctggatcagaccgccatcaatagcaccctctctgcggcctggggcggcgtgtacatcaacgattttatcgaccgcgggcgcgtcaagcgcgtgtatatgcagggggatgcggcctggcgttcgacgccggagaatttatccgcctggtttgtccgcggcgacagtaacaacatggcctccttcgacagcttctcatcattccgctggaccaccgggccgcaaatgctccagcggtttaacggactgtcggccgtgcagttccagggaaacgcggcgccgggcgtcagttccggtgcggcgatggcgacgatgtccgaactggtgggcgagctgagcgggtttgaaaggcaatggagcggtttatcctggcaggagcagacctcctcagtgcagacgttatgggtatacctggcgtcgctggcctttatgtttttgtgtctcgccgccttatatgaaagctggtcgattcctgtcgccgtactgctgatcgtcccgttaggcattcttggggccgtgagcgcttcgttgctcgccggatacgaaaacgatatctactttcaggtcggtatgctgacgaccatggggctttccgccaaaaacgcgattctgatcgttgagttcgccctggcgcggtttcaacaaggtaaaacgctggccgacgcggcgctggagggcgctcgcctgcgcttgcgccccatcgtgatgacctcacttgcatttgttgtcggcgttatccctctggtactctctaccggcgccggcgcttccagccagcgtgagattggcgccgcggtgatcggcggtatgctcaccgggacgctgctgaccttgctcttcgttccactctttttcctgctggtacagcaaggaatgatgcgccttaaagggcgcaaacggtaa

SEQ ID NO: 186001 - DNA, 876 bp, Klebsiella oxytoca
atgttgaaaagttcgtggcgtaaaaccgccctgatggccgccgccgccgttccgctgctgctggcgagcggttcattatgggccagtgccgatgctatccagcaaaagctggctgatttagaaaaacgttccggcggtcggctgggcgtagcgctgattaacacggcagatgattcgcaaaccctctatcgcggcgatgaacgttttgccatgtgcagcaccggtaaagtgatggccgccgccgcggtgttaaaacagagcgaaagcaatccagaggtagtgaataaaaggctggagattaaaaaatcggatttagtggtctggagcccgatcaccgaaaaacatctgcaaagcggaatgaccctggcggaactcagcgcggcggcgctgcagtacagcgacaataccgcgatgaataagatgattagctaccttggcggaccggaaaaggtgaccgcattcgcccagagtatcggggatgtcacttttcgtctcgatcgtacggagccggcgctgaacagcgcgattcccggcgataagcgcgataccaccaccccgttggcgatggccgaaagcctgcgcaagctgacgctgggcaatgcgctgggcgaacagcagcgcgcccagttagtgacgtggctaaaaggcaataccaccggcgggcaaagcattcgcgcaggcctgcccgcaagctgggcggtcggggataaaaccggcggcggagattacggcaccaccaacgatatcgcggtgatctggccggaaaatcatgccccgctggtgctggtgacctattttacccagccgcagcaggatgcgaaaagccgcaaagaggtgttagccgcggcggcaaaaatcgtcaccgaagggctttaa

SEQ ID NO: 186002 - DNA, 2538 bp, Klebsiella oxytoca
atggataatcttggttatgtcaaagggacgttgttcgctgggttattgattacggtaaaccagggttgggcagctaatgctacagcgccagttaaagtcagtaactatgttattccttcggtatttgctaacgcgttatatcagggcatgtcggtccctgtttttattcgttatgaaggcgataatagtacccaacgcagccagcaaaaaatcgctgatgccatccttaccatcaaggataatgagtttcgcctgaaccagatcaccctcagcgatctccctgagcgaactgaattatcgccgcaaataaaatcgcttattaacgagatgcaggacaaaagcatcggcgacggtcagcgcgtttatatcaacaaagacgcctcgctatcactcgatacgcgttcattttatcttgaattaacggttaaccgggaggccatgcaggccgctattttgccgcgtaccaacgtacttggagaatccactgcgcaggacctctccagcgtactgaattactccatgggaagctattacaacaaatatgagaataccgatagcgcaagtagctacctgacgctggacaatacctggtcgctgcgcgagcaccatctgaacttcaatggttccctgtacggtattggtaccagcaaccagcagagcaaactgtatcgctcgatgtacgaacgcgactatcaggggcgccgcctggcgatggggatggtggatacctggaatctgcaatcgatcgccagcatgagcgccctgaactccagccgcatttacggcatcagctatggcaataaaagcagttcacaaacgcaagataacacgcttgcgctggtgcccgtaacggtgttcctgccggccgccggtgaagtgcacgtttaccgtgacggtaaactgctcagcattcaaaacttctccatgggcagctacgaactggatacgtcgcgcctgccgtttggcatctacaacgttgatatacaggtggtcgttaacgggcgcgtggtcagcagcaggacggcgaacatcaataaaacgttcgcccgaaaatcgagcgtcaccggcgatctctcatggcaaaccttcgcgggcagcctcgaatacaacaagatggactatcgccacaactacaacatcaattatggcacacggaatacgtggattgccggggtcgccgctgcaaccaaccaagcctggctttccggcgtgaatctgaaaaccacgctctacggttttgacaataacggcgtcaatgaaacggaagcgaacgttattttcaacaactcgttcagctttaaccagcagggtctgctcgctaccgacggcagctggcagagtacctccaccttcaatatgagtttaccagatgggtacggcagcctgtgggggtcgcgccagtatggttctatcggtaacgcgctaccgatgcagaaaaacgactacgtcaccatcggcgccaacgctaacctgcgcaaaatcgcgccgttcctcggtacgctgagcgtcagccgaaccaataataaatataccggaagcacctataccaacgtcgattacgatcaatcgctgttagccaatcgctatgcgacgatttctctgcgcgccggtattcagaattatcagtacaacaaccatgaaaatctgcgcgataagtacgtcaatattgatgtctctatccccttctccacctggctcagcaccggagtgtccagccagaacggtaatatgctggcgaacgccacgctgcgcaaaagctttgacaacagcgctattacccaggtgggggcgtcggtttcgaaacaaattaaacagaataaaaatgacgatagcagctatcgcgccgacgattacgcaaccaatggttacgtcagctatgacaccaaatataacgccggcaccgtctccgtcagccgctcatcgcagcacagctcaaactacagcctgagctcacagggcagcgtggcctggacgcaaaaaaatatctatgccggaaaaggtacccaaaccgcaggcctggtggtcaacaccaatttcagcggcaagggtcggatgatggcgcagatcaacggtcaaagctatcccctcaccggcaaaagcaacttcatcagccttccgccttacgcggaatataaggtggagctgatgaacgacaaaaactcagaagacagcgtcgacatcgttaccgaccgccgcagcaaagtcgtgctctatccgggcaacgtcagcgtgattaatccggaagtcaaacagctggtcaccgtatttggccgggtgaaagaccgtcgcggcggttactacgccaacgccgatattcataaccacattggtaaaacccgaaccgacgaactcggtgagttcgccatggacgtcgataagcgttatccagtgattaccctggtggataaattcggcggcatttgcgaagtggatctggatctgaatgaagcgaaaggcgccgtgtgggtcggggagattccttgtgagatccaacaacaaacggcatcagtgactggagatgttaagaatgtctattaa

SEQ ID NO: 186003 - DNA, 273 bp, Klebsiella oxytoca
atgaaaaaagaaattaaagatttggtcgctcggcgctttactcaggctgaaattggtcagcgcttaaacgttagccagcaaaccgtatttaaatggttaaaaaagcaagttccttcaggtcgtgttattccactttgccaattaatggggtgggaagtgaccccccatgaattgcgcccagacctacacccgacccccatcagcggaatacccgaaggcgtcatcgtgccacaacgtcagtcagctgaggtgaatcatgaaaatcaggcatga

SEQ ID NO: 186004 - DNA, 399 bp, Klebsiella oxytoca
atgaagactatcgacatcaccacttaccgcataaacaggctcctgaaggaaagaaattggagtcagacagatctcgcgcagagattgggtgttacacagcaaacgattcaaaaatgggcgaaagggaaagctagtccctcaatggataatgtcgacaagttatcggagatcacagggcatccaccctactggttcatgctcccaccagacgaaggcgatcaggtggtaactccagacgcaatgaagttaggcccaatgcaactggacctgcttaaaaccttcaatgcgttcccggaagaagatcagcaacaaatgctctacgaaatgaaagatcgcaaagagactatggataagaccgttgcccggtggcttgcagcccagaagggcaataaagcctaa

SEQ ID NO: 186005 - DNA, 405 bp, Klebsiella oxytoca
atggtttatagtgacttagttgcaacagccgccatgattgtagccgtggtggccgttccagcaagcggctatttaagttatcattacgcgattaagggagaaagacgcaaagagttcaatctggtcgccgatgctatacgcaaaaaactcagagagcagcttgaggcagtcaacttaggctattacccaaatgaaagaaacagcatatctgagggggaatttgagtatttcttagatatgcatccaagtaaaaagcgtgcgcacgctcgtgaatactgggaagagtataaaaaagttttagctgaatgcgcacattacgatgaagccaatttttttaggtttatcaacaaagaagaactaaaatcggtcatagtaaaattactgccagtcactgaccgccgctag

SEQ ID NO: 186006 - DNA, 210 bp, Klebsiella oxytoca
atggactacgaagaagccgcgcagctgcgctatcaggagatgtgtcgcattgttggggatgtcgtgtttgctatggtcgccgaaggtcatgaaaccaaacgcgtggccatagcagacgtgataagaacggagattgcaaaggggctgtataagtgggattcagaccagattcaggtaatggagttggcggtaaagctactggaagagtag

SEQ ID NO: 186007 - DNA, 195 bp, Klebsiella oxytoca
atgagaaaatcactaaatgcacgctgtatccgtcgctgggaagtggaatttaaacctatctgcgattcaaaagttaacccttactggcgcaagcgtgacctgcgcgggtatatccgcgacgcagcgctcaccacagcttacagcatggtcgagagcatggctgaacgtaacgctaagtttgactatgacggttag

SEQ ID NO: 186008 - DNA, 264 bp, Klebsiella oxytoca
atgttagttaatgaccccgtattaatttctatgatagaagatctgactgataagtataataaaatgcaggattttttaatcgatgatgaaccttgtattgatatcgtacggtcggtgtatgagttggagtgtacagttagtgaattcaaaaaaagaattatacttcaacatatttcctattgccattcagatgaatgtgatgaccctgacctgcatgtcgccttaattgacaatataaaaaacatacttgactatcttgaataa

SEQ ID NO: 186009 - DNA, 543 bp, Klebsiella oxytoca
atgatcaagcaaaaaactatcaagaatattgttgaattaaacggtattggcttgcatagcggtaaaaccgttaacatgaaaatcatgcctgctggtgccgatagtggcatacggttccgtagaacagatgtaactcctgttgttgatattcagctccgtgccgatcagattcatgacactatgctggcaacaagcattatcaaccctcagggagttcgagtttcaacaatcgagcatttcctttctgcggtgtctagcatggggcttgataacctcttggtggagctcgatgctccagaacttcccattctcgatgggagtgccagaggattcatagactcaataatgcacgctggtttgatagagcagtgtgcgctaaaaaaatatcttctgataaaaaaaacggtttccgtaaaagatggcgacaaatgggctcttttgcatccagactcaaagttctcgatcgattttatgattgattttaagcatcccttgatttctgctgagactaatagattaaatgacctgctccccgttgattaa

SEQ ID NO: 186010 - DNA, 1008 bp, Klebsiella oxytoca
atgtctgttaaaaagctcgatgatggtcgatatgaagtggacgtcagacctgcagggcgcaacggaaagcgcatccgcaggaaattcgataagaaaagcgaagctatcgcttttgaaaaacatactcagtacaaccatcacaacaaagaatggttggcgaaaccgacagataagcggcatctgtcagagttaacaaaaatctggtgggagttgaagggaaagcatgagactcatggtcgagattatctaggcaaaattgagttattcacaaagattacaagtgacccatgcgcctttcagattactaagtcattgattagccaatacggcacagtgcgccgctctcagggcatcaaaccatcgagcatcaaccgcgatttgacttgccttagcggaatgtttacctctttgatagatgcagagctatttttcggtgaacatcctttcagggggctaaagcgactgaaagaggacaagcccgaaacaggctacctgacacaagaggagatcgctgatctactgtccaaagtggacggggataataaaaaaattgcgatactttgtcttagtaccggtgcgaggtggagcgaggcagcaaaactgaaagcggaaaacatcattcaaaatcgcgtcacgtttgttaagacaaagaccaacaagccgcgaaccgttccgatatccgaggagctggcaacaatgatcacttcaggaaaacgtggttatcttttcactaacgctaactatcctgcgttcagacgactaatgaaggagttgaaaccggatctgccaccgggtcaggctacgcacgcattgcgtcacagctttgcaactcactttatgattaatggagggagcattatcacgcttcaacggattctcgggcattcacgaattgagcaaacaatgacctacgcgcatttcgcccccgagtacctgcaagatgcggtaacgcttaatcctttacgcggtggcactgacattagagtgtccacacattgtccacgctag

SEQ ID NO: 186011 - DNA, 276 bp, Klebsiella oxytoca
atgagcagacagcttgtaagcaatacagatgctgtgcctattcaggagttcgccagacttatcgggaaaacccctgcagctgttaaagggatgattgagaaaggcaagcttccagtgattgaaatgacagaccctttgtcaacctctggacgtgcgggtgaatattggatttacctgccagcgtggaacaatggcatgaagcttgcctttgaaagccgcccaaaagagattcgcgaaggttggctcatgtggctgggtttgggagagccaaaatga

SEQ ID NO: 186012 - DNA, 174 bp, Klebsiella oxytoca
atgatgaccgagccccgttgcattgcacagttactccgtaatgaaagcccacgcccggttaactccatcatcactcatggcaaaggtcgcaaaggcatcattatccgcacccgcaagcctggaataatcgccacggcaaaaagctacctcaaatcaaaaggattggcattatga

SEQ ID NO: 186013 - DNA, 501 bp, Klebsiella oxytoca
atgacggttatgactttggcattagttcaaaaacaacctcaatctctccgcgttgtaatcggtaagcatcttgcagaacctcgctggcaggactcgtgtgacttctacaatcagatgatggaacgtgatcgactgacggtttgtttccatgcccaacttaaacagcgtcacgcgacaatgcggtttgaagaaatgaacgatgtagatcgtgagcgtctggcctgtgcgatggatgagttacgcggggcattttcaaaacgtcgtcaggttggggccagtgagacggcttatatcagtttcctgacagttagtcagcgccgtactttattccttcatgcaggattaactgagaacgaatttaatcagccttactggcgggttaatgaaggttcttgctactggcgtgagaaactattccgcgcacttcgtgaattattcagcttgtttgaatatgcaccaactattttgacctctgttaagcctgagcaatatttgcattaa

SEQ ID NO: 186014 - DNA, 216 bp, Klebsiella oxytoca
atgaataaagaaatatcagttcctcgcagcaatatgaaagccttgttagcgcaggccagcattgaggctcagctagtcaccgcgacgcgtttcgcgtctgcgcttgattctctgatagctcacatttgcaagtctgaaatgaaccggacggagattatcgagctgttggggcaagagtctgaaaagcttcacaattctattttgaataagcaataa

SEQ ID NO: 186015 - DNA, 276 bp, Klebsiella oxytoca
atgagcattaatattgttatcgataataaattcgtaattaccagcgaccaattccagtttattttgcaggaaaagaaggtcgctaagtctggaaaaaatgccggtaaagaatggctcgataccgttggtttttatccaactatcagcaagctcgtttccggcctagtgctacacaacattttaaccggggaagctcgtcagttttcagacttagaaaagcaggtcgagcagttaggtcaaaaatgtctggaagcattcaccgttaatggccgttga

SEQ ID NO: 186016 - DNA, 2274 bp, Klebsiella oxytoca
atggccgttgagacccgggggcgcgtagccccctcgccaccacccccgctacaaaaaagcaccggtgattcattcgtcggtgcttactcctggaataacctcaagcaagaggccataggccgcgacagaccccttacacgtgccgaattccgtcaggtgcaaggcgttttaaaccggattgaccgcctgccgtttttcctgcaaacgctgtttacctcgcgttataacttcatccgccgcacaaagagcccgttgggtgggctgtatttcttaaaaaacacctttgagcgcaagctgctgccgcgtcttgagcgtgttaatgagctgtgcggcatgaatgaatccgcctcgattggtttcctgtctgagcgtgatgaatatgcgcgcctgcctgacatgaatgataaagagcttaagaaatttgcggccaaaattgccgcccagctctggagtcagtatgaggaattaagcgacgcatgggctgatgctcacggtggcaaagatatgcttttcaccgaccaggctcaggcgcatttatacggtcaggtggccggtattgcgcgcgctttcaatttcaccccgatgtactggaaaaaataccgtaagggtcagatgacgatccgcatggctttttccgcaatttcccgactgattaaagacgagtggtgggttaaccagctcaaggcgcagcgtatgcgctggcgcgaggcgttgctcattgccgccggtgaggtcaataaagaccgttcaccctacgccagcaaaatggcgatccgcgatgttcatgcgcgccgcctggctaatctcgaatacctgaaatcctgcgagctggaaaacaaagtcaccggcgaacgtatcgacctcatcagcaaagtcatggggagtatttcaaaccctgaaatacgtcgtatggaactgatgaacaccatcgcagggatagaacgctatgcggccagcgtcggtgacgtggggatgtttatcacgctgaccactccatcgaaatatcatccgacccgacaggtcggcaaaggtgaaagtaaaacggtgcagctcaatcacggctggaacgaaaccgcattcacacctaaagacggccagcggtatctgtgccgaatctggagccttatgcgtaccgctttcaaagataacgatttagaggtttacgggatgcgggttgttgagccacaccacgacggcacacctcactggcacatgatgctgttttgcaaacccggtcagcgtaaagccattaacgaaattatgcgtcgttatgcccttaaagaggatggacacgaaaagggcgcagtaaaacagcgctttgagtcacgtcaccttaatcagggcggagcggcgggttatttagctaaatatatcgccaaaaatattgacggctatgcgctcgacggtcagctcgaccatgataccggcaagcctctgaaagacacagctgcagctgtaaccgcatgggcgtctacatggcgcatccctcagtttaaaccaattggtctgccgacgatgggggcttaccgagaactgcgcaaacttcctcgcggggtgagtatcgccagtgagtttgacgacagggtcgaagcggctcgcgctgctgcagatgaaggtgagtttgacctgtatatcatcgcgcagggcggtgcgaaccaaccgcgtgatgctcaggccgtcagggtcgcccgtaaagtgacggatgaggtcaacgaatacgaggaagatatcgagagagtagtcggtatttatgcccctcacctcggggctagtcgcgtacatgtaacccgtaccgccgagtggcgcatcgttccaaaggttttggccgttgagcctttgaccttaaaaagcggctctgccgcgcctcggagtcctgtcaataactgtggaaagctcatcggcggtggtgaaccagttacgacccccacgccgtctgagcaagccgcagcggtgttaaatctcgttgatgaaggggttatcgcatggaatgactccgaagtcgtgacggcgataagagacgcattaaaacacgatgcatcgcgcccaaatcgtcagcaaagaagcggcgagccattaatgcctcatcagatagcgccatcagggcgaatgacgaaagccgaacggtcacagattccgcgcattcgctttgagctggcgcaacagggcatcacgccgcagcgctgggagcttcaggcgctggcgcgtggtgccacagtgacatttgacgggcaaaaattctcttatccggtcactgatgggtggccgggtttctga

SEQ ID NO: 186017 - DNA, 1152 bp, Klebsiella oxytoca
atgaatgtagttgacttattctctggagttggcggtttaagcttgggggcaacgagagcgggcttcagcttggcaggtgccgtggagttggataaacatgctattttttctcatcaattgaattttcccgaatcaactcatttacatagagatgtgagtaagcttactgcgcaggatattttatctgcatgtggggttaatgaaattgattgtgtggttggtgggccaccatgccaaggcttcagcactataggaaaaggaaatgctgatgattcaagaaatgagctatatattcatttctttagattagtcagtgaattatctccaatttgcttcttggctgaaaatgttccagggattatgaatgaaaaatataactctgtaagagaagaagctttttcgatggtgaatgaccgttacactttattacatccaatcaaagttaatgcttctaattatggggcgccgacaacaagaactagaatttttttcattgggttcagaaaagatttgaccgagcaattaaaggaatcagatttctttccaaaagatgtaatgaggccaacttttgttaaagaagctttttatggactgccgcgtgtaatacgcaaagagtggcaagaagagaaacaaggttggcgcggcgtaaaaatggataaagatggttattattatgaaagactctgggggcatgtaccaaatggagttggtgatccagaatcgcttgataaaatgaaaactgggttagtttctggttttttgggtacagtacatactgatgagatagctcaaaggtacggtaacctttcctttggtgaaacggataaaatttcaaggtctcagcgacttgatccaaatggattttgccctacattgagggctggaactggtagcgataaggggagttatcaggctgttaggcctattcatcccactcagtcaagggttataactcctcgcgaggcggccagattacagggttttcccgattggtttagatttcatcctactaagtggcatagttttagacaaatcggtaatagcgttagcccattagttgcagaggctatgctattaccgctatatgaattatgtattcatgctaaaagagaacctttgaataccatggaacaactttgtaatattcaatga

SEQ ID NO: 186018 - DNA, 993 bp, Klebsiella oxytoca
atgagtagcggcggtagcattccctatcaccttaggcagcacaaagctgttgaaaggaatttatttatagagttgttacgaaaactaaacaactatataaacatatctgattatgtttatataggttttggaggaccatttctagaggactttaaacaactccacacatctctaaaaattagtaaaatgatttcactcgaaatagaaaataatgttcatatcaggcaaaaattcaacatgccaatttcatgcgttgatattggagaagaaccagaaaatagtggtgaatttattactcggtatgattttgaagagccatcattaatatggcttgactatgcaattcctagggaccttaacaaacagttaaatgaaattgctaatatgattagcaagctcaagcctaaggacatattcaaaatcacgttaaatgctactcccgatagtttaggaagagattacacatctcctgaccctaagccattcaggcttagaaaattgatagaacgtcttacagacgattactgtcctattaaccttgaagaagatgatgtaacatttaaaaggtttccttccgttcttttgaaagcattgcaacgctcaataaatgtcggacttgctggtagaagtgacattcaggttcaacctttagccacctttatatataaagatggtcagcagatgataacatttacaggcattattttacctaacgataatgatagcaaagcaatctttttcgaaaaatcaagaattgaggcgtggccattttttaacggcaactggaataacattcgaaacatcagtattccaacaatgtctttaagagaaagaatgtttattgaagaaagactaccatttggcaccgagccgcaaatcaaagagcagctcggtttttatcttggggatgacgaagatgaagcaagcgaacatctacaaaacttcattgaatattacaaagttgttccatggtattcaaaggttctcttttag

SEQ ID NO: 186019 - DNA, 1416 bp, Klebsiella oxytoca
atggaaaaagagactataggtgcgttccctgcaaaacggttttttgtagatatgctcacaagagacatcgaactacaggatgcgatacttgaccttttagataattgtcttgatggtgcgctccgctctgtatctgaaaaggcagtcagcagagataaagacaaaatttatgaaggatttcaggcaaaaataaactttgatagtaatagtttttcaatcgaagataattgtggtggcatttctggcgatcttgcgacagagtacgcgttcaggcttggtcggccaaatgacagagaaggagaaaaaatccccaccattggtatttatggcattggtatgaaacgtgcgatgttcaaaatgggcacggcttcagaggttttaagtaagacaaaaaatgagcaatttaaagttataataagtcccgaatggatatccgatgatgaccaatgggaactagaacttgaaagaaccgaggttaatttagagaatcctggggtaaagattaccgttactcaactcagaaatgatgtgagtaatatttttacacctgacaggggttttgaagaacgtcttactattgcaatcgcaaatcattacagcctgattattaacaaaggttttaaagtatttgtaaacaatgaagaagttaagccaaaccttacaacactaatgatcgacgaaaatgcatttagtgaaggaaataatggtatcactccatatttttatcgtggggagagtaaaggagtatcaattaaaattgccgttggtttttatcgagatttggtttcagaagatgaagaacgttcaattctttctggaaaaaccacgacagaaaaagctggttggacagtaatatgtaatgatcgtgtcgtgttacacgctgacaagacgcggttgactggttggggggaagcaggcgttcctcagtaccatacacaattcatcggcatagcgggtgttgtcatttttacatccgaagatgcggagaaacttcctataactaccactaagcgtggtgttgatggaaactcagatatttatcttgcaaccaaagatttcatgcgagagggaatgaaactcttcactgattttaccaatcggtggaaaggaaattctgaagctaagaaaaaaatgttctctgacgcgcctcaatccttatcactaaacacaaaagatgttgacagcgtggtgcctgacaataaatggtcgaaagttacaagatcaattggtggcaatgcttacaaaccaaaattaccagttccaaaagagacagaccctctcaaacagattaaattcaatcgaaagattagtgaaataaaattggtatcacaatttctttttgatgatgactcatttgcaccgacagaagttggaaattattgctttgaacaatttttagagagagcaaaaaaatga

SEQ ID NO: 186020 - DNA, 1044 bp, Klebsiella oxytoca
atgagtaaatacaaaggccgcaagccgcaaccacaaaagcgcccgcgcaacatgaaagacagcgcgccccaaaaagtggaggcgtttacctttggtgaaccgagcgcggtgctcgaccgccgcgatattctggattacgtggaatgcgtcaataatggccgctggttcgaaccgccagtcagctttaacggactggcaaaaagcctgcgcgccgccgttcatcacagctcgccgatttacgttaagcgtaatattctggcgtcaacatttattccgcacccgctcctgtcacaacaggacttcagccgcttcgcgcttgattttctggtgtttggcaacgcctttttagagctccgaaagagtgtcaccggtcgtccactgaaactggaagcgtcaccggcgaaatacacccggcgtggtattgaggaggatgtctactggtgggtgccgtcattcgaccagccgcacccgttcgcgccgggctccgtgttccatctgctggagcctgacatcaatcaggagctgtacggcatgccggaatatctcagcgcgctcaattccgcctggctgaatgaggcggcgacgctgttccgtcgcaagtattaccagaacggggcgcatgcgggttacatcatgtatgtgacagacgccgcgcaaagcggtaccgatgttgaggcgctgcgtgatgcaatgcgcagctcgaaggggcttggcaacttcaaaaatctgtttttctacgcaccgcacggaaaaccagacggcattaaaattgttccgctcagcgaggtggcaacgaaagacgattttttcaatatcaaaaaagtcagtgctgccgacctgctcgacgctcaccgcatcccgttccagctgatgggcggcaagccggaaaacgtcggttcgctcggtgacatcgagaaggtggcaaaggtttttgttcgtaatgagctcatcccgctacaagaccggatgcgcgaggtcaacgcgtgggccggtcaggaggtgatccgcttcaaaagctacaatctcgacactgaaagtgactga

SEQ ID NO: 186021 - DNA, 333 bp, Klebsiella oxytoca
atggatctcgatttctacaaaggctttgaatatcaagactcggtaagtgttagcaaggagttatggagtgatatcttggcaatagattgtcttgacaaagtaactgatgaagaatcactcatccctgagggattcgatggcgcaggtgaaaaaatatcaagaatctcactcaataacaagaaaaatgaattccttcaaggcttctcaagattgttaataaaattcacctctatcgagagaacggaaaaaagcagctcaaccatatctcatatcttaaaaataatgtcatatttaaatgatgatgaaataactcattttagattagatgtttag

SEQ ID NO: 186022 - DNA, 216 bp, Klebsiella oxytoca
atgcctgatgatcaggatgattttattgaagtaaaagttcatagagatggtgttggtacaactactgcacgaaaaatagtaagacaaggagctaaggtggttgtctcaggacatgacattcaacctggtgcgaagaaaatttttgaagaaaatggaatcatctattttgaaaacgtagatgcagcagatttagacacagactcggaggttgaataa

SEQ ID NO: 186023 - DNA, 846 bp, Klebsiella oxytoca
atgaaaaatttttttacggaatatgaaatcgatagttataaaccaaccaaactatttggggtaagtgatgaatcccaaaagatatttaaattttgtaatttagtatggtctaatgattgggtcgtaaagagagggatatataatttcaatccaactatattactacatggctcacccggaactggtaaaacaacattattgaaaaatatagcaaaacgcctggaaggggaaggatttaagtatttttacataagcttggagctattgctagataaagatcttggtatgtcttcaaaaaacttgaatgagttttttaaacacctagggaatttagcatcgacggaaattaaaatatttgttcattttgatgatgtagattcagtcttatgctcaagatatattccaaatgagtcttctggtgtaaagcgcttagttaatacctttattaaggaaattgataaaattgagtcaatgaattataaataccctcctattataacagcgacaacaaatatgtactcaatgattgatacagctgtaaaacgtaggttttcactcaaattctcaattgaaaataatatcacaatatctgaatttgagatgtggcttaaacctataatatcagacttgggtatggtagatgattttgactatttctctttatatgaaaaaatgaaccagaaaaaactaacaaattatgacgtatatctcattatgcagagtgtttttttagataaaattgctggaaatgaaatttcattcgaaacgatagctctaagattcgaattaacagaatcttcaaatatcggctttgaaaacagtaaagcgtcacttagccgcttatag

SEQ ID NO: 186024 - DNA, 909 bp, Klebsiella oxytoca
atggcagttatcgacctgagccagctccccgcgcctgatgtggtggacacgctggattttgaaaccctcctcgcagagcgcaaggccacgctggtttcgctctacccggaggatgagcaggaggcggtcgccagagcgctgacgctggagtcagagccactggtgaaatatctggaagagaatgcctaccgggaggtgattttacgccagcgtattaacgaggcggcacaggccggcatggtggcctatgccatcaaaaacgacctcgaccagcttgcggcaaataataacgttgagcgcctggtcatcaccgccgcagacgacacccaaatcccgccggtggcggcggtcatggagtccgacagcgatttacgtcagcgcatcccggcggcctttgaaggcatgagcgttgccgggccagccggtgcctatgaatttcacgccatgagcgccaatggtcgtgtggcggatgcctcggcgaacagtcccgcccccgcagaagtcactgtcgcggtgttgtcgcgggaaggtgacggcacggcatcggatgatttgctgctggccgtcagtacggcgctgaatgatgagacggtacgcccggtcggtgaccgcctgacagtcgtttcggctgagattatcccttatgcggtcgacgccgtgctgtacgtgtaccccggtccggcgactgagcccattctggccgccgccagaacgcagttaaccgcctatatcactgagcagcgtcgcctcggtcgtgacatccggatgtcagcgatatacgccgcgctgcatgtgcagggtgtccagcgcgttgagctgcttcagccacgggcggatgtggtgctcgataaaactcaggccgcgtactgcaccgacacccgcgtggtgattgggggctcggatgagtaa

SEQ ID NO: 186025 - DNA, 660 bp, Klebsiella oxytoca
atggcgaccgggtcatcacagctggaacagcgcgctgccgccgcgtgtgccgtcatcagtgacctgaatgtccccttgcgtgacctgtgggatccgtggaaatgcccggtgaaattcctgccgtatctggcgtgggcgttttctgtcgaccgctgggaagaaacctggtcagagagggagaagcgtcaggcggtcagcgatgcgttctggatccaccaacgtaaggggacggtggcggcggttcgccgggtgattgaaaacctcggctacagcatgacgttacaggagtggtgggaggtggccgaccccgccgggacattccgccttgagattgacctgaatgatatcggtattaccgagacgatgattaaggagctggaacggattattggcgatgcgcggccggtcagccgccacattgcccgcctgtcactgtcagcggggaccaccggtccggtgtataccggtgccgcatcgtgcagcggggaggtcatcagcgtgtatccgccggaatatacgccggatgaggccgcccgttacgacggcggcgggttccattccgggtcggtcacctataccgaaaaccagcggggagaagaccctcaccgctatgacggtcgcacttttcacgatggccgtggcgtttacgcaggagaataa

SEQ ID NO: 186026 - DNA, 1950 bp, Klebsiella oxytoca
atgagtgcaattaacgaacagacgaaatgggaagatgaggtttacctgctggcgcgtgaagaccgggtggagggcggcatttatggtccgtcaaacaaacaggcccggcagctggcgaaccgtacccgctatttaaaaaccgccgttgagtcgctgcaggactaccgggattacaccttcttcatgaccccggatgacccggacggcaccgttgcggggcttgccggtacgccggaggggaaactctttcgcgtggtggtgcctgacagcgaggggcaactgctggcctttatctattaccagaagcgcaacggtcaggcgaaccggctgaatgcgctggcaagccagcaggcgattacgtccctgcgccagcagctggagcaggacaccggtgcggcgctggatggcctgaccgcgttgcagtccggtctccagtcgctgacggccgcactgatgcagctcggtctcgatgagatggccgcgcaggtgaccagcatggccgcctcgcaaaaaagccagtcagaccagattcaggcgctgatgctggcgtttcagtccggtatgcgggcgctggctctggtggaggctactcccgaggaggtggaaagtcatcagttgagtaacctctatgccttccaggtgctggcccgtcagcttctcccgctcgacggcttcgacccctcggcggcaggcagcggcacgggaaaccgggaggcgcaggcgaaatatccgggcgtgtttgccttcggtgagccgcgcggtctgattcgcctggacgtgacctccgacagcggcgcgccgaccagcaaggacaacccggttaacggcaccttaaaggtggacgtcgacggggagatgttcacggcatacgtgtccttcaaggttcagggggcgtcgtctgcgggatacccgaaaaagaacatgaaattcgagctgtttgccgacgcggcacataccgaaaacgtcagcctgaaaatcggcgatgtggtgccgaaggacaaatggattttcaaggcgaactggattgactcgacccacctgcgcaatgtgctctgctacaacctgtggcagaaggtgatggcgacccgcagcggctggccgcgccgggatattgataacagctacgtggggaagctgggagccagtgccattgataccggtgccatcggctgcccgaaggggtacgcctgtgtgctgtatatcaatgatgagttttacgggataggggattttctctacaactcgtcccgcaaggattacaacatcgccaaaaacagcccggagcaaatcatgattatctgggacggggcgattaacatcccggcgctcacggataacggcacctgggtgatggactcaccttcgaaacccacggcggaaacggctgcctgcctcgaccgctggcgggacttcgcgcagtccgcacaggatgcgtttaccaccgctgccggtacgcatctggataaaaacaacgtggtggatttctacgtcttcctcagctttatctgcgccccggactgcgtgcagaagaacaccacgtttatcacctgggacggcacgaaatggtttttcatgccctatgacctggataccacctttggtctgcattacgccgggacgtcgattgcctatccgccagacctgaatctgtttgataacggtctcgccatgcaggtcaaccgcaccttctggaagaaggtccgtaccaccttccaggcggaaatgaatgcccgctatgcggagctgcgggataacggtctgttttcacagcgcggcgtgctggagctggcccgcgacctgctggggcgttacaccccggaactgatgcaggctgaatatgaaaaatggccgaatgtgccctccctgagcatcaccagtctggaccagatgatggactggacccgacagcgtattgcatacctggacacttttttcagctaccaccagtaa

SEQ ID NO: 186027 - DNA, 1119 bp, Klebsiella oxytoca
atgaccacgattttagtcaaagatgcgctgcggacctccattgaggcggcttcgggcggaaaacagacggtgctgtataccccgaaggggcagccgacctttgtgaacattatcccgaaggtgagtatcgaaagcctgaacccggcgctggggatttccggcgtacatccggcctttaagcagggcgacagggaaatcccgtatctgtatgtcggaacctatcagggatgcgtgctgaacggcgaggtcctgagtctgcccaacgtggatgcgaatgcctgtaacgcaaccagcgccactcttatcccgttactgaaagcgatgggcagcacctggcacggcatgacgtcggtcgagtgggcgctgatgcaggcgatggccgtgaaaagccggtacagtcccctgggtgccgatgtgtacggcaagtccgcgctggatgcgacccagaccggacgccgtatcgacggcaaagaggcaggcgatttgtcctcacagtctccgcgcatttataccggctccggtccggtctcttatcgccaggacaaaaaatacaacggcatcagcgaccttgccggaaacgtctgggagcgtacctacggcgcgcgtgtggtgggtggcgaaatccagctctacgggaccggcaatgaggccgcgctcgccgcctccgctgtattcagtgcgcacggcgctgatgtgccgggctggtacgccatccatgcggtgaccggggcttttatcacccctacgcacaccgggaacaccaccacggcggactatgtggccaccacccccaacagcgtgcgggcggtgacaaagaccaccggcctggctgacaacgagttttatcacccggcctggggcgggactttcgttcagccgcagaacacgctgccggaagcggtaaaaaatcttctggagctgtatggcgtatggccgtccctgaccggtaaggcgattgtcccggcggggtccaccgtcaactacaacgcgggcgcgacaagctgcatgcatcctgtgcgcggtaagaacgatattttccagtttggctttgccaacaatatcgaggtgctgaattccgagatgggtctgcgcccggtgtattacgcgcccctgagttaa

SEQ ID NO: 186028 - DNA, 1788 bp, Klebsiella oxytoca
atgagtagcgacgttaaattacaggttttactcaaggctgttgaccaggcgacccgcccgtttaaaaccatccagacagcgagcaaagcgctgtctggtgatatccgggagactcaaaaatcactgcgtgaactgaacggtcaggcatcccgtattgacgggtttcgcaaggccagcgcgcagctcgccgttaccggtcatgcgcttgagaaagccaaagcagaggcagaggcgttaggtactcagtttaaaaatactgagcgcccgacccgggcacaggcgcaggcactggaatccgctaaacgttctgtggaagggttacagaagaaatacaacagccttactgattcagtgaaacggcaacagcgtgaactcggtgccatgggcattaatacccgcaatttcgcaaatgatgaaaaagggctgaaaaaccgaataagcgaaacaacggcgcagcttaatcgccagcgcgaggcactggcgcgcgtcagcgcgcaacaggcgaagctcaacgtggttaagcagcgatatcaggccggtaaagcgcttgccggaaacgcagcgacaatgggggccgccggtattggtatggcgacaaccggcacgcttgccggggttgcactgatgaaaccgggttatgattttgcgcagaaaaattccgagttacaggctgtactcggtgtggcaaaagactcggcagaaatgtcagcgttgcgaaaacaggcccgactgctgggtgacaatactgccgcctctgccgatgatgcggccggtgctcagattattatcgctaaagcgggcggcgatgcggcagcaatccaggcggcgacccccgtcacgctgaatatggcgcttgctaaccgtcggacgatggaggagaacgccggtttgctgatggggatgaaatcagctttccagcttactaacgatcaggtctctcacatcggtgatgtcctgtcgatgacaatgaataaaaccgccgcagattttgacggattgagtgatgcactgacctataccgcgccggtggcgaaaaatgccggtgtcagtattgaggaagccgctgcaatggttggcgcacttcatgatgcgaagattacaggttcaatggcggggacggggagtcgtgccattttgagtcgactacaggcacccaccgggcaggcatacacggcgattaaagagctcgggattaaaacagcagacagtaaagggaatacccgccctgtatttaccatcctgaaggaaatgcaggccagttttgaaaaaaataagctgggtaccggtcagcgcgccgaatacatgaaaacgatattcggtgaagaggccagctctgccgccgctgttctgatgaacgcagcgcaatcgggaaagctggaccaactcactgcggcatttaaagcctcggacggcaagacagaggaactggttaaggttatgcaggataacctcggcggcgactttaaagagtttcagtctgcttatgaggccgtggggactgacctgtttgaccagcaggaatcctccttacgcaaactggtgcagacagcgaccggctacgtgctcaaacttgataattggatccagcgtaataaagcgctcgcgcagacccttggcgtcattaccgccgtggctatcggtgtcgtgggtatgatcgggaccattgggctgattgcctggccggtgataacaggcgtgaatgccatcatcgccgctgcgacggcgctcggtgccgtatttactacggtggccggcggcatcattaccgctatcggcgcgatttcctag

SEQ ID NO: 186029 - DNA, 636 bp, Klebsiella oxytoca
gtggctgccattgtcgccggggcattgctcatccgtaaatactgggagcccatcagcgcatttttcggcggagtgattgacggcttgcgggccgcctttgcgcccgtagctgacctgtttgcgccacttaaaccgatgtttgactggctgggcggaaagcttaaagccgcatgggactggtttaacaacctgatcgcgccggtcagatcctcgcaggagacgttaaaccgttttcgtgatgccggtgtgttgttcggccagcgactggcggatgccttaacgttgccactgacggcatttaataagctgcgcagcggtattgactgggtgcttgagaagctcggcgttatcaataaagagtccagcacgcttgaccagactgccgcgaaagccagtgccgccacgcagggtagctcttatattcccgcgaccagcacttatggcggttatcaggcttatcagcctgtgacggctcccgccggtcgtacctacattgaccagagcagcccaacctatcaaatcaacatgccgggtggtgcgccgggcggtcaactcggaaaccagttgcaggatgcgttagaaaaatatgaacgcgataagcgggccagagcccgagccagcatgatgcacgattaa

SEQ ID NO: 186030 - DNA, 645 bp, Klebsiella oxytoca
atggtttgtgagggtggtatcactgtcgacagaactgtcgtttcggctggcgtggctacacacccgttcagccagaaaccaccaaccatcaacggcccgctcatcatcaatccgttccgtgatgacacagaggactactcggccgcgcagattgcagagtggaacagcgccgaaggaaaaacggtatacctctatgactggcgccgtcagtacagcgtccagcgcccgatacggttttttgataatacacaggaagcattccagtattacaagggtgtctggacgccggttgttaaatgcggctcagaagtcgtgacgctgaataccaccgtgggaacctaccgccgctcagggaggttagtgcatgcgactttcagaatcgaaaccacgtcaatggcgctgacgacaggaggcgcggtagtgatatcaggactgccgttcactgtcgcagcgttgagcgatggagggttgaccgtttctccggtcctttgcagtcgtgctgggtcatccacaatactggcgcaaacgaatccgaccacaaaagagattctactgttaaccaatagctcaccgactgttttctcaattacaggcggtacaggtttgacgatttacggctcagttcagtacgttctgacagaatga

SEQ ID NO: 186031 - DNA, 264 bp, Klebsiella oxytoca
atgtttacgatagagaaagaagttgcggttaatcaggtgactgccgatggcattgcagtcggaaccacaacattagaagttagcctgacatacatcatcgagaggatcgagcttgaagggcagaacggcatcgcgttttatacagttacgtcaggtgctgatactgagggtgcgaggaactacatcccattcacctattcaggtagcggagatcctgagctagaggctgagtttgctttgaggtgttttcttgatggaaattag

SEQ ID NO: 186032 - DNA, 2196 bp, Klebsiella oxytoca
atgattaagccggtgaaaaaactgatgctcgtcgcgctgctttcggcgctgggaagcgcaggcgcgatggccgcggagcagtcgcactttgaacactttattacccgcgacggcgcaacgttaaaagatggcgacaaggtgttccgctttgcgggcattcatgcgccggaactgcaccgtatcgaggacgatgcgcgcggtacctgcaaggccgactcgcgcggctgggggcaatacttccgctggccgacggcggaggaacaggaaaactggattaaagcgctcgtgcaaaccggcgccagggcgcagcgggtatacgtgctctcggtgcagcagacgtttgacgaggcctgcggtcgcgaaacccatattctggccccggaaaccgccgacggcatgccgcgcctgaacgaaaaggcgatgcgggtgtacgacaacatgatcgccgaggcggacaaacaggggctgcgcctgattctgccgtttatcgatcactggtggtggtggggcggtcgcgagcagctggcggcgttctaccacgaaaagccggaggatttttaccgtaccgacagtaaaaccttcaaggcctatctggacgtgattcgtcaggttatcacccgtaccaacagcgtgaccgggcgcccttactatgacgaaaaagcgattatggcctgggagaccggcaacgagctggaagacaccaacgcggcgttccttcagcagaccgccgcatggatcaaaaagtgggcgccgcaccagctggtggtggatggcacctataagaaaattaatgcgtttgcgcttaacgatccccatgtcgatatcgtcagcaaccattactacaccaatgccgataacaaccatcccgaacaggtgaaaaaagacctgacggcggcagcgggtaagaaagtctacatggtgggcgaatttggcctgctggacgcgcagcagcttaacgccattatgcagtcgatcgtccatagcgaagtcaacggcgcgcaggcggcgggcggtttaatctggggcttccgcggtcatcgtcacgacggcggcttctactggcacaaagagtccaccggccactacagctaccatctgccgggcttcccggtcgaaggtaaggccaaccaggagatggaggtggtcgacctggtgcgcaccgccgccgcgcagatgaacgggcaggagaaagcgccgccgctgccgaaacctgacgcgccgacgctgcggccgacggattcaccgtttgcgatcaactggctgggggcggcggtagggcgcgcctatgatgttgagcgcgctgattcgccatccgggccgtggaaggtcgtggggcgcgacatttccgacggcgttaacgagtggaacccgcatacgatggatctgttccgcgatgactatcgcagtctgcggctggggaatacgtactattaccgcgtcatcgctaaaaacgagagcggcagttcatcgccttcgaacgtgattagcgtgaagcatactcaggctaatcaggcaccggtagtggcgctggcggagacgctcaccaccagccaggaccagggcgtgcagctcagcgcgagctggcgcgatgacgccctcccggaccgaaacgtgacggtgaactggagcaacggcggcagcgcgcaggcccacttctgcgcgacggataaagccgaaacccgcgcctggttcagcgcccccggtgaatacgcgctgacttttagcgccgatgacggcctgctcaaaagcagcaaaaccgttaaggtcacggtgacggaagccgtcggtaaagtccccgccgactactgccgttttggcggcggggtattgaacgtgaccgatggcaagattgcggcggcgaaaagcgaaaaagacgcgctggcgattggcgacgacggcttcctcgggccgttcgccaacgacggggataaggtcagctggcaggtttccgcgccgtgggccggcaagtatcagctgcgggtgacgttcagcggcaaatggggcggcaagaaaaactcgtttatcgtcaacgacggcgcgccaatcgcggttgaattcccgcagaccgatgagcagggccagcagctgctggtgccggttgagctgaaggccggcgataaccgcatcgacttcggtaaattcgccggcgactggggctacatgtttatcaaatcgattgaagtggttgcagagtag

SEQ ID NO: 186033 - DNA, 294 bp, Klebsiella oxytoca
atggatattgagtcggaaggcgaaccgggcgaagacggggtgattgacgattcgttccgcatcggcctgatggaagagcatctggtgcagctgcaccgcgcgatagccgacggcgcgaactgctttggcgtgcatcagtggacctttatcgataactggtcgtggattaactcgttcaagcgccgctacggtttctggcggctcgacctgcaaaccggagagcggcagataaagcgcaacgcgctgtggtttgccgaactggcgaccagcaacggcttcagttctgataaatag

SEQ ID NO: 186034 - DNA, 948 bp, Klebsiella oxytoca
atgacgcgtttacctctggccgccgccatcgctttgcttttggcttctcaggctgcattttcctctcttcccaccttttccgtctggcccggcggtgaagcgcccggcgccaaaaacagcccggcgagcgaatcgctggtggagcgcagcaaagacccctcgctgcccgatcgcgcggtcaccggcgttcgcgctccgacaattaccgtttacgcgccagagaagcccaacggtatcgcgctgctggtgacgccgggcggctcttaccagcgagtggtattggataaagagggcagcgatctcgccccggtatttaacgcccggggctataccctgtttgtgatgacctatcggatgccggcggacggtcacgcggaaggcagcgaggcgccgttggccgatgcgcagcgcgcgctgcgtaccctgcgggcgcgggccgccgattggcatatcgacccgcaaaaaatcggcattatgggcttttccgccgggggacacgtggcggcaagcctggagacacgctatagcgaaccggcttacgccgccgtggacgcggttgaccagcagagcgcgcggccggacttcgcggtgctcggctatccggttatttccatggatccggcgattgcccatcccggatcgcgcaaggcattgattggcgaaacgccgacggcagagcggcagcaccgctattcaccggagcagaacgtcacgccgcaaacgccgccgacctttattttccacgcggtggacgatccttccgtgccggtggataacgcgctggtgatgtttaacgccctgcgcgcgcagcaggtgccgaccgagctgcatctgttcgccgaggggaaacacggatttggcattcgcgggacccggggcctgcccgccgccgagtggccgcagctggcgatgaactggatagcctcgctggcggaaatgaaaaaatag

SEQ ID NO: 186035 - DNA, 327 bp, Klebsiella oxytoca
atgaagatgaccaaggcagattttggtgtaactattgacgatactttaataactgattttcgcgatgtggttaatgaaggggagtttgcttacagctacttcataaacagaaatggtaaaaaccagttcagccctatctgttcgtgcatggattggataagcgtttctgttcgcaatctgatgaacttccctgagctgtcggaagatattgatgtcaaggccatgcaggtttactcccttatatcatctattgatattgctgtggaggcgttgcagcagcttcaccgcatcattgagagtgatcataagttagcgaggtggccttga

SEQ ID NO: 186036 - DNA, 357 bp, Klebsiella oxytoca
atggtcgggcatagcgagaaaattcgtcagcttaatctggaaacggcgctgcatctgccagatagcaatattaattcagcggttgagattgttcgccactgcgatctggtgattacggcggataccgccatcgtgcatattgctcgcgcgttcgacaagcccatggtggcggtttacaacaaacgtaaactcaaagataccggtttgccgggctataccatttgggcgccgggttatgacaaggccagacagattgtctgcgaagagactaacgtcgccgacatgaccattgacgcggtctggccggcgatcaaagcgcaggcggatgccctgatcgccgctcgccagcaggcataa

SEQ ID NO: 186037 - DNA, 240 bp, Klebsiella oxytoca
atgcttcgtcagtcagacatcaaccaggcctttcgagaggcgattcttcggaactcgaaaggctatcagtatctacacacgcgagacttcatctcttgtttgatgctgcggggcattcatttctcagagtcagaagctaaccggtggattgagcgctatcaaagctgcttcgctgacaaaactccggaccacaccgaaaacaggctttggattttaaggaatacggggaggatcatgtaa

SEQ ID NO: 186038 - DNA, 327 bp, Klebsiella oxytoca
atgatggtaagttcgtttccttcacctgctgctgattatattgagtctgctctgactgtcacggctgcgtgcaacattggcgcgaactctcatgttatagagactgatcgcggctatgttgttcttgatttatcactgaaggtgacgcaaggaagcgtccttcttatccgcctggctggcgaactgcagtttgcaaaattgatggggcgttcttttatcactgtcgaaggtgaatcgatagaaggggaggcgatggaagatgttgaagtgctcggagtcgcgacgtatgtgatcaacgatatgaggcaggacgatagccctgtttga

SEQ ID NO: 186039 - DNA, 183 bp, Klebsiella oxytoca
atgcgagcacgcggcgcctcgcccggcgggacggcatttttgtcggcatttcctcgcgctaatgtcgccgccgccgcgcggctggcccgcacgctgccggcgggatcggtggtggtcacgctgctgtgtgatgtcggctcgcgttatctgactgacgctttctggaatgaaacccatgattga

SEQ ID NO: 186040 - DNA, 1431 bp, Klebsiella oxytoca
atgagcttactttataatgttaaatgggtttctctctctcaggttatacgtgttttatgccaagtattagcaatggtctttttttctcgatatcttactcctattgaaattggcatcatggcaatgactgttattgttgttaattttgttaatgtgttacgagatatgggatcttccgctgcgattatacagaaagataacgttacagatgagctaatatgtagcgttttttatctgaatttattaatgggggctggtttatttttcttggtttatttttgttcaggtttgattgctgctttcttcaaggagcctcttgttagctcgaccttaagtctggtagctatagccttccctataaatagtgtgactagtgttcatttggcattgctagagagagattcgaaatttaataaaattgcagccgtagaaatcttttcatctcttctgtcgttatcaatagctgtgttatatgcaatgaatggtggtggggtctatagccttgttttgcagacacttttatattcggtgttaagttcacttggcttttggttttattcaaaatggttgcctaaattcaagtttagtcttattgatataaaatcaattttttcatttagctctaatctaatagggtttaatataataaattatttttctaggaatagtgatcaaattataataggacgttttttctctgctgatctcttaggtcagtactctctagcttatcgcataatgttgtttccagttcaaaatattacatttgttctgacacgttctctttatcctttacttagcagattgcaaaatgatcctaaagaagcatataagatatatttaaaaacactccgggctatttcatttataataccgccgttaatgttgggggtttgtgctgttagcgatgagtttgttttatttgtttttggtaataagtgggctcagattccaggtatattagtatggcttgctcctgttgcgatcatgcagtcgttagttagtacaacaggcgctgtctttatgtctcatgcaaaaacaaatgttttgttaagaatttcaatatataacgcatttttgcaaattagcgctttcttgataggtgctttttatagtctgaaagtacttgttatattgtattgtgttgcaaatgttttaatgtttgtacctaatatgtatttggctttttcggtaataggtggacgctttgttgagttattccaaactatctggaagccacttttttcagcatttgtaatgtattctgtcttgcgttatttttctgaggattttgtttctcataatgttttggttttatcattgataatgaaaattataatgggcatattggtttatttcttttgcgttttagtccttgagcataaaatgttattgaaatttctatcgagacaaaaaaggctttcaaattaa

SEQ ID NO: 186041 - DNA, 792 bp, Klebsiella oxytoca
atggttattgtgaatttaacgacaacatctgagcgtttagagctttgttccgctaccgtttggtccttgatccatcaaagttgtctgcctgataaaatttttttatggatatctagagatgcttatatggcagacaaaggcatatttgctatcccgagctgggttgatgagataaatagtctgtatgatattcttaatataaaatacactgataataccgggccttatcgaaaaatatttcctatgttaaaggaggcttctgataaagatgttctggtctatgctgatgatgatgttatttattcttccaattggctggagcttttgttgacttctttttatgcctcggaagaaaaatatgcagtagcatctagaataagacttatgaacagaaatctctttggttactatcaaagctacaatagatatcctttagatttcattattactggtgtcggggggtgtgtaattaaaaagaaaatgataaatgataagtttattaacgatatttcttatcttgaggttgcccccaaaacagatgatctatggataagtaagattttgagattgtcgggtactgctgttaagagttgtcctcaagcactgtgttgtgttcaagaaatccagcactcaagttactcgctaaatcatgaaaatacgagtaaattttcaggtggcatttttttacgtttaatgtacaaattcaagttggctgtttttggatatgttgggattagtctttcgaataatgataagacacaaaaaaacattgatcgctattttaaaatataa

SEQ ID NO: 186042 - DNA, 936 bp, Klebsiella oxytoca
atggtaaaaaaaattcttcttttatttattattttatgcatgaataatgtttcatttgcctcagttaaaatctggttttgtccaaatgattctgggtttattactgataaacaactggaaaaaaaatgggctcattcaagaggagatatagatgtttacaagttttattatcagctgattttaaatgatagttatgagggattaaaaaagaaaattagctttttacaatccaataatattcaaattgctgtcgaattacctcccctagtctgggaagagaatggccgtggattcaaaatagagtcttttcaacgcaaagggcttattgagtctgtcatgaagaaattaaaggccgtaaatgcgaagcttgattatgttgcacttgatgagcctctttattttgctcattatatgaatggacctgctgcagttaattataacttagatgtattggcttcgaaaatatcggattctttaaagattgtttatgcttactatccaaacgtaattgtcggagagatcgagccaataggtgcatttaagcatctaacaatgactgaaaaatataatttatttaataattggtttgtggcttttaataataaaaatgacaagcctctaaaatttcttcacgacgatgtatcatggcgcgatgattgggaaaatgaaataacattgctacatcagttgacgaaaaaaaacaaccttgaaaatggtataatttttaattcagcatatcagtggtacaactctgaactatggatgaagagtgcaagacttaatattgataaagttctctcgataggttccctcattccaaatgttgcagttctacaaagttggaataaaagtccggaaataattgctgatgacaataatatttcagcacatagcagtttggtattatattttattaataaaagagatgctaattaa

SEQ ID NO: 186043 - DNA, 765 bp, Klebsiella oxytoca
atggagataccaactttcccttaccggaaagaagttcgtggatttcaagggtttgtttctgagatttgtttccatcttggattctttttttatcgaagggaaatttccttaattccttatatgggttgtgatgtatcacatatatggggaatccctgcatgtaagatttcaaatggaatcgatctttccagcttaaagcttttgagatcttgtaaaccaaaatttcgcgatacaattaactttgttgcggtagcgaggttatctttctggcatggacttgatcgtctcatacattcaattgcaaattatgaaggtgattatgaggtacagcttaaaattgttggtgcaggggaaccagagttaagtcggcttcaaaatattgttgcagaattaaagttggataacttaatttctttcactgggccacttcatggagataaacttattcaaatctatgaagaaagtgatattgccgttgactcattaggtcgccatagaacaggaacaaatcaaaatagttcgcttaaatcaaaagaatatacagcgttgggtttgccatttattaaaagtcacgatgatgtcgttttcgataatcagtttttttcattaactgtatctccggatgaaaacgatattaatattgaaaatgttatcaaatggtatgttgaattaccagttaatacaccttttttaatgcgtgagtttgctgtggaagaattatcttgggaaaaacaattgtcttaccttctgtcttttcttaaataa

SEQ ID NO: 186044 - DNA, 1176 bp, Klebsiella oxytoca
gtgtctgattttccgaacattgatcaagctcgtgaagctgcccgacagttagttcagacaatgatcatcactaaaagaaaccctaataaaatcaagagggaattagacacagcagaactcactatcagtgaagtgtttgctcaatacagaaatcatttaatgggtagatctaaaccagctaaaccgaatactttggctgtacttgataaagcagaaaaccgtttgaaggagtggtcaggacttcgagtgaaggatttaactggtaatgaaattcttcgtaagtttgatgagattgccagcagagccaggacagcagccgagcaaacatttcgctgggtaaatgttgctgtcaaacatgcaatcgatatcgaagcaagtaatgcacagactcaacaacgacaaccatcattgtcatataaccctttctcaattttaaaggtgcagaagaagttcaggactcgatcagaactggaagacagctacaaagcaaaaggtgtcagaaatccgctttcgccaaaagatactcttggacgatttttaacagcattacataacaaaagaagtttcaatcgtttaggctgtgattacctgctgttgacggttctcttaggtgccaggaaagaagaaacagcttctctgtgctggcgagagtctcttacaaaggaagaagctaaaacgacaagctatgtagatcttgaaaatcggctcattcgattctacgacactaagaatcgaaacgatcatgagcttccgatttgtgatgctgtgaaacggttacttgaggacagaagggacattgttcaggaagcagaaactcgtccagaaagacttatgtgggttttcccggcccgttccaaaagaagcaaagttggacactattcggatagcaaaagtttgagagagtatctgtgttcagaagctgagatcgtaaaacttggtatgcatgacctaagacgaactttcggaagagttgcagaagaacttacttcatatgctgtcgttaagagattgcttaaccatcgtaataccactgatccgacagaacgatatgctattcccgatgaagaacgaatctatgaggcattacaaaggattgagttgcacatgcttatgactgcacctaaattgtataatgcactattagcatcagcaaaatatccaccattgccagagtaa

SEQ ID NO: 186045 - DNA, 2181 bp, Klebsiella oxytoca
atgccacagcagagaaaactggccgtactcaccgcattcgttaaagcacaggagactgcggcgctggatgaagccgttgatgtgctcgatatgctgatactggatatcactcgtgcggcgaagaaaacggggcagaaaaagcgactcaggacgcttaaagatcttgaccgtgctgcgctactactggcgcgggcatgttcattgttgctggatgagcaggctgacgatgctgaactgagggagacaatattcaacagcataccgaaaagcaggctggcagaatccgtcagtaaggtaaatgagctggcccggcctcagaacaacaatttccatgacgaaatggtggagcagtacgggcgggtaaagcgttttcttccggcggtattgcgcgacctgcatttccaggcggcgccagccggagaacatacgctgtccgctattcattatctcaccgaactgaacggctcgaaacagcgcatcctggacgatgcgcctgaacatattattaccggcccctggaaacgtctggtatacgatgcggagggccggatacagcgtgccggttactctctttgtctgctggagcgccttcaggatgcactacgtcgacgggacatctggctcgaaaacagcgatcgctggggaaatccccgcgagaagctgttgcagggggaagaatggcaggctcagcgggtccccgtttgccgggcgctgggacatcccactgatggacataaaggcgtgcaacagctggcggtccagctggatgaaacctggaaagccgtcgcatcccgctttgaaggaaatgcggaggttcatatttgctatgacggtaaacatccttccctgactatcagcagcctggagaaactggaggagccaccatcgttgcatcgtctcaacagtcgggtaaggcagctactcccgccagtagatttgacggaactgttgcttgaaatagatgccagaacgggatttacacgtgagtttacgcatgtcagtgaatccggggcccgggcgcaggatctgcacatcagcctgtgggcggtcctgatggcagaggcctgcaatatcggactggaaccgctgataaagcacaacataccggcgctgacgcgccaccggctcagttgggtgaaacagaattacctccgggcggaaacgctggtcagcgccaatgcccgtctggttgattttcagtccacactggagcttgctggccgctggggtggtggcgaagtggcctcagctgacggcatgcgctttgtcacgccggtgaaaaacgtcaattcagggcctaacagaaaatattttggttccggacgtggtatcacctggtacaacttcgtctctgatcagtactctggattccacggcattgttgtccccggcacattacgagattccatttttgtgctggaaggccttctggagcagcagacagggctgaatccggttgagatcatgacggacacagccggtaccagcgacattatttttggcctcttctggctgctgggataccagttttccccccggcttgccgatgccggtgaagcggtattctggcgggtggataaatcggcaaattacggtgcactggacgaactggcacgtggttgtgccgatctgtcgaaagccgaggatcagtgggatgagatgatgcgaaccgccggttcgctgaaactgggcaccattcatgcttcagaactcattcgctctttgctgaaaagctcgcgtccatcaggactggcacaggcgatcatggaagtggggcgcgtcaacaagacgctgtaccttctaaattatattgatgatgaagattatcgtcggcggatcctgacgcagttaaaccggggagaaggccgccatgctgtggcgagggcgatctgctacgggcagcgcggtgagatcagaaagcgctatcgtgaaggtcaggaagatcaactgggtgctctgggcctggccactaacgcagtggtgctgtggaacacactttatatgcaggaagccctgagctggatgcgcagtaatggagaggaaaccggtggtgaagatatcgccaggttatccccactgatgcacggacatatcaatatgctggggcattatacgttcacgctaccggaggatattttgaaggggggaactgagagcattaaatttcaatttaaacaatga

SEQ ID NO: 186046 - DNA, 636 bp, Klebsiella oxytoca
atggtgttgtttatgtgtctattaaatagattttttgttataacagacacctgttgtccgatatttgatttaggatacatttttatgcgcctttttggttacgcacgggtatcaactagtcagcagtcgctcgatattcagatcagggcgctcaaagaagcaggtgtgaaagcaaatcgtatctttactgataaggcatccggcagttcagttgatcgtccggggcttgatctgctgcgcatgaaggtggaggatggtgacgccattctggtgaagaagctcgaccgtcttggccgtgacactgccgatatgatccagttaattaaagcattcgacgctcagggcgtagctgtccggtttatcgatgacggaatcagtactgatggtgacatgggaaaaatggtggtcactattctatctgctgtagctcaagccgaacgtcaaagaatattagaacgaacaaatgaaggtcgccaagaagcaatggcaaagggagttgtgttcggtagaaaaagaaaaataaacagaggtgcgatattaaatatgtggaaacaaggtttaggagcctcacacatatcaaaaacaatgaatattgctcgttcaacagtatataaagtaataaatgaaagcaactaa

SEQ ID NO: 186047 - DNA, 2097 bp, Klebsiella oxytoca
atggaatttaatattacttcaaagtctaatccgtttggcgatacaacagcagaaaatgataagaaaatgttgagcagtgctttcatcgaaactgctgactttagaactttaattgaaacagatgaccgaactattgttgtaggcagacgagggactggtaaaagtgctttattcattcagctaaatgagcattggaagaaagataaaaaaatattaatcctaagtttttcaccagacgacactcaaataattggctttagatcaatgttgaagccatttacaggctcattcaatttagccagggcagccacaaggttattatggcgatatgctatgttaatggagatagcatcatatatatcttctcattataaattatcatctcaaatttcgacagaaacattgttgaatgagcatttaaagaaatggaatgctgcacaaggtgatattttaagaaagtgtaggattgtagcaaaagaatatttagatgaaaacaatcctgaagaatcaattggtgaccttcaatttaatttgaatatttcagaaatcgaaggcaatatagtttcacttcttgagcgctcagacaggaaaattgtcatattgatggataagctagatgaagcatatgaaccggataatataggaatcggaatcatagctggtctggcatatgcctcaattgaattaaatcaaaaagcaaaatgcattcgcccaatcatttttttaagagataatatatttagatcgctatcaaaggaagatcctgactactcaagaaatatagaggggcaagtcataaggctgcattgggattgggcacaactcttaatgctatcggctaaaagaatgaaagtggcatttaatctagatattgagaaagatcaacgggtttgggataggtgtacagccgatgacctcaaaggaaggagtggttttaaacgatgcttgcaatttaccctttaccgccccagagatttactgtcattgttaaatgaagcttttttctccgcatttagagagagtcgagaaaccattattaacactgatctagaatatgcagccaagtcaatttccatggccaggcttgaagacctttggaaggagtaccagaagatctttccttcaatacaagttataactagcgcattccgtagtattgaacctgaattaacagtctacacttgcttaaaaaaaatagaagcatctttcgaatcaatagaagaaaatgaagaccccaaaataatctctgaaatacaattactaaaagctagtggaatcctccaaagtttgtatagcgtaggatttgtgggtatacgtgataaaaacacttcatcttattcattttgccatgatggacgaaccccagataaaggttttgaaagcagtgaaaaactattaattcatccatgttattggcttggtttgaatttaaatcgcaacgctcttgctccagaggaagctgaggaaataaatgacgaatatgatatcaatgttgtttccgataattcagccattagaaataaaacaataggtcaaataaccactcatctggatcaaataccgacaggaaatgaaggggctaatgaatttgagcaatggtgcttagacgcactaagaattgtatttgcatcccacctgacagatataaaaccgcatccaaacggtaacgcggttcagagacgagatattataggtaccaatggtggaaaatcagatttttggaagcgtgtattagaagactataaaacaagacaagttgtttttgatgcgaaaaattttgaagaattaggcccatctgagtacagacaattacaatcatatttaacaggtccgtatggaaaattaggatttattattaatagagaagaaagtgaggcattgaaatcagggagagatttggattggacaaaagaaatgtatcaatctcataattcattaataataaaattacctgcgaaatatatatctaaattgttgcaaaaattaagaaatcctgagaagcatgacgctatagatagtcagatggggaaacttttaactctatatgaaacatcatatatggctattaaaagtactcaaaagaaacgaagaaaatag

SEQ ID NO: 186048 - DNA, 504 bp, Klebsiella oxytoca
atggtaaatgttggcttcaccgggagcgaaacgacggtcagggatgttgtggctaagtggcgtaagcaggttaacagtcccgttatcgccccagttcgactcccctcagcatccagggtaagccgctggttaatgccctggcgaatgatcagaggagaagaaaactatgcatcccgcttcatcgaatcgatgtgccagaaagaaccgcaactgaaaatggcgcaacagctgtcgctcgacttctatcgaatgctgaaaacgaagaataaatcgcagttaaatcaatcgttcactgacgtaagtcaaagtgggctcattgaccttcagcgtgttgcggccagtatggaagcggatgcaacagcaatacacgaagcgataagcagcagatggagtaatggcgttgtggaaggccatgtaaaccgcctgaagatgctgaaacgacagatgtacggtcgagctggcttcgagttacttcgacgacgagtcatgagccctctggcttaa

SEQ ID NO: 186049 - DNA, 546 bp, Klebsiella oxytoca
atgccattacctgagcgaatgaaacccgcacgggtcacccgtaaacagatgaaagaactggtcagtcagctgaatggcattctcgatcacatcgataacgggatggacgaaaacaatgaagaactaaaacagatgatggcagactggaatgcacaggtcgtcatgccctgcgggttctctgattttcgtgatttttcatcctggacaagtgcactagatttcaccaggatggcgcttaatcaggaaaaataccttgatgactttacatggacagaactgaacgacgttatcaactttatacgcaaagcagaaggtagtgcatctgaccacagctatgcactccagttactggagattaatttcagggcaaacccactggatctcatctatcaccctgactgctggttcaatgatgaagcattgtttcatgctcggctgactaccgaagaaattggtggctacctgatgaaaaaatcaggtcgatggctcaacgatgcaccggatatccagctggtgtatgccatcccccaggatgtttatgattaa

SEQ ID NO: 186050 - DNA, 948 bp, Klebsiella oxytoca
atgtctgaggtgaatattcccgatattcgcgaggttctgcgcaaccttgtcgatggtaaccgctttacttttgctcaggttgcccgtgaaaccggcttatcaaccggtgtggtcagcggcttcatgaacaacaaatatgccggtgataacgaccgcgtcgagaaagccctgcagcgctgggtcaataaacagcattctgctgcagaactgccggagccaccgcgctttattgagaccccaacagttaaacaaatctggacagcctttcgctatgcacatctgacagagtgcatcggcgtggtttgtggtaaccctggcgtcgggaagtccgaggccgctcgggaataccgccgcagtaacgacaacgtctggatgataacgatcaccccctcatgtgccagcgtgctggaatgcctgaccgagctggcctatgagctgggtatgaatgatgcgccgcgccgcaaaggtccgctggcccgcgcactgcgtcgccgtcttgatggcactcagggccttgtcatcattgacgaagcggaccatctgggcgcagaaacgctcgaagagctgcgcctgctgcaggaagccacccgtgtcgggctggtgctgatgggtaaccaccgcgtctacagcaacatgaccggcggcaatcgcaccgtcgagttcgcccgcctgttctcacgtattgccaagcgcgtggcgatcaacaagaccaaaaaggccgatgtggccgcgattgccgacgcctggcatatcaccggtgaaaaagaacgcgatttactccagcagatcgcacagaagcccggcgcactgcgtatccttagccactccctgcggctggcggcgatgacggctcacggcgcgggtgaagctgtcagcgaaagctacattcgcaaggcactgcgtgatctggatctggatgttgatgtttcaacgttactgaggggttaa

SEQ ID NO: 186051 - DNA, 240 bp, Klebsiella oxytoca
atgattactgaacgtattgctgaacatgttggtatggccaccgctgcgcaggcatggctgcaggcgcgcggtagtcgtgttacggagatccgggtgtggatgcgccgcccgtgtctggaaatcacctgtccgccgactgaactggtgaacagggctaatcatctgattgaacgctgccccaccgggacccgttccgtgtggatggccacccttgaaggctgtcatgttatctggaggtaa

SEQ ID NO: 186052 - DNA, 525 bp, Klebsiella oxytoca
atgcgtaaaatttttctgggttttatgtttttaacaagtttctcttcttatgcggggcaggtctccattaaagagcaagcaaagtcactccttgaggattatgctcgagtagactcagtggactggtacaataagggggatacggcatttgctgaaaatgatgggtttattggtgtttataggcacctaaaggcatcagttagtgataattcagttaatttgaaaatggattttgtatccggccctaaacgccccgatagtgatgagtttagtaaaatcacctctgatgtttgtattacagtattttcccagttaattaacccaccgacaaaagatacaaaggaagttacttgggatgatgagccagtagaatcaggaaatgatgctcctgaccattttgcttttatgcgtacttctggattagataaagttcacggccagaaaatggaaggcattatcgatggctggcaagttagcattaaaagaactgtattattgacaacatgctctgcgaaaaaaacgtaa

SEQ ID NO: 186053 - DNA, 579 bp, Klebsiella oxytoca
atgacaacatcatttacccccgcattttctcacgcgctcgcgttcgttctcgcccgcgaaggtggttatgttaatgacccgaccgacaaaggcggcgaaaccaaatacggcatttccgacaagcgtgatggtcttgccgatggcaaaaccgacgtcgatggcgacggcaaacccgatacccgaattaaggacctgaccgaagaacaggccgggcagatttatttccgcgattactggtatccctcctactgctctcagtggcctgatggcatctccctttttgtgttcgattctgcggtacagcacggcgttaaaaaatctatccagctcctgcaggatgccgtcggtgtttcagctgacggtattatcggccccaaaacccgcgccgctgtagcctcagctgatgccgaatggcttcttctgcgctgttttctgcgccgttcccgctattacgccgagatcatcaaagccaattcttcgcagggtaaatacctcaatggctggtttaaccgtcttgatgaaatcgcgaacgcctgtcaggaggtcgtcggtggtcaggtctcggttccccggagctga

SEQ ID NO: 186054 - DNA, 408 bp, Klebsiella oxytoca
atgtttaaatcgttgaataccgactggctgaagctggcattgctccgggtatttcagtccggctggacggtggtgattctggttggattgtcactgctgttctgcagcttcactggccgtcaggcgtttattgtctggtggctgactttcgccggggtgctgttaattggggcgagcgtatggctcggcaatctgccttaccgtctgctgcatccgggtaattctactcgccagtggtcaggtgtgttgtcctggataatctggggagctggtttcctgttgctggccgtcgctcccgcgaatgcaaaagacccgtggaccctgctctttaatccgctggctggactgactgccttccttctctggttatgggtttcacataaggagccccttaaatggatccgataa

SEQ ID NO: 186055 - DNA, 288 bp, Klebsiella oxytoca
atgcgtgacattctcgaccaggaccagcgcctggttattctgcgatcccttgtcgaatgcggtgacagcgccaacgagtcgattctgcagacgtgcctgcagacttatggccatcgcgtttcccgcgataccgtgcgcacgcatctggcgtggctgcgtgagcagggtctggtcagtctgacggatgtttccggctgttatgtggcggaaatcaccggccgtggtgatgacgtcgccagcggtctggccacggttccgggggtgaaaaagccccgcgcgaggggataa

SEQ ID NO: 186056 - DNA, 576 bp, Klebsiella oxytoca
atggcagttgaaaaacagacccgtggtcgcccctccaaaatcgacctgctgccggatggcgttcgcgaccagttgcaccagatgctgcgtgagaaacgtcatacccaggaagaaatccgcgaagcgattaatgagcttatcgacagccacaacctgccggaggatatgaagctcagtcgcacgggcctgaaccgctacgccagccgtatggaggagttcggagcaaagattcgcgcctcccgcgaaatggctgaaatctgggccgcgaagctgggttctgcgccgacgtctgacgtcggcaaattgttgatggagtttgtgaaaacgctggcattcgaaacgtcgatgtcactcgctgaagaaaaaggcccggttgagccgaaggccctcggccagctggcgctggttgctcagcgtctggaagccgccgcgatggccagccacaaacgcgagaaagagatccgccaggccttcgccgaagaagccgccgcgcaggcggagaaaatcacgaaaagtgccgggctgtctgcggaaaccgccgctgatatccgtcgccagattctggggatcgtatga

SEQ ID NO: 186057 - DNA, 612 bp, Klebsiella oxytoca
gtgagcaatgaacgtccgtccctgctgaccaccggctccacggtctccgccgctgagaacatagtggcgtggctgaagccggagctgttgaacgaacctcagcaaaacaagcctgaccgcgtcagcgtgattgaacgccatatcggccagttcagcaccccggctgaggtcaaaacctggctgtcagatcgtgatggctgtatccgtctggccgcactccgggtgcgcaacatccgtgcacaggctggcggcaccgtcggcgatatcacctgggcggcgtatatcatggccaccgatgcatggggctatccgcgcgatacccgctgcgaggtgctggtcggaaagctggttcgccgtattgtccagcgcggagccgctaacggcatgaaggccgagcgcccggccacttccgtcagtgccgataacatctattccggcgggcttaacgagctgggcctgaccatgtgggccgtgacgtgggaacaggagttccgtctggatgatgaaatcgaccttgccaccctcccggacttcctgcgactgggggccacgctgcaggtcggcgatggcaccaccccgattgaagacgttattaacgtaagagagccgtaa

SEQ ID NO: 186058 - DNA, 1482 bp, Klebsiella oxytoca
atgtcgtcactgggtaatattcctgctgatatccgcgttccgctggtgtacatcgatattgataattctcaggcgctcgacagcgccccggcgcagtcgcgcaaaattatcgtcatcggccagcagagtgcgaccggcaccgctgccgttctgacgcaaaaccgcatcaccagcgacggcaccgctgaccagctttacggtaaaggctccatgctggccgggatgctcaaaaccctgcgtaaggctaacagctataccgaagtgtgggcgatgggcatggctgatattgctgccggtgctgctgcaaaatcggagttgaccatctccggcccggccactgctgcgggcacgctggccctgctggttaacggtatatcggtgcaggttggcgtcagcgctgacgataccgccgacactatcgcgacagccattatcgccgccgttaacaaactgcccgatacgcaggttactgctgcgctgaaagcggattcgaccgacgtcgtcaccctgaccaccaactggaaaggcgcgactggcaatgcgatggacgtccgtctcaactactacaccggcgagcagacacctgctggcgttgctgttgccctgaccgctttctccggcggcaccggcaccccggatattgcggccgtcgtcgcggcgctgggcgatgactggtacaccgatattgtgttcccgttcaacgatacgcagagcctgaatactatccgggatgaactgctcgaacgctgggggccactcaagatgattgaggcgcagctctggacggccttccggggcacccatgccgaaagcggcacctttggcgaaacccgcaatgactggctgatttcctgtatcgggaccaacatcgcaccgcaaccgcactggctgtgggcggcttcttacggcggtatagcgtcatactatctggccaacgacccggcccgtccgctgcagacgctggtgctgccaggaatcctgccgccggtcaagacagtacgctgggatatgccggagcgtaacctgctgctgcatgacggcatcgccacccattacgttgacgccagcgacaacgtctgcatcgagcgtgaaatcactatgtaccgcgtcaaccagtatggtgacgccgatacgtcgtacctcgacgtgcagtcaccggcgacgctggggcgtatccgctacgtcattaaaaaccggttcaccaaccgctacccacgtcacaagctggccggggatgatgtgctcgacctgcttgatccgggtcagccggtgatgacaccgaagattgcccgcgccgagctgctggatatcgcactgactgagctgattccggctggtctggttgaggacttcgacgactacaaagacacgctggatgtgtatctcgacggcgacgataaaaaccgcctgaacttcatctgccacccgaacctggtcaaccagctgcgtgtgctggccggtcttatccagttcaaactttaa

SEQ ID NO: 186059 - DNA, 354 bp, Klebsiella oxytoca
atgagcattctgggtatggcggccatccgtattaatggccgcgaaatcaaaactgagggtaagtccaccctcaatccgggaggctatgcccgcacccagcatatgggcggtggcaaggtctggggtaactcccgcaagatggccggtccctcgatccagatgaccatcgctgcagcacaggatatggacgtcatcgaaatcagtaactgggaaaacgtgacggtgatgtttgagggcgataacggcctgacctacatgatgaccggcgcggccacagataacccggcgacgctggatgaagacgctggcaccatcagcgccaactttatcggcaccaaactggtgaaggtataa

SEQ ID NO: 186060 - DNA, 1257 bp, Klebsiella oxytoca
atggccgcaaaatgggaagaccttcgcgatgcctcgttccggggcgtacctttctttttccgcgacgtcgagggggctggtggtcgcagggctatccctcatgcctaccccaaaaaagaggtgggctggacggaagaccacggtgcggtattaactcagcagcagattaacgcgatcctgctcggcagcgactacaccgaccagcttaaccgcctgctggctgcgctcaatactgccggtcccggagaactcgtgcatccgtggttcggcgtgcagaaggttcaggtgggccgcgtcacgcatcgcctttccactgaggaaggcggcattgcctacgtttcctttgaggtgtacgaggctggcgagcagctgttcccgtccggcaccgaagacaccagcgccaccacgctcagtgcggcggacaaggtcaaggaagcgctggccagcggtgattatttcgcggcacttgatggcgtcggcagtatggttgacacccttctggaggacatggagggctttgtcacaagcctgccgaccctgccggatgcgctcagcgagtggatggaccgcctcaaccggtttaaggacctcgccggtattgtggccgccgctccgggtgaaatgatccgcgatatcaccggcctcatcagcgatatgaaagacctggtctctgagccgccgttcgccctgcgggtctatgaccagctgcgtgataagtgggaaggtgaccgggcagcgcagtctgcgaccaaatcccttgtcgataacatcagcgtgaatactgataccggctttgccagcagcgtcacaccggcatcgacaccggagaccacggcagcgatggagaccaacatcgcagacttccgccgtctggtcattatctccacgctggtcgctcaggctgaagcggtggccaccgcgaccttcgagaccggtcaggatgcgcagaataccggcgaccagctggcggagcgtctcggcgagaccgctgcggaagccgtcgaaggtggcctccgtgaactgtggcgctcccttcgcgaattgcggttcgcggtggtgaatgatgtgcgtatccgaagcatccagttgccggaactgcgccgcgtcaccccggcccggacagtaccggtgatgctgctggcctaccgcgagaccggcgacgcggagaaccgggacgaactggtgacccgcaaccggctgcgctacccctcctttattacgccctcacagacgattgagatcatcagcaatgactga

SEQ ID NO: 186061 - DNA, 1092 bp, Klebsiella oxytoca
atgactgaagagttaaccctgaacgttgacggcaaggtctggggcggctggaccgacatgaccattaaccgctcgctggagtctgtggcgggcgagtttgacctgaccgttaccgcccgctggtcatctgccgcgccgcgcactatcaagcccggccagtcctgcacggtctccatcggcagcgaccgcgtcatgaccggctacatcgacgacttcattcccagctatgacgcggagaatgtctccctgcgcgtgatggggcgcgacaaaaccggcgatctggtggacagctcggtggtcgataagtccggccagtggaaaggtcagaagctggagcaactggcagccaccatctgcaagccctacggcatcgaggtggttaacgagaccgacaccggcgacgcctttggcagcatcaccctcgaacagggtgaaaccggctttgaactgctcgaccgtctggccaaacaacgcggcgttctcgtgacttcagacgcttacggtcggctggttatcacccgcgcctccacccaacgagccggggtggcactcactctcggcgacaatattctggctgcacgtggacgcttcagctggcgcgaacgggccagtcagtacatcgtcaagggctccgccagtgcgggcggcgtaacgtgggatgaccagccggtgaaaatggtcggagggcgtcagacgatagtcagcgacccggagatcacccgttatcgtccgaagattctggtcaatgaagacagcctgacggtcggcggtgccagcgctcgcggtgagtggtacaagacacggatgctgggcgaagccaacaccaccgaaatcaccgtcgcgggctggcgtgagaacggtatcagcggtccgctgtggcagacaaaccggctggtgaaggtaaccgatgccattcagcaactcgacgtcacctggctgattaagtccgtttcctttatggaaggcgatcaggggcggctgaccgtgctgacactggtcccgccagagtcgctggatatgcccgaacagaaagctaaaagtaagggtaaaaaggcgaagtcgaagacttctgtgggggtgacatgggactga

SEQ ID NO: 186062 - DNA, 540 bp, Klebsiella oxytoca
atgggactgaaggaggtcaacttttcccgttctatcgccgccatcggccgccgcctgcgcctgatggtggaccgggcgctggtgcgcattgtgacggacagcctcgggcggcagaacttgcaggtgcagtcgctggccgatgagaccaatgacgacgtcgagcgcttccagaactatggcttttccagcgtcccgcctgcaggctccgaggcgattgttgttgctgtcggtggccgtcgcggcggcatggtggccatcgctgtcgaggataaagggagtcgcccccgtggtggtgatgaaggcgacgttgttatttatcatcaggaaggccatattattcgcctgaaaaagaatggcgtgattgaaataacagggaagacggtaaatgtggttgccgaagagagctgtgacattatcggtaaacagataaatatcaccggccccacttctttcagtgaagatatacaggttaagggaaaatctttccttgaccatattcataaggatggtgacggtgaaaacacgactaaacccttatga

SEQ ID NO: 186063 - DNA, 585 bp, Klebsiella oxytoca
atggcgcatcgtgtagaggactggcaggacgtcctgcagcagctgatgccgcgcggtaaagcgtggccacgcgaccagacggcggcgctgacgtcactgctccggggcttcagttcccgcctgcagctggcggaggcgaacgcggatttgctggttaccgagatgcgcccggagaccaccgacctgctgctggccgactgggaggactatctcggtctgccggactgcaacgccatcccggacggcttcgaccgccgtcgtgatgccgtggtggagaagtaccaccgcaagggcgggctggccacctggcagattgagcaggccgtgaaggatgcgctgggcttcaccattcaggtgaccgaaatcctgccacatcacgtgatgcgcgacatcatgtatccgatttattcgcacaaataccgttacctgctgcaggtgacggtcacggatatgccgatgatccgctttcgcagtatcagcaacgtcctgacaccgttaattagtttgcaggcgcagatactggaatgttttttacgtcgttaccggctggccgggcacgattatgattttctttacgaggtttaa

SEQ ID NO: 186064 - DNA, 876 bp, Klebsiella oxytoca
atgtcatttgaattctctcaaagcccgcaggccatctggctttatcagtacgatgccgatggtgtttatattggctccgtctttatgacgatcccggcaggcaccggtttacccgttaataccacacatattccctgcgagccggataaaggccagaccggtatatttaaaaataacgtctgggaatacgtgaaagatattcgcggaactcgttactggaatattcacggcaccggctttgttatttccgcactgagtgaatccctgccggaatgggctattaccattgagccgccggttgctgatgctggttacgttctgctgttcacggatggtcagtggatacagattgaagataaaagcgggcaactttactacgagaccgacggcacgaaacataccatctctgacgcgtggtttacgctgccggagggctgcacgttcatagcccctccagaggacaaaacgacgttcgtcacccgctggaacgggactgagtgggtttatgtcaaggatctgcgcggtcaggttatctggaacaccatgactcgcgaacccctcaccatcaccgatattggccccgttcccgatggctacacccttaaaatgccgggtcagtttgatgaatgggacggctcagcctgggtaaaaaatatcgacgctgaacaggcttatctcatcgcccaggctgatcgccagaaggctaaattgctgtctgaggcatctgagcggatttcgatgctgagctacgccgtcagcagcggacaggccaccgatgaagagaaattgctgctcgcaagctgggaagagtatcgcctctccgccagccgcgtggacactacagccaccgacattgtatggccagagaagccttaa

SEQ ID NO: 186065 - DNA, 1191 bp, Klebsiella oxytoca; identical to SEQ ID NO: 151030

SEQ ID NO: 186066 - DNA, 1023 bp, Klebsiella oxytoca; identical to SEQ ID NO: 151031

SEQ ID NO: 186067 - DNA, 888 bp, Klebsiella oxytoca
atgccactgctcgaacgtctgagtggtgcccacggggtcgggccggtatgccgcgagctggatattgccccgtcgacatattactggcatcagcaacgtcagcaatcgccggaaaaacacagcctgcgctcgcagcgtgatgcgcttctgaaggtgcagatacagcgggtgtacgacgataactatggcgtctatggagcccgcaaggtctggcgtcagttacagcgggagggcatcggcgtggccagatgtacagtggtacggttgatgaaactgatggggctcgcaggcgtgctccagggcaaaaaagtccgcaccacaaccagtcgcagagataccgcagcacaggacagggtaaaccgccagttcgtagcggaatgtcccaaccagctttggtgtgcagattttacctacgtcatcacctggcagggcttcgcctatgtggcgttcattatcgacgtgttcgctggcgtcatcgtgggctggcgggtctcatcatcgatggaaacgtcgttcgtcctggatgcgctggaacaggcactgtggtcacggcgaccttcgggcaccatccatcacagcgacaaaggctctcagtatgtctcgctggcctacacgcagcggttgcaggatgcagagctgctggcttccacggggagtaccggtgactcgtatgataacgcgatggcggagagtatcaacggtctgtacaaagcggaggtcatccaccgtcaggcctggaagaagcgctcagaagtggaactggctacgctggcatggggggactggtacaacaatcgtcggttgctggaacgacttggtcacatccctccgatagaggcagaaaaagcgtattacgcttccatcgggaacaaggttctggcagcctga

SEQ ID NO: 186068 - DNA, 354 bp, Klebsiella oxytoca; identical to SEQ ID NO: 151234

SEQ ID NO: 186069 - DNA, 1221 bp, Klebsiella oxytoca; identical to SEQ ID NO: 151236

SEQ ID NO: 186070 - DNA, 738 bp, Klebsiella oxytoca
atgccacatacgctgatgaaacagctgacagaaatgaaactgacgggaatggcggccgcgctgtcctcacagatggagcaacccggcacttacgaagagctctccttcagggaaagactggcgttgctggtcacgcgcgaatcactcgaaagggatcagcgtaaacagaaacgtctgctacaaaaagcccgcctgaggcttgaagcctcggtccaggacatcgactaccagccagcgagaaacctggaacgttctcggatcgctcagctaagccagaacgaatgggtggtcagggggcagaacctgctgataaccggcccctgcggttgcggcaaaacctatgtgggctgcgcccttggcaacaacgcctgccagcagggttacagcgtacagtactggagactgaaccggttgctggttgaactgacgcacagccgcgcagacggtagttaccgaaagcagctggctcagctgtcaaaaacgcagctgcttatcctggatgactggggccttgagccgttgctgccagcgcagcgtaacgatctgctggaactgatggatgacagatacggaaagaacgccacggtgatgataagccagctgccaacggatgagtggtatggctgcgttggcgataacacgctggcagacgcgatccttgatcgtctgatgcataactcccaccggctggaaatgaagggtgagtcgatgagaaaacgactggcacaggttgactga

SEQ ID NO: 186071 - DNA, 213 bp, Klebsiella oxytoca
atgaaaaacatcaaactgcttgctgctgccggtatgctctccgtagtttctttctccggcttcgcccagtccgtcagcgttactgctgacaccctgaacaacgcggaagcgaaaattgccgctatcgcccaggaatccggtgcttcgtcctaccgcatcaccagtgcagaccagaaaaacgttgcccgcgtgactgcagtacttgataagtaa

SEQ ID NO: 186072 - DNA, 174 bp, Klebsiella oxytoca
atgaaaaaatttagcgtgactgcagtactgattctgactggcatgctctcatccggagctatggcaacctcgttcctgccggaaacttgctcggatatggacatctctgtccggacagactatgtcaaccatgaagacgtgagccacgtctttgactgtcagccagtgatctga

SEQ ID NO: 186073 - DNA, 147 bp, Klebsiella oxytoca; identical to SEQ ID NO: 128798

SEQ ID NO: 186074 - DNA, 357 bp, Klebsiella oxytoca; identical to SEQ ID NO: 128799

SEQ ID NO: 186075 - DNA, 531 bp, Klebsiella oxytoca
atgttactgatctttggcggtctgcccggtaccggaaaatcaaccatcgctcgcctgctggccgccaggctgggggccgtctggttacggattgattcaattgaacaggcgctgattcgcgccgaaaccgtcaccaggcacgatatagggccggccggatatctggtggcgtatgccattgctgcggataacctcaggcagggcaacgtggtgattgccgactcagttaaccctatagccattacccgccaggcatggagagcggtcgcgaccgagaatgccgcgccttatctggagatagaactgacctgctccgaccaaatgcagcatcggtatcgcgtggaaaaccgagtggcggatattcgcggtcatatcctgccggactggcaaaaggttatcgcccgtgagtaccaaccctggcgcaccgccagcctgactctggatacctcggtgctgaccgccgaagaggcggtagagcggatcgttgagcatattgcgttacgcggccgccacgcgccggtaggttcatag

SEQ ID NO: 186076 - DNA, 636 bp, Klebsiella oxytoca
atgtcgttggttcttttgcgcatgaacaaagattcttcttacgacaatattgggcatttagcctggtgtgctttggtggctctcggccttcagcggcacgatcggctcgttgttaccgaggccgaggaaaacctttttctgacacgctggctggccactgcccgaaaacagaaaagattctccagacatttaactgcggatatagactggttgcttgctcagggacgccgacttggcgttcgggcgcgtttgtatcagaaactgcattatttatggctcatgagcagcggcgatcttcacaatatgccggatctacttcgattgacctatgctatcaaaatggcaaaagctggcggttggcaatactttcttgtcgatgagaaaaagatggcggcgggtatcagtagatttcacaatatcaattcgttttgcctggaaagaacagctgttgaggccggatttgattctaatgggaagcaaatagccccacttcctatccgggtgtttggtcaaattgagaaactgcagtcacttctggactgctttggccttaaactcgacaaaatcgaatcatattcaaacgagcatttcgcagccaattcatcgttgtttgtactacaggcgcagatgacttga

SEQ ID NO: 186077 - DNA, 291 bp, Klebsiella oxytoca
atgactaaaaatattgaaagtaaaaatacatctactgagttgttctatgatcttgcaaagcgttcttttgaagcgagctggaaaacaatgcaggatatgtgtagtgacagcatttcgcatcttgtcgatgatgctgattttatgagtgcatttataaggataacgattaatcatgtttgtcataactttgacaagttaaccgcgcaggaagactatcatgggaatattgaagaggttaactacgaagaagtagcagaacggcttgtacgtaatgcttgggtgtattgttaa

SEQ ID NO: 186078 - DNA, 480 bp, Klebsiella oxytoca
atgagaaaagtaaaaacagacaacagtgatttaatccagtatttagagacagtcaaagaactaaaaaataatattacgattgaagaatatagaaaagaataccgcaggctacgttctgatgatgttcctttgattaaagcccaaaaattcaaatctgcccatacagagctacgcagacttgataaaaagagagaatctcttattgaatgctttattgatgagttaaatcccatcagcagttcaaaagctaacacatcagcgaaatcatcaggtaattttaatctatttaacgaacgtgcattatatcgtaaagcactttcagaaaaaagtgatgacgatataattgccttagtcataaaacagcgtacagaagccgctcttgagttccaacgttcaatagaacaaagctttgagcaactctctcacatctcatctgagttcgaaccaaagaggcaaaaccgtaagaaaatgtctctttaa

SEQ ID NO: 186079 - DNA, 699 bp, Klebsiella oxytoca
atgttagagcaactgaaagccgaggtgctggcggcaaacctggcgctcccggcgcaccggctggtcacctttacctggggcaacgtcagcgcggtggatgaaacgcgccgtctgatggtcattaagccctccggcgtcgaatatgaggtgatgaccgccgacgatatggtggtcgtagagatcgccagcggtaagatcgttgaaggcgctaaaaaaccctcttcggatacgccaacgcatctggccctttatcgtcgctatccgcagatcggcgggatcgtgcatacccactcccgccatgcgacgatctggtcgcaggccggtctcgatctccccgcctggggcaccacccacgccgactatttttatggcgccatcccctgcacccggccgatgaccgttgaggagattaacggggagtatgagtatcagaccggcgaagtgattatcaaaacctttgaacagcgcggtctggatccggcgcaaatcccggcggtattagtccattcgcacggcccgtttgcctggggtaaagatgcggccgacgccgtacataacgccgtggtacttgaagagtgcgcctatatgggcctgttctcgcgccagctggcgccacagctggcggatatgcagtctgaactgctcgataaacactacctgcgtaaacacggcgcgaatgcctattacgggcaaaactaa

SEQ ID NO: 186080 - DNA, 2580 bp, Klebsiella oxytoca
atgagtatgaaagagcttcctagttggttggttaataatcaaggttttatcaataaactgaaaggattgactatatcctcagtagttaaccaatttccatcagtcagggcgtttaataatcaaagtgtttcggatcaagatataagttatttgcttacttgcggtagtgttttatctcaatcaaatgatgatctttgccaagatgctgcgttgaggatatctcagtattgcttgattaacttgaatagtgagcaaaggaaagatagtgcagcattaattttagatgcgttagcaaataatgctacagtagagcttgctgtaaaaaaaggatttctaaaggaagggtttgagaaaaggctgcctatagctggtcagttagaaacaacaaaacgaaaaattgagcatacaattgaaattgggaacgataagcttatttatgctaataaatttcagtcagagttttgggatagagtgcaaaaaaatgaatgggttagtgtctcagctccaacatcagttggtaaatcttttattttagagtcttgggtggaagattatattaataaaaaagatagagggttaattgtttatttggtgccaactagagcattgataagtgaggtgtatgaatcacttcttatacgtcttgattcaaatgggactggagttataaatatacagaccttaccgcttaaaacttcctacgataacacaagagtaaatatttttatttttactcaagaaaggttgaatatattttataattctttaaatgaaagacctatagtcgatctgttaataatagatgaagcacataaaattggtgactcacttcgtggtatatttttgcaatatgttttggaaatgacatgtgcaagaaatagacagattaaagtgattttcgccagtccttttacatctaatccagagctgttattatcagatgccccttataagggtaaaacaagtgtaataaaaagtagttatgttacagttaatcagaatcttatttgggtagagcaaaggcctaatacacctaaaaaatggaagatgtattttttctttcggggggagaaacaattcataggtgattttgatttagaaaatacaccatcatcagatagtaaaaggctttcatttattgcattgaccttgggaaaacatacatctgggaatgttgtttatgtgaatggtgctgctgatgcagaaaaaacagccaagcaaattgcagatagtttggatgaagttactgatgataaagatatattaaatttgattgagttaagcgaaaaagttattcatgaaaggtttgcacttaattttaccttaaggaagggggttgcatttcactacgggaatatgccattaataataaaaactgaagtggaaagattatttggtaaaggcaagataaggtatttgatttgcacatccacattggtggaaggtgtaaatatggcctgtaagaacatatttatccgcgggccaagaaaaggtagtggaaaaccaatgaaagaggatgatttttggaacttggccggtagagctgggcgctgggggaaagagtttcaagggaatgttatttgtgtcgatactaataaccaaaggatttggaatggcacgccaccaattagtaagaaaaatataagaattattcgtgcaactgactcattacatgacgagatcgactcaatttatgaatatatcgattcacctcatcactatggcatgacacgatccaaccctaaattacaagggttatttagttatttatgtatttcacattatcttaacgacggattagaatacaatccttatattgaaaaatacaacttaaataatctagaagcgttggattctaaaattacagaagttttagactctctgagttttccccttgagattatatctcgcaatccgggtatcagcccaatattaatgcaaaatctgtgggagaggtttgagaggtgtgataaagaaaatttagagaacttacttctagctgatccatcaagtgatgatgcgttgccctcatatatcaaagcatttacacgtatatcagatacgatgagcattgatttgggttataattctaaaggtgtatttgtacttgcgttattagttattaattggatgagggggtatccactagcaagattaatttcagaaaggatatctcatttaaagagaaaaaagaaagagtataaggagccttctgtcataagaaatgttatggaagatgtcgagcgtgtcgctagatatcaagcacctaaattactttcttgttacaatgatttattaagacatttttatatttctgaagggagggctgatcttatagaatatatcgatgatgtaggtgttttcttagagcttggagtaagtgtaaagacacagatctctctgattagcttgggcttttcacgaacttcagccgttatgatatctgagtacataactagcgataattttgatgagcagctatgtatagaatggattattaagaatagtaatttgcttgatgatttacctgcattggtaaagttagaaatttactctatcatcaatggaattgagatctaa

SEQ ID NO: 186081 - DNA, 945 bp, Klebsiella oxytoca
atggatgctttacaaaccgcacttgagaaattggtaagggatgatggtgatactatttatagttatttccaagaaattaaatctgattacttgatcgagggtacttctgctgcttgccactttcattgtataaatttagatggtaatgggcgacctaaagtcgatgcacttatacagtaccttgtggggaaaatcatcgactatgctattccccgtaagaagataaatgcagccataaagtatcaacaagaaacaggttcaactcttaaaatagctaagttattcacgcaggcaatgggattgtttaccagccttgcgaatagcggtgaaggaggagagttaattctatttctttttgcagagaaattcctaaagctccctcagattatctgcaagatgaatctaaaaaccaatcctgaaatgcattaccatggtgctgatggtgtacacatcggtgttgataagcaaagccaaaaactatgtttatattggggggggtcaaagctatattctaatttgacacaagcaatatataaatgtatgaagagtatatctccattaattactagctcatttggtgatggtagtgctgaggaaagagatatccagttactaagcgattttatgaatgtagatgatcctaacctagaagcggccttaaaaaaattcttggatcctgataacccggaatttaataagttagagtatcgtggtatttgtttagtaggttttgatattgatgattatccaactgagccaaataagttaaatattaatgggttgcttgagacctttagcgataagattgactcatggagggataatattaaaaagagaataattgaggaaagtattcatggaatatcattgcatgtatttttaattccatttccttctgtagatagttttagacagaccttgattacctctttgaatggagattga

SEQ ID NO: 186082 - DNA, 2334 bp, Klebsiella oxytoca
atgaaaatgaacgtaacggacacggtaaaacaggcgtgcggccactggccgcgcattctcccggcgctgggaatgaaggtgataaaaaaccgccatcaggcctgcccggtgtgcggcggcgctgaccggttccgctttgacgataaagagggacgcggcacatggttctgtaaccagtgtggtgccggtgacggtctgaaactggttgagaaggtgttcggcatatcggcattcgaggccgccgggaaggtaaacgccgtcaccggccacctgccgccggtggccccggaggtgatggcggccgcagacgctgaaacggaggccgaccgcaaagcagcggccgcgctggccgtcagactgctggagaaaacccgaccggccaccggcaacgcctacctgacccgcaagggctttgccggtcgtgagtgtctgacgctgaccgcgtctcacaaaaccggcggcgtggcttaccgcgccggtgatgtagtggtgccgctgtatgacgggaccggcgcgctggttaacctccagcttattaacgctgaggggctcaagcgcaccctgaagggcggtcaggtcaaaggggcatgccatctcatcgacgggcagaaacaggccgggaaacgcctgtggatagcggagggctatgcgactgcccttaccgtgcatcacctgaccggggaaaccgtcatggtggcgctgtcgtccgtgaaccttctttctctggcgagcctgacccgtcagaaacacccggcctgtcagattatcctcgccgccgaccgtgacctgaacggcgacggccagactaaagccgccgcggccgcagaagcctgcgagggcgttgttgccctgccgccggtgtccggtgactggaacgatgcggtgatgctgaagggggaggacgtcacgcggaaagccatttatgacgccatccggccagcggcacaaagcccgttcgacaccatgagcgaggcggaatttaccgccatgagcgccagcgataaggcgatgcgggtgcatgagcattacggtgaagcgctggccgtggatgccaacggccagctcctgtcccgctatgaaaacggcatctggaaggtgattccgccttctgattttgcccgcgacgtggccggactgttccagcgtctgcgcgcaccgttctcgtcggggagaattgcctcagtagtggagaccctgaaactgattattccgcagcaggatgcaccggcacgccgtctgattggttttcgcaacggcgtactcgacacccagagtggcctgttcagcccgcacagcaaatcacactggctgcgcacgctgtgcgacgtggatttcaccccgccggtggaaggggaaacactggaaacccacgcgccgaacttctggcgctggctcgaccgggcggccagtggcaacccgacaaaacgcgacgtgattctggccgcgctgtttatggtgctggcgaaccgctacgactggcagctctttctcgaagtcaccggccccggcggcagcgggaaaagtattctggccgaaatcgccacgatgctggccggagaggataacgccacatcagccgatatcgacacactggaagacccccgtaagcgcgcctccctgattggcttctcgctcattcgtctgccagaccaggagaaatggagcggtgacggtgcggggctcaaggccatcaccggcggcgatgcggtctccgttgacccgaaataccagaatccctactcgacgcatattccggcggtgattctggccgtgaacaataacccgatgcgcttcaccgaccgcagcggcggcgtgtcacgtcgccgggtgattatccacttcccggagcagattgcgccggaagaacgcgacccgcagctcagggataaaatcgcccgcgagctggccgtgattgtgcgccagctaatgcagcagttcagcgacccgatgagtgcccgcgccctgctccagtcacaacagaactcagacgaggcgctcagcatcaagcgcgatgctgacccgacctttgatttttgcggctatctggaggcgctgccggagcccgacgggatgtatatggggaacgccaacattatcccgcgccagccgcgcctgtacctgtatcacgcctatctggtgtacatggaagcccacggctacaggaacgcgctcagcctgaccatgttcggcaaggggctctcagccatgctgaaagagtacggtctgaattatgagaagcgccgtacaaatcagggcatgcagaccaatctcgccctcagggaggaaagcaacgccgactggctgccgaagtgtgacgaacccaccgcaacataa

SEQ ID NO: 186083 - DNA, 669 bp, Klebsiella oxytoca
atgacttggctcggcattccattcccatcaagcaattcaaattttttagactcaggtattttaacactaggtaaattaccaactatagttgtggattctgggtttggttgggatagcgtttttgcaagtactctaggtgctattattggcgcagctattcccgcagcaatttcatattacgcaatttcgaatagtgcaaaaaccatgaaaactgatcgcgatgagcatgctaaatatgcccgagagcaactcagagcacaacttgtctcatcaagcagacaaaattggatcaatgaactaagagataatgcagctagatatatatcagtagctaacaaattaaataatttacaaatacttataacaaatgaatttagaaagcacgatcaaaaagatgattcttattatcgtcagattcgaatggatgccacaaatattaaaggtgatctaactttccttaaagcaaaaattgaaatgttactcaaccctcttgaaaatgagtctattgaagtgatcaccgcattaaatgagtacactgaaatttccaataactttaaacctggtgatgatcatgattttgataagataatggagattattaaaaacataaaagacaacattaaattaattagcaaggctgagtgggtaaaaacaaaagaattcaagtaa

SEQ ID NO: 186084 - DNA, 876 bp, Klebsiella oxytoca
atgaagacattactaacatcacggtgtattaatcaacggggagcaggtcagcctttcaagaaatcagcgaatgtctttaagaataaaacgccctatctttcacatgaggatgatgacgcatactttaagagtattcgtgctatctttggtgctcaccctacaaatcttaaaaatagtgatggtgaacgactgtttgcaagctggcctcattttcatgctttcaatgaaaatgatttcactataagcctttacaacaacacgccagggaaagatgatgttattttcggcattaagttcgatgagctaattacatatattgaagataggtataaatatctaacaagcctaaagggttccgtaatagcaatacgtataaaacattacagcaccctatccaaacagattataccgtctactgataacattcatgctgagttaaagttgcttctttcagaagttgcggtgcgaggtgataatgattattaccgaatggaagtggaagagttaataaagctgttcgaggggaatgttaaagaggcacatctcaaggatgaagttgacgtatttttaagtaaactacatccaattgcagtagagattagatataatcttcaggaaatgaatattgaggatttagcaactaagcatggcgtgatgatttcaacgcttccgaaaaatgccctgcattacgttcttcagaaaatgtttgcttggctccactctgatagatatgacccaatgggtggcttttacttggacaagttaaatgaatattcaggcgggcgatacaatttttgttctgaggatgatgacagtacaactctattgaagctccggatgatgttgcattggtatcatcaacaaaaagaggcttag

SEQ ID NO: 186085 - DNA, 1887 bp, Klebsiella oxytoca
atgaacaaactttcgcctgaaatgcccgaactgcaatcaatgaatatcactgccgataacatcaccaagcttaaatcattgtttcctgaagcctttaatgaaaacggcattgattttgacgttttaaaacagcttttgggtgaaaatgtagacgaaaaagaagaacgctatggcctgaactggcatggtaagcgtcaggctcgtcagcttgctcttaccccttcccgtggcaccttacgcccatgtaaagatgaaagtgttgattggcataacaccaaaaacctcatgatcgaaggtgataaccttgaagtgttaaagcttcttcaaaaaagttatgccggaaaagtgaagcttatttacatcgatccgccttacaataccggtaaagattttgtctatcctgacaacttccaagataatatgaaaaattatcttgaaattactggacagacagaagacggagcacgtttaagcacaaatacagaaaccagtgggcgttaccatactgattggttaaatatgatttacccacgtttaaaacttgcaagaaacttgttgaaagaagatggggttattttcatttccattgatgatactgaagttgataatttaaaaaaagtttgctcggaaatttttggtgaagagaactttgttgctaatattgtatggcaaaaaaagtactcaccacaaaatgatgcaacatattttagtgatatgcatgatcatattttagtctatgcaaagcaaaggaagacttcaaaaaatgattcaaacggttggaacatagattttctaccaagatcagacgaacaaaatgcagcatataaaaaccccgacaatgaccctcgtggagtgtggaagtctgtagatttatcagtcaaaacttattccaaggctaatgattactcaattaccacaccatcaggacgtattgtaactcctcccgccagtagatgctggcaggtttctgaaaaacgttttgtagaattgtgtaaagaaaataaaatttggtttggagaaaatggtaataatgttccatcaatcaaaagattcctgactgaggtccaagatggtgttgttcctacaacatggtggtcatataaagaatgtggacataatcaagaggccaagcaggaactaaaaaaactcatggagggagaatctgtattctttgacacacctaagccattgagattattagatagaatattacacttagcaacaaccaatgataaagattgtattatcctagattttttcgcagggtcaggtaccacggctcacgcaactttgaataaaaatattgctgacagtggttcacgccgatatattgctgtgcaattacctgaaaaaatagatgatgaaaaatactatacaatatcagaattaaccaaagaacgcctccgccgcgctggtaaaaaggttcgtgaagacaatccagagtggaaaggtgatgttggttttcgtgttttcaaactcgatacatctaacattcgtccgtgggaagccacagcagaaaccctttcagaacagcttgatgcttatgtaagcccaatccttgaaggccgtagtgaagaagacttgctgactgaactgatgcttaagcgtggtattgatctcagcgtgaacgttgaagttcgccagtttgatggattaaccgtttcttgtgttgacggtggtaaattgtttacctgctttgctaaacaaatccctgcatcttcagtagaagaactgaccaaggggatcatcgactggcataagagtttgaaagctggcaaagatactgtctgctatttccttgatgacgcatttgaaaataatattgctaaaactaatctttgcgccattctggaacaacacggcctgactaacctgcacagcctgtaa

SEQ ID NO: 186086 - DNA, 471 bp, Klebsiella oxytoca
ttgttgagtgttcaggcgaagttctttatccagatgttcacggattgtacgtctaatcatatgacgctggatgagcatcgggtcaatatcacccacgacatcaccaacttgcatatagtaggtattagaaggcgtttccagcgtcagataaccgtctttgcccgtgcggatctcgcttatcctgtatccctgataaatatcacgccccgtttcgtcatcaagtgccgtaccgtcatacacggtaatctcagaacgattcacgcccccttttttatcggctatttcaacaataacagtcgcgctaatgctattcttcttactgttaatactgaccagttttacataggggctattgcttgcattctggacttcaagcccggcaacttcaatttgtttgaccagtttctgattgtaagcatcaatggcatcgaggcgatacaccatatgatgtttatgcacatgtgtcgctga

SEQ ID NO: 186087 - DNA, 2367 bp, Klebsiella oxytoca
atggataatcccgccatccctgtgataaacgatgcggccagtcaggcaaaacaacgattaggtcagtcacgctaccggctggacgtgcatggctgcacagaatttcttgatgtgctgaaattcagttcggttgagtcgctcagcaagccctggagatttggtatctccgtgacctgctcgacaccggatatcgccagtgatttggtgctgttaaaacctgcgtcgtttacgtttcagaccccgcagttttacggggctccggccgtacccgttcgttccgtttatggcgtggtggcgtcattcgaacgcctgtccacgtccagagaggataccgtttatgcgctgacgctggttccacgtatcgctctgttagcacatacgaaaggcagtgaaattttcctcaaccagactgtgccggaagtcgtggaaaaggtgttgcgtaaacacgggctggaaggcgcggactttgagtttcggctgtcccgcgagtatccggtgcgagagctaattacccggtggcgggaaaccgatcttgagttcattgagcgtctgctggctgaagtcggtatttactggcgctttgcgatggatagccgccttgagcaggatgtggtcatttttcaggactctcaggagcagtatcagtttggtgtgaccctgccgtttcgtaacccggcaggcatgagtgacagcgggcaggaaagcatctgggatattcagaccgcatacaatgtggtgagcggaagtgtggccacccgtgactacaactatcgcgaagcgctgaaacctcagggcagcactgaaagcatttttagcaaagaagggatcaccgccggagaaacgtaccattatgcggaacccttcctgacagcaggtgacgctgatagcccggagaccggggcatacttcgcccgtctgcgtcacgaacgcattctgaatgcgcaatatcacgtcaccgggcattcctccagccctcatctggctccgggtcaggtactggaaacggacggaacgcttcccgatgccgtcagggaaggcatcgtcatcaccacggtgcgcaccagtggttcgcgcaaaagtagctttacgctgacgtttgagggcatcccctacagtgaaaccgtctgttatcgtccggcactgctcaatcgaccggtgatatccggctcgctgcctgcccgggtggaaagcacacagaaaggcgacacctattcctggctcgacccggacgggcgataccgggtaaaactggactttgaccgtaacagtcctgaacagggttatgcctatttgtggctgcggctggctaaaccgtatgccggtgatacgtacggattccactccccgcttatcgacggaacggaagtggccgtcgtttttgacggcggagacccggatcgtccctacatcgcttatgccctgcacgactcagaacatccggaccatgtcaccagtgacaatcatacgcggaacgtgtggcgcactccggcgaacaataagttgcggatggaggataagcgccaggaagagcatatcaagctcgcaacggaatatggcaaaacgcaactgaacatgggacacctggtcaatggccagcgtgaaaagcgcggcgccggttttgaactgcgtacggacgagcatggtgcggttcgtgcggcaaaagggctgttcctgacggcggatgcccagtccaaagcccagggcccggtgctggaaatggcgccagcgattaaccagattaaccaggccaacagccagatgcaggcgctgaacagcgctgctgaagccgccggagccctgatctgtgacatcaatacccagattagtcttgtgaccgacaaaatcaaagatctccagtcttcggtcctgctgggtagtgctccgcagggggtggcaatgacctcaggtgaacaccttcagctcagcagtagccgcaataccatgatcaatgccggtcagcatcttgatgtcggtgcgatgaagaatctgtctgtaacggtagaaaaagccctgcgtatgtttgtccataaagaaggggctaagctggttgccaaccagggagacatcgagattcaggctcagcacaacacgatggcactgttttctgaaaagcagctgacggtgaccagtagtgaagacgaaattattatcagcacgccggaaacactgacacttaacggtggcgggtcttacctgaggctgagtaagaacggcattgaacatggttcatcaggtgagttcattatgaaaacgtctgactatctggtaccaggcaccggcgcgaatctccccaacgaaacacctaatttcagcctgacggatatcacccaggaaaataaaatcagcagcaaatcttttaatgactaa

SEQ ID NO: 186088 - DNA, 2916 bp, Klebsiella oxytoca
atgctggacaagaatgtagcagttagtgttttaaacactcaagccctggccagagcgaaaattaacgctgaaaattttaaaaatggcatagataaaaagcttaaatatggcgagtcaaaatgtgcccgctatgttaaaaaagcattaatcgctggaggggcatctgcaaaaaattcaggaattgaatcagctaaaaattatggcccatggctgcttgaaaataactttaaagttgtggataacgctacaacagtgcgtactggcggtgtattcacaatttctggtcagcaagtgggggatgttgtcgtaatccaggcagcaccacatcatgtgcatggtcatatggcgatgtttaatggtacacactgggtatctgattttgtccaggaaagggggttctatcctgcccagatatatcgtgatcaaaacataccctatgcactttatcgttatggcgctaataccacatcagagcagaacgccacggctatccgaaaaggaaaaatcaaaatagtctggccgatcccctccaacagtcggggaagtgagttcaaaaatcaggaagagatcctctctcatattgggggggaatccaccgggcagtatatgattggtcgcagtgggatgtggcatggcgggatccatatcacggaagcaacgaccccgtggtgtgctctgagtggcaagtctcctcttgaagcattagatttcccagttccctttaaaggtgagcaggctgtgcgatgcatggctgacggcgaagtggttgcttatcgtgtctgcaaggattatctgacgcttgcatgggaatccggcccactgagcttttctggttcgtttgttctggttaaacactttattcaaccgggggagaaagaatccagcgggctgcatttctacaccctgtatatgcatcttgcgccgtattcagcttatgaggctgaagcagaaaatcagtgggccattcagaatactctaagagcatattctgaaatggactggctgacggcaaaactgacttcagataaaacttctccacaaattgcagggcacatacctaaaggggcaagagtggagtgggacccggcagacagcaatcttaacgccacaggaaataacaagcgaaaatatggtcttgtaacactgaaaggattaccagaagaaaccagcagtaccctcacacctggtcagcgctattgggttgttgtggataacaacaatattaagccagcgccgggggctggtccaggctggtggcggcatttgcttcctcccgcaaaggaagtcatggtattcgataagacagtaagtctcagttttccatttgctattaaggccggtgacccgattggccacatgggctactatcaggcaccaaaagatggtggttatgaggcacgataccaggtacatatcgaatgcacgagcatggatgataatctggagaatttcctgaccaacccagaaaaagtgggggagaaaaacccgctctggttgaagtattctcctggccttgctcttttcacaaaagatgttgcgaagggcactttcgcaaagggctcgacgtcgacaacgcggacaggcattctaccgttgagtaaggtcacaactgaaactgatacctcaacaaagcaagaatactggcagctgcgaccagaaaatgcttacgtccccaaaggccaggcggaacctcaactcttgtcgcagtatgatctggcaaagctgggcttcagaactgaaacctcagagcctaccagttttgattacttggatggaaaaaaccagcctgttggattcttccgcagccttatcaactcgctctatgaggttgcgaccagtgatacgcgaaccagtcatgccctggttaagcataattatcagcgcctgctggataaaattgatagtggaagcgaccgttactctccgatggaatactggagagcacttcataatcccgactatcgtgacaccatccagaaaacaatcgtaaaacatcccagcgattggtacttcaaaaaagatgatgctatctggcaacctttcctcaatgcgctgaaaaaagaagccccagaatggaagaaatatagcgaagattttcttgataaaatggcatggatgcaggatgtgtccactgagaaactagggccttcactgtggcatatgcatcctatcctttttttgggtacgttaaaaagtgctaaccggattactatcgtctacaagaattacgattatactttagattatgccttgaacaagcaaatgtcacttactggcgatagtgttcctacatatggcaattatggtgccgtaacacgtgagcaagttcgggactatatgaatcctgagcttcatcaggaaaacagtgaaatatatcaattcctcgacatttctgcaccttcgggtatttctcgcgaagatttaggtaagttactttccggtcaaggtgtgttatcagggaaagaagatgtatttattgctgctgcacaaaaatataatgtaagcgaaatttatttagcatcacatgcaattctggaaactgaccgtggtagacatgcgtttgccaatggaagcaaaatgtataacaacaggcatgtttataatatgtacggtataggtgtttttcctggcaacactcaaaacggggttgtagttgcttataacaaaggttggttctcagtagatgaggctatcgatggtggcgcaaaatggatttcggaaaaatttgttaataatagtaaaaaccaacaaaacacgttatataaaatgagatggaacccatccaatcccggaaccaggcagtatgcaacatcgataaactgggctcttatacaaaaaactgacatgaagaaaatgtttgatcagttcccggatgcaaacttacgtttcgaaatacctgtttataagaagggctaa

SEQ ID NO: 186089 - DNA, 777 bp, Klebsiella oxytoca
atgaagaaaatcttgctattaataatgtctatgctgtcatttcattcttatgctgcttgcgatgagtcttggaaaaaagctgactacgaacaaaacatacactcatataaagtgattaacaaaacttttttccattcaacgccagatgacaactcaagaaataataagctttttctaattagtaacaacacgtttgtcggctttttgaaatccggaggatatgagttcgggagatatacaagaaaagatggcagcattgtcatgggatggcttaaagacgatgatctctctgaaacggaaaaaacaaacacaccagaatttaatggcgctgacttaagcatttactccccaaatggaaatatagaattaagctcttcgttcgaagggttttataaagcatggggtaggtgtgggaaaaaagagcaacttgaaacgggggcctggagcaactatttatcgaaaggtgatgaaacgtacaagtattttgataactactggaaaggattcattattcgctcttcaaatataaactacaagcattttggtgatgattttgatttatatcgaattactaccataactgtaataaataataagtacatcactggtcgtggtatatatgttggcatgaatgaaaatgaaataataaatgcttatggagaacccacatcaagaagcaaagacaaaataagctatcatttcaaaaataacaccctgagtttcatgctagataatgatgtaattaaaaatatcattttggaagagagcatcctgtaa

SEQ ID NO: 186090 - DNA, 264 bp, Klebsiella oxytoca
atgcttcagataatacgtaaaggcgataaaaccactcacggcggttctgtactgaccgcttctgaaacgatgaaattcggtggtattggtgttgcccgcaaaggcgacaaagtgtcctgcccggttccgggacatggccctacaactatcatagaaggcaatcctgattatcttgatcatggtatcccggttgcatttcacggccacaaatgcgcctgtggttgcacgttgatcagttcattttccgctgcaaaggttgcctga

SEQ ID NO: 186091 - DNA, 1209 bp, Klebsiella oxytoca
atgcccgtttggctggatgccatccctgaaaaggctcctaaggtagcgcgtcccggcaccggtcgttggttgctattcctcgcgtttatcatgctggggggcatagcgctcacgctatggtgctggacgtcagagagaaccggatttgtcttctggttcaccgctttgggtcttccattttgtacctgggggcttattttcggcttacgccggtttgcctacaaagccgaacaggtgggggccgagtcccgaaatgtcgagcgagaagcgcttattgacagtgaaattctgcgcggtcaacgctgcgcctggatcctcggtacttatattcagagtccggccggaaacagcgccgatgacctgctgaaggcaatgaaagtcgcggcccccgctatcgacttctctcgcccaagaggatatgacaaaccggtcagatacgcggcattaacagaataccagactgatttaacaaaggccctgacagcggcggtgactaaactgacaacgcgtgtagaagggatcgttcagccgcttccgccggagttgccatgctggctggtactggattgtgataacgacctgtaccccttgattgaagagcagcttaaggccgctctctcactaaagaccggcaggatttttcgcctgatggccggaaaaggtctgggggcgtttgatgcctggctggacaagcgatgggacaacccgggcattctggttgccattaccgtgtcgttaccggcgtatccccgggaagaagatgctgatgctgtctcaatggtggtattaagcaaccgcaaagcccatgcctggccggatgctctccgccttcatcgccccgaaaggggaacagaaacaacgctcacaaagacgctcacccgggcgctgctctggtcgaagaccctgcccaatgaactcaaaggaagctggatctccggtcccacattgacgtcggacagcggctggaataatgcctgcgaagagagcgaagtggaatttagtctttcagaagacaattccagtatcgatcccgtgctgggatataccggccatgctgctccatggctggccatcacgcttgctaatgctgacgttgaacaacgaggggcgcaggttatcgccgcacaacccgccgctgataaggacgacatctgggtcgccgtcatcaccaaagaagaagttcgcaaggaatcgcctaagaatgtctaa

SEQ ID NO: 186092 - DNA, 3372 bp, Klebsiella oxytoca
atgtctaaggtaaaagtaaaaactctcatcggctcggttgtgactgtcgcctttttcctgacagtcatcgtggcatttttgttttatgcctttccggaaaatgtggcctcagccaccggcttcggaccgtatgacggtcaacggatactcacattctgcgccatactggttgccgcgatatttttgatcggctggctaatagagaaggctttcgaccacgcgggtaaatccgggttgtatttccagtggggccagaaaaaggctgagagtatcactccggtgacgaacaccattctcagtgaagaagatgacgatgaaccggtcttcagcgaagacgccgtgtccgaacacctgcgctttcgctatggacgccgctggcagcgtaaggtgcgactcctgctggtgatgggcaacccggacgatgtccataaagcagccccgggtctgtgccatgacctctggcaggaaggtgacggcaacgtactgatttatggcggtgatgcgcagtcacttccggatgagatcttcctttcaaaactgaagcgtctgcgatctggccagccggttgatggcattattcaggtgatgagtacttcagccctcccgacggatagcgaacgggatgctttcttgcgttgccgccagaaagccgatcatcagctgggctggcaggcgcctgtctggctgtggctgactgataaagcgaaaggtgctcagcaggacgcggacacggctgcgacaggggtgatattcggaccggaaggcactataaaagaggcggatagggcattgactacgctgtctcagcgcctgcaaaaagccggtatggcacagatactgaataatccggctcataacggcctgctccagttatcttcccgtctgcaacacgaactgaaagccagtctgaccgttttgctcagtgggttgatgcagggatctgcggcctggcgtttacgcggtgtcatgttcagccctgaactggccgttgccggaacggtaccgaacacgcgcctcgacacaccgacatggaaagccgtcattgatgactgtgatgccatcagcggcaggaagctgggcttcgactggcagaagatgctgaggttaattctgctttccctgattgtcctgtgggggaccggtacattgcagtccctgatcgttaaccgaacccagatttatgaggcacaggaaacggcgaggcaggcagcggataccgcaaaaccacttgctgaacgcctgcacaaccagctcgtactccagcaagctattgcccgtctgcaacatcgtgaggcgaccggagctccatggtacacccgttttggtcttaatcaggacagcgatacgctggccgcactttggcccctgtatgcgaaaaataacgcacagctgatgagggatgccacagccgatagtctcaggcagcagctgaattcgtttgtgcaacttcctcctgccagtgatgcccgaacgcagggcacacagcatacctacgacgtgctcaaaagttatctgatgctggcccgtcctgacaaagcagacgcagactggctggcaaaaaacgtcctgaaagccttaccgaaacgtcagaatgtgccggatggcacatggcaggacctggcaccgaaactgctgggcttttatgcgcagaacctcccggctcatccggaatggaaaattaagcctgacgctgaattaatcagcacggtccgtcagatcctgctcaagcagattggccagcggaacgctgagtccgggttatatcaggacatgcttaagcgcgtggccagcaactggcctgatttaacgcttgccgatatgaccggcgacaccgatgcctcaacggtattcagcactgacgaagtcgtcccgggtatgtttacgcgtcaggcctgggaagaacaggttcaggatgcgattaacgaggtcgtcaagacacgccgcgatgaaattgactgggtactgacggataagacgcaccagacagggagcgatatctccccggaggcgctgaaagcccgtctgacagaacgctattttaccgattttggtaacgcctggctgaatatggtcaacagcattcagtggcaggatgcgacttcgcttgcggaagccattgcccagctcagcctgatcggcgatgtgcgccggtcgcccctggtggccttgatgaacaccctcaactaccagggaaaaacgggcgagaagggcgaagcgctggcggattcgatagtggattcggcgaaaaaactggttggccggaaaaaatatgcccgacagttcattgagcaggcgcaggggccgaaggggccgctggaggacgtttttggtcccctgacgggtttcatggaaggaaaggaggggaccggacgtaatggtaatctgagcttccagtcctggcttgcccgtgttacacaggtccgccttaaacttcagcaggtcaccagtgcgccggatccgcaggcgatgtcccagatgctggcccagaccgtgtttcagggcaaagctatcgatctcaccgatacgcgtgactatagcagtctggtggcggcaagcctgggtcaggagtggaacgggttcggtcagtcattgtttgttcagccactggatctggcatggcgacagatacttgctccggcagcaggaagccttaatacccgctggcaaacaactattgtcgatcaatggaacaaagcgtttgccggtcgctacccatttaaaactaccggcagcgatgcctcattgcctctgctggctcagttcctgcgcagcgactcaggtcgtattgctacgttcctgaaaactaatctcggcggcatacttcaccaggaagggaatcgctgggtcgtcgatccttcagcaagtcaggggatggaagtgagcccggatttcctgcgggccatcaatcagctggctgaactggcggatatcatttttgctcagggagatgcgagcgttcatttcgaattgatggcgcgcccttcccgtgatgtagcccgcatgcagctgacgcttgacgagcaaaatctggacttctttaaccagatggaaagctggcagagctttacctggccgggaaacacgtactacccgggcgtcagcctccgctggcgtagcgtaaatagcgggatgcagctctatgctaatcaccagggcaactggggattcatccgcctgctggacaaagccctgctcactccccttgacgcgagccgcacgcagctggtgtggatcaccccggacggcaatccgctgaagtttgtgatgcgcagcgagttgggtgatggcccgctggccttgctgaagctccagggctttaagctgcccgaagccatcttcacggttgcagccagcgctgaatacgtcgaatga

SEQ ID NO: 186093 - DNA, 1770 bp, Klebsiella oxytoca
atggatgatttaaccctgtgctactatgaagccgaaatgcgctatctgcgcgaagcgggtaaagaatttgcccgggcccatccggaccgggcggcgatgcttaatctggataaacccggcgcgcgcgatccttatgtagaacgtctgtttgaaggatttgccttcctgatgggcagactgcgtgaaaagctcgatgacgatctgccggagctgaccgaggggctggtgagtctgttatggccacactatatgcggaccattccgtcacttgccatcgtagagtttacgccggactggcgcagcctgcgtcaggcagaaacgctggccgaaggcttttctgttctttcgcgcccgattgggccgcagaaaaccacctgccagtaccgaaccactcgggacgtgcccttacaacccctgcaacttgccgatgcgcgtctgcatactgaaacggatgggcgctcggctattcgcctgcgttttgagtgtccggaaaaagtggactggagcaagtccgggctcgaaaaagtcgctctttttctgaacgccgaaagcccggtcagttcagccctgcatctggcgatgacccgccgggtgcatgctatgtatgcccgtcatgtcggtaccggaactgaacgccataagtttgatggctggtgcaaacccatgggctttgatgacaatgacggcctgtggaagaaagccgatacagccttcagcggttaccagctgctgctggaatattttagcttccgtccgaagtttatgtttgttgagctacgcggtctcgacaccatcgggctcactgaggccagctcctggtttgaaatcgatattgtgctcagtgaagcctggtcatctgacctgccttttgagacagaaaacttccggctgcactgtgcgccggttatcaatctctttaccctggaagccgatccgctgacgcttaatcctctggataacgaatacctgctcaggccgctgcgtcttcaggatggccacaccgagatttacagcgtcgataacatccatggcgcggtgaagaatggcaaacacccctatgtaccgttcaccagcttccggcaccggggcggtatgatgcgtcatgatgcccctgaacgttattaccacacccgcgtgaaacgcggcccctctggtctgtatgacacctggttaattctcggggggcgctcgttcgagctggagcagctgtccgataaactagaatccctttcgatgcgaataaccggtaccaacgggcaacttccgcgaaaagcgctggaaagtaccctgctggacagggtggtcaaaaccggcaaagtgcccgtcagagtattaaacgtcacagcaccgacaatgccgctatatcccccggcaaatgaccgttttcactggcgagtgatgagccacctcggatcaaacttcctcagcatgatggacaatccggaggttctgcggggaacgctggcgctctatgactggactgacgatgagatgaaccgccgtcggcttgaagcaatcgtcgccgtgaagcacaccctgatccgccgttttgagaagggctttatgctcaggggcgtggacattgaggttacgctaaatacggataattttgcaggcgagggcgatgtgaatctcttcggggagatgctgcaccggttctttgcgctctatgccgatattcacctctttaaccagctcacgctggtactgcaaccgacagggaaacgactgagatggcgcgagaatcacagccagcacgtacccggctga

SEQ ID NO: 186094 - DNA, 1083 bp, Klebsiella oxytoca
atggcgcgagaatcacagccagcacgtacccggctgacgctggcccttaacaaagatatctggcgggccaatttctatcgtttctgccagctgctggaacaggaaaatccggacgcgcccaaactgggcgccaccagccatccgggcgacgatccggtacgattcagaccctggcctggtatgggtttcccggtcagtaccctgaaggtggtggagaccgacgaagaccatccgacattacccccaacggtccgcacgacatttctggggatgtatggcgtggactcccctctgccaacgtcctggctggacgacattgcgcagcgccgggaaggacacgaggcggtcaccttattcctggacattttcagccaccgcatcaccacgcagtattaccggatctggcgaaaatacgcgtatccggccaccttcgaggccggtgggcgagatgccatatcacagtgtctgctggggctggtgggactcggtataccgggtacgtctgagcaggtggcaacgccggtgtcccgtttcctggccctgctgggcaccatgcgtttgcccacgcgtaatgccgagggcatccgggctgtggtgagcctgctggcgccgaatacccgggcaattatcaccgaaccggatccggttaaggtccatatcgataatcgcagtgggctgggggccggaaaccgtatccgtctttcgcagcgggccacgctgggtaaaacggccagggaagcatgcagccgggtactggtgacgctggagacagcggatccggacgaggcggaaggctggttacccggtggtgtcctccataccgattttcttgttctgttacgcgtctatctcggctaccgcagtgacgcccgactgcgcctcactgtacccgtacggctgttgcctgagccccgccttggcaaaggcaggcgtatccaactgggccgcaccggtttgctgggtctgaaagcaggcaaactcagcaacagccaggagagtctgaccgtcagtctgggctgttatgaagggttgcaatggtctgtgttaccccctgctgaagacggacattaccgcttcgactaa

SEQ ID NO: 186095 - DNA, 525 bp, Klebsiella oxytoca
atggcaacaataacccgctggcgggtgctgacgcttattgcctgtggtctgctcgcaggctgcggtctgacgcagaccgtcacggacggtacggtcagcatcacgaaatccatcttctacaggaaaattaaaacgctgcatctggattttaccccgcgcacggccattaacgccgatggcgcacagacgccgctggcgaccatggtgcgggtttatcagctcagggatcgtaaagcggttgatgccgccgattaccagacgctgctgcgcaaggccgatacggtacttaaggacgatatgcttgcgtcaaaatcgctgctggtgatgcccaacggcagcgtgacgctcaatatgcccatggatgaagatgctcagttcgtggcggtggtgggattatttaaccgcccggatcagaaggacaaccgctggcgcctggtgctgacccgtgacgacctcgacccggacaaaccccgcacgattgaactgggtgatggctggctcagccttgtgccggtaaaggagtga

SEQ ID NO: 186096 - DNA, 2412 bp, Klebsiella oxytoca
atggataactggtcagcgcttttcgacggacagacccgatactttctggatatcaatgacagcacagtgaagccggatgtcctgcgcttttacggcagggaagccctgagcgagccgttcagatgggacattgagttcaccacgctgcaggcgaacattcccccggagcaggtgctgatgaaatatgcctctttccggatgcgtggcggcaaaagcgttcatggcatggtgacccgcctggaatggctttccacctcaaaggatcagtctcactaccggcttacgctcagttcgcgcctggcgctcctgggatacacccgacagtgcgcggtatatcagaatcagtccgttcctgaggtggttgagcgggtgctgcgtaaacacggtctggaaggtccagattttgaattcagactggagcgcacctatccggcgcgtgaaattatcactcagtggcaggagacggatctgcaattcatccagcgcattctgtctgaggtgggaatttactggcgcacggagatggacgacgtgcgcggtctggatacgtacatttttgccgacagccagcttaacgaccagtttgatgtgcgcctgccgtacagcgagccatcggggttgttcgacggcgcggcagaatcggtctgggatgtgcggacctggcacaacatagccaccggcactgtcgtcacgcgggattacaactaccggaccgccaccacgccgatggatgcggcggtgagtgtgcgcagtgatgcggtcaccaccggggagcattaccgctacgcggcaccttatcgtgaagcgggcgataacgccagcccggagccggaaaccgaatctggcgcattctacgcccgacttcaccacgagcgggagctcaacaaatcagcccgtatccacctgttcagcaacgcctcacacctcactcccgggcaggtgctggagccgcagggcgatgtcattacggccctgcaagaaggcgtgatcctcacgctggtgaccttccgtggcgcccgggattcccgtctgcatgtgtcagtctggggccagccttacaccgaacggtactgtttccgcccggcggaaatcccgcgtccggaaattcacggcacgcttccggcccgggttgagagccgggagaagaatgatatctacgcgcacctggacgagcaggggcgctaccgggtgaagccggacttcgaccgggaggggacggaacccgcttacggttacctgtggctgcggatggcgaaaccttatgccggtgaaacgctgggctggcatacgccgctcatcgatggcaccgaagtggcgattgcgtacagcaacggcgatattgacctgccgtacatcgcgtatgcgctgcacgactcggagcacccggaccacgtcacccgcgacaaccctacccgtaacgtgttacgcaccccggcgaataacaagctgcggatggaggataagcgcggtgaggagcacatcaaacttgccacggagtacggcaagacccagctcaacagcgggcacctggtggatgcacaggggcaacgtcgcggcacgggcaccgagctgcgcaccgacgagtggggaaccctgagagccgggaagggactgtttgtcagcgcagatgcgcaggcgaaagcgcagggtgacgcactggatatgagcgctgcgctgaaggaaatcgacaggcttaatcagcaactgcagcagctggaaatggccgcagaaaaagcgcaggcgctgaagggcgatgtcgacagccagatagagatgtttgagcagcggctgaaaccgctcaatgaagcggtgcttttctcggcgccggaaggcgtggccctgaccagtggtgaagatatgcagctggccgctgaacggaaccttgcgctaaacgccggagaagacttcagtgttggagtgatgggcaatgcgaccgctttgatcggggagaagctggggctctttgcccgcaccggtcaactgagcctgaaatccggggaagggccaatagatgtccaggcacaaaacgccagtatgcggttgttcgctgagaagaagctgacgctgagctcagcgagtgacatctcctttgccggaaagaaacgtatcaccctaattggtggtggcagttacctgaagcttgaggccgggaagatcgagtatggtacgacagcatcgtatttgcgcaaagtaaagcggactatgtttgctggtgcaaccgatctaccaattgagtcaatgaagcagatgacaatgatcattcagtattacgacagaaagttaaatttctcttcaaatgtcaattatcgtgttgaaacatcggatggagaggaactactttctggcttcggcacagatggatacatagacaaaagagacagtgaacatgaatattggatatttgtaagctga

SEQ ID NO: 186097 - DNA, 1239 bp, Klebsiella oxytoca
gtgcacggcatggtgacccgcctggaatggctttccacctcaaaggaccagtctcactaccggcttacgctcagttcgcgcctggcgctcctgggatacacccgacagtgcgcggtatatcagaatcagtccgttcctgaggtggttgagcgggtgctgcgtaaacacggtctggaaggtccagattttgaattcagactggagcgcacctatccggcgcgtgaaattatcactcagtggcaggagacggatctgcaattcatccagcgcattctgtctgaggtgggaatttactggcgctcgatgatggacgatgtgcgcggtctggatacgtacatttttgccgacagccagcttaacgaccagtttgatgtgcgcctgccgtacagcgagccatcggggttgttcgacggcgcggcagaatcggtctgggatgtgcggacctggcgcaacgtggccaccagcactgtcgtcacgcgggattacaactaccggaccgccaccacgccgatggatgcggcggtgagtgtgcgcagtgatgcggtcaccaccggggagcattaccgctacgcggcaccttatcgtgaagcgggcgatgacgcgagcccggagccggaaaccgaatctggcgcgttctacgcccgacttcaccacgagcgggagctgaacaggtcggcccgcattcacctgttcagcaatgctgcacacctcactcccgggcaggtgctggagccgcagggcgacgtcattacggccctgcaagaaggcgtgatcctcacgctggtgaccttccgtggcgcccgtgattcccgtctgcatgtgtcagtctggggccagccttacaccgaacgttactgtttccgcccggcggaaatcccgcgtccggaaattcacggcacgcttccggcccgggttgagagccgggagaagaatgatatctacgctcacctggatgagcaggggcgctaccgggtgaagccggacttcgaccgggagagcacggagccgggctacggctatctttggctgcggatggcgaagccgtactctggtgatacatacggctggcacaccccgctcaccgacggtaccgaagtggccatcgcgtacagcagaggcgacatcgacctgccgtatatttcccacactttacatgactctgaacatccggaccccgttacccgtgacaaccacacccgcaacgggccacagccccggcaaacaacacgctgtggatga

SEQ ID NO: 186098 - DNA, 294 bp, Klebsiella oxytoca
gtggcgcacgtcttcggtgaacgcactctggccacactggagcgtcttctgagcctgctgtcggcctttgaggtcgtggtatggatgacggatggctggccgctgtatgaatcacgcctgaagggaaagctgcacgttaacagcaagcgttacactcagcgcattgagcgacataacctgaatctgcgacaacatctggcaaggctgggacggaagtcactgtcgttctcaaaatcggtggagctgcatgacaaggtcatcgggcattatctgaacataaaacactatcagtaa

SEQ ID NO: 186099 - DNA, 258 bp, Klebsiella oxytoca
atgtttacgatagagaaagaagttgcggttaatcaggtgacggcggatggaattgcggttggaacggcaacgctcaaagtcaccctgacatacaccatcgagaggatcgaacttgaaggggctaacggtatcgctttttacacggttacatctgacgctgatgcggagggagtaaggaattatatcccgttcacctattcagggaacggcgatccgttatccgaggcggagtcagcgttaaggctagtcattgaataa

SEQ ID NO: 186100 - DNA, 153 bp, Klebsiella oxytoca
atgcaaacgaatgttattgccattccgaatacttgtctccagggcctcataaaagaaaaaacccgcacagagaggcgggtgtctaacaagactaatatgctatataaaaaacactcaatttacaaggaattgcgcctgaggtcctatccttag

SEQ ID NO: 186101 - DNA, 417 bp, Klebsiella oxytoca
atgaacgcttcacgcattaactaccagagattcaatgctggtgctggcgtgaacgagccggacaatgaatacattggcatcccgaataaagactttttcgcaaacctcaaagcgcaagcctggtggttggtagcggatcgtttccgtaataccttcaacgcggttaagaacggtgagcagtacccggtagatgagctgataagcatcgactcatcctgcccgctgctggaaaagctcaagctggaacttaccaccccacaccgcgattttgacaaaaacgggcgtgtgatggtggaaagcaaaaaagacctcgccaagcgtgatgtgccatcgccaaacgtggccgacgcttttatcatggcgttcgctcctactgatacggcaatggatatctgggaagcgctgggaaacagctaa

SEQ ID NO: 186102 - DNA, 1452 bp, Klebsiella oxytoca
atggcgaagaaaacaggacgagtcgccacggcggattcgtacgataactttgttgcccgtgtcggtatgcagcagcctaaccagcatgccgcatcgacctacagggcgaactataccagccgcaaccgcctgctcatcgagtgggcttatcgttcctcatggattattggtgccgctgtcgattcgaaagcggacgatatgaccaaaaagggtgtgcggatcaccagtgaaattgaccctaaacgtcgtggcattctggaatcgcggttcgatgagcttcagctttgggattgcatcaacgagacgctgaaatggtcccggctatatggcggggcggtggcgctgattctgattgaaggtcaggcacctctgacgccgctggtgctggataaggttggcaagggcagctttaaaggtctagctatacttgaccgctggatgattaacccacagctcaccaggcgcattaaggcgcttggccctaacctcggcaagcctgaattctatgacatcgtgacaacggcgcaggggcttcctgcgtggactgttcaccacagccgcctaattcgtatggatggtgtgaaactgccttaccagcagaaaatcaccgagaacgagtggggcatgtccatagttgagcgtattttcgaccgcctgacatcctatgacagtaccagcgttggcgctgctcagttggcgtacaaggcgcacctgagaacggcaaagattaaaaagctgcgtgagattattgccatgggcggcaaggcctacgaggcactgctcaaacagatggatctggtccgccagttccagacgaacgaaggcatgtccctgtttgattcggaggacgaatttgaaactcactcatattctttcgcgggcctttcagacctgcttggcgagtttaaagaagatattgcgggggctgttggaatcccgcttgttcgtctgttccgtcagtcgccgaagggtttctcaaccggtgatgctgacctcgcgaactactacgacgacgttggcacgcttcaggagcgagatttacggcctcacatccgcttgctattcgatgtactgcatcgctcggagtttggcgaaccgctgccggaagatttcacctttgagtttaatcccctgtggcagatgagcgataccgaccgatccacggtagcgaccaatacaactactgcgctggctactgctgtgcgtgagttgggtatgtctccggctgctgcgctgacagaccttagagagatgtctgacgtcactggcgtaggcgcatcaatttctgatgaggatatagcaaatgcggcgaaagagtggaaggaggctgaatctgaaaccgaacctccgccgacgatcggagcgtcagtatcacaaaagcctgttggcgatagtcgaccagataaaccaaatcgtaacgggttcatacgatggttcacaggcaagcgctga

SEQ ID NO: 186103 - DNA, 534 bp, Klebsiella oxytoca
atgtttgcccaggtagagcaggaagagtggaaccagtggcggtctatctcggaagaaatttccgctggtctgcgtgacgtgattggtaacactcctgtcggcatggtcgcacaggacatcgtgtaccgccagattcggtacatgaaatccctgccattagaggccgccggccgtgtaagggaaattcaggagagagcgatacaggcggttatcaacggtgagcgacctgaccagctctacgagatgatcatgcagtccggcgatgtggcggccagcagggcgcgaatgatagcgcgcactgagataggtcgcgccactggcgcactgacacaggcgcgggctctggcagtcggatcggagggctactggtggcgcattgagggtgctggcacccgtccatcacaccgcaaaatgaaagataagttcgtgcgctgggataacccgccgactctcgacggcatgaccggacatgccgggtgtctgcctaactgcaaatgttggtcggaagtgcagattcctgacccgggaaaatga

SEQ ID NO: 186104 - DNA, 216 bp, Klebsiella oxytoca
atgaaaaaggtccatatcgaatcaaaacgagccggtgaccgccaggttatcgaaatatcgatgggtggcatcaccgctcgttatcgcgctattggcgagctctcagagttaaaagccacaggtcgcggtaacgtacgtcaggttaaatcgctgcttcgtgagttccttcgtaatcaactcttgggtgacagcaatggtgcgcatcaatttcgttga

SEQ ID NO: 186105 - DNA, 1692 bp, Klebsiella oxytoca
atggtgcgcatcaatttcgttgacgaggacaggtggatcaccgtccaccccggcggcgggacggggacgccggttttgattggcgaggatggggttatcaaggctggtatgggcgggaaatttaacggacaaagtatatccgagacaaagaagcccgacgttaagtcagaaaaatcaacgccagtacctgaattgacaaagcagaaaccagagtttgagggtaagtacaagattagcctcaacgaaaaacagagcgttgcttaccgaagttggaaggctgagctggaaaaaacacctaaaaacgacagtgacgccagattcaacgccgagatccgccagcttttcagtgaagccccacacgacaaggaggcaagagctttgttgctgagatttctgagcaacaacccaagagcatttttggagatgtctcgtagatatcgacacaaagcagggggaactggcgatgccgatatgggacgacacacaatgaaatatttcttcaaaacccgcctgggaaatacgcgattccagctcgctgatgggtcagtcctgtttaaggacgtcccgatcgcaaggactggtgagcaggtatatggcgctgaggagctgcctgacctgcagcctgatagccacggactcataaccgtacagcgcacgcctgaagaagttttcagagagcgcactatcgcatcgtttgagggtatggccgtcacgataggccaccccaaagacttcagcggaaacatcatcttcgtcacgccagaaaactggcggcaactctctaacgggcacatccagaacgttcgccgaggcgcgggtgataaatcagacctgctgctggcggacgtcattgccaaaacgcctgaggccattcaggcagtggagaacggcgacgaagaggtgagttgcggttatgacgctgactaccgacaaatctcgccgggcatcgcagagcagtacgcgataaccggtaatcatctggcctttgtccctaacgggcgggctggttcacgttgtgcattgggagacgctatgccgagcactactaaaaactggtttacccggctgttgaaggcccgtaaaaccaacgatgccgccgaaatggcgaatcttatcgacaacccgcctgatgatgtcacgggcgataacgatgtatcgacctctatgacacccggcggagtgatcattaaccttgcgccgcaaaatccgcttcccggcccggcattgcctggtaccggcgatggcgaggaagaaattcctgcatggggtaaggcgctgattgaggcggttgccaagcttacgcctgcggcaaccgctcctggcaccggcgatgccgaggacgaagaggagaaaaaggaagaagagggtaaagttaccggcgacgccgcttaccgtgccgatctgattcagccaggcatccagttgccagagaaggcgaagccgacagcattcaagcgccaggtgctcgcctctgccgataaatctctggtgcactctattgtcggtgatgccgatatcagcaaactgaaaaaagcgaccgttgatatggcattcaatgccgtgtctgaagtggcgaaaaaccgcaataccgcagccaagaccgttgacggtttccgcaacatcaattccaacacaaccaaaaccatcgcggagattaacgctgccgcgaaggaactctggactaaacgctaa

SEQ ID NO: 186106 - DNA, 495 bp, Klebsiella oxytoca
atggacaacacatttctctaccggatgcctgcaggcatcgccggtgcaatctctcgtccgcaggatctgacggttgaacctcagacactggacagcgcgaaggcattcgccgcatacggcctcgccgggaagttctccgcaggtaagtttgtgccgattgaagcggctgacacggctgctgttgttgtgggtatctatgttcgcccgtacccgacagcctcccagcctgacaaagtgcgtcagattggtaccgggtttaactttgccggtgactgcatgaagcgtggctatgtgacagtgaatatcggtgttgatgccagctctgtggcacttggcggtgctgtgtttatgcgtgtagcaacgccgaccgcatccagcccgttaggtgccttcctggctgccgcagacggcgagaacactgtgcagatcaccaatgcttacttcaatggccccggcgacacgaacggcaacattgaactggcctttaacatttaa

SEQ ID NO: 186107 - DNA, 942 bp, Klebsiella oxytoca
atgccaatgacatttgaccaggcaacagtcgacagttctggtgcctttctcattcacgagctggaacgcctcgatcaaacgctgaacctgccgctgacctcccagacgtggagtcgtgatattcagctgcgtgaagacgtttctatcgctgacgaaatcagctccttcaccaacaccacctttgccgctgccggtacacctaacgccaacggtaaaaactggatcagcccgctggccactgcgattgcaggcgtcaacgttgatatcgagaaaaagggcttcccgctggaattatggggcatggagcttggctggacagttatcgaactgaatgctgcggcacaggtcgggcgtcctatcgatacccagaagtacgatggcatgcagctgaaatggaacatggataccgatgagcaggtttatatcggtgatgcggcgaaaggcgctaaagggctgcttaacctgtctcaggtgacgccgaccaacgcgaccaaaacgtgggcgacttccaccgccgacgaaatccgcgccagcattaaccaggtactgagcaatgcgtgggctcgttccgcttactccaaagtgccggaagatttgctgatcccgcctgaacagtattcgtttattgcgagcaccatcgtttccagcgccggtaatcagtctctgctgacctatctggagacgaacaccatcgcctaccaccagaacggcaagccgctgaacattcgtccggtcaaatggatgaagggtcgcggtgtgggcggtaccgatcgtatggtggcctacaccaacgataagaagtttgttcgcttcccgatggttccactgcagagcgtcccgatccagtatcgcggcctgtatcagttggtgacctactacggcaagctgggtgcggttgagccggtttacccggaaactctgaactacatggatggcatttaa

SEQ ID NO: 186108 - DNA, 282 bp, Klebsiella oxytoca
atgaagaaaatctatgtactggccgcgttcaatttcaacgacggtgcgaaaatcacgccattcgctgcaggtttccatgatgttgatgacgcagtggcagagcactggtttgtaaaagagcattgctcaccagatggcgaagcgccggcggtggttgatgatccccgtattgccgaactggaagcgcagatcgtagagaaagatgcgcgtattgccgaactggaagcgcagttgccggagaccgcagccaatggcaagaaatcaaagtctaccgacgcctga

SEQ ID NO: 186109 - DNA, 420 bp, Klebsiella oxytoca
atggcaagaaatcaaagtctaccgacgcctgagcaattcagggccgcttttcctcagtttgctgatgagaccaaatatcccacccccatgattcagatgcgcattaatctcgctgatgtcctgctgagtgaatcgcgctttggcgtggatatctttccctacatcgtcgggctgtatgttgcgcactacatgtacctttacgccgccgatatgcgtggtgtagctgtgggtaatgctggtggcgtaaatagcggcatacagaccgcgaaatcagtggataaggtttcagccagttatgacgccagcgcgacactggaccctaacgcgggcttctggaacaactcccggtatggttctgaattctgggaatatctgatgctgtttggtgcaggagctattcagctggggactccggaatga

SEQ ID NO: 186110 - DNA, 498 bp, Klebsiella oxytoca
atgaaaagcgggctcacgatacgctcagacaattacgccgatgttctggatgcgctgaataagctttccggtactgatgtgctggtgggtattcctgcgagtccaccgcgtgaagattcgccgctgagcaacgccgaaattggctacctgcaatctactggcgcgaccgtggagatcgacggcgaaacagtgacgcttccgcccagaccctttctcgacatgggcattgaggattcacgggacaaaaccacagagcggttaaaacttgcggctcaggctgcccttgagggtaacgcagcaatggcagagcagcatcttgaagccgcaggccagattgccagtgtcgcttctcaggcggttatcggtgctggtgaccgtctggcgccattgtctgagaaaacgaaggccaaacgtcgaaagaacgggcaggacttcaagccgttgtatgacactcatagcctgatgaactcgatcacctacgtagtgaggaaaaaataa

SEQ ID NO: 186111 - DNA, 387 bp, Klebsiella oxytoca
atgccgctactcgatgtgacagaggtcctgttagacccggattttgtcgatctgacgctggtatgtcaccggcaggtgcagacggttgatgaggataacttcccggtaaacaccgcgcaggatatcccgttctctggcgtggtgactgtcgaccgttcgcttgaagcgaagcgcatggccgccggacagaatatcaacggcgccatctttattgctactcagttcaggctgacccaggggcaaccaggattagatgccgatatcgtaacctaccgcgggcgagattatcgcgtgacgtttgtcgacccttatacggcgtacggtgccgggttcgttcaggcgcattgcgagctgatggaattcgacgggggaacgccaattgagtaa

SEQ ID NO: 186112 - DNA, 543 bp, Klebsiella oxytoca
ttgagtaacgacagcactacggcggggtacctgacacccgtcggggattctccgccctacgatgaagatctggaacggctaatcagccgctggatacggggcataaccggactggatgccacgctggtttaccctcgctggaccgacccgcaaaagcagatacccaaaaacggcaccacctggtgcgcgttcggtattaccggcatccaggaggacttcaaccccgcgtacgtgcagggcgaagagaacaccgagcagtggtcgcatgaaaccatcagcttgatcctctgcttttatggcccgcagggtctggcgacggccacgcgctttcgtgatggactgctggtggctcagaacaacgacgaactgaaccacgtcgggctgacgttcctgcagcatgggcggctcctcaatctgcccgagcttatcaataaccagtgggtacgccgctacgatatcagcgttgacctgcgccgcaaaatcatccgccagtacggcattaaatcgctggtcgacacgccagtgcaattctttggagattaa

SEQ ID NO: 186113 - DNA, 1146 bp, Klebsiella oxytoca
atggcacagggcttacctgtttccaatgtcgttaacgttgacgtcatcatgtcaccggtagcggcaacggggcgtaacttcggtgcgctcctcattctgggtacctctacggttatcccggtcactgagcgtattcgccagtattcagccattgaggatatcggcgatgattttggtgtcgattctcccgagtacgaggcggcgaccatcttcttttcacagtcaccaaaacccactctggtctatatcggccgctgggcgaaaacgctggcggagggtgaaaccggcacggtagaaaccctgctgcaggcggttaatgcctcactgcaatacaccaactggtacggcctggctattgccgatagtgccgatctggttgaagcggatgtgatttcggtggccgcggcgatcgaggcttccagtctgagccgcattctggccgttaccactgatgacgcgaatgcgctggtatccggtaataccgacaatatcggctacaagttgaaggcggcgggctactcccgcacattctggcagtacagtaccagcagcaaatatgccgctatctcggcctttgggcgtgcgttcacggtcaatttcacaggcaacaacaccactatcaccctgaagttcaaaaccgagcctggtgtgtcgtacgagacgctgacgaccgcgcaggcagccgccattgatgccattaacggtaacgtctacgtctactacgccaacgacactgcgattatccagcagggtgtaatggctaacggtgacttcttcgacgagcgccacgggctggactggctgcaaaactacgttcagaccaatctctttaacctgctgtacacctcgaccactaaaattccgcagaccgatgccggcgttacccggttaatgaccaacgtcgaagcgtcgctggatcaggcggtgaataacggcctgattgctccgggcgtctggaatggtggcccgattggccagattgaatccggtgacacgctgaccaagggttactacgtccacgcagatgcggtagccaaccaggcacaatccgacagggaagcgcgtaagtcgccggtgattcaggcggccattaaactggcaggggcgattcactatgccgacgtgcagattaacgtggtgcgataa

SEQ ID NO: 186114 - DNA, 444 bp, Klebsiella oxytoca
atgagcggaacctatagttttattgacgtctctgcatccctgacgggcccgaccggcagtatcgatctgggctacggctcggcgaactccgaagaggggattaccgtagtcatggcagaggcaaaaaacaccatgaccgtcggcgctgacggggaagtgatgcacagccttcacgccggtaagagcggcacaatcacggtaacgctgcttaagacctccccggtcaacaaaaagctgtctttgatgtacaacgcacagagccagtcttcagccacttggggtaacaacgtcatcgttgtgcgaaacaaggtctccggcgacatctctacagcgcgttcctgcgccttccagaaacagccggatcacgccaacgcaaaggttggcaacacagtgtcgtgggtttttgactgcggcaagattgaccaactgctgggggagttttaa

SEQ ID NO: 186115 - DNA, 426 bp, Klebsiella oxytoca
atggaatttgaaatcaaaggcgttaattatcgcaccgccaaactcgacgtattccagcaactgaaggtcagccgtaagctgctgccggtgctagccggactcgtcagcgaattttccacgctgaaagctcaggccgctgcgggtaactctggtgctgtgctggaaagcgtactgccgaaaattgccgatacgctggccgcactgcccgacgaggacgttaacgcggtgatctacccgtgcctgggtgtcgtgtcccgccagcacgaaaagggctggacgaaggtgttcgatcagggcgtgctgatgttcgacgatacggatctgtttaccatgctacagctggtggcgcgggtggtcgccgatagtctgggaaattttttgaaagaactccccgccagcgagacgcccaccccgccagcggtctga

SEQ ID NO: 186116 - DNA, 1995 bp, Klebsiella oxytoca
atgaacgctgaaacgctcaaggactttctgatctcgctcgggtttaacgttgatgaggccggtgctaaaaagttcgatgctgtagtggcgggtacgacgctgaaagcgattgagctgggcgtcaaggtcgaagctgcagcgctttctgttgtcgcgttcaccgccaaaatcgccagcagcctcgataacctttattgggcctctcagcgcaccggagcgacggtagagggcatcaagcaaatcgggtatgcagttagccaggtaggcggcagcgccgactcagcgcgtggatcgcttgagaatctggcacggtttatccgcaataacccaggcgcggaaggtttcctgaaccgtcttggagtccagacccgtgacgccagcggcaatatgcgggatatggcgacgatctttaccggcgttggccagcgcctgagcaatatgccgtattatcgcgctaaccagtatgcgcagatgctgggactggatgaaaacaccttgatggcaatgcgtcgcggtattggccagtttagcggcgaatacaccgcgatggcgaaggcgattggctataacgccgatgtggccgccgtcagctctaataagttcatgacctcgcttcgctccttcggccttatggctggcatggcgcgggataaaatcggctctaatctggctaacgggctggcaggatctattgacaccctgcgccgtcagatcatggagaatttcccgaaaattgaaggggctatcactgctggtgtcaaaggtgtcctgtggtttggtgaaatcattggccgggtggtttatcggttgatacagctcaccggggacattatcaactggtggaaatcactcagtactgaaaccagacaggttatcgaggtgtttggggcactgatgattgcctggcgtcttctgaacagcgcctttgcgatgtcgcctattgggcgcgtcattatgctgggtgctgcgctgataggtctctacgacgattaccgtacatggaaagaaggcggccagtcgcttatagactggggaaaatgggagccgggtatcaaatatgcccaaaaggcttttgcaagcctgagtaaggactttggtggcatctatctgaaggttaaagacctcggctctgccatcgtcgatctgggtaagcgattccttgaattcattaatatcgacacgtcgaaatttaatggcaaatggctgtttgaccagattatcgaaagcgtccgcagttcaatcaaaatactcggttcgctggtggatgctctgcgcaaggttattagtggcgatttctccggtgcatgggattcgcttaaaggcgcagccgcagcgtggagtgatagtccaattattcagggtgccgcctctgtcgggcaggggttatgggataaggctgttgactggtggaatggtgatgccacgcagtacgggcaatcagttaaacgaccgtcaccttcaaaagcaggggctcagttgcttggatggatggctccgatgatgggtaaactggagtccatgtataaccttccatctggtctcctgcgaagtgtcgctatcactgaatcaggggggaatcagtttgctgtatccggtgccggcgcacagggaatgttccagtttatacctggaaccgctcgggatatggggttacgcgggaatgatgtcttcgacccaatcaagtcagcggaagcggcggcgcgatatctctcgatgctcctgcagaagaatggcggcgatctgggtaaagctctggcttcatataactgggggatcggtaacgtgcaaaagtacggcatggcactgatgccgcaggaaacccgtcaatatatcccgaaagttctaagcaatatgcctggcgctggcgctcaggttcagcaacaaaacacctacaacatttatggaggcagcgcccaggagatagggcgggaggttagccgacaggttgacgaaaaagcgttagcgttaagcagaaatcaagcggggatgggttaa

SEQ ID NO: 186117 - DNA, 564 bp, Klebsiella oxytoca
atggatattctttctacgctgtttcagcagcagacgagaaaaatcggcatgatagttcccagcgtcgttatctccgaaaagcactctgacacactggagattacggagcatccggttgaggttggcgctgcgatttcggatcacgcctatcgtcgcccctctgaagtggtgatgcaggtaggttttgctggtggtggctcgttactggacttgctggacacaacttcctttgggctaagtgccggattaagcccgagggaggtttaccagaatctgctggatctccagaacagccgggtgccgttcgatgtggtaactggtaaacggctttacagcaacatgctgatccgggcgatggaagtcacaaccgaacgctccacggaaaatgttctttcggctgtgttgacgttacgtgaagtcattattaccagcaccactacttctcaggttgcagcgaaagcggacatgaaggagggtgccaatacgtcagccgtgcagaactctggggtgaaaacgccagtgcaaaaaaaccagtcaatctttgtgaaattgacgggaggataa

SEQ ID NO: 186118 - DNA, 303 bp, Klebsiella oxytoca
atggcgataagcgaaattccactctcccctgataatcagcaattctctatatcgctggcgggacagagcttgcagatgtcggtaacgtggcgggctgtattctggtgcctggatatcatggatagcagcggcgcagatctgataaaaggcatcccattaatcactggcgctgacctgttggcgcagtatcgctatctcgagctaggattctcgctgtatgtcggttgtgataacccagccaacgaaaaccctactgaattcgaccttgggactaacagccacctttacgtagtaacggagtaa

SEQ ID NO: 186119 - DNA, 1065 bp, Klebsiella oxytoca
atgtctcagaactggatgcgccactttgagctacagcttgtcgactcaaaaggcaatgctactgattttggtagtttcaaggtcacgtttaatattgactggtttaatctgagcagcgaaacgcgtgtaggcaccttcaaaatctacaaccttgcagcggacacggtaaaccggattgtaggagaagagttttcccggatcagggttatcgctggttatgacggaatcgcagcggatgtctccgccagccaggtcggcgtagccagaacggtaaacccggatgaggtaggccagatggatggtcgaaactacggtctgcttttcgacggtgagatccgatacaccatcacaggcaaagataaccccattgacagttttgtgctgattcaggcggccgattcccatagggctttcgttaccacaatgacctcacagacgcttgctgccgggtatacggttgcagattacaatcgtgctttgatgagagacttcaacgccagcggagtcacagagggtagtacgccggcaatgccttccacggtctaccctcgaggccgggtgttgtttggcatgacccgtaacctgatggataacgtcgccgagcaatgcaaggccacctggatgtttgtcgatggtaagagggaaatggtcgcaaaggatgaggtaatgcacgacgctatcaagctgaatagcgagacagggctgattggcatgccgcagcagaccatcggtagcggtgtcaacgttcgttgcctgattaaccccaacatccgggttaatggcctgatcgagcttaaccaggcctctgtctaccgcacggttctgggtaataacgatatcgccatgactcaggggcgcattaccgaccagaacaacaacggcaacatcaccgttgaaggcaccaccgcgcagccggccagtattgcgactgatggcgtttatattgtgcgcggcattatgtacactggtgatacaaggggccaggcgtggtacatggatatgatgtgtgaagcgcgtggcgcgatggatcttgtttcctcatcggcgagggaaagagggctttaa

SEQ ID NO: 186120 - DNA, 333 bp, Klebsiella oxytoca
atgaaaattttctgtttggcgttgttctcggtgatttcaaccccagtaatggctgcaattcagtgtggaaattatgtgatgacaggtgatggaatgaccgttatcaacggagaaacagtcacatctcagaaaataaaatttttgggtaagagtggcgactacgcgaacatgaaaatggacatgggccttatgcctgcgcgtgatggtaacaactatggctttgagtttgtaaagcgcgacggaaaggcattcctcaacgtccagctactgcaaaacagcatggatgcgccgaagatcataggttccttcccctgcaaaaaggtctctggctaa

SEQ ID NO: 186121 - DNA, 1062 bp, Klebsiella oxytoca
atgtcacagaactggatgcgccattttgagctgcagctggtcgattcgaaaggcaacactaccgattttgggggcttcaaagtcacccttacgcttgactggtttaatctcagcagcgagacgagggtgggggccttcaagatttataacctcgccgcggataccgtaaaccgtattgtcggtgaggagtttacccggatcagggttatcgctggttatgacggaatagcaccggatgtttccgccagtcaggtcggcgtagccagaacggtaaaccccgatgaagtaggccagatggacggtcgaaactatgggctgctttttgatggtgagatccgatacaccataaccggcaaagataaccccatcgacagctttgtgctgattcaggcggccgactccgaccgggcgtttgccacctccatcacgacccagactctggcggcgggatataccgttgctgacgtcaattcagcgctgatgaaggacttcaacgcaaaaggggcgactgaggggaacactccggccatgccggctacggtcttcccccgtggacgtgtgctgtttggcatgacccgacacctgatggataacgttgccgaccaatgccaggctgactggatgtttgtggatggcaagcgggagatggtggcgaaaaacgaagtggttcacgacgctatcaagctgaacattgccaccgggctgatcggtatgccccagcagactatcggcagtggagtgaacgtgcgctgcctgattaaccccaacatccgggttaatggtctgattgagcttaaccaggcttccgtgtaccgcactacgctgggcaataatgatatcgccatgacgcaggggcgcatcacagaccagaacaacaacggcaatatcaccgtcgaaggcaccaccgcacaaccggccagtattgctactgacggcgtttatattgtgcgcggcattatgtacactggcgatactaggggtcaggcatggtacatggatatgatgtgtgaagcgcgtggctcatccgatctttactcccaaggcgcaattaatcggggataa

SEQ ID NO: 186122 - DNA, 303 bp, Klebsiella oxytoca
atggccgtttcagaaatcccgctgtcaccagacaatcaacagttcgctattgcgctggctggccagagctttcaaatggccgttacctggcgttccgcgttctggtgcctcgatatcatggacagcagcggcgccgacctgattaagggcatgcccctaatcaccggcgctgacctgctggcgcaatacagctatctcgggctgggcttttcgctttatgtcggctgcgataacgcggataatgacaaccccaccgaaagcgatctaggaataaatagtcacctctacgtggtaacggagtaa

SEQ ID NO: 186123 - DNA, 576 bp, Klebsiella oxytoca
atggatattctctctacgctgttccagcaacagaccaggcggatcgggctaatagttcccagcgtcgtcatttctgaaaagcacaatgacacgctggagattaccgaacacccggtagaggtcggtgctgcaatttctgaccatgcctaccggcgcccgtctgaagtggttatgcaggtcggtttcgccggcggtgggtcgctgctcgactttcttgatacaacctctattgggttgagcgcagggctgagcccgaaagaaacgtatcaggaactgctggacctgcaaaacagcagggtgccttttgatgtggtgaccggtaagcggatttacaccaacatgctgatccgcgctctggaggttaccaccgacaggacgtcagaaaatgtgttgtctgcggtgcttacgttgcgcgaggtaattatcaccagcacgaccacgactcaggtagcagcaaaggccgacatgaaactgggggctaatacctcagcggtccaaaactcaggtgtgaaaacgccaacgcctaaaaatgagtcattgctaagccgcggtgtaagtttcttcacaggagggtaa

SEQ ID NO: 186124 - DNA, 1923 bp, Klebsiella oxytoca
atgaacgctgaaacgctcaaggactttctgatctcgcttgggttcaaagttgatgaggcaggcgccagaaaattcgatgccgtcgttgccgggacaacgcttaaagcgattgaactgggcgtcaaagttgaggcggcggcgctttccgtcgtggcgtttaccgcaaaaattgccagcggtctcgacgacctgtactgggcctcccagcgcactggcgcgacggtggagggcattaagcagattgggtatgcggtaagccaggttggcggcagtgtcgacggagcccgcggctctctcgaaaatcttgccaggttcatgcgtaacaatcccggcgccgagggtttcctgaaccggctgggggttcaaacgcgtgatgccagcggcaacatgcgggatatggcgacgatctttaccggcgtcggccagcgtcttagcagcatgccttattaccgcgctaaccagtacgctcaaatgctgggtctggatgaaaataccctgatggcaatgcgtcgcggtatcggccagtttagtggcgaatataccgcgatggcgaaggcgatcggctataatgccgatgcggccgccgtcagctctaataaattcatcacctcgctgcgctcctttgggctgatggcaggcatggcgcgggataaaatcggctccagcctcgctgatggccttgctggttctctcgacaggctgcgtcgccagatcctggataacttcccgaaaattgaaggcgcaataaccggtacagtgaaaggaattctctgggctggcgagatggtgggcagggtaatttaccgcctcatccaattgggtcagagtatcagcgactggtgggactctcttgataagcagtcgcagcaactgatcgaactaattggagcgctaaccgcagcatggtggatgctcaaccgcgctatgctcgcatcgccgattacgtgggttctcggtcttgccgctgccatcgctttgctttgggaggattaccagacctggaaggagggcggtaagagcctcattgactgggggaaatggaagcctgaagtagacgcagcactgaagatggtcggtgacctgaaacaaacggtttttgacctcgggaaagcgctggcgaaactgctaaacatcgaccccaaatcctggtctttgaagtgggatttcagcaacttcattacccagatgggcgagttcagcaaaatgctgagcatgattggtgacctgcttaacgccatcaaagatggtcgctggtctgatgccgcaagcatcggcaaggctctgctcaagcaagggagcgatcagcctgatgtgttgccaggagtaaccagtagtgccgtcaacgcgcgaggtaaggtgttgggcttctgggaagaggttaaaacccgcttcagtgatggcggctggtatcagcatgagcagaaaacgcttgctgatcgcaacaacaaccctggaaacattcgtcctgtcggcggtggcggcttccgtgcgttcggatcagcgctggaaggctgggcggcgatgaaaaaccaactgatgcgctacttcacagggaaaacgactggccgccgcctacagaccatcatggatatcgtcagcacttgggcgcccgcgggcgacaataacgacccgcagcagtatgccagacaggtcgccgggtggatgggcgtatctcctacggcagcgttgaacctgtccgacccgaacacgatgggtgcactgatgcagtctatggcccgcaaggagggttattctaactggaacagcccgctagctcatcaggcagcaggtgcgcaaatccagcagcataatacctaccatattcagggaacgaacgcccaggagatcggacaggaagtcggccagcgccagcttgatgctaatgcaagggtgttacgtactaaccagagcggggcgggctga

SEQ ID NO: 186125 - DNA, 153 bp, Klebsiella oxytoca
atgcgcccggtggatgccgggtacatcccttacaccgcacttaaagacgggtcggtagacctggccgatgttgcccgcatgaatgactggcttgacctgaaagccgataacgaaaaccgtatagcgaaatggagagaggataatgaacgctga

SEQ ID NO: 186126 - DNA, 450 bp, Klebsiella oxytoca
atggaatttgaaatcaaaggcgttaattaccgcaccgctaagctcgatgttttccagcagttgaaggtaagccgcaagctgcttccggtgctggctggtctggtttcagactttggcacgctgaaatccatgatggtcagagacggcgagggcaaactggttttcggtgagaaaagggcgttcgacgctctggatatcgttttgccgaagattgccgatacgctggcggccctgccggaagaggacgttaacgcggtgattcatccgtgccttggtgttgttatgcgccagcatgaaaaagggtgggtgaagattttcgatcagggcgcgctgatgttcgacgatatcgacctgttcacgatgctgcagctggtggcgcgggtggtcgccgacagcctgggaaattttttgaaagaactccccggcagcgggacgcctacccagccatag

SEQ ID NO: 186127 - DNA, 441 bp, Klebsiella oxytoca
atgtctacgtattcgtttcttgatgtttcggcctctctcgcggggcctaccgggttggttgaacttggctacggctcagcgaacgccgaagagggtattactgtcacaatgacagaggccaaaaacacaatgaccatcggcgccgatggtgaggtgatgcacagcctgcatgccggtaagagcggcactatcacggtaaccttgctgaaaacctccccggtcaacaaaaagctctcgctgatgtacaacgcacaaagtctgtcttcggcaacgtggggcaataacgtcattgtcattcgcaacaaagtatcaggtgataccactacagcgcgttcttgtgctttccagaagcaacccgatcacgctaacgccaaagtcggcaatacggtctcctgggtctttgactgcggcaagattgatcagctgcttggggagttttaa

SEQ ID NO: 186128 - DNA, 1152 bp, Klebsiella oxytoca
atggaaaaagggcttccccttaaccgtatcgctaacgtgacggtgacgctttctgctcgggccgcgcaggggcgcaattttggctcaatgctcatcctgggtgactcaactgttattccgatttctgagcgtctgcgcctttactccagcgctgatgatatcggcgatgactttggtgtagacagccaggaatatgcagcggctgttatctggttctcccagcaaccgcaaccgagtctggtatatgtcggtcgctgggcgaaaacgctggctactggcgaaacaggcagcgcagaaagcctcctgcaggctgttaacgccttgctggactggaattcatggtacggtcttcaccttgctgtgccggttgctgattatccttccgataccgacattatcagtgtggctgctgctatcgaagccgcgagcgtatcgcgcatctttggcgttacctcggctgattcaacgattcttgaatcggccactacgacggatctggcttccaagctgaaagcagcgaaatacagccgtacctttatccagtactcgaccagcagccgctatgctgcgctgtcctcgtttgcgcgtgcgttcactgttgacttcactggaagcaacacgacgatcaccctcaagtttaaacaactgccgggcgtcacctacgaaaccctgggcacctcgcaggctaacaacctggaagcgaagaactgcaacgtttacgtgtactacgaaaacgatacagcgattcttgaacaaggcgttatggcaaacggcgatttcttcgacgagcgccatggcctcgactggttgcagaacgccgtgcagacggctgactacaacacgctctataccagcacaaccaaaattccccagaccgacgccggcaccacgacccgaatcgccaacatcgaattggttctcgataaggcagttactaacgggctgtttgctccggggaaatggactggcggcccgatgggacaactcaataccggcgacatgctgacaaagggctattacacctgggcagaaaacgttgatgaccagcttcaggtcgatcgcgaagcgcggaaaggtgttccaattcaggttgccgggaaactggccggagccgttcattacggcaccgtcgcaatcacggtcgtgcgctaa

SEQ ID NO: 186129 - DNA, 552 bp, Klebsiella oxytoca
ttgagtaacgacagcacagagcctgggtatctaaccccggtcggggatgctcctgattacgataaggagctggaaaagcaactgagtcgctgggtaagaggcgtgacagggattgcggttaacctggtattgccacggtttaccgatcctcagtccaaaataccgccgaacggtgagacgtggtgcgggtttaacttttccacgctcttacgtcccggcactcctgcaaatgtccaggtaagcgaagagcagagcgagcaatggtcatgggaaagcattcaggtgcttttctgtttctatggccccggcggttccgggatggccacgcggtttcgcgacggaatgtttgtagatcaaaacgcagatacgttgcgacgaatctcaggtttgtcgctggtgagcgctgatgatatacgaaacctccccgaattgatcaacaaccagtgggtacgccggtatgaccttgccgtaaccctttcccgcaaaaacacccgtacctacaacgttaaatctgtcgttgaccctaacgtcacgatagttaccggagactaa

SEQ ID NO: 186130 - DNA, 405 bp, Klebsiella oxytoca
atgccgtttctcgatgtgactgatgttctgcttgatccggactttgtcgacctttcgctggtgtgctatcgacaggtgcagacagtggatgaagataatttcccgaccaataccgcgcaggctattccgttctctggtgtcgtaaccgtcgaccgctcgcttgaggctaagcgaatggccgccggacaaagcatcaatggcgccatcctcattgttacccagttcaggctaactcaggggatgcctgccagtgactcaacgccagaactcgacgctgatatcgttttatacagcggcagacggtaccgcgtgacctttgtcgatccgtacacccgatacggtgccgggttcgtgcaggcacattgcgagctgctggagtttaacggaggaattcccgttgagtaa

SEQ ID NO: 186131 - DNA, 507 bp, Klebsiella oxytoca
atgaaaagcgggctcacaattcgggaagacaattacagcagcgttctggatgcgctgaagcagttgtcaggcactgatgtgctggttggtatccctgctggccctccgcgcgacgatgcgccgctgagcaacgctgagctggggtatctccagtccaccggggcaaccgtagagatagacggcgagaccgtcactctgccgccaaggccatttctggacatgggtattgaggattcgcgggataaaacgaccgagcgtttaaagctagccgctcagtctgcgcttgaaggtaaagcagatgtggcggcgatgcatcttgaagccgcaggccagattgcgcgtgatgcctcaaaggctgtcattgaggcaggcgatcgtctgaccccgctatctgaaaagaccatcaagaagcgcagagcaatgaaaccgcccatccctggcgataagccgttgcgtgcccgcggattccttttcagagcgattcagtatgtcgtgaggaaaaaataa

SEQ ID NO: 186132 - DNA, 420 bp, Klebsiella oxytoca
atggcaagaaatcaaagtctgccgacgcctgagcagttcagggcaacctttcagcagttcgctgacgaaacaaagtaccccacgccaatgatccaggctcgactgaatcttgctgatgccctgctgagtgaatcgcgctttggcgtggatatctttccctacatcgtcgggctgtatgttgcgcactacatgtacctttacgccgctgatatgcgtggtgtggcagtgggcactgctggtggtgtcaatagcggcatacagacggcgaaatcagtggataaggtttcagccagctatgacgccagcgcaacactggaccctaacgccggtttctggaacaactcccgttacggatcagagttctgggaatacctgatgctgttcggtgccggagcggttcaactggggatgccggaatga

SEQ ID NO: 186133 - DNA, 282 bp, Klebsiella oxytoca
atgaaaaagatttatgtactctccccgtttaatttcaacgacggcaaagagcaaaagcatttccaggtaggtttccataacgtcgatgattcggttgccgatcactggttcgtgaaagcgcactgctcaccggatggtgaagcgccagcggtagcagaagacccgcgcattgctgaactcgaagcgaaactcgccgagaaagacgcgcgcattgctgaactcgaagcgaaattgccggagactaccgataatggcaagaaatcaaagtctgccgacgcctga

SEQ ID NO: 186134 - DNA, 942 bp, Klebsiella oxytoca
atgccaatgacatttgaccaggcgacagtcgacggcactggtgcctttcttatccatgagctggagcgtctcgatcagacactgaatctgccgctggtgaattacacctggtcgcgcgatatccagttgcgtgaagacgtgtctattgctgatgagatcagctcgttcactaacaccacttttgctgctgccggtacgccgaatgccaacggcaaaaactggcttagcaaagccgcgaccgcgatggctggccttaacgtcgacatcgcaaaaactggcttcccgcttactctgtggggtatggagcttggctggactgttcctgaattgcaggccgctgcacaggtcggtcgtccgatcgacacgcagaagtacgacggcatgcagctgaagtggaacatggacacggacgagcaggtttacatcggtgattccggtctggcggtaaaaggcctgatgaacctgacgcaggtaacgccgaccaacgccgcgaaaacctgggcgacctccaccgctgacgaaatccgggcgagcattaatgccgggctaagcgcagcgtgggccaactcggcttactccatggtgccgacggacctgctgatcccgccggagcagttctctctgctggcgagcaccatcgtatccagcgctggtaaccagtccctgttgacctatctggaaaccaacaccatcgcctaccaccagaacggacgtcctctgaacatccgtccggtgaaatgggcgaaaggtcgtggcgtgtcgaactccgatcgcatgatgttctacaccaacgacaaaaaatacgttcgcttcccgatggttccgctgatgagcgtgccgattcagtatcgcggcctgtatcagctcgtaacctattacggcaagctgggtgcagtagagccggtttatccggaaactctggcctacgtcgacggcatctaa

SEQ ID NO: 186135 - DNA, 495 bp, Klebsiella oxytoca
atgggtaatacatttctttaccggatgcctgcgggcatcgccggggcaatttctcgtccgcaggatctgacggttgaacctcaactgctggactcctccaaccttttccccgcttacggccttggcggcaagatttcctccgggaaatttgtgccaatcgctgcgagcgacgcagcgtcggtgctggtgggcatttacgttcgtccgtatccgaccgccagccagccggataaggtccagcaggtaggcagcggtaaaaacttcaccggcgattgcctggtacgtggttacgtcacggtaaacatcggcgcggatgcatccagcgtcgcgctgcatggcccggtatatatgcgagtggccacaccatctgcctcaagccctctcggcgcgttccttgccgccgctgatggctcgaataccgtccagatcactaatgcttacttcaatggccctggcgacaccagcggcaacattgagctggccttcaatatttaa

SEQ ID NO: 186136 - DNA, 1200 bp, Klebsiella oxytoca
atgaaatatttctttaaaacccgcctgggtaatacccgctttcaacttgctgatgggtcagtcctgtttaaggacgtcccgatcgcaaggactggtgagcaggagtacgacgccacagagcggcctgagcttgtcccgaacgacagagggaaggtcatcgtacgccggacgccagaagaggtatttagcgagcgagccatggcgtcattcgaaggcatggcagtcactatcggccatccgcgagattttgacgggcagatcatctttgttaccccagataactggcgccagctggctcacggccacatccagaacgtacggcgaggcacggacgataaaaccgatctgctgctggctgatgtcatcgtcaaaaccccggaagccctgcaggccattgatgatggtgatgacgaggtcagctgcgggtacgacgccgattacgaacagatttcacctggtctcgcaaagcaatctgcgattaccgctaaccatctggcccttgtccctaacgggcgggccggtttccgttgtgcaataggggattctatgccaagcactactaaaaactggtttacccggctcctgaaggcccgtaaaaccggggacgctgccgaaatggcaagtctcattgataacccgcctgatgatgtcactggcgataacgaggtatcgaccgctatgacacccggcggagtggtcattaaccttgcgccgcaaaatccacttcccggcccggcattgcctggtaccggcgatgccgaagatatcccggaatgggggaaggcactgattgaggcggtagccaaactcacgcctgcggcaactgctcctggtaccggcgatgccgaagacgaagaggagaaaaaggaagaagagggcaaagtaaccggtgatgccgcttatcgcgccgatctgattcagcccggcatccagttgccagaaaaggtgaagccgacagcgttcaaacgccaggtgctcgcctctgcagatcaatctctggtgcgctccattgtcggtgatgccgatatcagcaagctgaaaaaagccacggtagatatggctttcacggctgtttctgagctggcgaaaaaccgcaacaccaaaaccgtcgacagcctgcaaacgcagactgccactactgttaaaaccattgccggtatgaatcaggccgcgcaggaattctggtctaaacgaggctaa

SEQ ID NO: 186137 - DNA, 1452 bp, Klebsiella oxytoca
atggcgaagaaaacaggacgagtcgccacggcggattcgtacgataactttgttgcccgtgtcggtatgcagcagcctaaccagcatgccgcatcgacctacagggcgaactacaccagccgcaaccgcctgctcatcgagtgggcttatcggtcctcctggattattggcgccgcagtcgattcgaaagcggacgatatgaccaaaaagggcgtgcggatcaccagtgagatagacccgaaacgccgtggcattctcgaatcacggttcgatgagcttcagctttgggattgtatcaacgagacactgaaatggtcccggctgtatggcggggcggtggcgctgattctgattgaaggtcaggcgccactaacgccgctggtgctggataaagtaggcaagggcagttttaaaggtctggctgtacttgaccgctggatgattaacccgcaactcaccaggcgaattaaggcgcttggccctaacctaggcaagcctgagttctacgacatcgtgacgacggcgcaggggcttcctgcatggatggttcaccatagccgcctgattcgtatggatggtgtgaaactgccttaccagcagaaaatcaccgaaaacgagtggggcatgtccattgtcgagcgaatcttcgatcgcctgacttcctacgatagcaccagcgtcggcgccgcccagcttgcctacaaggctcatctgcgtacggtaaagattaaaaagctgcgtgaaatcatcgccgtgggcggtaagccatttgaagcgcttatcaagaatatggagatggtccgccagttccagacgaacgaaggcatgtctctgtttgactcggaggacgaatttgaaactcactcatattctttcgcgggtctgtctgacctgcttagcgagtttaaagaggatatcgcgggtgctgttggcattcctcttgtccgcctgttccgccagtcaccgaagggtttttcaaccggtgacgctgacctcgcgaactactatgacgacgtgggaacgcttcaggagcgagatttacggcctcacatccgcttgctattcgatgtactgcatcgctcggagtttggcgaaccgctgccggaggatttcacctttgagtttaatcccctgtggcagatgagcgacaccgaccgctccacggtagcgaccaatacgactactgcgctggctactgctgtgcgtgagttgggtatgtctccggctgctgcgctgacagaccttagagagatgtctgacgtcactggcgtaggcgcatcaatttctgatgaggatatagcaaatgcggcgaaagagtgggaggaggctgaatctgaaaccgaacctccgccgacgatcggagcgtcagtatcacaaaagcctgttggcgatagtcgaccagataaaccaaatcgtcacgggctcctacgatggttcacaggcaagcgctga

SEQ ID NO: 186138 - DNA, 273 bp, Klebsiella oxytoca
atgccagtaacaaaaaccatttcagcaaaaacacgctcgttttatccagaagtaggaatagctgttgattctgacgaacagaatattgaggtgacctacaccgtaatttcagtgacgattaacgcggacctctctgcctctgccagagtgagaacgcagattacaggctatgacgataccagtgagatttcggtacagtttacctactctggaagtggcaacccgattggagaagtggacgcagtattaaaaagtcactcccttgacggttga

SEQ ID NO: 186139 - DNA, 1935 bp, Klebsiella oxytoca
ttgctcggctaccatgatggttgggccgcgtccagcagcgagctttcaggcggcggtgagttccattacgtcagttctctggcggacgtaaacaacggcgtaactgtttttaacggatggtgccgtaaatttacggataccgttatcactacctacgatgccgggctgggcgacaatgacggtgtggatgcgcgggaacgtctgacgacgctgtttaaagtggtgcctgatgggtttacggttaaaattcgtggctatcacctgacatcaggcccggtgaagtgtgaaggcaagactggactaaccattgatggcatgggcggcgtaatttcagcaaaagagcttcgcgacgtttacactgtttatgacgttgctgaaacagaccccagagtggcaatgaccggagttctgtcgtgccttgattgtcctggtattaaaatattcggccttgagattcagggggcgatgaagctctccactactaatgatgatggtactcataaaggtgaggaatacgctctccttatccgcgcatgtgatggtggtgagatttatggcacgcaacttcataacgtattcgggtatgggtgtcgggggctatatcagagcaacgttaagttccatcacaactacgttcatcactgtttgcgtgagtccggtgttaacctggtgacgggcgggagtaacggttacatttattgcaaccggtttgaatatatcgggctatatggcgtcgaggtggaagggcagccgtactattccggcatgacgaaagtaaaagtatggggtaatttcattagttacactttccgtggaatttgtgttgtagaccagtgccttgagtctgagattaacgacaatacggtttcattttcccacacagccttatcagcatatcggacgtcagattacgccgtaagaagcacggcgtttaaagcaaacactgtactcagttgtgcgaggggtatgtttgcgaatggtgcccgtaatgcgacattctctgataacgatatcgacctgattgatgtgccggaatatttatacacgtcaccctacaataatatttttgaaatagaccagaccaaaagagctgtattttggtctccctaccttgctgagtttcagcatcttattggcgataacatcaagtttgatgatgtcgtatattcagttagcgcagttgaatgggacagcacaaaaacgggatacccgaaggataatgcatcgcatcctgatggaatgtggaaagtcacgctgaccagcgcattaccagaagagcttgacgacacagtatctcttgccatgacacagaatttcggcaacacgattggttatcagtctgctggaaatattcatggagtaacggttagcaataataagataaaaaatggttattatgccctgtattgtgcgtccaaccttatagcaggagagtccggcctccaggagacagtgacagataacacaataaatggttcaacgatttggctaacagtgagtggctcaggattcagactcatcgaccgcaatgaaccaaatgccaacgcgactgttaccgccagtctctggacgactgcaggttttaaagacgtaagaatgcgcaacactatggggatcagcctaccagcccggacggtaaatacctcgctactgaaaccacgcctgtattcgcagatatcgcgtcgtgcggttggggtaaggatcacgctgcttaatacaagccccactaatcagtggacgggcacaggtactcttcaggttacgttgaatgaccaggttgttgtcggttcgggtaacttcacgcggggcagtgaggaccctatccagttgttcacacagatggaggttaaggagggcagcaacacgattcaggtgaataccagcaacaacgatttgctgtatgcggcctgccagattgaattactgataccgtaa

SEQ ID NO: 186140 - DNA, 507 bp, Klebsiella oxytoca
atgaaaactaaaactgggaagagtatgaagcgccaagatatccttaaatggattcattctgagtcacctaacgttgaatcacagattaaacgttggcttgcagaaattttacagaaaggagataagtctgatgaattcatgcggggtttagaggttatagataatgaaatagttgttctactcaggccatacactaatagatatcctggaaattgcttatccatttgcacagtaacccttccttcagaactccaaaggaaaggatggtttaaaagctttctaaatctctgttgtagcgttaacccatggaaagatgttgtaattgaagacgttggcaatgcgcatctttttgatttttgtgtacgtaataacttttcaatcctacaccctttttataaaacaacatttattgttaatcaggttgctgttagggaaatgaatattctgcctttggaagattcttcttactatctgaccttaagtaaatcagaaaaccgcgtcgtatag

SEQ ID NO: 186141 - DNA, 681 bp, Klebsiella oxytoca
ttgtgcttcgcagttgcatttgcagcacttataatgagctatattgtttctcttatcactgaaaaagcaaagatttcagctactaatgctaactatgaaatacttcgagagcagctatcattaaatactaaaaccatcaaagatatagaaagtaaaatcacctctgaattgtggatttctcaacaagtctggcaaaaaaaatacgaaatgtatgaatatatttacgctcaactacttagtataaaaaaatgggctgataatgaatttgaaataatagagattcacatgctacctacatatatggcgagtaactatcatgggtatttcacaaaagaacaagaagatcagttttggagtgaagttcagcaggcccatgatgaccgtgaaaaagcactaaatgatgaagaatttaaattaaaaaacaaagagctacaacaaaaacttggagtcgcattcacagcgttaactgaaatgatgataaccaaagcaattcttcttaataaaaacgtaactgttattcttaatgaattgattgagaatataggcattgacccgtcaccactggattatgaagaaccggatgattatgggtatagagtgaaaggtgcgattgatacagccttaaaaaaaattagggacagtgcattatctgatttagaaataaaacaccaagagaagtaa

SEQ ID NO: 186142 - DNA, 564 bp, Klebsiella oxytoca
atgtttagcgaagaaaaagtagctcagatggctgcttacctactgtcgaaagacggtgggcgcatggcatacctaaaacttatcaaacttctttatctttctgatcggcagtctcttggcgtttatggagaatctataagcggggatagatttgtcgctatgaagcatggtcccgttctctcacaaacctatgaccttgtcaaaaatggcggggaagaagaaagtggttggaatcactggatacgcggcgcagagaattatgaggttgcgcttaagccaatggccgtttctgttgaagatttagatgaacttagcgaagctgatatcgaaattctcgatagcatcatggctgagtttggtcatatgtccaaataccagattcgtgattttacgcatgatcattgtgcggagtggcaagacccaggctgtacatctgtggccatacctccttcagccactttttccgcgttaggtaagccccatctaactgcatcagcgcttcaggatcgccttttcgaacgcgagcaactagaccgggcattgtctgtatacaaatttaggtag

SEQ ID NO: 186143 - DNA, 306 bp, Klebsiella oxytoca
atggctgagttacgcgcaggtgggttggcaatattcattgcaggcccagcagaattaataggcatggtggttatcactgaacggcttgtagggccaaatgaggttattaaattacctggtgtccaacgggttagaaattctggctcttcgaggtggctggtccataacgaaagacttgtagtaaccctatctaacggctcaaagctgaatgattacgccttggtgtttcagcactggctaatgccaatcgacggcgacgacttcagcaatgaataccagcaccagaaggagcgggagcatgcctaa

SEQ ID NO: 186144 - DNA, 189 bp, Klebsiella oxytoca
atggcgtacatcttcctgattttcgtcatcagcagcaatgcatcgaatatgcaggtggttcctatgcagagtatggagcagtgcaaagcagccattaaggcgatgaaaatagccgaagacaagcgcacctggaatgatgtttcgccgtatgtggatagcgtgcagtgcgtggaggtaaatcatggctga

SEQ ID NO: 186145 - DNA, 195 bp, Klebsiella oxytoca
atggctgaaaaatcatctttggaacgcctgcaggaaattaatgcagacaatcaacgcagagtgacagtcagcgtcggcgttctcaaggcggcgcgtagagaaatacaggctcacgtcaagctaaacggcaagggaatcatgacggatatggttctcaactccctgaatgcgattatcgaaggagccaaccaatga

SEQ ID NO: 186146 - DNA, 555 bp, Klebsiella oxytoca
atgactgatatcaccgaactggcgccagctatgaaagcggcagcagagaaagcaagttccggcgactgggtaaaagagtctggcgatggctgggatgccacttgcagcaacgatgaccaggccaacagcggatttattatcgcgaattttatagggccggattcagcggccaatcgtgaatttgttcagttggctaatcctgccaacgttaagcggctggtagaggcgctggagaaggctcaacaggtagacgaagaactttgcaaactcctgcctcccggcgctgagtatatggacccgccagacggcggcgatgttgagccgattgagcaagtacgtcgaatggtggctgattaccgccagcgcatcgccgagctggagtccagcaccgtcaccgtgaagctgccgccaaaaattgagcgcgactatgttgatggctggttttcgtacaagggtggtctcgtcggtggcggcgcggctgagtggtacaacaaggcactggatgatgtcggttcagaactaaccgccgctggcatcaagtgggaggctgagtga

SEQ ID NO: 186147 - DNA, 420 bp, Klebsiella oxytoca
atgaaagttaaaacatattccgttaacaccttcgatgcgtggctccagactgagggtgatgataccactggctcatatgtcaaatatgaagactacgccgccctggctgctgaatgcgcagcgttaaagtctgccattgaattcgccgatccatggcttccaacgtgcgatgaagagttgctgcatcgaattgagattgcaaaacagacccccgccaccgacgcctacctggccgggattaaggctgatgcgattaccgcttctttggatgcctgctctgactatcttgaaactgactgtgttatggacaggcttgatatcagctacgaagaagctgaaaaacgtacgtcaggagcgatggagtttcatgattcgatcgtcgcttttgcccagcagctgcgcgagggggccgacaaatga

SEQ ID NO: 186148 - DNA, 324 bp, Klebsiella oxytoca
atgaaaatgccctataaacaagatttcatcgccgctctgctggcagctaaggagcagggcattggcgcaatgctggcgttcatcatggcgtaccttcgtggccgctataacggtggcgctatggcaaagacccttattgacgcgctgatgtgcgcaatgattgcctggtttgttcgtgaccttctcgactttacggggctgagcagcaatctcgcttacatcgccagcgtgtttatcggctacatcggtaccgactcgatcgggagcctgattaaaaaaatcgcagccagaaaggcaggagttgatgatgctggagctcaataa

SEQ ID NO: 186149 - DNA, 480 bp, Klebsiella oxytoca
atgctggagctcaataaacaacgtaaagcgtttctggatatgctcgcctggtctgaaggtacagacaaagcggggcagccgacaaagaaccgaggctatgacgtcattgttggtggctcactctttactgactacagtgatcatcctcgcaagctggttaacctgccaaagctgggtatcaaatccaccgcagcggggcgctaccagctcctgtcgaagtggtgggatgcttaccgcaagcagcttggccttaaggacttctccccggcatcacaggaccaggtcgcgctacagcagattaaagagcgtggcgctctcccgcttattgacaacgggcagattcgtcaggctatcgaccgttgcagcaatatctgggcttctctccctggtgctggttacggtcagtttgagcacaaagccgacaacctcatcgcaaaattcaaagccgctggcggcttcgtcgctgaagttaaatcatga

SEQ ID NO: 186150 - DNA, 177 bp, Klebsiella oxytoca
atgaactatctcattaatcgactgaaagagccgtcaacctggcgcggcatcattcttgttgttgcgggcgtatttggttatcagatgcctccgggcattcaggaaaccgtcatcgctggcggcgtagcgctggctggcgttgttggtgcagtaatgccggacagcgttaagaagtaa

SEQ ID NO: 186151 - DNA, 486 bp, Klebsiella oxytoca
atgagggattgggctgccagccgggcagcgaattcagggcggtatgttgagacaaccagcgctgccacaggctatcagccagaaccggcgcccccgaaggcgtcatgtgatataccaccatcgccgggtccgccggaggcatatcgtccgacgccgccgtcagcgcggccatcattgtttgttcagtcaggcgaaccagcgtattcatcctcacctgcgcagccaggcggtccgtcccgtccttttgcgccagccatgtcccggtgctgcacggcacatcgtccgccagccatacctgcatggcctccccggcctgcgctgtctgccacagcggttgtggaacagacgcccccgccaccttactgttcaacagtaaaggcaccgcccggcggcaatcgctccgcacctggctcagctgccagcgcagctcataaagcccggccgccagcgccgcctcatcacgatgcagctgcggacagacgctga

SEQ ID NO: 186152 - DNA, 249 bp, Klebsiella oxytoca
atgctccccgtgatacaggccgagccccatttccagcggttcaccgtggcgcgcccaccgatccagctgcagcgcatccccgcgcaggatctgcacggcgcgggctttcggggcgtagtcatccatcgcaatctgcgcgtaatgctgaatatcgaaccccacccgctgcagcagctggcggttgttccacgcgctggcgcacagtgcgatgatggcggcaagggtgaacaggcagaatgcccgccgtaa

SEQ ID NO: 186153 - DNA, 1341 bp, Klebsiella oxytoca
atgaaaatttatcgtccgctgtggagtgagggggcgctgctgtcccctcagcaattccagcagcagtcagcgtgggaatcttttcgcagcacaggcgttgcggctctctcttcgccgttttcatggggggttgagcgggttgaattcgatgagaggctgctgggctcgggccttattcagatctctcaactgcggctctggctgcctgatggcacgctggtggatacggccgtcagcgatctgccgcctgaacctcgggaactggagttagcgcagcattcagacgcggtcacggtgatgattgcgctgccgctcatgcagcctgggctgaataatgtgcagcgggaatcggctatgaccgagcggccgctccgctaccgtgaggagtgggtgaatgttcaggatgcgtttggcagcgaggaggagtccgttgccgttgcccgctttaacctggcgatccgttttgaccatgaagataacgcgtcatggcagtgctgcgcgatcgcgcggttgatccgcgatcgacagggatggtgccaggatccgacatttattccacccctggcattgttctctgccagtccggcgatgcgtgaaagactggcgctactgaatcgtcagcttcgttcccgccgtcagcgtttgatgtccatgcgccgcgagagcaacgaacgcctggccgatttcgctgtggcggacgtctctcttttctggttgctcaatgcgcttaactcccatgcgcgcgtgctggtggagtttgaacgttctcctgcccgtcatccggagcaggtgtgggcagagctcgtccgtctggcgggcagcatgctgacgttctctctcgacagcgatctggatgccattcccgcctatgaccatgcagaacctgaaaaaacgtttcctccactgtttgaactcatcactgctttgctggaggccagtttgccgtcccgagtggtcgcactggagatgtcccgaccggacgagcagacgtggaaagccgcgctgcacgacgctcgcctgcgcgaagacgccgatctctatctttctgtccggtctgatgttccggcctggcaggtagctgagaaattccctgcgttatgcaaggcgggttcaccggatgaggtgaatgcgatttccgccgtcgcgctgcaggggatcccgctcattgccgttagccgcgttccggcagcgttacctgtgcggatggaaaaccagtacttcgcgctggatatggagagctctgcggcccgggacatgctggagcagggggtatgcatgttttacgtgccggccctcctgggacggctggaacttgaactgtttgcggtactgcgatcatga

SEQ ID NO: 186154 - DNA, 675 bp, Klebsiella oxytoca
atgagaaaagacattgatattgatgaactcatggcggaaacctggcttaccgtcaccatgcttaagaaaggggcaacaacgcccgacggcagcgcgttatatgacacctgctgtaaacacgtggaaggcgtgcgcgaggcgctggagcgcgccgggtacgatgaggcaagcatcgggcatatctcttatgcgcaatgtgcgctgcttgacgaagtggtaatgagcagaacgctgagtgcaggtgccgaagctgatgcgggtcaggcggcatggcgaaaagcgccgctacaggcgcgctatttcgggtcattacacgcaggcgaagccctctgggatcgtatcactgaggtcttacggcagcctgcgccgaatatagccgttctgacctgttatcaccgggtgatcgcgctggggtttcgcggattatacagcatcagttcagttagccagtcacagcgggaagaggtgattaaagcgctttctgagcaggtgccgcctctgaatgcggatatctctctggtggttcgccggacccgaaaacatcgctatagcatcctgcgttcagtctggttctgggctgctacggctgcggtgatcgctgccgtggcatggtggggaggccacctctggctccaggggctgttatccgctcagttaccggagttacctcattga

SEQ ID NO: 186155 - DNA, 306 bp, Klebsiella oxytoca
atgttgagcgtcctgttgccagtcatccaccgcctgcggcgttttatcagccggatataccgccagcttatcgccacaaacaacaagccacggcgttgcaggaccggaaaattcaccgctcagaaccatcggcggcgtgaatccaattatctgacccagcagcttcatttgctgacgcaacgctttcagggacgcgcgcagtacggcttcatcctgatgtctgtcgggctggcaggaatacataacggcgagctgtccgccctgatgcggctgctgttcgtgaatatcgcgaacaatgtcgcttag

SEQ ID NO: 186156 - DNA, 612 bp, Klebsiella oxytoca
atgaagggaatgcaacggataaagaggcataagaactttatcaatgtcgtaaagtatgtgttgaagcctggttctcaccataaaagtgctcctgttgttatcggtggtaacatgattggtgattgtgcaaatgaacttatagcagagttcaacactgccagtgaacgacgaactgacatcgcaaaaccagcatggcacaactctcttagacttccgaagaatgatgaacttacaaatgctcaatggataaagatcgctgacgattatatgaatcaaatggggtttagtgatactcatcttcgttgctatgttttgcatgatgacagtgtgggtcagcacatacatatcattgctaaccgaatagattcggtctcaagtaaggttaacttaggtagacatgaaagccttaaaagtggtcgtataatccaggaacttgaaatcaaatacagtctcactatcacaaaaggccctgaaccactaaaacctacggatactggaaaagaaacaaacaaagcaattcccaaaaaatcaaaaaagatttcccggaatgaagcaatgtttgaacaaagaacaggtgagatctgccaaacttttatcaaggagcatttgtaa

SEQ ID NO: 186157 - DNA, 606 bp, Klebsiella oxytoca
atgctccttgataaaagtttggcagattcaccagatgtgaaaactttcctaataaggcttgaggaagcgaaagtttcatgtacagctaacatagctaccactgggagaatgaacggattttctttcgtattcaatggtattgcattcaaagcatctcaacttggcaaaaagtattcttgggtaaatcttcaaaagctcatcgactacgagcctgaacgagacaactcactactacttgataccagcacagttgctactgctactgctactgctactgctactgctactgctactgctactgcaaaagattttgctgcaacggatataccaagggaaagcataagtgaaaaaattgctgaactcgaacttcgactcagagaagacagaagaaacggaatcgtagaaaagattcttcaaaaaaatgttgtacaacggcaaaaacactccaggcttagtggctggattccattcataaaaaggttcatagagcttctcagaagctatgggaagagcattcttcacaaaacccatacgactttatcaaaaatccatgcaatgaaatcgttaaacaagtcgatggaaattcgtttttatacagtgagttaa

SEQ ID NO: 186158 - DNA, 381 bp, Klebsiella oxytoca
  misc_feature (240)..(249): n is a, c, g, or t
atgaataactttgttgttacctccttattcattgcgatatttttaatttctggctgttcaacatcagggaaccagaaccttaaaaatgaaacaccacaaagccttcagtcaaagatcattaaaaacaaaacaactaagatggaattgctcactaagttaggtgagccagatacaagaaccacacttgatgacggaaatgagcagtggagatacttcatgtataacaatcagtttaatgcnnnnnnnnnngttgtcggtttgctaactggcggttctcagagtcagtctaaaacgcttgaaatagattttaaaggagagactgtcagtaaatggactttctcctctgacaacaacaacaccaaaactggtattcttaattaa

SEQ ID NO: 186159 - DNA, 336 bp, Klebsiella oxytoca
gtgttgtttggctgcagcgttcagaccgttcgtgcaacgctctccctcctcgaggctacccaggccgtccgggaagcggtggagtctggcactgttaccgttacccaggcgcgtcagcttggcgcgctcccacctgaagagcagcgggcaaaagtggcagaaatcgagctggcgacagctggtaccaaaggccatgaaaaatcccgtcggcagcgtcaggttctcggtgaggcaaagccgcgcatcaaatcccgtaaggaaatcacaaaagccctcgaagatgccagcggcgaatatgccgaggctctgctctgggtacttggggaggcgaaatga

SEQ ID NO: 186160 - DNA, 135 bp, Klebsiella oxytoca
atgaactttgaacctgaaaattacagccggcgcgcccttctctggtttgctgcactggtcagtgttgccgggtgggttgcagtagtcgctgtgatctggggcgtatgcatgatgatcgaatgggtgacggcatga

SEQ ID NO: 186161 - DNA, 486 bp, Klebsiella oxytoca
atgaacatctcaacagtaaacgagctcattcagtcgctggagagtgcgggcgagctgtcgatcaaagagcggaagtatctggagctggcgaaagagtttaagcagttggctgcggagaatgtggggctgaaggcgatcgttgactcggtcactgacctgagcaatgagcctcagtaccactccgagggtatgggttgcggactggaagaccgtggaattacggaccgttacgatgcttgccgctatggctgggatgaagctatggagcgtgtatacggtgaggttatcccatgtgctgaagagttggatttccccgccaccgatcgcatcgtagccgggattaagactgatgaggtggaggaagagccatttggctttgtatcacgaagcggagacttggtggttattgagcttaatggtgatcagcatatcagggatggaatgcctgtttttgttaaagcgctgcgcgagggggcagacaaatga

SEQ ID NO: 186162 - DNA, 438 bp, Klebsiella oxytoca
atgactgatatcaccgaactggcgctgattaccaaaatcaaaaagcagctcgaaaactttgacactgtggtgctgaaagagggtgaagccgtcgcgctggtagaggcgctggagaaggcgcagcagcgcaacgcagaacttgaagcgcaaaacgactatttcgcctcccttgtcgcaatggcgcgggtatcagcagataaggcgatacggaagtttccacagcccaattacgttctccttaaagtcgccgaggaggcgggtgaggtcgtgcaggctggcgttcattatgctgaaaacaggatggaatgggggaaggtagagggtgagattgtccaattgctggcaatgctcatccgcctggtaacggaaggtgatcaggttaatggcattacgccgcccgcgttatgttccgctggcatcaaggtggaggctgagtga

SEQ ID NO: 186163 - DNA, 168 bp, Klebsiella oxytoca
atggtcagcaatcgagaaattcgcagaatcatggcagcaggaatcccgaaccgggtgtatcgcgttagtaatactcgcaagatggtgaattattcgagagtgttaccgggctgcgtctattgcgttcgtgttaaatggagtgcgcgtcaggcgcgcaaggggtactaa

SEQ ID NO: 186164 - DNA, 747 bp, Klebsiella oxytoca
atgaccagcaaattaaccagagaagaacgcgtgcaggcgctctacgacctgaaggtggggcaagttctcagccaggctgatattgaaaacgtcaaaatgttggcccgcatggcgctggccgcaatggacagcgaggctaaggagtccattagttttgacgaatggtcacgcaaatgcgctttgcaaattacgctttgctaccctgattttcgtgaaaaggctcagtacatatgggattcagcgcgcgaaacacagcagccagcgccggtagtgcctgaccgttccatattcgaacaatggtgggaatctcagaacggagcgccactcgatggctgggattctttacggacaactgacggttattgtgatgatggcattgacggtcagtttgaagcctggaatgcctgccgcgccgccatgctgcaggaactccaaaaaagtgcaggagcttcgaataactgcaggagtaacgaaaaggtgcaggtgctgcaggtgctgcaggtggtgcaggttcagtcggtgcccggcatcaatccagcgccagctctgggttctttgccaaaaacaggcgaagtgctgccagccaactctccggtaattccgaatggttacgtgatggtgccgaaggagccgacgaaggagattctcgacgagttcgactcaattatcgactatggcgcagaagactctgtagacgcctggcacagactgctcgcagccgccccgcaggaggtgaaaggtgaataa

SEQ ID NO: 186165 - DNA, 744 bp, Klebsiella oxytoca
atgtatgataaagaggttatatcttttcttgaatacttagggtgtgaaggtaagaaaagcaaagcatttgaagaacttggacttaatgaattaaaaataaagatagataaatatagggaggaacataacgagcatccagaaggtatgccatatgatattgatttgatgcgggaaattttctcagcctacttcaaacacaaacattttattgacgaaatttgtgatgtactttttggctacactcaacgactccatccagcgatggtccatcaatcatatactcctgctatattaaaagaattaaataacttagttaaacataatttcatccctgatataatatcccctaaaccttacaaaggattatatatcaatttaaaaatcgacagtgtcccttatttaaatgatgggttgcttaaaaaaatattaggactggatttgtcagtattcaaagattcagagtctctaatgaaagaaaataacggtgttgcatataaggatataccgctatttaatgaaacaaatatatttggctttgagtttttgaaagttacagaccgtgttaactactcagagtttatgatcgatagaatattttttgtaaaaacaaaggcagaaataataatttcgtatgatgatattatgaaagaggttcttaaaacaataggggacataaaagaatctattgactcattggttaatgatggcaggataaattatattaattcgcaacaaagcaattga

SEQ ID NO: 186166 - DNA, 1716 bp, Klebsiella oxytoca
atgagcaggaataatgatattaatgcagaagtagtatcagtgtcgccaaataaactaaaaatttctgtagacgaccttgaagagtttaagatagcagaagaaaaattaggtgtaggatcttatttaagggtttcagataatcaagatgttgctcttctggccatcatagataatttttctattgaggttaaggaaagccaaaagcaaaaatacatgatagaagcaagcccaataggtcttgttaaaaatggaaagttctatcgcgggggtgattcacttgcacttccacctaaaaaagttgaaccagctaagttagacgaaataatatctatatatacagacagcatagacataaaagatcgctttactttttcaagcctatcacttaatacaaaagtatctgtacctgtgaatggaaatagatttttcaataaacatattgctatcgtaggttcaacggggtcaggtaagtctcacactgttgccaaaatacttcaaaaagccatagatgaaaagcaagaaggttataaagggttaaacaattctcatataattatttttgacatacattctgaatatgaaaatgcattccctaattccaatatattgaatgtggatacattaacccttccatattggctattaaatggcgatgagttagaagaactttttcttgatacagaagcaaatgatcacaaccagagaaacgtgttccgacaggcaattaccttaaataaaaagaaacattttcaaggtgatccagccacaaaggaaataataagctttcattcgccatattatttcgatattaatgaagttatcaactacattaacaacagaaataatgaaagaaaaaataaagacaatgaacatatttggtcagatgaggaaggaactttcaagtttgacaataaaaatgcacataggttattcaaagagaatttaacacctgatggaagttcagccggtgctttaaatggaaaacttctcaattttgttgatcgattacaaagtaaattatttgataagagattagacttcattctgggtgaaggtagcaaatccgtaacatttaaagagacattacaagccttaataagctatggaaaagataaatcaaacattacaatacttgatgtaagcggtgttccttttgaagtacttagcatttgtgtatcattgatatctcggttaatttttgaatttggttatcattcaaaaaaaatcaaaagaaaaacgaatgagaatcaagatatcccaatcttgattgtttacgaagaagcacataaatatgctcctaaaagtgatctgagcaaatatagaacatccaaagaggcaattgaaaggattgccaaagagggaagaaaatacggtgtgacccttctccttgcaagtcaaagaccttctgaaatttcagaaacaatattttctcagtgtaatacttttatctcaatgcggttaacgaacccagacgatcaaaattatgttaagcgattactcccggatacagtaggtgatattacaaacctcctaccatcactcaaagaaggtgaagccttaatcatgggggattcaatatcaataccgtccattgtaaaaatagaaaaatgtacaatgccaccatcgtcaattgacatcaaataccttgatgaatggaggaaagagtgggtagattcggagtttgataagataattgaacaatggagtaaaagttaa

SEQ ID NO: 186167 - DNA, 492 bp, Klebsiella oxytoca
atggagggatatggagtgtcgattattgctgaattattagatcaccgttctacaaaatttgcggcttgctatgttaaaaatataccagaatatgcagagaaaatagacgaaataatgattagaagtttatcagaatatgtaggggcttttaaaggagagttagttaattcagacacaggtgatataaaaataaagacacataagggtataaattccggaaactgctctaactgtaatgattgtaatgctcctgttccaattccttgctatacctgtccttactttaaaccctggatagatgctccccataatgaggtttatgattttctcatgaaagaaagaaaaagaatagccgatataacaagtgatattaaagtcgcaactacattagatagaaccattatagctgtaaaagaggttataaataaatgcaatataataaagaggagtcaaagcaatgaatgtacaaaatattcaggatgtcaaaaataa

SEQ ID NO: 186168 - DNA, 1812 bp, Klebsiella oxytoca
  misc_feature (1018)..(1027): n is a, c, g, or t
atgaatgtacaaaatattcaggatgtcaaaaataaaaacacaagtaattctttggatttattcgtggagaaaatgaagtttatagctctaaatgagattagcataccttgggattctgacaaatgggttataaaaaatgtggcaattaagtttactaagataagtgataatgctctccataatgaaaagatgaactccgattttataaaattttccaaagcatatattatcaatgagacaccgtgtaagactcacagattacaaatgataatccctactttaaggtgtttagaacatgttctcatcaagaattattcaagtggaaatatatgtaatattaattatagtatccttggtgaagtcattgatttgataaagcataaatatagtgttagttatatgtgtgcgattagtagtgaattgaaaaaaatagtctcttttttaaataaaaataactttacctataaatatataggtggttggaaaagccctataaaggataatcgcaattatttcaaaagcaatgatgagcaaagtaagaaactaccaagtgaagatgtgatgtatatttttgcagacatttttaggcaagatcttacagatgttagagatatttttacgacctcaatatttgctctgttaatgtcagcaccttcacgaatctccgaagttttgtctttatccattgattgtatgttcacaaataaaacaagaaaaggtgaccagaaatggggattaagattttgggctggcaaaggctttgggggtgatatcaaatggattccttcaacaatggttccggtaacacaaaaagccatatataggattatagaaattacgaaagaagccagaaagtttgccaagttaatggagttagatttcaaatcttttcataaacaatctaaattcaaagaatatgctgaaagcaaagttctctcagcaatccaaatatgtgagatattgtttaatgatactttttcagaaaaagaatgtaaaaaacgtttaaaacgtttgtccnnnnnnnnnnatataatagaaatctatgtgcctgataggtatttatttcagggaaatgttttagcacataaaagaagaaatactatttttcaaaggcatgggtatcaaaatggccgagagcgaactatttattttcattctcatcaattaagacacctattaaataccatagctcaaagaaatggaatgaccgaatacgatttggccaaatggtcaggaagagcaagtattaaacagaatagggtttataatcacgtcagtgatgaagagattcttgaaaattatgaagctataaaactctcggctcctaactattcaattagtaatgccgtaaccgttcgtgatcctgtatcgaaggagattcttttgtctctcaatcatagtgcggttcataagacagagtttggatattgtgttcatgactatgccctatcgccatgtgaaaaattcagagattgcttgaattgctcagagcagatctgtgtcaaaggtaattttgataatcttgaaaggcttaaaaaacgattagtggatactaatgaattaatagatatcacgataaaaaattcagacgaaaatgatagccaattagataaggatcgctggttgacttttcatttaaaaactcaggagagattacaggagttaataggaatcttagaaaacaaggaagtgccgaatggttcattcgttcgattagctaataagagctattcacatctatcaagagttataaatgcaaaggatttattggaacatagaaatggagaaaacaatgtcaaaaaaattaactaa

SEQ ID NO: 186169 - DNA, 1209 bp, Klebsiella oxytoca
atgtataaaataaaaatagataaatttcgacttgattcaggagagcgatattgcattgtgacaaataaagaaactggcattcctctttattatccaaacttatatctaactacacaatttagaaataatggacatgcattagctacgatagaatcaaaggctgtgaatattacaatcttatatagattcttagaaaaaaacgatatagatattgaaacaaggattctgaaagggatattcttgttcgggggagaaatcgatagtttggtttcatatttgggggctatttctgaactaaggaacaacataaacgtaggattaggtcacgtatcgaaaaaaactttacgcaatagaataaatagtattctttcatataccacatggttagtagatgaattattgcaatatgattcctccagatataaaaccagtttttctaaaatgataaaagctattgaagtcaggaggccaaggaatcatgacaataaaaatagtgaagataatcaaaataaaacacttaaagatgactccgtagtttgtttaatgaaactaattgacccacagtcaccttctaatccctttaaacctgatgttagaaatagaaatgcaatcattattatgattctcactgaattaggtataagaagaggtgagttattaaatattaagattgaggatattaattttcagaagaaaaggatatgtattcgaagacgagccgacgaggtatctgatccaagattaaatcagcctttagtaaaaactcttagcagacaactgccactaagtgaagaattagcttcaagattaatggagtatatcattcatgatcggaaactatacttaaagggaaagtctgaatttctttttttaatttataaaaatgggccatgtcagggtaaaccattaagcatctcaggataccaaaaaataatttcaaaaataagtatgagtgatcgtttacttagaggattctcaggacataaattaagacatacttggaattatgatttttctcgcctaatggattcgcaaaatcaaagtgaacgaaaacaagaagtcatgagggaaaagctaatgggttggaaagaaggttctggaactgcggctacatataatcgaaggtttattgaagagcaagctgatgaagcttcaattagactacaaaaaatattaggccgtagaggaggagagaatacaaatgattag

SEQ ID NO: 186170 - DNA, 195 bp, Klebsiella oxytoca
atgccgcacaagaaagtagcattacagctcattgaagaaacgcttaaagaactcgagtcaccaaaaggttccttgttctcggctatacaaaatccagtcagtcgaattcattattactatttattccagaaattaataaagaataactatccagtcacacttaatcataagacgagcgactacattaggagctaa

SEQ ID NO: 186171 - DNA, 927 bp, Klebsiella oxytoca
atggaaggtaaattaattttctgttccgatgcaatactgcggtttcagtccgattacgatgaaacctcggctgttccgttgctttccatacagaacgcggtagatgatgccgatcccttttttcttctccgtttcttccaccatacgactctgattgaagaaggaacaacactggcaagtatcttcttggctatagagccgtggaaggcgttgttagcggcttatctggacagagatgttggtgcctatatagatgaggtaagaaaaccgtccgggccaacgacatgggatattgaatggattggaattgaccgtcgaagctcggtttatcgcgcttataagcgtcaggatatggaagaaggggaagatttttcggcctattttaatcgtgagcggttcccgactgatgagtttgacatagaaagtagctgtgatgcttcaggcttcattaaaggggataaagaacgctggagtatcagcggtgatgttcacgaaattaaaaatctacctgtaattctctatagtaaacaaacattgatggcttcgtcgaaggatggattgttgaagaagaacgtatcaggggtgaagagtaccaagcatagctgcttagtttatggtgatacctcgttttcgttcagtgaggcaatggaagctatcttcatcagtgggctgttcttctatgcgccaagagacgccgccagcagccttgatgagttgaaagcgagtttagcggcgctggtagccaatgaaacagataaagaacctactatagccgtagccgaaggtgcttttgattcggtcgctgctcacatggaaacagaagctgaggagtggcaatccattaagaagctatgccagcgagaaggtgagctacccatacgtatcggtagtattaagacggctgaacctccagagtttcgtttttag

SEQ ID NO: 186172 - DNA, 654 bp, Klebsiella oxytoca
ttgcgcgttgcgctacctggtatcatccagtcattcgaccctgaatcaattacggctgttgttcagccggcgatccgctacatcgagcgtgacaacgacggcaacaaaagcacaaaggactatccgctgctggtggatgttcctgttgtctttcctcatggcggcggctgtacgctgactttcccggtcaaagaaggtgatgagtgcctagttatctttgcggaccgctgcattgatttctggtggcagagcgggggcatacaggagccggtagacgggcgcatgcacgatttatcggatgcattctgtatcgtgggcccgcagtcgcaggcgaagaaaatcagcggcatcagcactacgaccgcacagctgcgtaccgacgacggcaccgcattcattgaggtggccgccggaggggatatcactgccaccaccgccggcaacgcgactattaacgccccggaaatcgtccttaacggcaatgtgacgattaacggcaacctgtcgcagggtatgggcgagaacggcggcacggccacgatgcacggcccggtcaccgtaaccaacgatgtgacagcaggcggtaagagcctgatgacgcacacgcatggaggggttgagcatggtaacgacagcaccggggagcctgaataa

SEQ ID NO: 186173 - DNA, 354 bp, Klebsiella oxytoca
atgcgataccgaagagaagacgatgatggggattataccttcggtcagggtgatgatacctggctggtaaactctcccgaggccgtcgcgcaggctattaaaacgcgcttcctgctctggtacggtcagtggttcctcgataccacagagggcacgccgtggattcagtcggtcctcggcaaacagcggcccgacacttacaacctggctatccgccggcgcatcctggaaacgcagggcgttagctctatcactgaatttaacaccgaagttgacggccgtacgcgccgtgtaacgttcacagcaacagtagaaaccctctacgggacaaccacagtaacctcggaggcgtaa

SEQ ID NO: 186174 - DNA, 531 bp, Klebsiella oxytoca
gtgaccgctgttgttcagccggcgatccgctatatagagcgtgacaacgacggcaacaaaagcacaaaggattacccgctgctggtggatgttcctgtcgtcttcccccgtggtggcggctgtacgctgactttcccggtcaaagaaggtgatgaatgcctggttatctttgcggatcgctgcattgatttctggtggcagagtggcggggtacaggaaccagtagacggccgcatgcatgatttgtcggatgcattctgtatcgtaggcccgcagtcgcaggcgaagaaaatcagcggcatcagcactacgtccgcgcagctgcgtaccgatgacgggtccgcaatcattgaactggccgccggcggcgcagtgaccatcaccagcccgcagataaccattaacgggcccatgcaggtcaatggcgaaatcacatcaaccggcgatcaggttgctggtggcatcagccagatcggccatacccacggaggtgttgagcctggaggtggtagcacaggggtgccgcaatga

SEQ ID NO: 186175 - DNA, 354 bp, Klebsiella oxytoca
atgagataccgacgcgaggatgatgacggggattacacgtttggtcagggcgatgacacctggctggtgaactctccggaggccgtcgcgcaggccattaaaacgcgcttcctgctctggtatggtcagtggtttctcgataccacagagggtacgccgtggattcagtccgtactcggaaagcagcgacccgaaacctataacctggctattcgccagcgcattcttgaaacacagggcgtcagctctatcaccgcattcaacactaccgttgacggccgtacacgccgtgtaacgttcacagcaacggtagaaaccatctacggaaccacgacagtaacctcggaggcgtaa

SEQ ID NO: 186176 - DNA, 777 bp, Klebsiella oxytoca
atggcaacaccggactgggaggccatcgagtcggcataccgggccggagtccttgttctccgtgatataggcgagcaatacggcgtaactgaaggggctatcaggaagagagctaagaaatttggttgggtacgcaaagccggtacgcaggtacgcaaaaatggtacgcaaaccggtacgcaaaaaggaaaggtgcgtactaccgagaagcccgtccgctctggtggtacgcaaaaaagtacgcgaccaaaagcagaacctccaccagatacgaaaccgatacgcggatcgcgtaccgatcctccatccaacccattcaagcccggtaatcagcaagcattaaagcacggcggttatgcccgccgccttctactcaaagatgaggttatagaagacgcgaaagcgttgacgctcgaagacgaattatttcgccttcgggctaacaaccttgtcgccgcagagaatattggccgatggctgaccaagctggaagatgctgaaggggaccaggaaagaaaggtgttgatggaaaatatcagcgccgccgagaaggcgatgatgcgcaataccgttcgtattgagtccatcgtcggcacgcttgcgacggtaggcaaaatatttgctgatacagactatcgcaaggctgctactgataaggtatcgctggaggccgatcgtcttcgccgtgatgcaggtattgatgatggcaacggagagcgtgacctcaatgacttctactctgacatccaaaccgacgctgaatccggttctgcgtag

SEQ ID NO: 186177 - DNA, 1074 bp, Klebsiella oxytoca
atgcagactgctggagtggatagtggtatgactcaaagtacaacagttatttccgggatgcaggggcaatggcaggagtcttcttctaatttcagtaatattacgggtagtggtttacttggattcagaacgggctttaatagtgcattatattctatatatttacgccgtgatggcactctccccatgacaggtgatttaaatatgggaggcaacaatattaataatgcaaaaaatattactgcgtccggtaccggtagcttcggtgggaatatcacatcaggtggcacggtcacagccgcagggcaggtggttgctcataatggatatggagacactattgcgcttggtggtgatgctgctggaaatgattatgagataagattaagtaatggaactaaacctctgagtgttttttccccaaatgctgcagattataccactgttttaaatgtttataagaatgcaaagatacagcaacgccttgctactaatggtcttgatcctaatgatttgccttcaggctggagtggtggattaagaactaatgatgtttacgcggcgggaacagttggtgctggttcaggaggtgtcgtcaatgcatatattaacagcgctggtaatatttatgcatctaatgatattaacgtagggcatcaggtcaacactcaatatgtctgggcctcaggtaacctgaactctaactacattcattcaaatgggaatattgatgctgatggtaggcttaatgcaggtgagtttttatacataaatggaaaagcaaatgtaggatcgggttgctctccaaatggtttacaggcaactgcttcaaatggattactattatcatgtgttagtagtaaatgggttaaagcctctggaacttcaggattttttacaatgaacaaaggcgtttgcttggttaataacccggaaacaaacacctgctcatgtcagtcaggcactgtagcgaaagaattgttttatacaacagcaactgaacagttaggtggtggtagccatggtggcggcacaacagtggtaaaagagagagtattatatcaatgtagataa

SEQ ID NO: 186178 - DNA, 1077 bp, Klebsiella oxytoca
atgaacaatcaggtgtttgaaattgttcaggccatgtctgggcaggggaactgcataacgatccccggaccgtatctggatttctttgcaggagacaggcagcagcatttgctggcggccattctcaatcagctggtgttctggtcgggcaagtcgagtctggaaaatggctggttttacaaagagcacgcagcgcttgcgaaagagatccgcgctaaagacggcgatgtggtcagaaaggcaatgttcaagattacagagcagtacctggcgggggttattgaggaagaattgcggcaggtaagcggcacgccgaagaagcattaccgcgtcgatcaggaagcgttaattgccaagattttcccacaagggggaaattcaaataaaccattgaaagatatggattcggctcaagagccgaatggaaacggcttaagagccgaatcgaagcaagtgattgaaagtgatggaaacggctctcaagccgaatgcattcgtcccaagagccgaatggaaacggcccaagagccgaatcctggaaacggctctcaagccgaatcctatctctatacagatcttaaaaacagatcactacatacagatcataaaaaccacgcgggagagatttctcctgtggataacttttctgaatcgactcagaaaacagtcacgccggaagcaaacattcctgatgctaccgaagacagtaacctggctaccgatgatgacttcgatctcgcgatgtggttctggtcgaccatcatcgaaatgtacgaacgcgccgccgaatttgacggctctctggcaaaaccgagagaaccgaactttgtcgcctgggctaacgaggttcgcctgcttcgccaggagcacggatgtagccacgaccaaattcgcaccatgattgagcgcattcagcgcgatcagttctggtgtccaaaagttcaaaccatgaagacattacgcaacaaatggcctgagctggcgctgaagctgtgcccggtaaatctcgcaaccggcagcaacctcggttttagcggcaaggttcaggcagatattcctaagggtttcaggggctaa

SEQ ID NO: 186179 - DNA, 714 bp, Klebsiella oxytoca
atggaaaaagattcaagggttgaattttataagtcaaatcatcctgcaggggttattaataatttcaatcacggtttagagaaaacaactgctgaatatattctattttctgatcaggatgatgtatggttgaatgataaagtggagttacttttaaataagatacaaaaggcagaaagtaattgcaacgagccgacaccgtgtttagttttttctaatttgtgcgttgttgatgaaaagttgaatgttattgggagtgatttttatgtactaaatagtttaaatcctctaaataacctagatgagcgatatttgatttggcgttctacgatctatggatgcactactatcttcaatagagctttgttgtctaaagcaggcttagcaccatgcaatattactatgcatgaccattggtttgcttataatgctcttaagttcggtatgttaatttatgatgaaagaaaacatgtcctatatcgacagcattcaggtaacttggtaggctcgcataaaagaaatatttttagtaaacttagccgattacggaaaacaatgtcaggaattaataaaaatatagctactgttcgctttttggaacacgaaaaaaaaatggcagaacataaatttaccttatttaataatgtcattccatttattagagaaagaacattatatactgtgctgtttattatactttggagtataaaatga

SEQ ID NO: 186180 - DNA, 150 bp, Klebsiella oxytoca
atgaaaaaaattgttctttcaggtgttaacatgaccgaagggggcattttaacaatttataaaaatgtcatttcgatcctgcgcacagattgtaaaatccaagggtttagaaaatttccattttctagaatttccatcaataaagtctag

SEQ ID NO: 186181 - DNA, 294 bp, Klebsiella oxytoca
  misc_feature (112)..(121): n is a, c, g, or t
atggaaaacaatactatccagtgtcctttttgcctgaaagaaagccagcgcggtgtgcaagtttgtaccggctgcatggcgactgttttatatggaacctaccccggctggnnnnnnnnnnccggctggtatgctttcgtggttatattattgaccttcggcctgtctatactgatcggaatgtctacaggcatagcgggagctactatcagcctaccaatcattgcggttgttgggtttgtcgcaggtaaggcaatattttctgataatgttgtgttcaggcgaagaatgtaa

SEQ ID NO: 186182 - DNA, 552 bp, Klebsiella oxytoca
atgcgtaaaattttatccattactgttcttgccgtgttgttatcaggctgtggtgaaaaaggcgattttgagaaagcgatcaacgcaaaatttgcacaatcaaagctgtgctattcactgcagaacaatgacgttactttcaacaaaggttttcctataaaggttaatcatggctaccgttctgccggatacagtgccagtgatgaaatactgaaaggtctggctaatcagggactgcttgatgtctcccaacagcctaacggttttagcagtgttgatgtattagagataacagacaaaggccaagaggttgagttttgggatcgtaaagatggtgcctgtgttggtcatcgggtagttgctgagataaaggaatggaccgagccgggcaacggtaatcagaaagttgttcgcgtcacctatacatggaagttaactgatgttccatcatgggtggacaaaagcgcattctctggtgtgaaagggatgaatgagcctgccgatggtgccatgaatcttgttaaaaccagcaacggctggaaagcgatctga

SEQ ID NO: 186183 - DNA, 162 bp, Klebsiella oxytoca
ttgtgtcttgagtgcgtcaaaatgagcagttccgcaagttattttagcatattcttcattaccaagaccaatgagtttactttttgtctcaacaacaaagtaaatatggtcttcacctttgtcttcaataaccaaagcccagtcaggattgtaagtccctaa

SEQ ID NO: 186184 - DNA, 777 bp, Klebsiella oxytoca
atgagtaaatacactgacaggataacgaactatcacgcagggaaacctaagttttttgcacacatcgacctctcaacgcgaccgttaatcgacgtttcagccgcaatgacaggcatgattcaggatttcgacattgataccgccatcggccagcagctggatattttgggtgaatggataggccgcaagcgcagggtcaggacgcctatctctggcgtgtatttctcgtgggatacagaaaaacttggctgggaccagggcgtctggcagggacctttcgatcctgatgatgggtttcttgacctgagtgacgaagtttatcgactggtgctaaaagtcaaaattgctattaataactggaacgggcagaacgacacattgcctaagattctcgacaatgccctgacaggatcgggtattcgtatggcaattgtcgataatcaggatatgtccatttctatatggatacttcctgaccctacgattgttatcagtgaaattgacaggatgattctcgatagcgcagttaataagggtccattcatcgcattacctcccggttacgttccatctcgttatgacctgaatcccatcgatcaggttaatgctgaattatggtgggctatccaaaacggatatatgaccgttaaagctgcgggtgtaaaggtgagggagatacagatgccgtcaaatagtggctattctttttttggttttgatgtagataacgaatatatatccggatttgactctggtaactggggagaagatttataa

SEQ ID NO: 186185 - DNA, 708 bp, Klebsiella oxytoca
gtggtagaaaaagaatttagggataaggtactggaactgcaggctgcacaggatgagcgtgacgcccagaatgaaattaaacgtcaaatgcgagaggaaaggcagcgtgctgaagagttggaaaggcagcaacaagaagctgaagccaaagagcaagagcttgaagcacggcgcaaagcagtagaagaagcgctattggctgctgatgaagaacaccgccaggaactagaagaaacccgccgtcagttggagcaagagattgaggacgttcacaagcagtatgagcgagcaaaatcaatggctcagatgactaaacagggccatgtttatatcatttcaaatatcggttcatttggtgaaaatgtattcaaaataggcatgacgcgccgccttgagccactcgaccgagtaagtgagctaagcggagcaagcgtgccattcgaattcgatgtgcacgcaatgattagctgtgacgatgcgccagcccttgagtatgcattgcataacaaactaagcagtgagcgaatgaataaggttaaccttcgcaaagagttctttaaaacggacttaaacaaaataattcagtgcgttgaagagcatcacggtaaagttgaatacattgcagatcccgctgcactgcaatactaccgctctcttgaaatagcagaagaagcccaaaataataaagaactattagttgcgtcttag

SEQ ID NO: 186186 - DNA, 642 bp, Klebsiella oxytoca
atgactttatcgctatttttccactggggagcgatgcttattgtattgatttttttattttctcagtttttggcaagcaaaccaaaactcatttacgcattatcaatcatcactacctcattacttcttgtttcttattttatcaatttcgattttatcaacatgctcattggtaaaatgagcttcatttcatctcttggcggtggtattggcaatgttgatataaatagtaaatttggcgcataccttggtggcgatgtggaaggtgctttattttacgatggtaatatttttaggcgtatctactcttcgttagagttaatatttttttcagtgatatcgttcttttttatgtgggtttttcggaaaaagaatatagtaccttcagtatctttttaccagttatatactctacaactaggcatcgtactttattctactttgctaatttccatggtgtggtttattaggaatttttattggtgtgctcttttaaatccaattgttttatatgaagcaatagcgagttatgattccaccgtaaaaagaagatacatagtatcgctttgctactctatatttatattactatatttatctctttggttttggcggcatcccttggttatcggttcttattaa

SEQ ID NO: 186187 - DNA, 387 bp, Klebsiella oxytoca
atgtcgctgttcgacaccggcaggtgggcgctgaagcccggctcgacaaagctgctggtgaactcgctggtcggcatcaaagcgaagcccggctggctgattgtggtggcgggccataccgacagcaccggcgacgataaatccaaccagatactttcgcttaagcgtgccgaatcggtgcgcgactggatgcgcgacaccggcgacgtgccggagagctgttttgcggtgcagggctacggcgagagccgacccgttgcccccaacgacacggccgaaggccgggcgctgaaccgccgtgtcgaaatcagtctggtgccgcaggcgaacgcctgccagccaccgggcatgacccccgcgccatcgcaggatgatggcgctttttaa

SEQ ID NO: 186188 - DNA, 594 bp, Klebsiella oxytoca
atgtactcatctaaaccgacttttgtttatggttttcatggtatagataaacgagctgctttacgtatcttactacaaaaagacaacttcattcatagcaacaactcgtatgactggcttggtaatggtgtctatttctgggaaaacaactatgcacgagctattcagtatgccgaagaagacaaaaaaaggaaaaactctaaagttaaaacacctttcgtattaggtgctgtaatagatcttggtcattgccttgacctcttggatcagaagtatattgacttcctcaaggttgcatatgatgacatgatttcttctttaatcgcatcaggaaaaccgatcccgcaaaatgctgcctttggtaaaaatgattttgattttatgcgacgtgaacttgattgtgcagtaatacgttatgcctgcaatattgttaaggaagctggaactccttttgattctgttcgtgctgcatttcttgaaggtaatcctttatatgatggtgcgaaattttatgagaaaaatcatattcaaatcgccgtaataaaccccgattgcattaaaggtatttttttgccaagagagaaacagagctaa

SEQ ID NO: 186189 - DNA, 183 bp, Klebsiella oxytoca
atgatggatattgaagaactgacaaaaaaggtgaaagaaagagcggctaagcgaaccgatgaagaacggtttaaactattagtggatgctaaaatactgactaaaaacggtacttttaattcacgttttttctcaaaagaaacagttgagaaaagcaaagaagcaaaaatggcagtcaattaa

SEQ ID NO: 186190 - DNA, 591 bp, Klebsiella oxytoca
gtgtattgggcggatgagtggaaagcgaaagaagacgaattactgaaaagctgccagcgtacgtatcaggcggcgctggagcgcgatgctgatatcgtctacgactcaatcggcgttggagcatctgctggcgctaaattctctgaaattaatgatgatcgtaagcgcgaaaacatgaacgcatcccgtatcaactatcagcggttcaatgctggcgctggtgtgaatgagccggactacgaatacattggtatcccgaacaaggattttttcgccaacctcaaagcgcaagcctggtggctggtagcggatcgtttccgtaataccttcaacgcggtaaagaacggtgagcagtacccggtagatgagctgataagcatcgactcatcctgtccactactggaaaaactcaagctggagcttaccactccgcaccgtgactttgacaaaaacgggcgcgtgatggtggaaagcaagaaagacctcgccaagcgcgatgtgccgtcgccgaacgtggccgatgcgttcatcatggcgtttgctccaaccgacacagcgatggatatctgggaagcgctgggaaacagctaa

SEQ ID NO: 186191 - DNA, 600 bp, Klebsiella oxytoca
atggataatgtatttattttcgatcaggatactaaaattaacgatgccttcgtatcaaaaatgattcatgctttcaattcaatgaattttaaagagcgaattgcatgtgtggggccaaattatgaagatatgaataataacacgatagatgccattgaaaaggactttataatagcatcagggtcactttataacgtgagtatatttgataaagttggttattttaagtctgagtggtttatagatttaatcgatgttgaatggtgtcatagagcaaaaaaacatggatataaaagttatcaaattcaaaatataaagatggagcataatattgatgataatgattacccaacactatttggaaaacaagtacgaattggatcaccggtgagacaatactaccttattaggaactggatactaagtcttaaaagcaatagttttagtctaaaatttaaaattaagacaatgtactacctatgccataagccaataattttcttattgtgctcacctaggaaaactagatttaaatatatcattcggggttttaaagatggtttgtgcaatattactggagagtttaaggagcgagagtga

SEQ ID NO: 186192 - DNA, 519 bp, Klebsiella oxytoca
gtgggccggactggtggtgtaggagagcgttccctgggcgtgggcgccgtggctgcgcaccgcctgcagggcggcctgcatattgcgcgggtcgttcatggcgtcgaagacgcggaacacgtccatgccgtttttgacggcgcgctcgacgaagcgctgcaccacgtcatcggcgtagtggcggtagccgaggaggttctggccgcggagcagcatctgcagcggggtcttcggcatggcctttttgagctcgcgcaggcggacccaggggtcctcgccgaggaagcggatgcaggcgtcaaaggtggcgccgccccagcattcaagggaccagtagcccgcgttatcgagggcggccgcaacggggagcatatcgtcgaggcgcaggcgggtggcgaaaagggactggtgggcgtcgcgcaggacgacatcggtaatggcaacggtcatggattcctccgtgaattaagggttaagtcggcgatggtggtggatagcggcggcaatcaccggctttaa

SEQ ID NO: 186193 - DNA, 645 bp, Klebsiella oxytoca
atggtttgcgagggcggcatcactgtcgacagaacggttgtttctgctggcgtggctacacacccgttcagccagaaaccaccaaccatcaacggcccgctcatcatcaacccgttcagggatgacaccgaagactactctgccgtgcagattgcagagtggaacagcgccgaagggaaaacggtatatctctatgatttccgtcgtcagtacagcgtccagcgcccgatacgtttttttgagaacactcaggagacgttccagtattacaagggcgtctggacgccggttgtcaaatgtggttcagacgtcgtgacgctgaataccaccgtgggaacctatcgccgctcggggcggttagtgcatgcgacattcagaatagaaaccacgtcaatggcgctgacgacaggtggcgcggtagtgatatcagggcttccgtttacagtagccgcactgagcgacggggggttaacggtgtccccgataatctgcagtcgggccggctcggggatcatcctcgcgcaaacgaacccgaccacaaaagatattttgttgctgacaaatagctcgcctgccgctctctcaataacaggcggaacaggtttgactatttacggctcagttcagtacgttctgacagaataa

SEQ ID NO: 186194 - DNA, 132 bp, Klebsiella oxytoca
atgattttgttgctggtcttttttgtgaaactggaatcgtcggagcaggtatggtttttctgttatctgctgtactggcgagaacatcagccaacacgatttcctccggctcagggagaacagatacagtaa

SEQ ID NO: 186195 - DNA, 225 bp, Klebsiella oxytoca
atgagtcaagaaaaaataaaggcatttaacaatctccaagacatgtgtgttcagtccattaatatcaattctttcaactcattccagtcttgtagaactttccatttattattcgaagtattactaacgttttgctcttttgacgctccattaaaatgtgctgtacccaaagcaaaattaagtaacaatgtcattaattcatggctatcatctggcgaaaaataa

SEQ ID NO: 186196 - DNA, 183 bp, Klebsiella oxytoca
atggataataatgcatgggcagtcattgatagtgatgggattgtcgtaaatattattgtctggaatgggacggaggaatggctaccgccagaggggatgaccgtaataaaatgtggtgataagccatttagcatcggaggttcatataaaaatggtggctttacacctcaaacagcaaattaa

SEQ ID NO: 186197 - DNA, 183 bp, Klebsiella oxytoca
atgccgggcaacctgactacagcgggctggcaacaactgctgtggctataccagcacaatttttcccggctgatatgctttccaaaaatattacatggggaatatcatcatggggcggctatgtcgtcgttgacgctaatgatgccagtccatcaggactggcagcttcatcatttacaataa

SEQ ID NO: 186198 - DNA, 258 bp, Klebsiella oxytoca; identical to SEQ ID NO: 185975

SEQ ID NO: 186199 - DNA, 297 bp, Klebsiella oxytoca
atgaatcttggcgaaaaaataagagctattcgcgaagctgaaggcttaacaagggatgaattcggttccctgctggaaatccccataggcactcttcgtcgttacgaaaccgggcggattgaaaacataggcggtgacgttctaatcaaaattgttaatcacactaactttcataagtacatgaattggttgatgacggacaaaaccgatgaaggagccggacaaattgcccctactctctcccctgatgggcaagacggaacatcgagccgccgaagcgcgaaaaaggttggctaa

SEQ ID NO: 186200 - DNA, 228 bp, Klebsiella oxytoca
atgtatccgcgtctctcaattatttgcagcgcgccgattccggtctgcgccagggcgcttgccgctctgaaatgcttcgctcgcggtcagcgcaatttctcccgcgttaaaccgcatgcctatctcgtaattcgcatcggccgccgctggcgtctgctgagtaagaacggcggcaagcagtggcggcttatgactcacgaaacatacaaccaggagtaccgcaaatga

SEQ ID NO: 186201 - DNA, 948 bp, Klebsiella oxytoca
atgattaaatcacccgtcaaatgggcaggcggtaaaacccgcgtgatgcccgagctgctgaagcacatcccgaaagccgattgcctgatcgagccattcgttggcagcggtaccgtgtttatgaacacggaataccgccgttacgccctctgtgacagcaatagtgcgctgatcaatttttttatcacactacgggataacacagagaacctgatagcgtccgctaaaagcatgtttaagcacgggaacaatgaggagacttattacagtgaacgtgcattttttaattccttaaagcgggaagggctaagtgatagctctgtactccgtgcggcattgtttctgtacctgaaccgccactgctttaacgggctatatcgcgagaatgcagacggtggattcaacgtcccatttggtcgttataagtccccttattttccagaagctgaaatgcgcctgtttgccgaaaaggccagggataccgatgcgctatttctttgtgatgattttcgatcttcaattccctacgtcgcgaagagccacccctactcggtaatttactgcgaccccccctacataccagccagcaaaaccaccaacttcaccgcctacggcaagccgtttaccctggacgatcatcgcgccctggttacaactctgctcgatgcgcatcgccagcacggcacccgctcggttatctcaaacagcgatacgccggaaacccgcgagatctattcccctttcaaactccacgccttcagcgttcgccgctctgtcagcgccaaaagccgcgacatggccggtgaagtggttggcgttcttcgcgtgtgcgattgctgtggccgttctggcggtggtcattgccctgactgcggcccggtgatggggagccacacctacaacgcaatggcggtaacgggcgcttttgacgatctggaggctttctga

SEQ ID NO: 186202 - DNA, 207 bp, Klebsiella oxytoca
atggctatcaaaaaaacacacgtcggcaccgtcataaccaaagacggcccgaagcttaagaagctgcacgcaacggaaaaaatgtgggtggtcggtactaacgagctttatcacaaagagacggggcgccgtcactttgcagaaaacaccaggcgtcggctgcttctcgaatcaatttgcccaattcaggaggctaatcatggttag

SEQ ID NO: 186203 - DNA, 228 bp, Klebsiella oxytoca
atggttagcgaaattgacgctgtggtcactcgggtgatcgagtgctggccgattgacgacttctggatggtggaagttgaggtgatggccggtggtgaatacctgcgcactgatatcaccgttagcacgaaacgagaggccagcgcaattcagcggggcgacaccgtagcgatccctgtcgtgggtctggatggcgattttgccgatgaagatgaatcgccgttctga

SEQ ID NO: 186204 - DNA, 156 bp, Klebsiella oxytoca
atgaacgaagaaaccaattaccgccgattctggcgcaacacagttgtctgtatcgccctctgttcgcttttgttctggatcccgatgggctatctcgccgttcgtgttttctctgtggtgtgggaggcgctgtggtcgcttattacaacgaaatag

SEQ ID NO: 186205 - DNA, 1125 bp, Klebsiella oxytoca
gtggtcgcttattacaacgaaatagacccccacgcagcgcagcacctgcgcaaccttatcgacgccggccacatcgcgccgggcgtcgttgatacccgctcaattgaggatgtcacccccaatgaccttaaaggattcacacaagttcaccttttcgccgggatcggtggatggtcgctcgcgctacgtcgcgctggaattcctgatagccgacctgtctggacagcctcttgcccttgccagcctttcagcgcggcaggcaaaggtcttgggtttgctgacgagcggcacctatggccctccgcacattggcttatcggccagcgccgccctgtcgtggtctttggcgagcaatctggcagcgctgacgcgaatgactggatcgaccttgtacaagctgacgtggaagccctgggctatgccttcggggcggttgcgtttccgtctgcgagcgtcggcgcgccgcaccaaagagaccgtgcttattgggtggccgacgccgattgccagcaatgggaggggcgcagggaatttcaaccgacaggggggggtaaaccttcagacagcagtgttattaactggctggcccacaccaacgaccatcgacaacaatcaggttgcgggggcaggtgcggcagccaatgcaccgaagcgagggacgacgctgggcggtgcagccagactggcaggttggccgaccccgacggcaacggacgggaagggcggctatcaggggggcagggtgcggaacgggaaactgtcaacggacaggctggacgtgacagcgcagcttgcagggtggccgacgccaacaacgagcaacgaccgatcgccatgtccgcaagaggctatgcggacgtatcgcgacaatggaacaaagattcagaagcggccacaggatgtagcggcgctgtgcggcccggtccggttaacggcttctggcgagacactgactggcttcacagccaggatggaaagtggaggccagttagacccggatcattcccgctggctgatggggttcccgccagagtgggaagactgcgcgcctacggaaacgctatcaacattgaagcggcgacagcgttcataaagtcctacatggcagcggtagattatgtctga

SEQ ID NO: 186206 - DNA, 282 bp, Klebsiella oxytoca
atggagctgattaatcgtatctggaatggcgtgacgtactcctggtcaacattgctgacgggcgtcggtgtcatgacgcaaaaggactggctgaccgctattggcatcctgattggtatcgctgccgctgcgctgggtgaactgcatcggcgccgcatggcgcgcattcacgaaaccaataatgcgttactgaacgaactgatcgacgcgattcgcgacgacaccgagaaccgccaggacgtcaaagagctgatccgcaccatccgggaggcgccgcgatga

SEQ ID NO: 186207 - DNA, 396 bp, Klebsiella oxytoca
atgaaagcgatagccattcttgccatcgtgatgtttgtcctgctgattgccgcagtcagtggatttgcctggcaaagccataagcgcgaacaggcagatcaatcattgaccagcacccgggaagaattaaaacaaaccggcgatgtgctggctgaggtcagggcgctgcgccaggacgtcaaccaggtagaggccgggataaaagcactcagtcagcaacgaaacgcaacaggagaacaccgacgtgaaaacatcaaaaccgcactggccggtaacgactgcgccgttgctcctgtgcctgttgctggcgctgacagcctgtaccagcgagccgaagaagtcagcgccgcagattattcaggagcctttaccggaaagcctgacggcaaaaactga

SEQ ID NO: 186208 - DNA, 585 bp, Klebsiella oxytoca
atgggaattgccgaactgcttcgcctgctggagaacattgcgcgcactggcacggtgaccgagattgacgagaaaaacgcgcgcgttcgcgtgcagagcggaggactggaaaccacctggctgcgctggaacgcacagcgcgccggggcgtttaaagtctgggtgccaccatccatcggcgagcaggtctggttcctgtgtctgggtggcaacaccgacgtcgcctttatcggcgggagcctgtacagcgacgacaacccggcaccgggcgcatcgcgtaacgagatggtgatgaccgccccggatggcgcgacgtttcgctacgacgcggaggcgggcgcattgcaggtgaagggcatcaaatctgccgtggttgaggcatcggtaattgtcaccctggatacaccagaggtgaactgcaccaacctgttgcgcgctaaaaatctggatatcaccgaaggtggagagatgcgcggcaacttcagtcataccggaggtaagttcacgtccaacggtgtgcaggtggacgaccatgaccacggcgctgttgagcgcggcggaagctggacggagggtacgcgatga

SEQ ID NO: 186209 - DNA, 597 bp, Klebsiella oxytoca
atgagtagctctctgttaccaccatcctcccgtgactggcttcgctataccgaagcgggtaccgccagactgtcggaaattaccgtcgcgctgcgtacgctgtggacgccgaccgcctgccctgtcgatttactgccgtatcttgcctgggcgctgtctgttgatcgctgggacaaggactggccggcagaacgtaaaattgccgccattcagcgatcgtactggctacaccgccgcaaaggaacgcgcgcagcggtgcggcgcgtggttgaggatatgggttttttggcgacgttcgccgagtggtttgaggtcggagacgagccgggcactttccggcttgaggttgatatcaacgatgtgggactgacagcaaagacactggctgagctgaaccggttgatcaatgacgccaggccggtcagcaggcatccggcgcagctcaacatagcagcgaaggtgcgcggcgatatcctggtcggctcaacgttgtgcagcggcgacattatcagcatctatcccgacgactacgcggcggaagataacattacttataacggcgtgatttttcacgacagcaattttaattacgggtaa

SEQ ID NO: 186210 - DNA, 1557 bp, Klebsiella oxytoca
atgttgtggtctcctgcggagccacctttaggcataaaggctaactggccttatctctttaagctttctcgggatgtgtttccagagcagttttggtgcgaaattattgcctatctggttggtctaaagatggggatcgaggttcctgcagcttttcctgctacatatactaactctgaggatgtagttgagaacggtgcattaatggaatggttctatgatgaaaatcagcaagcctttacgcatgcctccgacttcttttttgctttgaaccctgaatttgaatccgaatcaggtaaacaccataatctcaatgacttagttaggatttgtaggcgattcagtcttaacggtaaatttgataaatcgaagcaaggatgggagatatggttacccaacatgcttctctttgatgcgtttattggtaacacggatcgccatcaggaaaattggggttttgtttttactggtcaacccgaaggttctcctcataaattattgattaatttagcgcctctctttgataacggcacgagtctcggttgtgaaatgaagatggataaggtcgctaattggaaccacatacgtttagaaaaatacatcaactgtggttgtcaccatcttcggcatcaacgtactaacacgcgcgaaagagtgggtcatcttgaatcgattcagattttaacaggtaatgaaaatgttaagaaaattctccaaaaaagcttctcttttgacatacatgagttaatcgtcgatattgaatcattgagtttaatcaaatgcctaactcctctgtcattagatcgtttgaattggattaagcgtttgattttacgtaggtaccaaaaaatgtcattagtgttggaaatgcggattttagaaaaaattattgaaccttctcgcttatggttaacttggcaaccgctttcagggggctcccgctatcttgtgggtaaaattgaccgagatagagaagcgtatacctttacttacttatctgagacggatgatttccatgtggctgaatctaaaggattcttggggcatcctgctttccctctgaaggatgttgtgcatactggaaacgtattggagccttttctccgtcgcctgccgcccagcaaaaggaaagattatccagtttatatgaagaatcacttcttaccatatccgtttgtgaggtctgactttgctttactcgggtatacgggggcgaagtcccctgccgatggattttgcttgatacccgattttgggggcgtccaagaggctgagtatttggcggaagttgctggtacccggtatcagaaagagttggaattggctgatgtagcagttggtgattctgtcgagcttattcatgagagtgataacgagtacgacccaaacgcaattgccatcatccatagcgctgggcgcttaggctatatcaataaagtgcattgtcaggctttgcttccaaaaataaggcgcaacaaagtgttagctacagttgcgaagaaaaatgggactcctgagcgtccattgatttatgtactgcttgagttttttgattga

SEQ ID NO: 186211 - DNA, 633 bp, Klebsiella oxytoca
ttgtgttattttcgatgcgttctgttatcatttcgcctcgacaaacaacctactccgtcatatgtacaccgggatgagaatatgaaaagactgatgattgatttggaaactctgggtgttatgacaacagcaccggttgtttctattggggctgttttttttgacgtagagacagctacaacaggtaatcgcttttatcaggcaatcactctcgattctgctctggagcatggagttgtagaaagctctacgctgcgttggtggttgcagcaatctgaaagggctagggctgtgtttagtgatgagaatgcacttactttcagccaagcgcttacggagttttctacatttgttgcacataacgttcggggtgaagagtttgaagtttggggaaatggttctagtttcgataacgccatattagcaaattgctatgcgaggttatcaatgcccctaccgtggaaattccgaaatgatcgtgatatgcggaccatcgttgctttatgtaagcaactcaagggaatagatcctttgaactctattgtaagagttggcattcatcataacgcattggatgacgcttttttccaagctcagtgtgttataaacgcatataaattgattaacagttag

SEQ ID NO: 186212 - DNA, 576 bp, Klebsiella oxytoca
ttgatacttgatgctcatgtgaataacgacgagttactggatagaatttgtcaagtatatggttttactcaaaaaatccagctagcccggcacttcaatattgccgccagctccctacaaaaccgctacacacgaggcactgtttcttatgatttcgccgtgcagtgcgcactagaaactggagcaagcctactatggcttcttacggggaaaggctctcaatatgatggcaaaccggccccaacggatccgaaaatgatagataccttcactctgagtgatggaaagctcgaagaaaattcaccattgagtattgatgccggtttttttagcaaacaaatgtcaaaaggtattgctgttcgcgccgatggaaagctgcacttcatagaacaagatgcctcactttctgatggcctttggttggttgatattgagggagctaccagcatcagagaattgacgctcctacctggcaaaaagttacacgttgcgggcggcaaagtaccatttgagtgcgggatagatgagataaaaacgattggccgtgtagtgggtgtatacagcgaggttaattga

SEQ ID NO: 186213 - DNA, 1464 bp, Klebsiella oxytoca
gtgagcgaaaatagctatgataaaaatgctactgaagatgagtacgctgaattttggaagcattttaatgcgagacacgacgaccctctcgtcaaagacgtaaagaaaacatatcgatggtttgttgaagtcatggggcaagaaaagtggtttgagcgaagagataatgttctaagatattttcgctctctcactgaacggttatataacagccaaactgatgtttcttttcatgaaaaagattctcgcatggctttttatgaagattggatcgcttggtatttataccttgcagaatcacttgcagatcgcccaacagttgatgaacctgcgcaatcctctagaatttggccgttttttgctacaattggggaatttagcgaagagttgaagtgtaccaaaggtattgaaaataagcttaaagatttacttgttaaacctgagaatcaaccagactcggtattatttgaattggttgttgctgcctgttatataaaaaatggctgggaagtagagtttatacctgagtccggtgcaggtaaaactccagaccttcttgtgaagaaagaaaatgataaactatatgtcgaatgtaaaaggcttgcaaaggtaactcaatattcagaaagtgaacgaacggaatgggttaaaagatggcagcaagctctaccttacataatttcttatccatatcctgtttttttcaatgtaaagttcaaatgtgaggtcaatagtacccatcctgatatttttttgaatgttgttaggtatttatacgcatcgcgagatttaatgcaatgcggtgttgcatcatgtgaaaataatgaaatatcagtagtggcaaatttaattgatatggatcgagtaaatgaacatttcgctaaatggatagtaaaatatccttcgccacagcttaactctcttttagatgataactatgaaccccatggtagttatacaatggcctgccaagctaaactttgtacttatagcgatgatgaatatagtacaattaacgtttttgcagacgaaataaagagacctttctgcgctaaatgggaatgtatagcagatgagtcgattgcaaaaaaagctaaagatgttaagggattgcttgtaaaagctgtgaggcaagcgccagatgatggtaaaacagttattcatattggatatgaaacattacatggcccacatgtagaagtgcttcgtgatgaaaaaattactaatatgttagctaattttgattgcgagggtaaggatattgaaattgtatattgccattcattccagccaagactgttttcagatgataattgggattttgccgaaactgttaggtattacctaagaggtatgagccaaaaatatcttttgaagaaaatgatgctcttggaaagagagggtattgttgagtccaacgatacccattgggagcaagatttacgagaaatgaacaataaataa

SEQ ID NO: 186214 - DNA, 867 bp, Klebsiella oxytoca
gtgacaatccgcgcccgtagcgccgattttcgcggaacgctgaactcacgtcgtgaggagtcctggcatgataagacgctcggcgaaatcgtggcggcgatagcgacacgtaacaaactgacgtcgagcgttataccggagctggccggaataaaaattccgcatatcgatcagtcacaggaatcggatgccaaatttttgacacggctcgccgagcgaaacggtggtgaggtttcggtaaaagcgggaaagttgctttttctgaaagccggtcgtgcgttaacagccagtggaaaggctattccacaagtcacgatcacccgcagcgatggcgaccgccatcagttttcgattgctgaccgtggggcgtataccggcgttacggcaaaatggttgcacactaaagacccgaagccacaaaagcaaaagatcgccctaaaacgcaaacccaaagagcagcatttacgcgcgctacagcaccccaaggccaaaccggtaacgaagaaaaaaacggtgaagacgccagaggccagggaaggtgagtatatggtcggtgaggatgacaacgtgtttgccctgacgacgattttttcaaccaaagcgcaggccatgcgagccgcccaggccaaatgggacaaactgcaacgtggagtggctgagttttctatcaggctggcgacagggcgtgccgacctctacccggagacgccagtgcaggtttcaggctttaagcgcgttatagacgagcaatcatggacaatcacaaaggtaatgcactctctgagtaatggcggcttcacgacgagcctagagctcgaggtgaaattgttggatgtcgagtacggttctgaagaggaggaagaataa

SEQ ID NO: 186215 - DNA, 1185 bp, Klebsiella oxytoca
gtggacagaagtgcagttgatacaattcgtgggtattgttatcaagttgataaaacgattattgaaattttttcgttaccacaaatggatgactcgattgatatagagtgcattgaagatattgatgtctacaacgatgggcacttaactgcgatccaatgcaaatactatgagagtacagattataaccactccgttatatcaaagcccataagactaatgttgtcacactttaaggacaataaagaaaaaggggcgaattattatcttttcgggcactataaatcaggacaaaataaattaacacttccattaaaagttgacttcttcaaatctaacttcctcacatacactgaaaaacaaatcaaacatgagtaccatatagaaaatgggcttaccgaagaggatctacaagcctttttggatagattagttataaatatcaatgcaaaatcatttactgatcaaaaaaaacaaactatacaaataataaaaaaccattttcaatgtgaagattatgaggcagagcattatttttattctaatgctttcagaaaaacctatgatatctcttgtaataaaaaagatcgaaggataaaaaaatcagattttattgaaagtatcaacaaatccaaagtcttatttaacatatggttttatcaatatgaaggaagaaaagaatatttaagaaaactaaaagaatctttcataaggagaagtgtaaacacttctccttatgctcgttttttcatcttggaatttcaagacaagattgatataaaaacagttaaagactgtatatataaaatacaattaaattggtctaatttatctaaaagagcagatcgaccatattctccttttttacttgttcatggcatcagcgaagataaattatacgaattgaagaatcaattatacaatgaaaatctaattttcgctgatggatacccttttaaaggaagtgtatttactccaaaaatattagtcgaagggttttcaaataaagaaatccacttccaatttatcaacgacatagatgatttcaatgaaatactgaacagtattcatataagaaaagaagtatatcagttctatacgaaaaactgccttgatatcccatcccaactaccccaggtaaacatacaagttaaagactttgccgatataaaggagatagtgtaa

SEQ ID NO: 186216 - DNA, 711 bp, Klebsiella oxytoca
atgagcttgccggataacctagagaacctccctgttgtactcattccaggatttatgcttgatgaaacattatgggacgattttatcgctgcatttcccgatagtagacgctttattcctgtgagcctgaatgggggaacaacaatccaggatattgccgccaacatagcccagaaactacctgagcgttttgttctggcaggtttttcgttgggtggctacgtagccagagctatttatgaagcttttccggaacggacagcggctatgattctcattgctacctctctcagagaagattcaccagagcagaaaaaaacacgcatagcgactgcggttactcattcctccagagcattcagtggactgagcaccatggcaattagaaagtcgcttcacgctgatcttgccgataatacgccccttattgataaaatccgtgacatgggaaaaaggctgggagcacatgcattcagtgtccagtcagggctaaaccgtgagcgaataacgttaaaaccagtttcatgcccgacctatgtcattgcagctgaacatgaccggctgcgttcaaaagaggaggcagaagaactggccaagctaaccggcacctgtgctgtttatattgacggctgtgggcatcttattcctctggagaaaccgtatgaattggcccaactcatgtacgtatggctcaataaaaaagacctttga

SEQ ID NO: 186217 - DNA, 936 bp, Klebsiella oxytoca
atgacaaactatgattttagagcactcaataatgaagagtttgaaagactagctacggacctcttaagcaagagagaaaatctgcttattgagcgttttaaatcaggaaaagatggtgggattgatggtcgtttttatcactctggcgaagtaataatccaagttaaacactatgttaaaactggttatagtggattattaagtaaacttaaaagcgaagaagttgcaaaagttaaaaacttaaaacctaatcgatacattttcatcacaagcgttggtttatcccctgctaataaaaaagaaatcttcgatttatttaacccttacattctaagcaataatgacatcattggtcctgagcatctcaatgatcttttagcactttaccccgaaacagaacggaaccattacaaactttggctttccagtacaaattttttaatgagtctgctaaataatgctgcaattcaaaatagtaactttctgattgaagatgcgagaaaagaatcatacaaattcatcgaaaccaagcaattacaaaaagctttagagattttagatgaaaacaaagttgtaatcatcactggtttgcctggcgttggtaaaaccactcttgcaaaacaagtgatgctcatgcattgtaatcgcgactatgaaatttaccacattgaaggatcaatttcagaaatagaatctatatatttaaaagagagaaagcaatttttctattttgatgattttctcggcgctactcttttagaaattttcactagaaactctgattctaaaatcgttcagtttattaaaaaaatcattaccgacaaaaacaaaaagatgattttgacgtcaagaaccaacatattaaacagagctaaaaatctcagtgagatatttaatatctgtctcttatacacatctccgagcccacgagactag

SEQ ID NO: 186218 - DNA, 3054 bp, Klebsiella oxytoca
atgaccattcgtttttatccgtcgcggctgcccggcgaaccactcgaaacgcatgagcatggcgttaccagtattcgcaactggctggttaccaatgttgaagagtatgaagatagggaagtgtccccgctggccattgagcttgatggccagctcgtacctcctggtgaatgggcgtttcgcatcatccggccagaaagtgatgtccgcatatatccagtgccatttgctaccggcttcgccatagccagcctcgttattgcagtagcggctgcagcctactccatatacatgatgaacaatatggacagcggtggctacacgtcatccacagggcgcagcctcgacctgaaccccgcgaaagcaaacagtgcgaaactgggcgatgcgattcgtgaagtttttggccgccgccgcatttacccggattatgttgttcagcctgtcacccgttatgatcccgcggacccgaccatcatgcatgttcatatgcttgtctgtctgggggcgggtcattttgattactcagagggtgatatcagagtcggggatacaccaaaaacgtctttgccggggttcagtcatacaaactatccacccggagccgatgtttccggcgatgagcgtagcgaaaattggttcaattcgactgaggttgggggaacatcctctggctccgggcttgatatggcgcagacctcaccagattcagacgacattatcgcggacagcatgacggtatccggcgcgaacgtaacgttcactggacttgatacggatgacgacgatgatgaagatgaggacgataacgcgctgcctgaaagttgggtcgaaggcactattgtggagattaaagcccccaccaacttccttatctccacctcgtcaggttacagcgtatttgcaagcaagctcctgactgaaatcgcgccggtagtagggatgccggtgacgttgagttttaacagtgttgattacgatctctttattgcagcttatacgccggggcaggatgccgttccgggagaggggggcagtgcagctaaaattcaggccagcgcagcgccgacgacttacgattactcgctgggcagtacaacctttacggtgacctggcacggaacgacttataccgtctctctggttgccgattatgtcaacatgtccggccttctggctgcaattactgaagggctgaccgggtccggcctggtggcgcaggataatggcggaacggtactgatcacagaagaggcaagcccgtttgcgggcggagaaatcacctcatcctcgctcccggtagcggtctttggcgatgcgcctgtttataccgctggcagtgaatcaaccggcggaagtgcagctatcactgcaaacgtcacattagcgtataacagcgcgacgggtacgcctttttcggggatgccggaaggtacccagcgtctttctctctctcatcggggtaatgagtaccagataatttcaactgatggcacaacggctaccgttgcgcgtctggttaatggtgcggttgatgcctcctggccaggtttttcagcgcgtacgatgattgattatgaatccaccgggctgaatgacagtgattcctggatgggccccttcctggcaagccctgataatgaaactgttgatatgtttgaggcgaatttttcattccccagcggaatctgcggcttcgataacaagggcaagaaacgcatccgacatgttgagtgggaaatccagtatcgggtttatggttcaggtgcaggctggatcagtaaaacaggtgagtatgcgttaaagaacgtaaacggcctcgggttcacagagcggattgtgctggactcaccgggtcttgtcgaggtgcgttgccgccgtcggaatgagcagggaagtaataacgcgcgcgacaacatgtactggcaggctcttcgcgggcgtctgctgacacgcccttcatcctaccccggagtgactcttatgggcgtgactgtggagaccggcgggaaacttgctgcacagtcggatcgccgggttaacgttgtggccacgcgtgtatatgactcaggcgctgcgaggtcaatttcgggcgcattaatgcatgtgggcaattctctcggccttcagatggatacggaagccatcggcgtgctggaatcgacatactggacgcctgatggtgagtatttcgactgtgctaccggagacagtatttcggcgctggaaatgctgcagaagattaccaacgcagggaaatcctattttttgctgagtgacggactggcgtccgtcgggcgggagggggtcaagccctggacaggaataatcactccacaggagatgactgaggatctgcagaccggcttcaccgcgccgtcagatgatgattatgatggcgtcgatgtgacctatattaacgggaccacctgggcagaagagacggtccagtgtcgcaccagtgataaccccacgccggttaaaattgaggattatcagcttgatggtgtacttagccgggatcgcgcgtatcagattggtatgcgtcgcctgatgaagtacctgcagcaacgggagacctatcagacgacaactgagctggacgcgctgtgctacaacgttggcgatcgcattgttctgacagatgatataccggattcagcgacgacaatcagttgtctcgttgaatccttatcaactgtcaatggcgtgacgacgatgacggtatccgagcccctgaactggacgtatccgaatcccagagcattaatccgctatcaggatggttcggcctcagcgttgatggtcgcgacgaaggtgggagactatcagctgtcagtgccttatctcagtaagttcgacaagatagatttttcgacggcatccattgaaccggtcaggctggttttttgcgattcttcccgcgtgggttacaacgcgatagtgtcggaaatagctccgcaatctgatgggacgtgtcaggttaccgccaaagagtaccgcgcgtcattctacgactacgacaacgccagctaccccggcgacgttgcataa

SEQ ID NO: 186219 - DNA, 381 bp, Klebsiella oxytoca
atgtttaaccctgataaatacctttcggtcacctggctgaaaggcggcagagtgtatccgcagctcgactgcttcggcattgtgaatgaaatccgtgcggaccttggactacctctctggcctgagttcgccggggtgaccaaagacggcggcggactcgatcgcgaagcgcgccggatgatgctttctctgaaacgttgcgacccctgcgaaggtgccggggtggcctgttattccggctcaaccgtcacccatgtcggtattgtcgtcagtatcggtggcttgctgcacgtggcggaatgcaatccggggacaaacgtcacctttctgccgttgccgcggtttaagcggcgctttgtcaaagtggagttctggcaatga

SEQ ID NO: 186220 - DNA, 474 bp, Klebsiella oxytoca
atggcaatttcaaccgatattaactacccggcggaatatcttccgtgtccattaaaagaaaactttggccttaaaccaacatcaccactgaaaagtagcacgatggttaccggccgccgaagacagcggcgggcttatacgtctgttccttcacagacatcagtcgcctggatattcactgatggtcaggctcaactttttgaagcctgggtaagggatatcaccatggatggggcgaactggttcaatatgccgttattaacgcccctgggtcagcaggattatgtttgtcgatttactgatgatttctacgagggacctactcccgaagggggaaaatactggcggtatactgcgacacttgagctttgggaaaggccaattcttcctcccggctgggcagagttccctgattttatagtgaacagcgacattcttgatttggcagttaacagggagtggcctgaagcatga

SEQ ID NO: 186221 - DNA, 2421 bp, Klebsiella oxytoca
atggctggcaagtcactaggtactcttactatcgacttgattgcaaaagttggtggatttgtttcagggatggataaagctgaacgtgcatcagccaagtggagtaagcaggtacaagatgatgtggcaaaatctagtgcagcgcttacagggataggggctgctgctattgctgctgggctggctgtaggtgcctccggatttcaattgcttaaatcaacatcaaggcaaatatcagaaactgatcgctgggctaaatcattacagctatctactcaagagcttctcgcttggcagtttgccgctgaaaaggctggtgtatcgggtgatcaaatggctgatatctttaaggatattggcgataaaattggcgatgcagtattaaataaatctggtgaagctgtagatgcacttaatgcccttggattatcagctgaaaaactatcaaaagttagtccggataaacaattgctcgctataggggaatctctagagaaaattagtactaatgccgagaaaacaacgattcttgaaagtttgggtaatgacctttcaaaattgcttcctttgtttgataacaataataaaaaacttaaacagtttattgatcttgctaaagattatggtgttgctcccgatccatcctctattgatgatttagtgaaggtaaaccagctctttgaagatatggaggctcaagtcgctgggctcaaaattgagatttcggcagggttagctaaagtcgatctaaaccctttacagagttcacttgataaacttcacgatgtactgactgatcctgttgttcttcaaggtatttctgatcttgtatcagaagttgccaagcttgccggatggcttgtaaaagcggctgcgggagctggccaacttgcctctagcactggtaaccgtttcgcggcacttagcggtaaaattgacctctcgaatattgaccaggtcaatgaacgtattacttatttgcaaaaaagccttgagggaaggaatggtttttactctaaaggtgagtcgatgtttggttggcttaccggagtagatgacagcgcaaaagccctcaatgatgagttactttctcttatagaaaaaagggataaactttctaatgccagcaggatatctatacctcttcaggctgcaacagtaggaactgacaacccgtttgcactacctgcgggaagtacgaatggtaagcctgctaaaacaccagtaaataaacttgataatgcttataaagctgtggagcagagctatctacgtcagattgtattaaccgatcaacttactggtaaaacgaaagaagtcacagagcttgaaaaactgcgattcgatttatctactggaaaacttgtaggtattaataaagagcaacagattaggctggaagggcttgcatctgaaattgataaatacaatgccctgtcaaaattccgtgatttacaggatgagttattaacacctgaagaaaagctccttaaaaccacgaaagaacgctttaaagtcctgaaagatattcagggattgcccggagtcagcaaggaagaagtaaaaaaagcaaccaaagctatcaccgaagattcatttgccgatatgcctaactttactggtatagaccccatgtttggtgggcaactcggtgagctaagaaaagtcgatgatgcgcagaaagagcaggaaaagtggtatcagaaccaacttgatttgcttgaacagaaccgacaagcacgctctgaccttaatgaagaatgggacgccagagaacttgagttaaagaaaaaacaccaggatgaaatgaacaggctcgacgatgcccgcaatcaactgatgttaagtagtgttgttgatggtctgggatcaatggttgatatgactcgtactgcttttggggagcaatcaggcatatataaagcagcatttgctgttcaaaaagctgcagctatagctcaatcaattattgctattcagcaagggatcgctatggcggccgctaacccatttccctacaaccttgcagctatggctagtgttgcagcctcaacagcgagtatcgtatccaacatttctgctgtggggatggcccacgatgggcttgatagtgtcccagagacgggtacatggctcctgcaaaaaggcgagcgagttactactgctaaaaccagcgcaaagctggatgccactctggatagggtcgcgactcagtcaaccggtggtgctatctatgctccaagtcttagttttaatgtcaatggtgatccctcggatgtgcaaattgccatgatgaagaaagctgcttcggatggtgctcagatgggatatcaaagagcagttcagtctgtagccagcgggcaaggtgatttgcataaagctctgatgggcaaaacaaatgcgggcaggaaattacgctga

SEQ ID NO: 186222 - DNA, 264 bp, Klebsiella oxytoca
atgaacggcatcggtgggcgaacgatcgcggaggctcaggagcgaataagtcttcgtgagtttcagatgtgggtaaagtaccgcgataagtatggtccgcttaacattatgatgcgtactgagtggggcgcagcgttggttgcttccgttctggcaaatatcaataagtctacgaacataccgccatacaaggtcagcgacttcgccccgcatatcaatgaatccgctgtatcgcttgaggacgcgatgaaaacgtgggaatga

SEQ ID NO: 186223 - DNA, 327 bp, Klebsiella oxytoca
gtggaaataagcgaggaacagctggcgcagataaaggcgcatctgaaggttgatggtgacgacgaagatacgcttattgctgcctatgcttcggcctccgtcgattatgttgagcggttctgcgacggtgcgctggtcgaaacattaacgccgccagtggaaggggaaactcagccccgtgaggttatttttacttccggcatctgggcggcaatgcttttgctgattggacactggtatgcgaaccgcgaagcggcagcgcagaacctatcggaagttccgctgggcgttgaggcgctgctgattaggcaccggaggtggaactaa

SEQ ID NO: 186224 - DNA, 1164 bp, Klebsiella oxytoca
atgtctgaattatctgtactggaaaaagctatcgaaaactcccaaaaagaagtaaaggagcttatcgaagaacagcgtaaatccatcaaccagacaggtgaaatcaacaagcagctgcagatcgatctgacgaaagcacaggaagaactgaaagccaccggcacccgcctgttcgatcttgagcagaaactggccggaaactctcctgatcagactgcgcagaagtcatttgctcagcgcgtatctgaagacctgatgaagggctgggacggctcgcgtaccaaagcgaaagttaccagttttgataaagcgattggttcgggcgcagcgtcggcaggtgccctggtccagccgcagcagctgccgggtattcttatgcctggtcttcgccgtctgaccgtgcgtgacttgctggcacaggggcgtatcaccagtaacgcgctggaatacgtgcgcgaaaacgtgtttaccaacgctgcagcaccagtggcagaaggtaccctcaagccggaaagcaacatcactttcaccaaagaaacggcgaacgtgaaaactatcgcccactggatccaggcatcgcgccagatcatggatgatgccccggccctcgagtcttacatcaattcccgcatgatgtacggactggcgctggtggaagagaaccagatgctgaacggggacggtaccggcgataacctgcaggggctcaacgtagtagcgaacgactacgaaaccacactcaacgcaaccggagatactggcgctgatgttctggcacacgccatctatcaggtatcgctgagtgagttcgaagccgacggcatcattctgaaccctgcggactggcaccgtattgctctgctgaaggacgctaacggcaattacatcctcggtggcccgcaggcgtttgcctcgaaagtgctttggggccttccggtggtgtcgaccacagcgcagacggcaggaaaattcaccgttggcgcgtttggcctggcgtcgcaggtttgggatcgcatggatgccaccatcgagatcagcaaccaggaccgcgataacttcgttaaaaacatgctgaccatcctttgcgaagagcgcctggcgctggcccactatcgcccggcagcgattgtgacgggtgatattgctgtcagcactggtgcataa

SEQ ID NO: 186225 - DNA, 669 bp, Klebsiella oxytoca
atgcctgacattcagaagacgctggctttcgaccagacagaaatcaagttcatcggcgacggcagtaagggaacatttgaagggtatgcctcggtttttaataacaccgacgccgatggcgacattattttgccaggtgctttcgctggtgtgattgctaaccagagtcgcaaggtggccatgttctttaaccaccagacacgtgctatcccggtcggtaaatgggatgccatgcatgaagatgacaaggggctatttgtccgtggtcaacttactccagggcttagcctggccgaagacctgaaagctgccatgcagcatggcacggttgaagggatgtctgtggggttttccgttgggcctgatgattacaccgttggcacgtcagggctcatcttcaaaaacatctcttacctgcgggaaattagcgtctgtactttcccggccaacgagctcgctggcgtaacggccatgaagagcatcgacagcatcaaatctattcgcgatgcggaggcctggctgagggattcagtcgggctttcgcgttcagaagcacaggcatttattgcccgtgttaagtctgcaggccgaagcgagttcggtagcgacgacattgacgcgctggcacagcgcattaactcatttgccgctaacctgcggacaccttaa

SEQ ID NO: 186226 - DNA, 1278 bp, Klebsiella oxytoca
atggcagataccgattacagcattgacctgcggacgcgatcgccattctgggcgcgcatggcctctatcctgatcggcggccgcctggtgacacccgataagggctcgcaaatggcgggtacgtcagcgcacggtgtggttggtgattctgttgtgactgatgagcgtaatatgcaaatcagtacggtatgggcctgcatcaggttaatctccaccgtaacagcatctttaccactcgatgtttatcagaccaaaaatgatcagcgcacgaaagtggacaacagtcacccccttgcgaaactgctgagattccgtcccaacaacttcatgaccgctcttgagtttcgcgaagcaatgactatgcagctatgtgcctacggcaacgcctatgcacatgttgagcgaaacggtgttggtgacgtgattagcatggttccactgatgagcgccaatatggaagttcggctcagcgataacggtaaaaatattatctaccgctaccgacgggacactgaatacgctgacttttcacagaaagaaatttttcatctcaaaggatttggcttcaatggtctgactggtctttcgccgctggcgttcagtgcgaagtctgctggtgtggccatagcgatggaagataaccagcgtgaatttttcgccaacggtgcgaagtctccgcagatcctgatgactgacggcaaggtgctgacgaaagagcagcgcgggcagctggaggaaaactttaaggagatcgctggtggtccggtcaaaaagcggctttggatccttgagagcggcttcaccacgcaacctatcggcgtttcgcctcaggattcagaaattctggctgcgcgtaaatttcaggtcgccgaactggcgcgattttacggcgtgcctccacatctggtcggcgacgtggacaaaaccacctcctggggatcggggattgaacagcaaaacctgggctttctccagtataccctcaaaccctaccttgatcggtgggagtacagcattgagcgctggctggtcaaagagtcagaacagggcatcattcacgccgagcataacctcgacgggctgttgcgcggtgattcaacaagccgggcatcatttatgcaaatcatggtcaataccgggattcggaccgttaacgaggttcgaaggctcgataacctgccgccgctgcccggaggtgatgtggcgacacggcagtcgcagaacgtgcccattaccgatctcggaacaaacaaagagccccgcaatgccggggcttaa

SEQ ID NO: 186227 - DNA, 1533 bp, Klebsiella oxytoca
atggctaaaaaaactctgacaagagccgagaggaatatcctctggtgcgaaagaaatatttatattcccgaaggtaagtttgtcggccagccgctgaaaatggctgagttcatgaaggatgacttcagagccattttcgacaacaagcatggtacacgtcgcgcaatcatcagtcgcgggcgaaaaaacgccaaaacggtggaaaccgccatgctgatgttgctctacctggtagggcccgaggctgcaccgaactcgcagctgtattctgcggcacgctcacgcgaccaggcggccattctgtttaacctggcctcgaagatgtgccggatgaacccggtactaatgcagtacgttgcgatcaaggattcagctaaagaaatccactgccctgagctgggttcttattaccgcgcactgagtgccgaagctaccacggcctatggtttctcgccgcgatttgttgcacacgacgaactgggccaggttcgtgggccgcgagacccactttatgaagcgctggaaaccgccaccgctgcacaggataaccctatttcgataatcatcagcacccaggcgcccgatgcgagcgacctgcttagcctgctgattgatgatggcctgaccggagccgatccccggacggtggtccggcttcagaccgcgccggaagatatcgatcctttctctgtcgaggccatcaggctggcaaacccggccttcgatgtgttcatgaaccagaaagaagtgctggatatggccgccagtgcgaaacgcctgccgtctcgccaggcagagtttgagaaccttgtgttaaaccgcagggttgaagcgaaaagcccgttcgttagccagagtgtctggcatatgaacaaggaggaacccggcgaacttgcgggggctaccgtatggggcgggctcgatctttccagcgtgtcagacctgaccgcactggtgctgaacaccacgcagggcgatgtgcactgtaaattctggctaccggaggaagggctggcagataaggcgcgtaacgatcgtgtgccttatgacatatgggcgaagcagggctggctaaacacgacacctggtaaggctatcgagtatggatttatcgcgagggagctgcggcgcgtttttgagctctgtaacgtcagggcgctggcgtttgaccgctataacatgcgcttccttcgcccgcatctcatcgatgctggtttcaccgatgtggagctcgaacgattcgtagagttcggtcaggggtttgtttccatgtcgcctgctctcagggagctggaagccaaactgctcggtgcgcagctgaagcacggcaatcatccgatcctcgaaatgtgcgccaaaaacgccacggtaatcactgaccctgccggtaaccgcaagtttgtgaaaggtaagtcgagcggacgtatcgacggcatggtagcgctggcgatgtctattggcgcgcagaccagtgacgaggtagaggagcagggtgacgttaatgatttcatttacaactttttgagcgtgtaa

SEQ ID NO: 186228 - DNA, 435 bp, Klebsiella oxytoca
atggcacagcgaggcagaaaatctcttgccgcgacgacggctgtgtcgcttccggctctggctgaaagcaggctgcagccctcgttacaccttagcgatccagagataaacgtctggatcagactggttaacgataacccggccagctcatttactgaaacacatcgcgacatgatggaaatgtactgtcggcatgtggtgcaggcgagactgttaaccactcagatcgaggagtttgagctggagtggctggctcgggatgatgggctgaagcgctacgataaattgctcacgatgcgcgagcgtgaagtgcgttctgcgtcttcactggcaacgcgcctgcgtatcacccggcaggcgactgctgatcctaaaacagtaggacgcgccaacaaaaatctgccgcgggagaaaaaaccctgggaaattgaataa

SEQ ID NO: 186229 - DNA, 210 bp, Klebsiella oxytoca
atgcaagacctgaagattgaataccgggatggcaagctggtggaactgagcattgatggtgtgagctttctttctgcatccgccatctccttcagtcatacagcaaacgagacgctaccaacgatcatcctgacaatgtctgtcggtgtcggtgagcgactggagccccccagccctccccgtgaacacctgcggatcatcgagaaatga

SEQ ID NO: 186230 - DNA, 291 bp, Klebsiella oxytoca
atggcttccagttcaccctggcatcatctctataacaccaaacgttggtaccggttgcgttatcaccagcttcagaagcagccactctgcgagtttcacctcagacgaaatcaggtgatatccgcaaccgttgttgaccacatcaaacctcacaagggcgatgaaacccttttccacaacccggacaatcttcagtcgctatgcaagcgctgccacgactcggttaagcaacgcatggagaagggcggaacggttaccgagttcgacaatgaaggcagggtaatctggtaa

SEQ ID NO: 186231 - DNA, 741 bp, Klebsiella oxytoca
atgtaccaaaatttagctaatgcaacatttcaggtaattgcgggagattcttgcggaagtggcttcagtttcatgcgagaagacttggttgtaaccaattttcatgttgtggccacctgttgtgacttacaggaaatgcgacaaattaatcccgttattcttcaaactgaagcgaatgagcatatcggtgctcaaatattgcatattgatggtgacaacgactttgcgattatgcgattgcaatcccctcttcctggcgggagaactgttcttcagccatctgctgggtttactccaactcgaggcaaaaagttaatctttgctgggtatccgcacgggatgccgcaattgttaacccatgagggaataatttcagcccctcttgagaaggggatgttttctattgatgggatggttaacggtggaaactctggtggcccagtagttgatgcaagcactggtgacgccataggtatggtaactcagcgccgttttatgttgggtggagatgctgagaagttaagtagggaggccattcagctaaggaattatttagcccaagcttcacagggtatgagcgttggaattatggggatagattttgggcagttagctgatatgtttggtcgttctttgcaggtagttaccaagatgcttgaaatgaatgccaaccctggtattggcgtaggcttctcgttaacgcctatcatcaatgcgattagtaaatttcctgaagattaa

SEQ ID NO: 186232 - DNA, 192 bp, Klebsiella oxytoca
atggaaaaacaagatcttgggtttatctccgtgaccaataccgttgatgaaattagccgtatgtttgtagaaggaataatcccaccagagggctctaagctagaggtggtgttgttcaagaaaaaacatattgacgaaaaatgttcaatcacgctaaagctacaatctatccaacctcaaaaagttgattga

SEQ ID NO: 186233 - DNA, 285 bp, Klebsiella oxytoca
atgagtgaagcaaaaccgcaggacggcaccaccgtaaagggttatcggacccttaccgctgacgatatcgcgcaaatgaatgagctgaaagaaattagccgtgatttttgcgagaagcttgatatcgaacgtactcacctttctctggaggttgtagaggtcaactctcaggaggctatcgagcgtgctgaagcgctgcgttgtctcgccattgcgcgcaccaaaatgcaggaagcctgtatgtgggcatgccgcgcagttgcccggccagatgctgactgttaa

SEQ ID NO: 186234 - DNA, 270 bp, Klebsiella oxytoca
atgcaaatgataacgcgaaagaagccggcctttaccgagctgtatcagaccggagttctgacccgtattgttgcagtcagaaacgcagatagcggaggctggcgactgtttggcctgtggagagataagcaaatcggggtatacgtagaggctgcgcgcggaggtgtccgggaatggtcagggctgaattacctggctaacttctgcggcagctgcggaatcagtttgtgggaggttcactgcaaggtcgagcccaagttacttcagtga

SEQ ID NO: 186235 - DNA, 141 bp, Klebsiella oxytoca
atgtccgctatgacttttgtcgttgagtttgaggatggaaaggagccgccagtacacgcgcacatggaagtgcttggcggtaaggttgtcgcggtggcgtttcgtgatgctttggaggagccagaagaggatgacgactga

SEQ ID NO: 186236 - DNA, 675 bp, Klebsiella oxytoca
atggccaataaccagttaacagatgaagagctgcaaacgttaatcatcgagttgcagcagaccgcttaccgtcttaacgggactaattctgcttacctgatgtcagatgcgataaagccattgcgcgagctacaggaacgccgcaaggccgagagggacagcgagccggttgcgtggactgatgaagaagaattgcgcgatgcgaatgaaggagggagcggttatttgtttgggattggacatgacgcgaacaaattcgctgacccgcggcgtcagataatgctctatcgccacgcgcagcagccggtagtgcctgaagaaaagccaatgcctaatccgctgagcatgtacgcggttgatgctgttgcggctatagcagaggtgaagggctggaacgcctgccgcgccgccatgctgcaggctggtgatacagttcgcgacctatccacgccagtagacccacaggtcgctgaatacgagcaaaacgtattgcaggctggcaactctccggtaattccggaggggtacgtgatggtgccgaaggagccgacatccgagatgatttgggctgcaaagtactgcttcacatcaacaccaggctgggatgtatttaaatctgcctacaaagccatgctcgcagccgccccgcaggaggtgaagcgatgtccgctatga

SEQ ID NO: 186237 - DNA, 513 bp, Klebsiella oxytoca
atgagtaaagtaggcgatcatttctttgagttccctgcatcacgtggaactcagggtggttcaattgtcctgatgctgactgttcctgcacggacactaacgagagtcctcgccagcgataactacggggacacccttgatcgatctcagcgagaactgaacccagccagggcgaaaaagttttatcagtatcttgttgaagcatacgaaaacaaagagccatttatcattccaccgctggtaggtaactgcgattcgtatgttgaattcgaagagttcggaaacactaatgtcggggtggaccgattcccgatggattctgagattaaattgtttgatggtcagcatcgtgcagccggtattgcggagtattgccgcaccattgatgaacgtaagcgtgcagcgagaaccgtattgacggggatgtgttattcagttggcagtgctacgcgccaggggagtagctcgctgacccggtttatcggccagtcagcaatgacgtcaaggacataa

SEQ ID NO: 186238 - DNA, 960 bp, Klebsiella oxytoca
atgaacaatcaggtgtttgaaattgttcaggccatgtcgggacaggggaactgcataacgatccccggaccgtatctggatttctttgcaggagacaggcagcagcatttgctggcggccattctgaatcagctggtgttttggtccggcaagtcgagtctggaaaacggctggttttacaaagagcatgcagcgcttgcgaaagaggttcgggttttagagggcgatgtggtccgaagagctatctacaaaattactgagcaatatttacccggcgttatacaggaagaaattcgtcaggttaacggtacgccgaagaagcattaccgcatcgaccaggaagagctgatgctcaagattttcccgtcaatactggattcggcacaagtgccgaatggaagcaaaatattgaaagtattggattcggcgcaaacgccgaatggaaacggcacaaacgccgaatcctatctctatacagatcttaaaagaacagatcttataacagatcttaaaaaccaaggcggagagacttcccctgtggataactttgctgaaaaacatcctgaagcggtgattttcaacgctgaaaaaagcctttggggcagcgctgaggatctggagttttcagagtggttttatgcccgcgtcgtcgaggtacatgagcgtgctgctgaattcgacgggacgatttcaagaccgccagagccaaactggaccttctgggcgaatgaaatccggttgcttcgcgaacagcagggctgcactcacgagcacatgtacacgatggttgaacgcattcagaacagctggtgggtcaaggacattaaaaccgcagaccgcctgcggagcaaatggcctgaggtggctgtgaagctttgtccggcaaatctcacaaccggtggcaacctcggttttagcggcaaggttcaggcagatattcctaagggtttcaggggctaa

SEQ ID NO: 186239 - DNA, 396 bp, Klebsiella oxytoca
atgagtaaaaagaacttgtctgttaagcaattaagtcatgcgggacaggtcacctacgaaatggctaggcggtatacgcttggcacagcaaaaccgcgcgatgaaaagctgatgagaattgcggaatggttgagcgtgcctccagcctggctagactacggggcagtagaaaacagtgctgaatccaacgcagccccggagactgtcaccctcacccaaccagagaagggcgatgaaacagaattcgcgagcttaagcgatgaagagaaacgcctgattcgagtcttcagaaaattccctgatgcagaagcaaacaacatgcttctggcctttgagattcgctataagaagctcctggagttctatagcgagtacgcagatccagacaaaaaataa

SEQ ID NO: 186240 - DNA, 630 bp, Klebsiella oxytoca
atgacatccattcgattaacaaatgcaatccgcgaacaaattgctaaaaacgcattaacaaagtccgggattgttgcagcacttgaagccttgcaggttaagcgccatgaagtggcaagggatgcacgcgtctttgcttttggtggcgcagagaaaacagcaaaggttgataaggcgtatgaaaagctggataaacttttatctgagcttcgcgcttccggcacttcgatttacttatcaagcggactatcttcgtcaatatatatatccatctccgggcgtcagcttggttggtgtccttacggtaaagacaccaaaggcggggatattctcctttttacgccgaaccgtgatttatgcctttttggtgctgagcatgaaataactaagcgctttgatgaaattatgaatgaagagcaaaagctgaatgccagagcaaaggaaatcgaagcaactgtatgggctgcgctgaactctgttaccaccttaaagcgccttatcgaagtatggccggaatgcaaagagcttatcccggaaaatagcgataacgccagagcctctcttcctgctttaaaagtggaagaccttaaccggatgattggccttcctacagaagaggttgtcagctaa

SEQ ID NO: 186241 - DNA, 189 bp, Klebsiella oxytoca
atggcgccggttctggttgaaggttgttccgtttttatttgtggtcgcatcggtaagctttcattgctggggtggagtatgagcagaaatggcattcgttcactggttattgttctggccatctgccttgttgcctggcctgcgaccattatcaaaattctgcatgttacgggggtgtttaatggctag

SEQ ID NO: 186242 - DNA, 288 bp, Klebsiella oxytoca
atgtttacgatagagaaagaagttgcggttaatcaggtaactgctgatggaattgcggttggagcggcaacgctcaaagtcaccctgacatacaccatcgagcgaattgagcttgaaggggcgaacggtatcgctttttacacggttacatctgacgctgatgctgagggagtaagaaattacatcccattcacctattcagggagcagcgatccgttatctgaagctgagtcagcattaaaggaatcgcaatcccagcacgatgacatgcagaagcgcaccacctga

SEQ ID NO: 186243 - DNA, 1158 bp, Klebsiella oxytoca
atgagcaaaatttttaaatcgctaataacggttgccggttcggaaaagatagccgccgcaatcgttagcggggagaaggtcattttctcgcaaatgtctgtcggcgatggcggagggagcgcaacaaccccgagcgacggtcaaaccgcgttagttaatgagcgcttcaggacacaactgaatagcctgaaattatccgatactgaaaatatcattattgccgagatgattatcccgccggaggtgggcgggtttaccatccgggaggcggcgctgtttgatgacactggcgcgtgtatggcggtcgccaacgtcccggaaacctacaagcccgcactcgcagaaggttcagggcgttttaccattctccgcatctggctggcggtcagtagcaccgaagccgttgagctggttgttgacccgggcattgtgctggcaaccgttgaggatgtgattaacgctggtaacgagattaaagactatgccgacgaacagctggacgagcatgcaaaatcaagaaatcacccggatgccacactggacgaaaagggctttacccgactcagcaacgccattaacagcaaagaccaggacaaagccgccacgccactggccgtaaagctggctattgaatcagccatccgttcagcctgggaaatggataaccctgtcggaacggtgaagttttacgcgcagaacgtgaaccctaacgagcgttatccgtggtcagaatgggtttacaccggcgaaaataaatccatccgcgtcggaagggctgatggttcagacgtgggcgccactggcggtaacgacactgccaccattcagaaggccaatcttcccgccgtgcagattgatgtgagcggggaaaccagcgagcagcctgagcagacgctgacgaccacgcgcggcggtattcaccatcatggtggggtggccggtaaagatgacccctgggaaatcggcggggatgtgcggcagctctttaacccgaaagagctgggtgtgacggatgatgccggagaacacgaccacgaagtcactgcaccgccgcacaagcatacgaccagcggcaaaaccgacaatctcggcgagggtaaatcgttcagcgtggtggaagcgcacaccctgctgatgtgctgggcgagggtggcgtag

SEQ ID NO: 186244 - DNA, 387 bp, Klebsiella oxytoca
atgaaaaaactagttctctcgctgttgctggtatctgccagcgtcgcagcgcaagcctctaacgaggctgttttacagaagtctcttaagccctggaatccgctgtctattgaaagtaatgcaggtgttgttacgcttgtaatgaatgaggatagcgttactacgcaaatctataattccgtcattcgaatgggtgtgtgtggccctatttggcttaacccccaaaaaactacgtacctaaaaaatacaaaagaagtgcgggtgttaaatagatacgctcatagcgggtttgtttttgagaaccctagatcttcttgcaatgaggcggggctagcaaaaggcgatgattctgagttagtcatcgcatcgtatacccatgcattttaa

SEQ ID NO: 186245 - DNA, 204 bp, Klebsiella oxytoca
atgcgggcagcgccgatatcgcacgctattgcgattcctgtggtctgcgccaggagcgcggccaaaattacccaaaaaaacttattcatcgtttactctcaaaatgtcctgaccactgggcaggcattaatgtgctttcagggcttcgatttcgtagccaacttgcaccatgtggatgtactgaattgctatcggcagcgctag

SEQ ID NO: 186246 - DNA, 606 bp, Klebsiella oxytoca
atgagtattgtagctacactgagagaattatcggaagtctggaagctatttggtgatatgcctgacgatacaacactgaatgcagaattagcagccatttatttaggtgttagcccgaaaacattagctcgttataggcagaatggtggtggccctgaatacattcaatatcaggaagaaaatagtaaagctcgaaatcaacggataaattatttgttgaaggatttaaaaatttggagagatgctcataaagttaaaaacagtatggaagctgctcaagttagaggacttgcattcaattcactgatcgacttcacgatcccacaaccgttttggcatatagataatgagttagattcagataacaaaaataaaatattatcacatgcacttagaacaccagaagaacgatttaaaatttatttagcagaaaaacatatcaaaatcgtttggatctcagtagaagaagccttgcttttagattggactgatttaaccgaaagacaaatattccatgattcgtttgttaaccttttaaatgattcaatccagctttctactgctgcacaagaaaatctcgtattgaataacattttcaaaaaataa

SEQ ID NO: 186247 - DNA, 267 bp, Klebsiella oxytoca
atggcgacgctggggcgtcttatgagcctgctgtcaccctttgacgtggtgatatggatgacggatggctggccgctgtatgaatcccgcctgaagggaaagctgcacgtaatcagcaagcgatatacgcagcgaattgagcggcataacctgaatctgaggcagcacctggcacggctgggacggaagtcgctgtcgctctcaaaatcggtggagctgcatgacaaagtcatcggccattatctgaacataaaacactatcaataa

SEQ ID NO: 186248 - DNA, 273 bp, Klebsiella oxytoca
atgccagtgacaaaaaccatttcagcaaaaacacgctcattttatccagaagtaggcatagctgttgattctgaagaacagaatattgaggtgacctacaccgtaatttcagtgacgattaacgcggacctctctgccactgccagagtgagaacgcagattacaggctatgacgataccagtgagatttcggtacagtttacctactctggaagtggcaacccgattggagaagtggacgcagtattaaaaagtcactcccttgacggttga

SEQ ID NO: 186249 - DNA, 1095 bp, Klebsiella oxytoca
atgatctggtcgcactgtttcaataatcaaacacgtgaggaagtcattgatctagtttgcttggttgtttttaatgctaataacatggaagaacgggagtgtaaaaattcattaaagcgtgttttcaatatcaaatataaaaataactttcactccaaagtaaataaaatagatgaatacataaaagagtcaataaaatcaacacttaatagaagtctgacacagctaaataaaaatgtaatgataagattgacaccattcaacccatcggtgtctgactatatcatcaatcgctatgctactgatgaaacctctcttgcactttacttttcagcccttaagacaaatcaatcaattaacactttattctctttgcacagcaataggaaaatcagtgctgatgtatttatttcagtgcttgagtcagtactcaatgctgttgatcttaaatgcttaaatgattactcaattcatctccttcattcgatcatacattccaatctaatctccaccaataaaaatagaatggtgtacccaagcttatttttaaacattgaagaagaatatctcacttacgattacgaagttggggagtgcgtgttatgggctgtaaaaaatgctccaagtctattttcagatcaattcatctctgactttataaattatgccatgaggtctagttggagatataccctcaaccatgacgattacctccccttagcacacttaatcaatcttcgacctgcaataaaaggagaggaagttactcatgaactaatggaacatatcaaagaatattggcatgaaaattatgacgaacatttatctggaacagggaaaattcaatcattagattatgacgaaagatctaaagctgatgacattgcatatgacatgctacatgatttaattaatgaatacgatttgccctttgaggacaatgaaattgaatatatgtatagtaaagttgatgcgtctacacacctctatgactcttacgattatgatgaggatgaaagagatcgcttccatagccacagagatgaaaaagaacatagcgaaagctatataaacgatttatttcaaaaacattaa

SEQ ID NO: 186250 - DNA, 1770 bp, Klebsiella oxytoca
atgacagttcgattgaataaagtatcaataactaacttcaggtcttgcaaatacaccgaagcttttctaaggccatatacagcattggtcggctataataacgcaggtaaatcaaatattatattggctataaaatggctcttagatggctccctactaagcgatgctgatatgtacgacccacaaaatccagtgcgagtagagggagtcattgaagggattactgatgatacgctgacgttacttagcgaagaaaatcagcaaaaaattgcaccattcatcatagataaaactttgaggtttgcaagaaagcaggacagagaagttgttgatggtgataagttaaaagtcaaaaaaacacttgaggtttttgatggtaccacatggaaaaaaaatcctggtggaatcgatggcgctatctcgaatcttttccctgaaccaattcatattcctgcgatgtctgatgctgtagaagatgcaaccaaaaataaagccggtacaacaatcgcgaaaatattagctgcaattgttagcgaaataaaaaaagaatatgaagtaaaattctctgaaaacatctcggaaatcggtaaatatcttgctcatgatggttctactaggttagatggtttgaacaaaatagacagtggcgttagtcagaaagtaaatcagtttttccccgatgtgagtgtgaaactacactttcctacccccactctggatgaaatattcaaatcaggaaccttgaaagtatttgaagaacgagctggttcctcaataatgcaagacatcagccgattcggccatggtacgcagcgttcaatacagatggctttgattcaatatttagctgatattaagaaaagaagcgatgatacaaaaaaatcaaacactcttattttcattgatgaaccagagttatacttacatccatctgccataaactctgtgagagaatctctggttgctttaagcgatcttggattccaagtcatcatctcaactcactcggccagcatgctctcagcaaaacatgcctgcaatgctatacaggtctttaaaagttccgaaggtactatagcccggaaaaccatttcggaaaaaatacaagaattatatgaggcatcctcaccacaacttcactctgcatttaccttatctaattcatcatttttcttattttcagaagaagttttattagtcgagggcaaaacagaaacgaatgttttatgcgcactttataaaaaaattagaaacaatgaactcaaccctaccaagacaagtattgtagctgtagatggcaaaggcagtcttttgaaaatggccaatgttatcaattcaataggtataagaacgcgaatccttgccgattgcgattttctatcaatactactgacaacctctcataatgaagtattaagtagtgaatgcgatgaattactctcatctttaaccaatttgtctgatccacaaagcttgcaacttactaaccccattatttctatagactcactaaaaagcagttcaagcaaagactttataaaaatctgcaatcatcatgaagtaaaagcctcaatcaaaaaaattcatgataaattaaagagtgatggaatatatatttggaagtcaggggatattgagcaagtatacggatttggaaaaaaacaaagcgaatgggataatttattagattgcttaagcgatgatgaaaaagaggtccgtgccattattaagaactatgatgaaatggaagattttatcttatggatttga

SEQ ID NO: 186251 - DNA, 1212 bp, Klebsiella oxytoca
gtgaaaggcatgcagaaaataaagcggggtaaacagtttgcaggtgtggttctctatagccttaagtcaggatctcaccacaaaatcacgccttatattatcggtggcaacatgacgggaagcactgctgctgaacttatcagtgaatttgaaggcacaagactactgcgccccggtgtcgccaaacctgtctggcataattcgattcgcctgccaaagggagaaacactgtcagtcagacaatgggcggcattcgctgacgattatatgacccggatgggattcactgaaacccatcttcgctgctatatcatgcacgatgattcggacgggcagcatatccatataatagctaacagaattaacatggtcggtgggaagctgtaccttgggaaaaatgaaaatcttatcagtacccggattatcagcgagctggagaaagtccacaaactcactcaaaccacatctgcaatcagtagtcatagtcaggagaaaagaaagccttcccgcaacgagctgatgatggctgaaagaacgacaactccctgccccaggtccactctgcagagcctgattgataatgcgttaaccggccgccctgatttgctgacttttatcactatgctggaaaaggaaggcgtgaactgtaaacccaatatcgcctcaacgggaaaaatgaacggcttttcatttcagtaccagggcattgcctttaaagcgtctcagcttggaaaaaagtatggctggtcttctctgcaaacacagattgattttacaccagagcacctggctttactgaaaaaagagcaacagcagactgtgccagtgccagtgccagtgccagtgccagtgccatcatgcgagcctgaagaacaggctgcaaaccgggaaacgattctggagaaaatccttcagcttgaagaaaaaattcgtctggaaagacaacaggaaacagtgggtgtcattcaactcaggagcaaactgcacaatacagctcgtcagataccccgccagcgtcgtctgcattcgtggcttgtattactcggccatattgtggcacttctcaggcgcaggggcatgtctctgttacatgccactgcacatcctttccaccaaatcctgcacctgcatcttctgacaccctgtcattccatgacaacaaatcccattaaagaacaattagttaaaaacaacccccatcctgcaccataa

SEQ ID NO: 186252 - DNA, 948 bp, Klebsiella oxytoca; identical to SEQ ID NO: 180766

SEQ ID NO: 186253 - DNA, 660 bp, Klebsiella oxytoca
atggcgaccgggtcatcacagctggaacagcgcgctgccgccgcgtgtgccgtcatcagtgacctgaatgtccccttgcgtgacctgtgggatccgtggaaatgcccggtgaaattcctgccatatctggcgtgggcgttttctgtcgaccgctgggaggaaacctggccagagagggaaaagcgccaggcggtcagcgatgcgttctggatccaccaacgcaaggggacggtggcggcggttcgccgggtgattgaaaacctcggctacagcatgacgttacaggagtggtgggaggtggccgaccccgccgggacattccgccttgagattgacctgaatgatatcggtattaccgagacgatgattaaggagctggaacggattattggcgatgcgcggccggtcagccgccacattgcccgcctgtcactgtcagcggggaccaccggtccggtgtataccggtgccgcatcgtgcagcggggaggtcatcagcgtgtatccgccggaatatacgccggatgaggccgcccgttacgacggcggcgggttccattccgggtcggtcacctataccgaaaaccagcggggagaagaccctcaccgctatgacggtcgcacttttcacgatggccgtggcgtttacgcaggagaataa

SEQ ID NO: 186254 - DNA, 660 bp, Klebsiella oxytoca
atgattatctgggacggggcgattaacatcccggcgctcacggataacggcacctgggtgatggactcgccctcgaaacccacggcggaaacggctgcctgcctcgaccgctggcgggacttcgcgcagtccgcacaggatgcgtttaccaccgctgccggtacgcatctggataaaaacaacgtggtggatttctacgtcttcctcagctttatctgcgccccggactgcgtgcagaagaacaccacgtttatcacctgggacggcacgaaatggtttttcatgccctatgacctggataccacctttggtctgcattacgccgggacgtcgattgcctatccgccagacctgaatctgtttgataacggtctcgccatgcaggtcaaccgcaccttctggaagaaggtccgtaccaccttccaggcggaaatgaatgcccgctatgcggagctgcgggataacggtctgttttcacagcgcggtgtgctggagctggcccgcgacctgctggggcgctacaccccggaactgatgcaggctgaatatgaaaaatggccgaatgtgccctccctgagcatcaccagtctggaccagatgatggactggacccgacagcgtattgcatacctggacacttttttcagctaccaccagtaa

SEQ ID NO: 186255 - DNA, 285 bp, Klebsiella oxytoca
atgcgcggagactgtgaggacaaatcgcctgcctctttgccgtcgatacggcgtccggtctgggtcgcatccagcgcggacttgccgtacacatcggcacccaggggactgtaccggcttttcacggccatcgcctgcatcagcgcccactcgaccgacgtcatgccgtgccaggtgctgcccatcgctttcagtaacgggataagagtggcgctggttgcgttacaggcattcgcatccacgttgggcagactcaggacctcgccgttcagcacgcatccctga

SEQ ID NO: 186256 - DNA, 636 bp, Klebsiella oxytoca
gtggctgccattgtcgccggggcattgctcatccgtaaatactgggagcccatcagcgcatttttcggcggagtgattgacggcttgcgggccgcctttgcgcccgtagctgacctgtttgcgccacttaaaccgatgtttgactggctgggcggaaagcttaaagccgcatgggactggtttaacaacctgatcgcgccggtcagatcctcgcaggagacgttaaaccgttttcgtgatgccggtgtgttgttcggccagcgactggcggatgccttaacgttgccactgacggcatttaataagctgcgcagcggtattgactgggtgcttgagaagctcggcgttatcaataaagagtccagcacgcttgaccagactgccgcgaaagccagtgccgccacgcagggtagctcttatattcccgcgaccagcacttatggcggttatcaggcttatcagcctgtgacggcccccgccggtcgtacctacattgaccagagcagcccaacctatcaaatcaacatgccgggtggtgcgccgggcggtcaactcggaaaccagttgcaggatgcgttagaaaaatatgaacgcgataagcgggccagagcccgagccagcatgatgcacgattaa

SEQ ID NO: 186257 - DNA, 450 bp, Klebsiella oxytoca
atgaatgacttcaaaccctttgaggacaagctcgccggattgatagcggccctttctcccgccgggcggcgtcggatgaccgccgacattgcaaagaaactgcggcagcggcaacagcagcgcattaaatcgcagaaagcgccggacggttcgccgttcgtcccgcgtaagcgccagcccgtcagagcaaagcaaggtcgtattaagcgcgaaatgttcgcgaaactgcgtaccaaccgctatatgaaagcgggcggcggcgacagcgcggcggtagtggaattcaccgggaaagtgcagcgcatcgctcgggtgcatcaactcggcctcaaggataaaccatcccccaaaaacaccgccgtcgagtacccacagcgccagctcctgggctttaccgaagatgaccggcagcttgtggaaagagtcattatcgactaccttactgattga

SEQ ID NO: 186258 - DNA, 861 bp, Klebsiella oxytoca
atggatatttcagagctcgataacttcaagaagcaacttatcaataatgattccataacaggtccgatggaaatactgacatttaaatcattatttatcgagttgtattttgatgaacaaaaacttagtacaggaacagcttttcttgctgcaaatgatagggaatcgcattgcgcgctgatcactaatcggcataatgttacaggaagaaatcaagaaacaaacgaatgtcttagcaagacgtgtgccacacccaataacatagttatatatttccataagaatcactccgttggcgaatggctcaaagtaaagcttcctctataccgtgaggatgaaacgccatgctggattgaggatccagtgctaggtgcgaaagctgatgttattgctttaaatttaaaatggggaagagatgtatctagagttccattttatataaagaccaatttggatcgagataatttgtatgtagggccgggagatactgtcagtgtgataggttttccatttggtgttagtagttttggcaaattcccagtttgggctaccggcttcctagctcaggaactattactaatgacagatgaaaatccaatctttttaatcgattgcagagcgagacaaggccaatctggttctcctgttgtagcttatcgaactggtggatatagacaatatcaggatggcaaaatatcgtcagtaatgtctgccactccaaaatgggagtttttaggaatctacagcggaagagttaatattgagtcagatcttggaagagtatggcatgtttcagttattgaaagagttttgaatgcagcagaacaagattataatgaaagaataagtaaagacaaataa

SEQ ID NO: 186259 - DNA, 594 bp, Klebsiella oxytoca
atgatccgcaccggcatcgtcgtcgaaactgacctcgacgccgggcgctgtcgcgtgcagaccggcggcatttataccgactggctccagtggttaacccaccgcgccggacgctcgcgctcctggtgggctccctctgttggtgagcaggtgatgattctggccgtgggcggtgaactcgacactgcctttgtgctgccgggcatttattccgacgacaaccccgcaccctcggcctcggcggatgcctggcacgttgagtttcccgacggtgctgttatgagttatgagccggaaaccggcgcgctgaccgtcaccggcattaaaactgccgacgtgaccgcatccgatacgattgccgtcagcgtgccggtggtgctggtcaaggcctcgacccgcgtcaccctcgatacaccggaggtggtctgcaccaacaaactgacgaccggcacgctggaggtgaaaaaaggcgggaagatgtccggcgacatcgatcacagcggcggcgctttcacatccaacggtgtccaggtggataaacatgggcacggtggcatcaaacgcggcgatgaatggacggaggggacccaatga

SEQ ID NO: 186260 - DNA, 774 bp, Klebsiella oxytoca
gtggcgaacctgcccgaatcctacaagccgcttctggcggaagggtcgggacgttttcaggtgattaatatctggctgatggtaagccagactgccgatgtgcagatgattgcggacccgtcagtgattctggcgacggtggaagaagtccgccgggcggggaacaatgccaaagattatgccgatgacatcgtttccactctggagaatgagacaagggaggccattgcatcagcggtcagcaccgctatccgtgatttctgggaaacggaaaaccctgtcggcacggtccggttttacagccagcatgtggacccgaatgaacgctatccgtggtcaacgtggacgtataccggtgagaacagaaccattcgcgtggcaaaagcggacggttcggacgtcggcaccaccggcggcagcgatacggtcaccctggcgcgggcgaatctccccgccgtgcggattgatgtaaccggctcagcctctcaggtggaggagcagaggttgagaaccggcaaaggcggcgggcataagcacaaaggcgggatggcggggccaggtgaggcctgggacagtaattatattgtgggctctgataatgacagccgcaggacgcgaaactatacctctgacgaaggtgagcacgaccacgaatacacggtacccggtcacggtcactcagtcagcggcaaaaccgataacctcggagaaggtaaatcattcagcgtggtggaggctcacaccctgctgatgtgctggagccgcgtcgcctga

SEQ ID NO: 186261 - DNA, 933 bp, Klebsiella oxytoca
  misc_feature (789)..(798): n is a, c, g, or t
atgaagggaatgcaacggataaagaggcataagaactttatcaatgtcgtaaagtatgtgttgaagcctggttctcaccataaaagtgctcctgttgttatcggtggtaacatgattggtgattgtgcaaatgaacttatagcagagttcaacactgccagtgaacgacgaactgacatcgcaaaaccagcatggcacaactctcttagacttccgaagaatgatgaacttacaaatgctcaatggataaagatcgctgacgattatatgaatcaaatggggtttagtgatactcatcttcgttgctatgttttgcatgatgacagtgtgggtcagcacatacatatcattgctaaccgaatagattcggtctcaagtaaggttaacttaggtagacatgaaagccttaaaagtggtcgtataatccaggaacttgaaatcaaatacagtctcactatcacaaaaggccctgaaccactaaaacctacgtatactggaaaagaaacaaacaaagcaattcccaaaaaatcaaaaaagatttcccggaatgaagcaatgtttgaacaaagaacaggtgagatctgcaataagcagcagttacaaatgctccttgataaaagtttggcagattcaccagatgtgaaaactttcctaataaggcttgaggaagcgaaagtttcatgtacagctaacatagctaccactgggagaatgaacggattttctttcgtattcaatggtattgcattcaaagcatctcaacttggcaaaaagtattcttgggtaaannnnnnnnnnagcctgaacgagacaactcactactacttgataccagcacagttgctactgctactgctactgctactgctactgctactgctactgctactgcaaaagattttgctgcaacggatataccaagggaaagcataa

SEQ ID NO: 186262 - DNA, 492 bp, Klebsiella oxytoca
atgaccgtcatgctgtggcgtctggatgtcggcgatatcggcggcgcgatggacatcgcccgctacgccttcaagtacggcctgaccatgccaggcaggcaccgccgcccgccgcagtacatgttcaccgaagaggtggcactcgccgccatgcgcgcccatgccgccggtgaaccggtcgtcatcagccagctactcgacacgctggcgctgaccgccgctgccgatatgccggacgaggtgcgcgcaaagctgcacaaaatcaccggacaggtgttgcgggataacaaacagcccgccgatgcgttggcccaccttaaacgcgcaatgcagctcgactgtcaggcaggcgtcaaaaaagacattgaacggcttgagcgagagctgaagcccagaccggcaatggtcgttaaagccccggtaagcgcgccgcgcgccgtgaaaaccacggcaccggctaaacgtggccgaccgaaaaagaaccccggttaa

SEQ ID NO: 186263 - DNA, 750 bp, Klebsiella oxytoca
atgagatattctggatccccaacttccagaaactgcgcaaagtgtcgtcgggcatggcctcacaaagccacctgcgtagcacctacttttcaacaccgtccaccctggcgcatggcgcttatccgttctggtcgggggaattatttaaccgtggccgcgccagcgccagcgagcgggtcgacatcgatatcagtcatgacgccctcgccgctggcgtggcgtgtcccgatggtcagtggcgacagattgtcaccattgaggatgcactcgccgggggctgtacgctgttcaatctggagcagctccggcaggaaaacagcgtcgacgacttccgcaatctgtttatgtgcgagttcgttgacgacaaggcctcggtgttccccttcgaggatttgcaacgctgcatggtcgacagtctggaagagtgggaggactttgcgccgttcgccgacaacccgttcggctcccgcccggtgtgggtgggatacgacccgtcgcacagcggcgacagcgccgggtgtgtggtgctcgcgccgccggttgtcgccggtggcaagttccgcattctggagcgtcaccagtggaaaggcatggactttgccacgcaggccgaatccattcgtcagctcaccgaaaaatacaaggtcgagtatatcggtatcgatgcaaccggcctcggcattggcgtcttccagttggttcgctcgttttatcccgccgcccgcgatatccgctacacaccggaaatga

SEQ ID NO: 186264 - DNA, 156 bp, Klebsiella oxytoca
atgactttgcgcggtgttggagttggtgccgagaaaaatcagctttgcgccgttgttgccgatgacgatcgggtcgccggtcagttccacatcaacccggcgggcaaactggatgatgtactcacggaatacatacgcctgcgttttacttgctga

SEQ ID NO: 186265 - DNA, 804 bp, Klebsiella oxytoca
atgcatggtcgcccaggcgacgtccgcgtgactggcttcctcggtgcggctggcctcataggtggcgctgcgcccgctgctggtcatggtcttgcggatagccataaacgaggtcgtgatgtcggtggcgctgacgtcatattcgagacagccacggcgaatcacgtcttttgctttcagcaccatcgcggttttcatttccggcgtgtagcggatatcgcgggcggcgggataaaacgagcgaaccagctggaagacgccaataccgaggccggtcgcatcgataccgatgtactcgacgttatatttttcggtgagctggcgaatggattcggcctgggtcgcaaagtccatgcctttccactggtgacgctccagaatgcggaacttgccaccggcgacaaccggcggcgcgagcaccacacacccggcgctgtcgccgctgtgcgaggggtcgtatcccacccacaccgggcgggagccgaacggattgtcggcgaatggtgcaaagtcttcccattcttccagactgtcgaccatgcagcgttgcaaatcctcgaacggaaacaccgacgccttgtcgtcaacgaactcgcacataaacagattgcgaaagtcgtcgatgctgttttcctgccggagttgctccaggttgaacagcgtacagcccccgctgagcgcatcctcaatggtgacaatctgccgccactgaccgtcaggacacaccacgccagcggcgagcgcgccatgactgatatcgatgtcgacccgatcgctggcgcgggcgcggccacgattaaataa

SEQ ID NO: 186266 - DNA, 156 bp, Klebsiella oxytoca
atgactctgcgcggtgttggagttggtgccgagaaaaatcagttttgcgccgttgttgccgataacaatcgggtcgccggtcagctcaacatcaacccggcgggcaaactggatgatgtactcgcggaatacatacgcctgcgtcttactcgctga

SEQ ID NO: 186267 - DNA, 852 bp, Klebsiella oxytoca
gtgaacggggtctgccttgacgatgtgaaagtgttggggacccaccgcgtcccgttctacaccgacgcaggtagttacaacgtgattcacacatcctacgttgaaaagacctgtctggttgatacaacaacgacaactattgccggtaatcagttctataccgactatcaggacccgtggaacccatcgctgacaaaagcgccagcgatggtttgcgagggcggtatcaccgtcgacaggactgtcgtttctgctggcgtggctacacatccgttcagccagaaaccagcaacaatcaacggcccgctcatcatcaatccgttccgtgatgacacagaggactactcgaccgcgcagattgcagagtggaacagcgccgaggggaaaacggtatacctctatgactggcgccgtcagtacagcgtccagcgcccgatacgattttttgataacacacaggaagcattccagtattacaagggtgtctggacgccggttgtcaaatgcggctcagaagtcgtgacgctgaataccaccgtcggcacctaccgccgctcggggagactggtgcacgtgacgttcagaatcgaaaccacgtcaatggcgctgacgacaggtggcgcggtagtgatatcagggcttccattcacagtagccgcactgagtgacgggggattaacggtgtccccgataatctgcagtcgtgccggttcggggatcatcctcgcgcaaacgaacccgaccacaaaagagattctactgttaaccaatagctcgcctgccgctctctcaataacgggtggaaccggcttaactatttacggctcagttcagtacgtcctgacagaataa

SEQ ID NO: 186268 - DNA, 768 bp, Klebsiella oxytoca
gtggcgaacctgcccgaatcctacaagccgcttctggcggaagggtcgggccgttttcaggtgattaatatctggctgatggtgagtcagaccgccgatgtgcagatgattgcggacccgtcagtcattctggcgacggtggaagaagttcgccgggcggggaacaacgccaaagattatgccgatgacattgtttccaccctggagaatgagacgcgggaggccattacctcagcggtcagcaccgccattcgtgacttctgggaaacggaaaaccccgtcggcacggtccggttttacagccagcatgtggacccgaatgaacgctacccgtggtcaacgtggacgtataccggtgaaaacagaaccctccgcgtggcaaaagcggacggttcgaacgtcggcgccaccggcggcagcgatacggtcacccttcagcgggcgaatcttcccgctgtgcagattgatgtaagcggggaaaccagcgagcagcctgagcagaagctgacgaccacccgcggcggtattcaccatcatggtggtgtggccggtaaagatgacccctgggaaatcggcggggatgtgcggcagctctttaacccgaaagagccgggtgtgacggatgatgccggagagcacgaccacgaagtcacggtaccggcgcataaacacacgagcagcggcaaaaccgataacctcggcgagggtaaatcgttcagcgtggtggaagcccacaccctgctgatgtgctggagccgcgttgcctga

SEQ ID NO: 186269 - DNA, 774 bp, Klebsiella oxytoca
atgtggttgccatcttttaaacaaaaatctgtcaatgatatcgaaagaccgcgatttgaagttttacatatttgggatagaatcgatcctacaaaatactggggcacttgcatagtcgaaactatatatcgaagttctgttagagataattacccacatattacggttgataaacttagcactgaagagatagagattataattagccgtattgatgaaaaacctaagaaacaggtttcatttaaggcttggtatagcaagcattatccgatttccaccggtggtgaatattctgctgctgtttgtatcacaggacgtgatttatgtatcagagattcagaatatagaggtcatcgtattgggacatgggcgatgtcagaaattataaaatgggttaaacaatggcctgatgcatatgtgttaccaatattgatttccgaaactgatgcttataaagagaataaaaaacgacgggattttatttataaaaacatcggtgttgagtttaactattccaatgataataaaacaagtggtctttcctatcccatgcttgcctccgaattgaatgtaatcaactcttgggacaaagaatcggacaaacacggaaatattaaaacagaaccatttactgattttttgaacggccttattaatgatataaagggtttaactaaagaaaatgaagagttgcattcccttaataaaaaattagaatcacaaaatcattcctcaatgataaaaagggttattgatcgtttgaagaaattttag

SEQ ID NO: 186270 - DNA, 540 bp, Klebsiella oxytoca
atggccggttttcagcgcgtgcagcagcgcctcgcgggaaaagtagaacgtcgccccaatctggcgcgatttcagaatgtcacgaatgcggtgctcaagcccggctcggtgccagcggagctgatactcgaaagactctgcaaagaaaatctcttccagtttttcgatagcctcgtcgctgaaaaagttctttgtcggctttttgcggtcgcctttgttgcggttggccacgcggggattcaggtcagcttcgtttccggtctggccatagcgattaatgcgtgcaaagcgctccatctgccgggccagaaaatcggcgaccttgaaatcgtggggcgtcaggctgggtttcgcataaagctgaatcagccgggcctccagggtgctttcgacccggttcagcggtgcggttttgtcccactggtcgcgctgtttccagctctgcactgtggggcgtttggtctgcaacatgtcggcaatctgcggcacggagaacccctgccagtacagcaaagccgcctggcgtcgcgggtcgtttaa

SEQ ID NO: 186271 - DNA, 282 bp, Klebsiella oxytoca
atgacggccattcgtttaatggctgacgaggggcgcgcctggccgttactggatggcaccggcacgatttacggtatgtacgtcatcaataatatcagcgagacaggaagcctgttttttgctgacggcacggcgcgcaaaattgattttacgctgacgttaacccgcgtggatgaatcccttgcggcgctttatggcgatatcggcgaacaggccaaatcactgattggcaaggcgggaaatatggcctcgtcagtgactggcatggtggggattagctga

SEQ ID NO: 186272 - DNA, 291 bp, Klebsiella oxytoca
atgacggaaggtgaaaaaagcgtcctgtcactgtttttgatcggcgtgctgattgtcgtcgggaaagtgctggccggtggcgagcccatcaccgccaggctttttattggccgtatgctgctgggcggctttgtctcgatggtggccggggtggcgcttgtgcagtttcccgacctgccgcctgctgccgtgtgcggatttggctccatgctgggtatcgccggttatcaggcggtggaaattgcgatccagcgcagaattaaaaaaggggaaaacgatggcggtcattaa

SEQ ID NO: 186273 - DNA, 297 bp, Klebsiella oxytoca
atgaaaatgacgcgtttcgccgctggtatcgcgctgatttacctgatgctgtgcgccggttgcaccagcgcgccgcctgtaccaacgccgccgccggtgattgtgtacaacgcctgcccgaaggtcagcccctgcccgatgccgggcagcgacccgctgactaatggcgacctgagtgcggatatacgccagctcgaaaacgccctgaaaagctgcgcaatccaggtcgatacggttaaacaatgccaggatgaaatcgatgcaaaagcccaacagtctgcgaaaagccttaactga

SEQ ID NO: 186274 - DNA, 237 bp, Klebsiella oxytoca
atgagtcaagaaaaaataaaggcatttaacaatctccaagacatgtgtgttcagtccattaatatcaattctttcaactcattccagtcttgtagaactttccatttattattcgaagtattactaacgttttgctcttttgacgctccattaaaatgtgctgtactcatggctatcatctggcgaaaaataagcaactttcttataagtaccaatagtttctttagcataaggtag

SEQ ID NO: 186275 - DNA, 282 bp, Klebsiella oxytoca
ttgtggcgggaacagcagattgccgggggttttagcaagctggccgacgtgccggctgacgatctcgatggcgagagcgtgcgcgttttctattacctgcgtgccgtcacctcaatggcgaccgccacactctatgagcgttatcgcggtgtggatgccagcgccagaggcgacaagaaagccgacagcatcgataccactgtcgacgagctgtggcgggacatgcgctgggccgtatcacgcgttcaggacaaaccccgctgcatcgtgagccaaatctga

SEQ ID NO: 186276 - DNA, 141 bp, Klebsiella oxytoca
atggaacgattgctcttcaatttgcttgtgcatttttcccacctgaacacttttcagacagttcaaaaaatggacttcaaattgctaaaaaatagaaaaaataaatgttacgaaacctgcattttgaagggatctgattga

SEQ ID NO: 186277 - DNA, 588 bp, Klebsiella oxytoca
atgcgtagcccggacagatgcgcagcatcacctccgggaaagtctgtcactctgcgctcttttcccgggggcggcgcaaagcgcctgcccgggctacaggcccgcagactgctgaggatgcttagcccggacagatgcgcagcatcgcctccgggaaagtctgccgctctgcgctctttttccgggggcggcgcaaagcgcctgcccgggctaccgggccgcaggctgctgaggacgcgtagcccggacagatgcgcagcatcgcctccgggaaatactgccactctgcgctctttccccgggggcggcgcaaagcgcctgcccgggctacagggccgcaggctgctgaggacgcgtaacccggacagatgcgcagcatcacctccgggaaagtctgtcactctgcgctcttttcccgggggcggcgcaaagcgcctgcccgggctacaggcccgcaggctgctgaggatgcgtagcccggacagatgcgcagcatcgcctccgggaaagtctgccactctgcgctctttttccggggcggcgccgggctaccgggccgcagattgccgggaactcgtagccgggtaa

SEQ ID NO: 186278 - DNA, 582 bp, Klebsiella oxytoca
atgtttgctctggtcgatgtgaattcattttatgccagctgtgaaatggtctttcgtcctgatttacgtgggcgccccgtggtggtgttaagcaataacgacggctgcgtaatcgcgaggaatcacgaggctaaactgctggagatcccgatgggcgcgccgtatttcaaaatgaaatcacagtttgagcgtcatcaggtggcggtatttagcagcaactatgcgctttatggcgatatgtcccagcgcgttatgacccttcttgaggagctgtctcccgcggtgtatcaatattccattgatgaagcgtttgtgaatctcagcggcatccatcgcactgaggagcttgaagcattcgggcgccacgtgcgaagtacgctgctgcagtgtacaggattgacggtcggggtcgggatcgggccgacgaaaacgctggccaagctggctaattatgcggccaaaagatggccaaaattcgagggtgttgtcgatctctctttacaagccaggcagaggaaactgttggcgaaggttgccgtcggcgaaatctggggggggggcggcgcatggcgaaaaagctga

SEQ ID NO: 186279 - DNA, 1236 bp, Klebsiella oxytoca
atggaccttaataaaacaccacgcctgttaattatgatgttcatacagtactttatgcagggcgcctggaatatgaccatggggctggtattaagtacctatggaatggcgaccataatcggctcatcctatgccttgctcggattagcgacaattatttcaccgttatttattggtatggtggccgatcgcttctttgcatcacaaaaggtcatggcgatcctgcacttagtcaatgctggcgtgctgctgtttgttccgcaatttattgaagcgcaaaataccggcatgacgctgaccatgattttcctggtcggtctgctgttttatccgacaacggcgctggctaacagtatcagtttcagccatatcaatggggttaaatatttcccattcatccgcgtttttggcaccttcggctttatggcaatcggctttatcattggtgaaatgggctattccggcaacacagttacctggtatattgcggcagcttccggcgtcgtcctgggcttatattgcttcacattgccgaatacgccgccaaaagcaaaaggaaacgctttcgcgctgcgcgatctgttatgtctcgatgctctggcactcttcaaagatcgtagcttcagcgtgctgatgctgagtatctttgtcttaatgatccccaaaaccgcatattccgcctatattccggtctttttgaaagcgctggggttcgataatgccgcatcaatgatgcagatcgggattgcctgcgaagtgattttcatgttcctgctatcgttcttcttactaaaagccggctttaaaatcacgctgatgctgggtgccgtttgctggatcatccgcacgctgttgtttgctcatgcctcgctggatgccaacatgatgtttgtgctgatcggcctgatgttacagggattctgctgggactttttctttaccgtcggcgatatttatgttgaccgcaaagccgcgccagagatcaaagcgcaggcgcaaagcttgaggtttatcgtctccaacggcgtcgggctgctgtttgcttctaccgtttgcgggcagatttttaacagtaccgtgacagagcaagggccggaagcgttaccgcaatgggaaacattctggttagtttcagccggtgtcgccgcggtagtgagcgtcttcttcctgattttcttccgcgacgatctgtcaaaacgcaaaacggatctcgcattgaagaaagcgaactcctga

SEQ ID NO: 186280 - DNA, 318 bp, Klebsiella oxytoca
atggggttcccgtcaccggctaaggattacattgagaccacgttaacagtgaattctctgtgcaacatcaccgcaaactcgcgagttatcccaaccgaccgcgggtatgttgttctggacttatcgctgaaggtaaagcagggaagtattctgctcattcgttctgctggagagcttcagtttgcaaagctaatgggtagatcgttcattacggtagaaggagaatcgattgagggtgatgccatggatgaggttgaagtgctcggagttgcaacgcgcgtgatcaacgatatgcggcaggatgatagtcctgtttga

SEQ ID NO: 186281 - DNA, 183 bp, Klebsiella oxytoca
atgttgatggaatggtattttggttttggattgttgctctggattatcgctcaggtcacaggagcagatgaaacgaaaggtgtgctaaataacctctgtggacttttaatgtttgtagttctttggcccgtgactctcattacgattttaactgaaataaaaaaaagtatagtaatcaactga

SEQ ID NO: 186282 - DNA, 255 bp, Klebsiella oxytoca
atggcacttgttcaggacaccataatttatggtgcaaaagtcgaaaattgttatatcgccgtggggagcattacccttgccgcagacagaacggagatatatttcaacctgaatttctcagtaacaaaagagcacccgcctttattcacggattatttcacctgcccatacgacattgattgcggggaaatcgttgagcaggcctatacctatctgaaaagcctttcccggttttccggcgcggtagacgcatag

SEQ ID NO: 186283 - DNA, 2004 bp, Klebsiella oxytoca
atggcagaagttccactcccgacaccgacgcaggttccggtaccaagcaccgatatccgcaatgcggtatttgcaggcgcgaagcttgatgaagaggttaccggcactggtgaattctataccgatcgcctcggcgtgcagcgcctgaccaatacggggcgcacaaatctatttaatttatcccaacaggacagagaaagccggttcaatgcatttatccagaactcggggtatgaagtaatcggtgattacacttcaggccccctgaagattgaagaatataaccagctcattcgctataacaacgagctgtataaactcaccgcagcgacagatatcccgtttaccgcggctggtaatactgacgaaacatggaccggtactgacgctgcgcattttgtatctgtcggtgatgcagcgcttcgccaaaacctggaatcagatgaagagggtatgggtacctggctgagcactcacgtgcaaaatggtgttgttacgcaaaatctgcatgattttcttaattcctcaataaactttgttactcctcaaatgttctccagctttcaggaggcggcaacttttgcaagtgagaacaaagtgaaattacatatcggcccctaccagtacgatatttacgaaccgattgaggtgtggggttctctctgcattgagggtgatggtgaagatttttctaaactcatccagaaagcgggagcgactggcgatgcggttataatccagcaccttcaggatgtgaacgacaccgtccagttttcgggattttctgtcgagaccgagaaacgcttcatcctgaataacacagcgattaccgtagatggaacaacgcttataccgtcacaaggcgggcaaattccacggcgcacaaaggggcgtggcattttccgcaatctgcgcgtgtgcggtacggctgaaaaccgaagtgaaaatatcgggttcggcgtggggttcgatttgcgttcgctcggctggtacgacatggagagcattaacgtatctggctgtgcagagctgggtacagaatataaatcgctcggtattggcgttctccagcgcggcgggggctgggtggtagagattaatcagagccgactgcggttttataacctcgaatatgcctggtactgcccggactatgttgaaggtctgtttctggataaataccagtttgtgaatgtccgtaacggcattgtcggcggggtgcatgatgatgtctggtcgctcgacccagcgggaaagctgggcatgtaccagccgtttatcgggccgggacacattaacgcgtccgatgtggcaatttacatcaataacgtcagttacggcacggtaacggacgtgtttgccatgatgaatgataaaggcgtggcgacgtcagtgaatgccgctcatctgcgcggtggcatcagaaacagcgtacataacctgaatattctgcactacagcacgaacacagggttaagtcgtaagtcactcattctgaataatatctctgacagtttcgtctcgaatatgaactcagaaaccaaaagcgatgactacgaaaagcatgatgttgcgattcagtttgtgagttcaagtttccgcaaccgggtggacgggctgaaagttgcccgtgcaaataccgccgtactgaacggcgaggggtgtggtaataacgtcatcaacggctatcgtacagatggagtcgcaatcccggttactgataacgccggggatatggccaggggaaattcagaggggcgaaacgtggtgttcagtcctgcgggagcggcagaatacaccatcaccgttacaccccgacaacagttcagtcgccgccctttgggtatgtcatacagcgtaatccgcccaacagctgtcccaatgcaggtcttttatgacagagaatcttcgctgcctacagcgattgtgctgaaagtaaaacctatcactacatcgacattaccgaatatcgaatgtgaaatcagtattactcttcacgattaa

SEQ ID NO: 186284 - DNA, 270 bp, Klebsiella oxytoca
atgaatttcttgcataaacgaatgcatctcaacgccggtgatacggtcgttgtcgactgctctcatcagtgcaatattttgctgatgactgattcaaattttaacaactaccgcagtggaagagggtttcagcatcacggcggtggcggcttctttaaaaggctgcctgcgcatttaggtgttcctcattccggatactggaatgtcacccttgatttaggaggtggttcggcgtccgtgcgccattcaattaccgtcatcccagcatag

SEQ ID NO: 186285 - DNA, 180 bp, Klebsiella oxytoca
atgaaagtagcaatcgaagttaatggcgaggttatctggtaccgcgataacgagactctggagggcatggcgtctttgggttatttgaaggacggcacacagcagaaaatcattgccgcccttgaggatgccttaaatcaggcaaagggtgaacagctatgctgggatgacggtaattga

SEQ ID NO: 186286 - DNA, 3432 bp, Klebsiella oxytoca
atggcagaaaatgctggcgggatttactacgaattagacattgagtatcaaaagcttcttgttggtcagcagaaaataaatcagcgcctaaatcaacttgaaaccggatttgataaaactactacagctgtaaccaataccgaccggtcaatgtcaaagctttctcgtgtggctgtttcattggctgcggcgctttcagttcagcaggttgctcaatatgccgacgcttgggcaactgtaagtaataagcttgccaactcagttaggcccggcgagcaacttgctgaggtaacagagcgtgtattcaatattacacaacaaagtcgtagcagcttagatgcaacagcatcactctatgcccgtttagagagggctacgcgacagtacggaactagcgctgatgatatcgccagacttacaaccattatcaataaaggttttgtcgtttccggcgcaacggcgcaagaagcagaaaacgcgatcattcaattatctcagggccttgcgtctggagcgctccgtggcgaagagttcaattctgtaaacgaacaaggtaatcgcctgatcgtagcacttgctgactctctgggggtgagcacgggtaaaatgcgcgaactggcagcgcaaggcaagctaacaacagatgttgtggttaacgggcttttgtcacaaggggcgcaaataggtgatgagtttgccaaaactaccacaacaattagtcaggcgcttcaggttgctggtaataacatcactaaattcttcggagaaaatgccagcgtaaaagcaggagtgtcgatattcaatgatgcagttattggccttagtgaaaatattgatatcctcggcgtagcgctaacggcagtatctgcggtaatgggtggaagatatgtaggggcgttaactcttgccacacaggcgaaattatctggtgcatcagccgcaataaaacaacaggtagctgaatataatgccgccaaagcaaccattgccagtgcggaagcggaaattaaaaattcccaggcaatcattgcctctgagcaggccaaggcaaggcagttagctactcaggccgctattaataaacaatatggtttagccgtttcctatcaggctgagtatgcagcaatacagaggaacataacagcagctgataatgccgcaacagcagcaaaagaaaggctggcggtggcaactcagcaggcatctgtagcaaacagaacttacgccgcatcggcaactcttgccaagaatgctctttcattaattggtggccctgccggcgcagcaatgttggcggctgcagctgtttactacttctaccaaaaagcgcaacaagcgaagcaggaaagcatcgattttgctgattctcttgatgggcttacagcaaaaatgaaggaaatgagcgcagctcagatttctgcggccatagcaaaaaccgaacagtcgatcatagatcaacgtgacgctgtagctgatttgaatgatggttatgacaagctcttaaagaaaaagtttcgcattgaacaagcttcagcaataagagacgttacgagtgaccttgctgaagttaatagagaactagcgatccaagcgggaaaggtggatgaggccgaaacgaagttaagtcggacaacaagctctcttgggttactccgatctcaggcgaacggtcaatttcgtgaagggatagatttacttagaagggatggtcaggaagctggcgtagtggctggcttaatgaataatcttggagatgcgataaatttcgcatcacgagcgaaggagaaatttaattcttccagccttaaggttgaacgacccaaaaatgttcaggactacttagataagttacaggagcaggtcactcttcagagtgaacttaacgacagaaaacgagcgcaattaaaggctgaacaggacatcagaaatcttggtggttcggaggccgacgttaatcttgccagggatagagcagctgcagaatatgatgcccaacaggcgcagcaaaacaacaagaaggccaccaaggaatcaacatcagaagccaaaaagcttgccactcaacaggaatcggtaaaccaaaaacttgaaaatctgcgacagcagtctgaacttgcggccagttcaactcaagaattgagccgagacagtgcaatattgcgtgcgcagcagtcactcggtagcgctgcaactcaggcgcagattcaggaggctgggcaatacgcagctaaagcgtgggatgcggcagcagcggcaaggggcgtaaccgaagcgctcaaggccataccggagcaggcggagaataaatcctacgcagaatccatgcagaacctcaaggcagccctgaatgccggggagattgaccttcaagagtacaatactgctaccgagaaaatggcgctggagcaccagaacaacctcgccaaaattaacgcgcagaaaacgctaaacccggtagctacggcccgcgccgaagttgaccctgtgcagcaactggtgaacgagaataaccagaagttagccctgatgcagcagtaccagcagcaggaacaggcaatactccagcagagctatcagcagggaaaaatcagttacgaccagttcatcgctgccaaatcagccacggatgctcagtatctggcgctgagaacggcgcaggagaatcagtacaaccagcagatgacagaggcccaatggcagctactcagccagcagagtctcggctatgacatgctgacgagtgcagtggacgcctttagcgggaatgcttccaatgccattactggactgctcacaggcacaatgtcagcacaggaagcgatgcggtcacttgggaatactatcctgaacagtgtgatcaacagcatcgtgcaggttggcgtcgaagcgctgaaaaactacatcctcggccaaaccctcggcgcggcttctgttgcttcttctgttggaatggcagcaacgacggcttcggcatgggcgcctgctgctgcgctggcatccctcgcaacgctaggaacaaacgctgcgccggcatctgcaggcatcacatcaactgtaggacttgcgagcggtcttgctctggctggcgcgcgctataatggcgggccggtatcggctggcagcatgtatcaggtcggcgagaaaggtaagccggagatttaccaggccagcactggcaagcagtacatgatcccgggtgacaatggaagggtcatcagcaataaggatatgaatggcggtggtgggctgaatgttcaggtagtcataaacaatcaggcatccaatgctgagccgcaatacatgggagcaactcagagtgacggcaattatgtgctggaattcctgatttctgatgcggaacgtaatggtccttacatcagcacgctacaatcgacgcttgggttgtctcgtaaagcaaatggagcgttttga

SEQ ID NO: 186287 - DNA, 1029 bp, Klebsiella oxytoca
atgcgaatttttattgcacttagccttttaatggtctcaggcgcagccgtggctagtgaaaagttagtatgtgagtatgcagtgggggcgttgtctacaccgccaaatctgctcactaaaggtaatgcgaatgtgatattcgatggaaaatcctttacggcatataggctggatggttcttttgttgtaaccccaccattgactgaaaagaaggatgggatgatttttgttgatgataaaacaaaggtctttgctgccagtctggacagatctaactttgcagtgtctgacagaataaaaaaaaccgcagagcagtggtctaaatgttcgggcggaagttcttacagcaatgaaagagatcaaatatcaggctcaccggtaagcacgtctgaagttgaaaagataaaaacattgcccggcattgctgaattacattgttctaactttattgataaaagatactctcaatccaaaaatatatcctataaaataaaacccagtatattcgctaaaatgccgttagtttctggtggagagattacctgtgaggtgtcaagtaatatatggaactggaatgaaacaaatgtaatggcagtagaacatggtcttattgatcgcataccttatacattatatcactcagacggttcagggaatgttggcgtggcagataaggcgtggtcgttcgggtgcgtaaaagattcaatgacggataaaaaacaatgcgagataaccaatgaaagcattaggataattaaaaaggcaaaaggatactcagctattgtaggtaatgagcatttcccagggcgaagtgcatatataagaattgggcaaggtaagcccattgcttccggtgataatggctactttccgaatgtcacaggaattgtcggcagcatcaatggcagtacaaagttgctcacaaggtataccaaatggccttatgattatgttgttgatactgaggttaatacaattggatttgagcaagcaaattttcttttaggtaagacattgtcagtatactaa

SEQ ID NO: 186288 - DNA, 243 bp, Klebsiella oxytoca
atggcagaaaaggaacaggcagccaggcacaagtacaaccaggatgcactggacggcgaaattaacctcgatcgccgcggtcaatggatggttttttctatcgccataattattcttgtcatggctgccgtgtttgcatggaaagggaatactacttttgcaggaacgctggttgccatagacctcataggccttgtgtctgtttttgttctcggaagacgccagggtaagaaagatgagtaa

SEQ ID NO: 186289 - DNA, 195 bp, Klebsiella oxytoca
atgaaagcaacagtacgccgctacttacgcgctgccggaagcattcttgatatcgctccgtcagccagatacacaaggaacgtcaaaaaaaccaccgatatgcaggaaatcgaaaaagatttctatcgcataggtggtgatttcaggcgttcacttgcaatagcaaatgccgcaaagcaagagccaacaagctag

SEQ ID NO: 186290 - DNA, 579 bp, Klebsiella oxytoca
atgaatgaccatttaagtcagcgctatcttttagaatgctttgattatgcgcccgatacagggttgctttcctggagacgccgtccaatccatcatttcactagcgaagtcgctatgaatcgatttaatggtaggtttaccggaaaggaggcgtccagctcgttgaacggacgatatttatatgtttgtgtgaacaagaagcatcacctttgccataggattgtatggtgcatgcatcatgggtcatggcctgaagacgatgtggatcatattaacggcaataagtgtgacaaccgcatagaaaacctacgatgtgtcaacagaagccaaaacatgtctaatgttggtatgcaaaaaaacaacagctctggttttatcggtgtcttttgggcgtcacgggaagcaaaatggatggcagttgttgcgcataataagaaaaacatccgtttaggtatgttcgattgcccaatacaggcggctcttgcatacaatgcaggcgcgctgaagtatcactgctcgtatgcgcaaaagaaggttgacataaacatcaaagcgattgagcttgcaaggtctgaataa

SEQ ID NO: 186291 - DNA, 399 bp, Klebsiella oxytoca
atgattaccacagaacaggctaaggaatatctggactcagtcggtatcaagctgcctgatttcattctcgccgcactggttgaacaggtgaacagcattcaggagtgtctggatgcgcattactcaccggcaactgcattactgattcagtcttatctgctggggcttatggcgctggggcagggtgacaaatatatatccagccatacggcgcctagtggcgcttctgagtcgttccgctatcagtcattcgctgaccggtggaaaggcacactcaatctcctgcgtggtctggacaaatacggatgcgcgacgtcacttattcctcccgacccaaccaatactgcatttgctggtatctggataggtcgtggcggctgcatgtgcgggagtaagtga

SEQ ID NO: 186292 - DNA, 573 bp, Klebsiella oxytoca
atggcactcaccgacaaacaagatatgttctgtcgcgagtacctcatcgatttaaacgccacgcaagcggctattcgggcggggtacagcgctaagacagctaatcgcaccgcgtccgaaaacctgtcaaaacctgacatccagtccagaattgctgaactcaaagtgcagcgcaatgatctggttggtataaatgcgacatacgtcctcaatcgtctcgttgagatagaccagatggatgtgctcgacatcctcaaagatgacatgagcctgaagccagtaagcgagtggccttcatcctggcggagatatcttagtggcttcgatgtggctgagatgttcgaaggccgcggagaagagcgtgagatggtcgggctgcttaagaaaattaagtggccggataaagtgaaaaaccttgaactgctcgggaagcacatagatgtgatggctttcaaagagcaagccactcatgaacacacaggcaagaacggcggccccattgaaatggcaacgctgactaaagaagaatacaaagcagcgcggcgggagatgttggaggatgacgactgctga

SEQ ID NO: 186293 - DNA, 219 bp, Klebsiella oxytoca
atgaccagcaatgcacgtaaaccaaaattcaaaattggtgatattgtttatttggttactggcagtccgagtatgtcagtcgctgagccgctgattgaatacaaatctggtagcaatgcgttccatggtaactataaatgccaatggtttgcgggaaagaaacttgagcatggaaatttccctgaagaatcattgaccacaacaaacccaaagcaataa

SEQ ID NO: 186294 - DNA, 273 bp, Klebsiella oxytoca
atggagcaacatgactactcagatatcgctttccagataagtacaattcatggatttaaaaagctatttattgccagtggggctggagtggacattccgatcgatcatggaagataccttgtagcggtgaatgaacgtggagacagactggcagataaatcaccaaatggaacatggattattgaaggtaaattttatgctggctttgatccaaacatcccaaaatataaacacgcgatagaggttgtccacccgccgcttgaaaataagtaa

SEQ ID NO: 186295 - DNA, 351 bp, Klebsiella oxytoca
atgatccgattaaccgcaatcatcagcgctgtagtcatcctgctgcttacctgcattttctcatggcgttctggctggaattctcacgctgatcatatcaacgccctcgcggcgaagaagaaagagaaagccgaaaagactatccagccagttgagcaaaaggccgctgccgctacagaagagggcaaggtcatctaccgaaccataacccgcgacgtggtgaaatatgtccagtctccgaatcgtactgtgtgccggtttgacgatgatgctgtgcagctgcgccagcgagctatcgacgctgccaataccatcccaggatttgatgagccctccgtgcaaagcaagtga

SEQ ID NO: 186296 - DNA, 684 bp, Klebsiella oxytoca
atgaacagtcagcaactggaatacgtacgtcagcagctcattgtggcgaccgcagatatgagcggggcgacgaaagggcagctggtagctttcgccgagaacgcgcaattcaccgcgacggcccgcagccggggacggaagaaaattaccgacccggtcaccggcaggaagattaaccctgacggccctgcgatgagcggcagtcagtcccgcgccaagggatcatctatcgcgctggtggggccggttgagttcgtgaccgcatcgtggcgccgcgcggtgctgtcgctggaagaccatcagaaagcgtggctgctgtggaattacagcgagaatatccgctgggaacaccaagagacgatcacccggtgggcttgggaacaatttagcgagaagctggccggcattcgcattgcaaagaaaacagttgatcgcctgcggcagcttatctggctggcagctcaaaataaaaaggctgagataaccggcaggggagacctctattccccggcctcaatggtgggaatcaagccagataactggtgccacaattattcagattactggcaggctatgatggacatctaccagaaacttgataaccagtccttactctctgtttctcgatcacgttcacaacaaaaagcgactttttcgcagcaaggtcttgcaaaagtcaattaa

SEQ ID NO: 186297 - DNA, 612 bp, Klebsiella oxytoca
atgcgtaaaccatcccgccgtaagtgcaaagtatgcggtgaatacttcgtgccgaaattccacgatatccggatccgctggtgctgcccggagcacggcgcaatcctcgcgatggaagagcgcgaaaaagagaaggtgaaggccgcggctaagcgcatcaaagagcagaaagaggccgagaaggcaggtcgccaacggcgctctgcacgtcgcaatgagttgaagccgatccgtcactgggtgcagatgactcagcgcgctttcaacgactggcgtcgcgaaatgctgctggccgccgggcacggctgtatctcctgcggaaccaagactgcttttgcctggcatgccgggcattaccgcaccactgctgccgctccacaactgcgcttcaatcccgataatttgtggcttcaatgctccgcctgcaatgttcacaaatccgggaacattgaggcgtaccgtgcagccttggtcgagctgatcggcgaagagcgcgtgctggcgctggaatccaacaacgaaacccaccgatacacccgtgaagaactggacagtatacgctccaaggccagagcagaccttcgcgcgctgaaacagcaggaggccgcatga

SEQ ID NO: 186298 - DNA, 531 bp, Klebsiella oxytoca
atggataataatttcattacaaaagaattgggcgaaaagcatacgtatcctcaagagctctttgaagtagccatgaaatttacgatggcattttattactgcgaaaatcatttcttttcaagatattgcaagataaaaaacagcgataattacagcattgacatcttggctattgttaaagacgattgcaatgcagtaatagctgatacttttcagtactttaagggaaggtatgcggatggggaacgagctagagagaggttgcatgcccttgtcatgcaggaggaaggaggcgacctttctggatgggctaaaacgattgatgattatttgaaaagatctgaagggaatgttgttgcaatgctgtcggtttgcttgatgattattattaggctgcgacacaatcttttacacgctaacaaatatgaagcaatgagtggggagccttcagaacaacaacaattattaagcaaaggttatcgcctactcgcaagccttttatctgcaagaaataaaaattcagagaattga

SEQ ID NO: 186299 - DNA, 228 bp, Klebsiella oxytoca
atggctgttgcaagaatgctttgcgttagctcgaccaaacctgactggtttactccaggtgccatatacgactcagaaccacgcggtgccgatatttgcatttgtggtgacaacctcgtttcagacctcaacaaagaggactggtacgaaatgagccagcgcgcagatgggctgtggttcttaatcggttttcagcaggcaattttatttcggggagccaaccaatga

SEQ ID NO: 186300 - DNA, 321 bp, Klebsiella oxytoca
atgagcaagccactcagttttattgataatcattttcttagcgttcgtgtcgatgaaatttgctcctcagttcctacttttacgactaaacaggcggcactcgatgccggttcattgttcggctggcgctcagctgttcgcattgagaggcgtttcgaaaaggtttgggttgtcggtaagcaatgctttcagggcgatcatgccgcaggccttaatttcgattcctggcgatttcctctgcttaagtgggtgcaagaaaacggcgtaactaaatgcccggtccttactgtccgtaggtttaaacaggagcgtgccgcatga

SEQ ID NO: 186301 - DNA, 846 bp, Klebsiella oxytoca
atgactatcacactacaggcagtaaacgagctcattcagtcgctggagagtgcgggcgagctgtcgatcaaagagaggaagtatctggacgttatgcgctgggcgattcgtgttgctggcgagcgtgatgcggcgctgaatgcagagcgcgtatgggaaagggtcatgatggaagtttgcggcgaggatggccctgcgtcggtagccaacgaaattcgctcgttgcgggccctacgggatacggcaattcaggcgcttaagtctcaggtcgagcagctggctgcggagaatgtggggctaaaggctggcgtaacttacttcgcatactcgcctgaatacggttttgattatttcaaagacaagcagatcgctattgatacagcgcaggaagagattgacgcttaccgtgaggacgcagacgacggctggagcgaagatgttcagcgcgtgtcatggggtgttgtgattcaacaggctcaaggcttcgatgctcaagggctgcatacctccgatagccagcacacctatcaaacatgcaattaccggttggttgactcggtggcaacccccgccaccgatcgcagcgtagccgggattaaggctgatggggtggagtggattgaaggtcacgaacccagcgagtttggccgctactgggttcggtatgaaaccgatatcgggccgcagtactgctcggcgcaatggatggaatataacttctgcgcgtcaagcgataccaacatccataaaatctggctggcagaccactcgcgctcaatcaacagcctgaagggtgtaactcattacacaaaaattcccgcaccgttagaaggaggtgcattgtga

SEQ ID NO: 186302 - DNA, 543 bp, Klebsiella oxytoca
atgcaatcacttacgtatcaacacaataccggattcgttccggccgcgatgataaatcgcgctcaaacaaaacagggtcacgatcatgacctgatccgagatgcagtaagagcctgggcgtcggcaatcgacaatcaggacgtggtatcagctctgattatcaacgagtaccgggagcagggcggcgatttaatcagctttcctgacgatataagtcgggcccgccagaagctgtttcgcttcctggataaccggtttgattccgatcagtaccgcgagaacgttcgccagctgactccggcaatcatggccgtgctgccgctggagtaccgccatcgacttcttccagaagacagtttcatgtcccggttagcacgccttgagaaggaaacgagcgaggcgaaagtggccgttgcgatgaatgctccgcgtcaccagaagctcaaggaactgagtgaggggattgtagagatgttccgtgtcgacccggacctgaccgcgccgctgatggctatagtcacgtcgatgctgggggttatgtga

SEQ ID NO: 186303 - DNA, 231 bp, Klebsiella oxytoca; identical to SEQ ID NO: 94512

SEQ ID NO: 186304 - DNA, 264 bp, Klebsiella oxytoca
atggatattaaagatttgcttaaagaaattgatgtcctggaatcaaacataagaagcacagataacctattggaagtaaccggtctgcacgggcttaatttgattgttgtggcagctaacaacacctcatacatgggcattgcagatcaagaattcctgatagaggcgctcaaatcgaaaagaaatgagatgcacgagagactggtgaagctcatcgatgcggtcggcgtggttgaaaaagttattgatggactggtcgcttag

SEQ ID NO: 186305 - DNA, 138 bp, Klebsiella oxytoca
atgaatcacgatgaatttgatgatggtcgttgcggtatgtcgcgccggtgctggcgaaacctgacccgcatctgcattggcttaatagccatatacctgctggtttccttgtttgtgatggaggccctccatgattag

SEQ ID NO: 186306 - DNA, 207 bp, Klebsiella oxytoca
atgattagtcaacactacggtacccagaccgttaaccgcggtgccgttcagccaggcatgctggttaagcatcgcgatggcacctggacggcatcagctcacaagcgcggcaagttgtaccttcaccgcggatgcgagcgtacctacaccaaagccctgcttatcgaaatctaccttgatggacgcggaaacggcttaagcaactaa

SEQ ID NO: 186307 - DNA, 915 bp, Klebsiella oxytoca
atgagctttgatcttattcagttcgtcaaacagcaagagtcgctgtttaccaatgcccttactgaccagagcctgacgtgggcaaaagaatgccagtttgcgattcagttattccagcgcaatgacaaattggcccaaacggcaattagcaacccggttagcgctcagaacgcaatcatcaacgttgctgcggtcggcatcagcttaaaccctgcaagcaagttggcctacctcgtcccgcgtgacggaatggtatgccttgatatcagctatatgggccttttgcatatagcccaatcagccggggtcattaagtggggtcagtgcaaactggttcatgcatgtgacgcttacgaaactattggcctcgataaagctccggcccataaatacaacccattcgccactcctgaagaccgcggcgccgttatcggcggctactgcacggttaaaacgtcagacggcgattacctgactgaagagatgagtctcgccgagattgaagaaatcagaaaggtgagcaaagccggcacatccccgaaaggtccctgggtcaacttctggtctgagatggcaagaaagacgattgtgaagcgcgcatataaatactggccgcgcgctgaccgtctcgataacgccgtggacatgctcaacgagagcgaaggcatctttaccgagccgaccatgccttacacatctgaaagtgaagttatccagtcgaaagaaaacgctgagcaagagctgaacaatacagtccgttcgctttgcgaagacatgaagcaggcaaaaaacatgcatgccctcaaaacccatttccaggctgcctacaaaatgacagcaggaatgcggctgcagcaagaggttcaggctgtttatgccaggtctaaagccaaatttgaagaggttacccaatga

SEQ ID NO: 186308 - DNA, 483 bp, Klebsiella oxytoca
atgacagctctttatcagatcgccaacgacttcgccaagctgaccgactcaggaatggaacctgaacagatagccgacacccttgatgggattgagtgggagcttgaagcaaaggttgagcagattcttgcgatctgcaaaaacgaatctgcttatgccgaagccctgaaagaagagagtgagcgccttactgagcgcgccaaagcggctgaaaaccgtgtggaaagaatgaaggattatgttgccttatcactagaaactgccgggaaaaagtccctgaaagctggcattcatcaggtaacggttcgtgctccgtctaagtctgtcgaaattactgacgccaacgcattgccgcccgaattcgtcgaatacgagacaaatataaagcccaacaaactggccataaaacatcaaatcgaagctggcgtggatataccgggggcgcaaataaaaatcggcaagccgtcactgattatcaaatag

SEQ ID NO: 186309 - DNA, 1908 bp, Klebsiella oxytoca
atgaccggaaatacccccctgatttacggctctatttgcagcggcatcgacgccgcgaccgtcgcctgggagcctctcggatggaaggcggcatggttctctgaaattgaagcgttcccgtctgcggtgctggctgaatgctggccagaagtcgtgaaccttggcgacatgacgaaaatcgccgcagcggtgcgcgccggtgaagtacaggcaccggatgtgatggtaggcggaacaccttgccaggcgttcagcattgccggtctgcgtaatggccttgcagatgcccgcggtcagttaactctttcatatgtggaattagcgaatgcaatcgacgacaagcgcatcgagcgcggagaagaagaagcaatcttcgtctgggaaaacgtccccggtgtcctcacaagccacgacaacgcctttggttgttttctggcaggacttgccggagaaagctgtgaacttgagccatcagggggaaagtggacgcactctggttgtgtgtatggaccccaaaggacaatcgcttggatcgtcaaagacgcccaatatttcggagtggcccaacgacgcaagcgtgtgttcgttgtcgcaagtgctcgaaaaggattcgatcccggccaagtactttttgagtccgaaggcgtgcgccgggatactccgccgagcagagaaccgcaaacggcagttgccgcccttactgcgagaggcgttggaacgtgtggcgcagatgacaatcaggcacaagcagggcacctcctcgctttcggtggtggaaacacagggggaaacattgatgttgccgcctgcctgacagcaaagggccagcgcattgatttcgaagtcgagacttttgctgtgcatggtactcaggatcctgacactaattttgagcttgcgcatacgcttggacgcaatcacgggcaggagaacgccgtgttcatcccggtggatgacgatgagggcgttaccgagcgtgacattcggtttatgcggcaaatacatggtcttcctgttgacccgccatgcatcgcattcaatagcaaagattatgggcaggatgccgaggaggaaatttccccgacgctgcgcgctggatgcagtgttagtggaaatcaaaatgcaggatcaccacccgcaatagcatattccatgcaagttcgccgccttatgccagtcgagtgcgagcgcctgcagggatttcctgataaccacacgttgatttcgtggcgcgggaaagaagcgaccgaatgcccggacggccctcgctatcgcgctatcggcaacagcatggcagtgccagtgatgcgctggatcggcgagcgtattgcggccgcgttgccagttaaaaaatctgcgggtgattatggcggcagcaaaactccagcggatcagcgcgacctctggcgcacaccgcccgccctcttcgcatgcctgaatgctgagttctgcttccaacttgatgccgccgcagcgcagcataacgcgctgtgcaaggagttcatcacagccgagcagaacacgctggagacttcgtgggctgattacctgagcattcccggctacgtctggctgaacccgccctacagcaacatcacgccattcgtgaagaaggctgccgccgagagcgccaatcagatcggcacggtgatgctggtacctgctgacacttcggttggctggttcaaagaggcaatccagaccgctagcgaggttcgctttattaccgcggggcgactggcatttatcaatccagtaaccggcaagcctgtcagcggcaataacaaaggctcaatgctgattatctggcatccctaccctcgtacacactgccatttctcgacggtagagcgtgatgcactgatgaatttcggtgcccgtttgatagccaagcgggaggcagcatga

SEQ ID NO: 186310 - DNA, 219 bp, Klebsiella oxytoca
atgacgccagaagaaaagaaaaatgcgctcagaagcatcgcgcgcagggctaacgatgaggttaaggcaaaacggcggtcatcccccgctttaagttgcgacgagatatcacgcccgatcctcaacggatgcttgccgctgataatgcagcttgggttaacgccacgccatctctatgtggagatcggtattttgaacggaaagataaaggagcgctga

SEQ ID NO: 186311 - DNA, 1173 bp, Klebsiella oxytoca
atgaagtggtttgtttttatgttcgttgccatcgcggcaacgctgatggtcccccctgaggccaatagcggatcgtttgatccggtaaccggcgcttatactacggatccgataaccgtcacgctgacgccaaagaccgttacggccagcgcgtcggtaattcctaacggtgaaaaagttctccttagcactactacgtctaccggacgaggaggcttgttgtactggggagcgcatacctacaccactgggagtgccgctattgccacatcagccgccgccgcaattaatgcctacggagcatgtactgcaaacgccagcggaacttctcttaccgtaaacggatgttttagctttttagatgttaccttgctctacatgggtaaaagcgcctcttgtaaatctttttttagttcatcgaacaatataagtctttcgacaagtagttcgttaaccaattttggcgagttcgttgagcttgcttttagccctggtacaggaatttatgggcggttgaacaggtcagcaataacaaatgtcaatacgacttctgtcacctatccaggtcaaaccatcttaccaccgcgttcctggggcctccccaatacaaatctgaaggcgacactatctgccaaaacgccgccatatacctatctttattgcagcgtatcgcaaagtagcgccgccaggctggacaatgggactgcatcttcccattctttttcgatagtgcctgcggccagtaaaccggcctatgccccgacgattagttactcgccggcgctccctatcaccaatactatcaccgtaaatatccgcaatattgccgcgattgacattctccccagcacggtattcaacaccggaactatctccgcctggcgcacaacctatatggaacaaccgcttaccgttaccgggcagggcaatataacccgcaattttggcgcatctgagaacttcaacattattgaatcctggacctgcgcgacaacagggcaaatcgattttcgaataaagcgcgacaataccaacaccaatgtctgttcaggggcaacctatacccataccgtgcaaacgccacagtcgttgacggcacagtggaaagcgttaaatcagacctcatcaggcgcatggagcgcggcggcaacggtcacttttacgctgccctag

SEQ ID NO: 186312 - DNA, 189 bp, Klebsiella oxytoca
ttgcagccggaagtcctgctggccgatgcgctggagagcggtaaactggtgcgcgtgctggaggcgtataccccgcagccgaggccggttcacctgctctggcggcaggatctgcggccgctgccgaagctgacgcgctttgttgaacatcttctgcaggggcaacgccagaacgggcggaccgcttaa

SEQ ID NO: 186313 - DNA, 348 bp, Klebsiella oxytoca
atgccatcagtaaaggccagcgatacgctggtgaccgccggggcggttcagtcgaaccatgtacggcaaaccgccgcggtagccgcgcatttgggtctgaagtgcgcagcgctgctggagaatcccattcaaaccgcggagcctaactatctctgcaacggcaaccatctgctgtttagcctgatgggctgcgagtcagaaagggttgcagaactttacgatccggatgcgcagctgcagcagttcagcgagcggctttcggcagaaggggcgaaaccctatattgttcccgtcggcggctcaaacgcgctggggtgctgggctacgttgagtgcgcgctggagatag

SEQ ID NO: 186314 - DNA, 1530 bp, Klebsiella oxytoca
atggaaccaacattgtcattaaccgtgatgttctgtgctgcagtgggtgcttcagtatcagaatcgctgtcagaatccgagtcactgtcggaatccgagtcactgtcagaatccgaatcgctgtccgaatccgagtcactgtcagagtccgaatcgctgtcagagtcggaatcgctgtcagagtccgagtcactgtcggaatccgaatcgctgtctgaatcggagtcgctgtcagagtcggaatcgctgtctgaatccgagtcgctgtcggagtccgagtcgctgtcagagtccgaatcgctgtctgagtccgaatcgctgtccgaatccgagtcgctgtctgaatcggagtcgctgtccgaatccgagtcgctgtcggaatccgaatcgctgtcagagtccgagtcactgtcggaatccgaatcgctgtctgaatcagaatcgctgtctgaatcagaatcgctgtcgctatccgagtcactgtcagaatccgagtcactgtcagaatctgagtcgctgtccgaatcggaatcgctgtctgaatctgaatcgctgtccgaatccgaatcgctgtcagagtcagaatcgctgtcgctatccgagtcactgtccgaatcggaatcgctgtcggaatccgagtcgctgtcagagtcagagtcgctgtccgaatccgagtcactatcagaatcggaatcgctgtcagagtcagaatcgctgtcggagtccgaatcgctgtcagaatccgaatcgctgtcagagtcagaatcgctgtcggagtccgaatcgctgtcagagtcagaatcactgtcggaatccgagtcgctgtcggaatcggaatcgctgtccgaatccgagtcactgtcagaatcggaatcgctgtcggaatccgagtcactgtcggagtcggaatcgctgtcagagtcggaatcgctgtccgaatccgagtcgctgtcagagtcagaatcgctgtcggaatcagaatcgctgtcagaatccgagtcgctgtcagagtcggaatcgctgtcggagtccgaatcgctgtcggaatcggagtcgctgtccgaatccgaatcgctgtcggagtcagagtcactgtcggaatcggaatcgctgtcggaatccgagtcgctgtcagagtccgagtcgctgtccgaatccgaatcactatcagaatcggaatcgctgtcagagtcagaatcactgtcagaatccgaatcgctgtcgctatccgaatcggtgtcagaatccgagtcactgtctgaatccgaatcgctgtcagagtcagaatcgctgtcggaatccgagtcgctgtccgaatccgagtcactgtcagaatccgagtcactatcagaatctgagtcactatcagaatcggaatcgctgtcagagtccgagtcactgtctgaatcggaatcgctgtcggaatcagaatcgctgtcgctatccgagtcgctgtcagcatccgagtcactatcggagtccgaatcactgtccgcatctgagtcagtttctgaaatcgaagagtggtga

SEQ ID NO: 186315 - DNA, 204 bp, Klebsiella oxytoca
atgaaagaaaaaaacaactttatacgtctacctgaagttctggaaagaacaggattttgtaaagcttggatttatcgtttgattagtcgtgacgaattcccttcacctataaaaatcggtgatcgtgcaatcgggttcgtagaaagtgaaatagatgcgtggattgacgaaaagatttatttatcaagaaataaagccgcctga

SEQ ID NO: 186316 - DNA, 159 bp, Klebsiella oxytoca; identical to SEQ ID NO: 99612

SEQ ID NO: 186317 - DNA, 492 bp, Klebsiella oxytoca
atgaaactatccctgacggtggaagctgataccgttaatgtactggctcttaatgggggccggatcgccgtggatatcgacggtattgaactggcagaactgattgatgtggtctgtgacaacggctgtacattacgcgtgactgacacaccaggggaaccgggagttgaaaacccattcccgtctgcctcccggctgaacggcatacagtgcagcatcacccatatcacccgtgaagataacgccattctggacctggtctctcttcagcatcacgacggcactaacagcgactggatattgtacaccagctacggctacctgctcagactgaatgcccgtcgtcatccggtactggagctcaggcgaatgggattatcaaaaacctgtcggtggttagtggcgaccctcatacactctggctacaccgatatcatccatcttgatgcctccggagaacgcctgcctggtttcgccacttttaactggtag

SEQ ID NO: 186318 - DNA, 381 bp, Klebsiella oxytoca; identical to SEQ ID NO: 99610

SEQ ID NO: 186319 - DNA, 363 bp, Klebsiella oxytoca
atgcagaacacgacaactgcagcaaaccatgatattgccgaaccctggtggggccttaagcccaccgttatgccgtgctttggcgcacggctggtacaggaaggtaaccagctttactacctcgccgaccgtgccagtttcaccggtcagttctgcgatgcggatttacgccacctcgaccaggcatttccgctgatactcaaacagctggagctaatgctggtttccggggaactcaatccgcgccatcagcactgcgttacgctgtatgcgaaaggactgacctgcgaggccgattcgctcggctcgcatggctacatctatatcgcgatttacccgacaccctctgaagcaaccgcgtag

SEQ ID NO: 186320 - DNA, 480 bp, Klebsiella oxytoca
atggaacaccaactcccgctgtttgcccgtgaattatcttccaccgaccagcaaaccatccgggcagccttaaccctgctggcgcaacagttacgtgaacccggggcgtcatttacctccagccacgccgtccgtgactggctgcgtctgcagctggccacactggagcgtgaagaattcatcgcgctcttcctcgataaccagcaccggctgattgcgtacgaaacccttttcaccggcaccatcaaccatacgcaggttcattcgcgagaagtagtgaaggcggcactgaaacataacgctgccgccatgctcgtagcgcactgccacccttcgggacaggctgagcccagcgctgccgacagacaggtcacagaacgtctcaggcaggcactggacctggtggatatccgccttctggaccatctggtcattggtggtatggaaatcgtctcactcgctgaacgcggctggctataa

SEQ ID NO: 186321 - DNA, 480 bp, Klebsiella oxytoca
atgaacaacaccctcaaacaaacccgttccgtggcgggttcgctcacctcaccacaaagtgatacatacggtatcgtgtgcaccctcgtccccgatgaacaacgtatcgtcttctggccacagcattttggcaatatcccgcagtggataacccttgaaccacatatcttcgcgtggatggagcacttctgcgaaggctacaccggcggcatctggcagttttacacactcagcaacggtggggcgtttatggtgccagaaactaatgacaacgatgaaaaatggatgttgtttaacaacatgaacggcaacagtgcggagatgagcgcagacgctgccggggttgcggtctgcctcatcgcatacagccatcacgcctgtcgtactgaatgcaatgccatgacagaacactactaccgtctgcgggactatgcactcgtgcatgctgaatgccacgccattatgcgcattattgactga

SEQ ID NO: 186322 - DNA, 819 bp, Klebsiella oxytoca
atgaaactggccagtcgttttggacgcgttaaccagattcgccgggaccgtccattaacccgcgatgaactcatacagtatgtccccagcgtcttcagcgaagacaaacacgattcccgcagcgaaaggtacacctgcattcccaccattacgctgctggaaaacctgcagcgtgaaggctttgaacctttctttgcctgtcagtcacgtgttcgtgaccagagccgtcgggagcacaccaaacacctgctacgtcttcgtcgggcgggacacatcacggggcagcaagtaccggagattattttacttaactcgcacgatggcagcagctcataccagatgttacctggctacttccgaagcgtctgtaccaattcactcgtctgcgggcagtcactgggtgaaatccgggttccacaccgcagtaatgttgttggaaaggtgatagcgggtgcttatgaagtactcggtgtatttgaccgggtggaggaaaaacgtgatgccatgcagtcactgcttttacccccgccggcacaacaggcatttgcgaaagcggcacttaactaccgatttggcgaagagcaccaacccgtcactgcatcccaggcactgagtgcccgacgctggcaggatgagagcagtgacctgtggactatctacaaccgcctgcaggagaacctgattaaaggtgggctaccgggccggacaacgaatggtaaccgtgctcacacccgtgcagtcaaaggtatcgacggcgacgtgaagctgaaccgagctctgtgggtcatggcggaaagcctgctggagagtctgaagtaa

SEQ ID NO: 186323 - DNA, 213 bp, Klebsiella oxytoca
atgacctttcttaaaatgctggtgaccgctctgggtcaggccctgacctggtgcggcggatatcaggccagactgtatattgaaacctgctttcgtcaggccggttacgatgatgatcgtatcgatgcggccagagaggcagtaacactactggttagcgcgctgataactgcgctgatggcacaaatactgcgtctccttgaccccttctga

SEQ ID NO: 186324 - DNA, 357 bp, Klebsiella oxytoca
gtgaaaataacgacgtgcctgatggccttttcgctcgcgctgtccacaccggcattagccgcaaagccactgccggtaaaagtggaaaccagcaatcttgtccatcctgcagggacccgctacgcaaaagtggtggtgaccgcgctcgatgacagcgtgaaagtgcaaaatattgacgtgaaccggggcaactgccgtataaacaactacaaatcaccgttttcgacgaaagaaaccattttacctgccctgttgcactatggtcagtccgtcagtgtgagcttttacaatgactgtgtcgcttcagaggtggtcatcaccaccgataaaggtgcgtggcgctacacctaccactaa

SEQ ID NO: 186325 - DNA, 468 bp, Klebsiella oxytoca
atgaatatgaagaaaacagggctgatggctctcagtctggttgcgttgctccccgtcacttcacatgctttcggtaaccccgacacctggacccgaggatggggtcagggggtatcggaatttgtcatcaccgggaaagggcagtcacaactgctgttgtcctgtgaggatgagggtactcgggcagccactatcaccctgaccgatacacgtggacgtcaggtcagtatggatacggatactgcaatgcaggtaaaaatcgaccagcaggaagccgtcgatatcagtgagtcaggtagccgggtgggtgagaacaatctcgattttgcctggagtcagttacgccagggtaaacaggtgactgtttcaggaaccggtgttacccccaccactttcgcactgaagggtgcccgcgaggtactgcctgaatttggtacccacggctgtgtctcaaaagcctcactctga

SEQ ID NO: 186326 - DNA, 276 bp, Klebsiella oxytoca
atgtacatcccccaaaaggcgcgcttcgcacagttacttccaggcatcctgctttcggcattcatactcagcggctgtggcgataaaaatgaacgtgaatttatcagtggctgcaaatcaggtggtggaaccaccgccatctgcggctgtatttacgatgaccttaaaacgaaatacacacacggagaactggagaaaatgaaccagcaacctggtgacgtcccaccagactttatgaacaacatgctgaatgcggccagacagtgcagaaaataa

SEQ ID NO: 186327 - DNA, 615 bp, Klebsiella oxytoca
atgtctttcaatatcagtagttacggtcatttaaaccgtaatgcagtgttacgcatagaagaaaccctcaacagggcattacaggaatatccacgtacactagtgctaagagtcgatctccgccttcctgatttcaatcagtacgattctacgttaatgacccgttttatcgtatccctgaaaacacaggtcaatgctgatttacacagaaggaaaaaatcaggtagtcgtgtacatccctgccacgttcgccatatatgggctcgtgaaaaggggttgtcaggccgcaaacattatcacgttgccttgttcttcaaccatgacagctattgtggtcccggacgttatagtcctgaaggtgagagatatcgccataacttggctttgatgataatggaagcctgggtcagggctttacggctggaacactttaatcattatcagcagtattattccctggtggaatttaccgctaagccttatcacgctttaaatatcaaaagtccgtattttgagactgactaccaggaggtaaaagaacgtctgttatacctggcaaaagaattcagcaaaagcagtgatggttttcgaaactttggttacagccagagctaa

SEQ ID NO: 186328 - DNA, 219 bp, Klebsiella oxytoca; identical to SEQ ID NO: 99598

SEQ ID NO: 186329 - DNA, 1581 bp, Klebsiella oxytoca
atgagttcacgcccaggagagcacaatattcctctggcaagtatcccggggttaccgaacagtcagcaacagggtttccctgtgaacagctttccacccgtcttacgaaataccatcaccgcgttacacgaagacacaggtatccctccagaattaattggcaatgttgtactggctgctgcatcgcttgcctgtcagtcacatattcatgtcatccctccatattctgacaccgctgaacaatgctcgctttatctcctgacgattgctgaatccggtgaaggtaaaaccactatcaataagcaggtcatgaaaccgttttatgagttttcggcaagaatgaaacgggaattcgagacgcagctagtggcttacaagcgggaccacaatatttggaaaataaaacaacaggccctcaacagcaatctgcgacaggccattaaaaagaattactccggtgagaacgaagcaaaggcaatagaagaacatgctgaaacagagcctgaacgtcctctccgtccggatttcatttatgaagatgtatctctgaaagctttggtggaaggtcttggtgaatgccctgaggcgggatttattacagatgaagccattactttttttaaaagctacctgaagaacaatccaggcttgctgaataaagcctgggatggcgaggcttttgattttcgccgtgcggatggtgagatttataatattgtcccctgtctgactttttctctgatggcccagcctggtgtctttatggcttatattagaaagtatagtgatgttgccagaaacagcggttttctgtcccggtttcttttttcatgggttaacagcacactgggtaaccggggtgaaaataccagccatgacttaaccaatgcatcactggcacatctgcatacaagaatcaatgaattactggaaatgcagagagcccgctttaaccacaaggatattgttaaaaaacggcttccgctcaatgaggaagctaaagcattctggcgcaaacagtggtccgaaacagaaagaagaatggcgaccggcaatgaatgggagcacattcgtgatatcgctgcaaaatcaggagcgaatacgctccgtatcgccgcgatactgacattttttaataacagcgatgcagagaccattgataaaaaaacaatggaacaagcctttaccatcatggactggtacatccgacaggccagtcagttattttatcccatgtcagaacgttatcagtttgaacaggatgtccgggaacttcatcagtggttaaaacaccgttttgaccagtataatggttgtgcatttcccaaaaatgaagttgagaaatacggccccagccgactgagacgcacggaaaaactgaatcccgtcctgaatcaactcatcggtcagagaatgcttaccgtcatcaaaatgcaacctcatggggcactgtatctctcgtacctgaccaccgacggttattatgttgtaccggagaatatacaaccctgcagtccagtcattatggtccagagcgccgataatactcaaaaccccgcgttcattgttgacctgtattaa

SEQ ID NO: 186330 - DNA, 915 bp, Klebsiella oxytoca
atgaaaatagagccttccatcctgccttctcttgcatggtttgcgctgattgcgcgctcaggcagcttctcaaaagcagcctcggagatgggcatcacacgggcagcattatcccagaatttaaaagcgcttgaggaacgactcaacaccaagctggtttatcgaaccacccgtaatatgtcgttaacagaagaagggcagcgtctttacgatgtgttgatatccgcatttgggcagattgatgatgctctcagagatgtcggtgatacccggcttgaacctacaggtttactaaaaattaattcctcccgtgttgcggcaaggatgcttgtagagccgcatatcagtgaattcctgcaccattatccaaaaacacagatagaactgatcatggatgatggattgtctaacatcattgctgaagggtgtgatatcggcattcgcctgggacagagtctggcagagcatatgacggcagtgcctgtatccccgcggataaaactggttacagtggcatcaccagactatttacaaaagaacggtattccacaaacgcctcaggagttgtgcaattacaattgtctacgattacgacataaaagtagtggggcacttccatcgtgggagttctcacataaagaaaataatgaagagttcgaaattgaagtctcaggtggatacgtttccaacgacgatgaaagcatgatccgtatggccgtcaatggtactggcatcattcaacatctggattttgctataacggagcaaattaacaaaggtcagttacaacaaatccttgaggactggtctacatcattccccggattctatctctatgtgtcatcacgagtaaggatgccttctaaagttcgtgcattcatagacttcatggtcgagaagcgttcgaaagattga

SEQ ID NO: 186331 - DNA, 921 bp, Klebsiella oxytoca
atgaagactgtttcgattaaacacacgtactgggatatagctgctgacatctatttccctgctgatttcgatgagacaaaaaaatatccagcaattatcagcgctcacccgattggaagttgtaaagaacaaacgtcaggcagtgtgtatggcgcagcgctggcaaaatccgggtttattgtgattgcgtttgatgccagtttccaggggaatagcggtggagagcctcgttatctggaagatcccactatgcgggttaaagatttcagtattgttgttgattatctggtgaccctaccttatgtcgatgacgatcgtatcggtgtgctgggtatttgtggcggtggtggatatgccattaatgcagcaatgactgagcgtcgaattaaggccattggtaccgtcactggcgcaaattatggtcgtcttatgcgtgaaggatttacagcgttcgatccgattggtgcgctcgaagcaatggcaaaacaaagaaccgctgaggctcgtggaactgagcttcgtgtggatgatttgttgccaccctctccggaggctgctgttgcagcaggattgacagaaacagacttgcttggtgcaactgaatattaccgctctccgagaggctatgcgccaaacggtgttaaccgggcgcttttctctcatcaaactgtcgccgtggggtgggatgcatttcatctggcagaagttctcttgacccagccgctgatggttgtagtaggggataaagttggtgcatttggagcgtatcgtgatggctgtgaaattattggtcgggcagcttccaaagataaagaactggtcgttgttgaaggctggtctcattatgacctctacgacaaaccagaacctgtcaaacaggcacttgataaactcatccctttctacaaaaagcatttataa

SEQ ID NO: 186332 - DNA, 636 bp, Klebsiella oxytoca
atgacaaatgtgcttgttttaggtgccaatgggcaaattgcccgttgggtgatagatatgctatccactcaaactgatattaaaatgacattgctgtatcgcaaaccaacaaaaataaaagggaatgaacctgtaaattcagaaattattattggtgatgcgtcagatcagaagctcatggaccaacttatggcagggaaatatattgtttatgcaaaccttgcaggaaatgtggacgaacagatggaagtcattacttcagcaatgaaaaaaaataacgtgaccagggtgatcagcattaatacccttggcatttacgatgaagtgccaggcgctttcggtgagtggaacaataaaaccattggagagtatttccctcgctacaggaaagctgctgacattctggaagcgtctaacctcgactataccatcatcagagccgcctggctgacagatgagaatgaagtcgattatgaggtcacacaaaaagatgaaccatttaaaggaacagaagtttccagaaagagcgtagctgatcaggttgtcaaaatcataaataacccatctcaaatgattaataaaaatattggattgaataaacccggtactaatggaagtaagcctaaatttatgtaa

SEQ ID NO: 186333 - DNA, 1149 bp, Klebsiella oxytoca
atgagaaataaatttacatcattattcaccccttattccctgggcgaaaacatagaattacgtaaccgtatcgtaatggctcctatgaccacatggtcagcaaatcctgacgggacgatatctgatcaagagctggcattttatgaacgacgctcccgggatgttgggctggtaataaccgggtgtacctacgttacgccaggtggtatcggatttaccgatgagtttgcagcgtatgacgatcgattcataaacagtcttgaaaaattggctactgcggcaaagagtggcggcgcaccggccattcttcagatttttcatgctggcaacaaggcgcttcctgaacttgtaccaaatggtgatgttttaagcgccagtgcatcaaatgcccaggctggtgatttcaatagtggtaaaaccctgagcagggaaatgacggagaacgaaatccaggcaacgattcaggcatttggtgatgtgacgaaaagagcgattaaagccggtttcgatggtgtagagctccatggtgcgcatggcttcctcctacagaatttcttctccccgctgtttaatcatcgttccgacagatgggggggcgatcttgagaatcgtatgcgtttcccactagctgtattacaggaagttaaaaacgcagtttacgaatgtgcggcaaaaccgtttgtcattggctacagaatttcccctgaagagtctgccaagggcggattgcggatagaggacacttataagctactggatcgtttgatctcatccggtgtctcttatatacatgcctctctcgtgagtattaatgatagctatcccgttgataattcaaacggcccgagaactattgaactgctattaaatcatattgccgggagggttccggtgattgctgcgggaaaagtgcgcacccctgagcaggcgctggaagcactttccttaggtctccctctcgtcgcagtaggaaaagggctggttattaaccctgaatgggtttctttggctaaatcaggtcgaagtgatgaaattcagactgcacttgatcccaaattcgtgccagaactatctattccagacaagctttggagcgttatcaaggcatcaaaaggaacagggtggtttcctgtaagagatgtcctgtaa

SEQ ID NO: 186334 - DNA, 1191 bp, Klebsiella oxytoca
atgaaaaaaaataaaattaatattgataaattgatatatctagatcaaaggatcattgttaatgagttccagcagaaaacccctatgatcaaacgtgacaaagattatacgttatgggttgacatcaacaatatcaaacctgtagatttatactgttacctgcaagctcgatttggaaagcctaacgggattcaatcattgttccgagagtacgactcatcaaaccttattcattgggattacacgtttgattacgaaggttatcggatcacaattatgtgtatgacctatcgcatagagatacataaatcaatagatttccaagaccagaaatatgcaaaagacgaattcatcaaagatttaaaagatgattttaggaattatggaaaaaaaatctccacattcaggactaaagtggaaacgtggcatctattcataaatcctttcaaaagaataaaaaccgctattgattcaaatttcgtagagttagataacttaaagattaatgaaataaaataccccgaattcaataaatttaataatagaacaaagaaagaaatgtccatcgctggagagaagttctccaaagccaatacgttaggcattaacatttccttaacactacctatatatgctgaagcattcattaattttttaattttcaccctcgcaaaagttaatgcatatgaaaataaagaggattatgaatcgtttatacgtagcccaataaatgaacgcatgagaaacttgcatctcaagtgtaaatatttccattgcgctgttgattataacaataatgaggcatgcaaagaatttcaatcgataatgaatatcaggaatgaaatgttacatggaaatgtaaacccaaatactaatcattttgataccgtatattttgatgacaggactccgctctttgctaaatttactgatttagcttttgactcctaccttgcatctcaaacaggaattgaatatcatactttactgacaagatatgagagcatacaaaacttcatttcttatgttttaacatgtttggatttaaatgccgccaaacaaattatggatatgttagatgaaccctaccctggatggaatccaaaaactaaaagattaggaaaacttttcgcagataaagcgatcgactttcaaatcgatataggcaaaaaaataaaaattatttattaa

SEQ ID NO: 186335 - DNA, 1464 bp, Klebsiella oxytoca
gtgaaatttgtggatatagagtggggaagtagcgaagcaaaaggcgatggcaatcttaaagattatttttatgagtttcctgggtttgatatgatcatgaaaggaaactacagatatataatcggaaggaaaggtacggggaaaacagcagtaattgaagttgttaagaataaagttgataaagaccctttagcgttctatgctgaaatgtctctgaaggatttcccaataacaattcttaaggaacttagagacaagggtttcgaggggaaggcccaatatgttcctgtctgggaatttcttatactttctcagatatgtaggacaataatatatgaggataacggaacatcttcaatcgagtctgtagatgatttaaggcgattttacgaagataacgatattgagaatctttcagcaacgcaaacccttacagttatgaaagaacgaaactctaagtttcagatatcagccttattgaaatacctccaggctactgttggttttgacaaaaaaaaatctatgactatggttatggatattcactatcaaaagatttcactcgcaatcaaagaactaataaaaacaattaacacacagtctgtttatcatgtttttctcgatgaactcgacgaagagttcaaatctggagataaatctaataagacattaatactttctttgttaagggcagtggaaaatcttaatacatattttaccgataacacttccgtttcatttaggccgttagtggctttaaggagtgatatttataatacacttcaagatgataatgacacaaataaattacacgacttcatatttaagttagattggtcaattgatattgaagatacaaaagatactgatatgtctatcattaacatcattaataggcgaattaatttttctgatgaaggtaaaaattgctcatggccagacattgtaagggatgatgcaccagattatataaaaggcggcatctggagctatattacatcaagaacatttacacgccctagagatgttataaaatacttaaaaatatgccaagataaaaatcccatccatgatctttctttcaaaaatgtcgaatcatcagagtctacttactctgagtggttctataatgaaataaggaatgaaatttatacacacttgccagtatgggatgaatgtttaaacgtatttcgagatgttggctattttaggacaacgaaagatgaatttataagacgaatacagaccaggccaagagttaataagtacttacaagatagtgggaagaccgctgatgacttaattgaacaattgtttaactttagtctcattggaaatatagatgataaaggcaggtggagttttaaatataaagacgatgatgctttatggaataacgaggcagatttaatactacactttggcatttcaaaaaaatttagattgccaacatacaggcgttga

SEQ ID NO: 186336 - DNA, 1977 bp, Klebsiella oxytoca
atgaaattgacccccatagtgaaaggtttagccatagctggcttgttgtcatcgattagcctgtcagcatgggcggaagtcgctgcaaaagaagcgaccgctgccaccaaacaagccaacgaagccctctataaccaactccccttctctgataacaccgatttcaccaacgcccataaaggttttattgccgcactaccgaccgaagtgattaaaggcgaacagggtaacgtggtatgggatccgcaacagtactctttcatcaaagaaggtgaaaaagcccccgataccgtcaacccgagcctgtggcggcagtcgcagctgattaacatcagcggcctgtttgaggtcaccgacggtgtataccagatccgcaatctggatctttccaacatgaccatcatcgaaggtaaagaaggcattaccgtcgtggatccgctggtgtcggcagaaaccgccaaagtgggcatggatctgtattacaaaaaccgcggtaagaaaccggtcgtcgccgttatctatacccacagccacgttgaccactacggcggggtgcgcggcgtagtagatgaagcggatgtgaaatccggcaaagtgaaaatttacgcgccgtccggctttatggaagcggcggtggctgaaaacatcatggccggtaacgtcatgagccgccgcgccagctacatgtacggcaacctgctgaaaccatcggccaccggacaggtcggcgccggtctgggcaccaccacctcggcgggtaccgttaccctgattgccccaactaatatcattgaaaaagacggtcagaaagaagtcattgacggtctgacctatgactttatgctggcgccgggctcggaagcaccgtcggaaatgctgtggttcatcgaagagaaaaaactgatcgaatccgcggaagacgtcacgcataccctgcacaacacctattcgttgcgcggcgcgaaaattcgcgaaccgctgccgtggtctaaatacatcaacgaagcaattgtacgctggggcgacaaggccgagattattatggctcagcaccactggccaacctggggcaacgaaaatgtcgttaacctgctgaagagccagcgtgacctgtaccgttacattaacgatcagaccctgcgtatggctaacgaagggctgactcgcgatgaaattgccgctaaattcaaactgccggatagccttgccaacacctgggctaaccgcggttactacggctctgttagccacgacgtgaaagccacctacgtgctgtatctcggctggttcgacggcaacccggcgaccctcgacgaactgccgccggaagaagcggcgaagaaattcgtcgattacatgggcggcgccgatgccatcatgaagaaagcgaaagaggattacgaccagggtaactaccgctgggtagcccaggtggtcagcaaaatcgtcttcgccgatccgaaaaaccaggatgcgcgtaatctggaagccgatgcccttgaacagttaggctaccaggcggaatccggcccgtggcgtaacttctaccttactggcgcgcaggaactgcgtaacggcgtggtgaaagggccaaccccgaacaccgccagcccggataccgtgcgcgcgatgaccccggaaatgttcttcgactatctggcggtgcacatcaacggcgagaaagcgggtaacgcgaaatcggtctttaatatcgatctcggcagcgacggcggcaagtataagctggagctggaaaacggcgtactgaaccataccgccaacgcagaagcgaaagatgccgataccactattgccctcaaccgcgccaccctgaataagatcatcctcaaagaggagacgctgaagcaggccgtcgataaaggcgacgcgaaaatcaccggtaacgccgataagctcaatgaaatgctgggctatatggacaagttcgaattctggttcgacatcgttgcgccataa

SEQ ID NO: 186337 - DNA, 438 bp, Klebsiella oxytoca; identical to SEQ ID NO: 105071

SEQ ID NO: 186338 - DNA, 1032 bp, Klebsiella oxytoca
atggcgaccatcaaggatgtagcattgcgggcaggggtctctactgcgacggtttctcgcgtcatgaatcagactgcgtgggtggagccggttacccgcgagcgcgttgaaaaagcgatgcgcgagcttaactaccgacgtaacgccgccgctatcgcgttggcaaagcgcagcggcaatatgcttggcctactgaccggtaatcttgcagaccctttctttgctcacctggctcgtggtgtggagagcgttgcccgcaagtggcagtatcgcctgatggtgtgcagcggagggcatgatgaggcaatggaaaaagccggtctcgactttcttgtgaatcagggttgcgaggcgattgtcgttcacgccagccgtctgtcagaaaaagaactcctgcgctacagcgcccattttccggcgatggtaatagtaaatcgctatatcgccgggatggcgaaccgttgcatctggctggaaaacagcgccgccgcgcgtgaagccacccaccatctgcttgcacaggggcaccgttgcattgcctgtgttacctccgatcttcctatcatcgaccgtcaggagcgtcttgagggctatcgccaggcgatggcggaatttggcatcacgccggataaacgctgggtaatcagcgttccctttaatgaagaaggcggagaacgtgcggcgcacctgctgcttaatagcgctatcccctttaccgccgccgtgaccttcaacgacgtgatggccgccggtatcatgcgcgtactgcaccagcagggcatcagcctgccgcagcaactgtcgattgtcgggtttgatgatgtggtgctggcgcgctacctgcatccggcattgaccaccatgcattacccggtcgagcagatggcatgctgtgcagcacagctggcaattcagatccaggaaggggcagccattctgccaagcgccaacagctttgcggcagagctgattatccgtgactcagtggcgcctgcccccgcgtctctgcgtccattcaccgtcaagtgttaa

SEQ ID NO: 186339 - DNA, 1452 bp, Klebsiella oxytoca; identical to SEQ ID NO: 105073

SEQ ID NO: 186340 - DNA, 1167 bp, Klebsiella oxytoca; identical to SEQ ID NO: 105074

SEQ ID NO: 186341 - DNA, 504 bp, Klebsiella oxytoca; identical to SEQ ID NO: 105075

SEQ ID NO: 186342 - DNA, 1221 bp, Klebsiella oxytoca
atgcccttaaatgcgcgtcaagtcgagactgcaaaacccagagacaaagcctacaaactcactgatggcggagggctctatcttatggtcaacactaacggttcaaagtactggcgcatgaagtatcgatttggcgggaaagagaaaaagctctctttcggaacctacccgaccatctcacttgcggaagcccgaactaaacgagatgaagcaagaaaggtactagcaaatgacaaggatccaggagaggtaaaaaaagccgcacagctcgccaaaaagctatcagttaccaacacatttgaagcaatagctctcgaatggtacaacgcaaaagtatctggctggtcaaagagttatgcagattacgtcaaccgaggttttaaaaataatgtctttccctttctaggctctcagccagtgaatgaaattaaaccactggagctattatctgtattgcaacgaatggaaaagcgaggagctccagagctcgcaagcaaagtacgccagcgttgcagtgaggttttccgctacgcgattgttacaggtcgtgccgaatacaaccctgcggctgatcttggtagcgctttgcaaggccatgataaacagcactatcccttccttaccgctactgagcttcctgattttttacaaaagttatcaagttactctggaagtctaattactcttctcgcaacccgtttgctcatgctgacaggcttgagaacagtagaattacgtctggctgaatggagtgaaattgactttgataatcgtatctgggaaatccccaaaactagaatgaaaatgaaacgtcctcatgtaatcccgttatcaactcaatccttgagcgctcttcgtcaattggaagaactgacaggaacctacccgcttatttttgcaggacgaaacgatgttaacaaagcgatgagtgaagctagcatcaatatggttataaaaagggttggctacgacaagagagctactgggcatggtttccggcacaccatgagtaccattttgcatgagcaggggtttaacactgcctggattgaaatgcagcttgcacatgtggataaaaactcgattcgtggaacgtacaatcatgcgcaatatctggatggaagacgagaaatgatgcagtggtacgctgattatcttgataggttggaaggtacaaataccatcggtaaatcatgccgtggtagttttagttttatttaa

SEQ ID NO: 186343 - DNA, 1227 bp, Klebsiella oxytoca
atgctttgcagcatttctaaaataaatattccaatcccatactctaggaaaagagttgaaattgaattaaacggaagaagtttaattattacaggaggtaatggctgtggaaaaaccagctttataacagccatttacaattatctgaaaaaagggattgatgaccctcaaaataatgacatccagcatttattaaatcaaaaaagatcctatgagaatcaattaaagacaattggtagagatggtggaaattataattattaccaacaaagattaaaggaatgcgaatctcgattagaagaattaaataatttcaatattgaaattagttctcttgacaataaagatattcgctctttgcttaggtttcacagtgcaacaagacaatccgcaatctcatcaccaagccaagctccgaaacactccgtgcttgttgaagaaaacaagcactttgctaatgataaggatggcagccaattctttgaaagctatttgctgagtttaaagaaaaatcagagttatgcaatagcttttgataaagatgaaaatgaagcaaaacgcatcagcctatggtttgacaaaattcagttagatctgcgctcactatttgaagatccggatttagttctagagtttgatacaaaagatgagaagttttatttacatcaggatgggaaagacaaatatacctttcagactttatcagctggctattcttcaatattgagtatttacactgatttaataatgagagttgaaatgtggggtgtttcacctgataacatacaggggattatatttattgatgaaatcgatgctcatttgcacgtatcattacaaaaacaaatattacgatttttcattaaatcatttccaaaaattcaatttatcgtaacaactcactctccttttgtggttacgtctgttacagactccgttatttatgaccttaccgctaatgaacaaatcatagatgtttcttcatattcatatggtgtagtgatggaggaaattttcggagtcctgcctgattctcatgcattaacagataaactaatccacatcgaaaatttagttcaaaatataacagaagaaaacataagcgagttagagaaagttatttcatctttggcatctgaaaaagaaaacatgagtaatgatactcaagcctttcttgataccgcacagttaaaattaattaaaacaaagaaaaacattagtaagtag

SEQ ID NO: 186344 - DNA, 654 bp, Klebsiella oxytoca
atgtttaatgtagtgaggtcaatgccagctcccggttcactgttgactcaaagaaaatatgatggtgatgatgttcactcagctcttcaggagtgtttttatgaaaaatgttatttatgtgaaacaaaaaagcctttagatataaatattgaacactttgatcctcatatgggtgatgcaagtaaaaaattttcatggaataacctatatttagtatgctcacgttgcaacaatatcaagcttgcaaaatatgataatcttcttgactgttgctcgataagtgtatgggacagagtaaaattaactcccggattttctccaaaagcgaaaggatttattatttccccgcaatattcggatgaaaaaacactggaaaccgcacaattattaaatgatatttataacaatgacaatacgatcaataaaagacttacagctcgttctcttcgagcacaggtagttcaaatcacacacaagctaactcagcatatgattacatattatagcgaagattccacagatgaagaaaaaacagatgcaattaacaggatgaagattatgattaaaaaatcctatccttactctgcattttgtcgctggatgataaaagatgatgaagatttagataaattattaacacctcttatggactaa

SEQ ID NO: 186345 - DNA, 441 bp, Klebsiella oxytoca
atgtttgactcgattttagttgtatgtacaggcaatatttgtcgctcaccaattggtgagcgttatctacgtaatagtttacctaaaaaaataattgattcagctggtaccggagcacttgttggaaatgaagctgatgaagcagccaaaaggattgccattaagcatggtctttcgcttgaggggcataaaggacaacagtttacctcagcccttgctcgaaaatatgaattaattctcgttatggaaaaaagtcatattgagcaaataggtaaaattgcgcctgaagccagaggcaagactatgctatttggacattggataaaccagcgtgacattccagatccttatcggaaaagcgatgaagcctttgcctctgtttatgagctgattcaacaggcaggtgctctttgggttgaaaaattaggtaaaaataattag

SEQ ID NO: 186346 - DNA, 2166 bp, Klebsiella oxytoca
atgacacctgttacgaatgcttctaaaacaaaagattcagatgaactcgatttggccagaattatcggtgagctcattgatcatagaaaattaataatttctgtaactgcattatttacgctactatcgctagtatatgcattattcgctactccagtgtatcaagctgacgcgatgatccaagtcgagcaaaaacaagcaaatgccatattaagtaatctaacgcaaatgttacctgatagccaacctcagtctgcaccagaaatagcattattgcagtcaaggatgatacttggtaaaacagtagatgatttaaatctgcagacaagagtaaaggaaaattatttcccaatatttggtagaggttgggcccgtttattaggaataaagccaggtattattcatatatctaggctttacataccgggtgcaaatgcagatgatgctgtaacattgaatcttactgtcaattctgatagccaatacacattatcaaatgatgaattctctattaaaggaaaaattggggagttagttgaagataaaggaatttcgatcaaggttgatgatattaatgccgtacctggtacagagtttaccatatcgtatgttactcgtttaaaagccatctcagatttgcaagagtctttttctgttacagatcagggaaaggatacagggatattagctttatcactcacaggtgataatcctgatttaattaaagaaataattgatagcataaataataattatttagcacaaaatatagctcgtcaagccgcacaagatgcaaaaagtttggattttttggggcagcaattgcctaaagtaagaaatgagctagatattgctgaaaataagcttaatgaatatagacgtaaaaatgattcagtagatctctccctagaagctaaatcggtgcttgaccaaattgtaaatgttgataatcagctcaatgaattaacttttagagaatcagaaatatcacagctttatacaaaagagcatccaacatataaagcgttgatggaaaaacgaaaaacattacaagatgaaaaagctaaattaaacaaacgtgtttcgggaatgcctgaaacacagcaagaaatacttagacttagcagagatgtagagtcagggcgcgcagtatacatgcaactattgaatcgacagcaggaattgagtattgcgaagtcaagcgcaattggcaatgtcaggattatagatactgcagtcgcgcagcctaagccagtgaagcctaagaaaacattagttgttatatttggagtgttttttggtgcctttgtttctgttggattagttctcttgcgcgtttttttacgaagaggaattgaaagcccagaacaactggaagaattaggtataaatgtttatgctagcataccggtttctgaatcattttccaaaaaaattactcagcgcggccattggaagaagaaaaatgaaacagaatatcaatcctttcttgctgtagataaccctgctgacctcgcaattgagtcaataaggggacttagaacaagtcttcattttgcaatgatggaggctagaaataatattttgatgatttccggtgcaagcccaaatgcaggtaagacatttataagtactaatctcgctgcgataatttctcagacaggaaaaaaggttttatttattgatactgatatgcgaaaaggatatacgcataaattatttagtgttgataatgacaatggactttccgatgtactgtctggcagagtagaagttctacaggctgtgaaaaaaatctcaacggtaggttttgactttatatctcgcgggatggtgcctccgaatccggctgaattgctaatgcatagaagatttcaagatttattatcgtgggctagccagcactatgatatagttgttttggatacaccgccaattcttgctgtaacggatgctgccataataggtaactatgtgggtaccacattactggtagctcgatttgagcaaaatactacaaaagaaatccaagttagtatcaaacgatttgaacaaagcggtgtacatgtaaaaggttgtatacttaacggagtggttaaaaaggctagtagctactatggctacggttataaccactatggatatacatataccaacgataagtga

SEQ ID NO: 186347 - DNA, 330 bp, Klebsiella oxytoca
gtgatattgctgatggcgtggtggcctttatcactgatggcatggtcgccagcggcgctgctgattggcattgtcatgctggatctcggcggtcaggcgctgcacgtcactaatcagagcatgattttccgtagccgtcctgaggcgcacagcagactggtcggtttgtatatgctgttttatgccctcggcagcgcgttgggggcgataagtacgactgcggtatacgccagcgcaggatggcaaggcgtctgcctgctgggagcatcagttagcctgctggcgctgctattctggttaataacccgggggatgacgacgatcggatga

SEQ ID NO: 186348 - DNA, 183 bp, Klebsiella oxytoca
atggcgatatatgtcatgcccaacttgattcttcaggaatgctcgctgacggatgggtggctaccggttctgacgcctgctcagaggatgtggaatattgtactgttgatggtgtgcgctgttttgctatcaggctgcactgaatgtctggtttcccgtgtcactttacttaaccgcctttga

SEQ ID NO: 186349 - DNA, 1119 bp, Klebsiella oxytoca
atgcgttctcttcggccctgtacgctcaaaaaagcactggaccgctattgccggaccgtttcccgatacaaaagaggggcccgccaggagcactggcgtattaccgttttaagacgggctcctgttgctgacaaactgctgcacgaaattaccagtgtcgacattgctgcctacagggatatgcgacttgccacgatcaaccctaaaaccggaaagccactttccggcaacaccgttcgtctggaaatggccctgttatcagatttattcgacattgcccgacacgaatgggcagcatgccgggaaaatccagtctctgtggtccgtaaaccaaagataccaccgggcagggatcgacgtctgctgccgcttgaggagcgaaaactactgcggggcgcggccaggatggcatcgggtaaggaggtcaccactatgattattctggctgttgaaacggcgatgcgtcagggagagcttttagcgttgcgctgggagaacatcaatcttcgtcttggtgttgctcatcttccgcagacaaaaaatggtcatcccagagatgtgcctctctcacggcgcgcccgcaaggctttgcaggattttgaggtccgctcttccggacacgtcttccggtacaccacaaatggcttcaagtcagcatggcggcgcctgctgcatgccaccggtatttctggtctccattttcatgatttacggcatgaagccatttcaagactgtttgaactgggcacactggatgtaatggaggtggccgctatctcgggccacagatcgctggctatgctgaagcgatatacccacctgaaagcccaccgccttgttgcaaaactggaaggcgggcgtaaccgacgtatggcctcagtttttgtgccttacccggtttctgtcatggccacggaaacgtgtgtcacgctgcaggctccggatttcagggaactgcgtgtccaggccgccagtatggaggaggccgccacacgccttcgtcagttgctgctacatcaactggccacccggctgcgggacggtaaacgtataccacctccctgccaggtgccgccagactccggtacctggctgatggtggatcccctcgcggcctga

SEQ ID NO: 186350 - DNA, 516 bp, Klebsiella oxytoca
gtgccattattcatgtttttactgtggaccctgagcgtctcgctgctctgcctgtcatgggtgccgccgccgcttcttgtcccgctttatctctatcctcttctgtttcgccctctgtttgctctgttacgacacatccgcggtcgccgctgcctcctcagataccggcgcgggcgatatcatctggaatttgatggcagtgcgctgaccggccacctgacccgggacgaacttcgcctgtttaaacaggaactgtcgcgatgtacccggcacgcgatgcggcagagaaagactctcataatcgaatcccatctgctgacagactggcgacagaaagaactgcgccgggcgttaccacacgacagcctcattcggtacagcctataccccaccccgctctctgcggtcatggtcattcgtctgcttaccctgctgtccgaatggcgctgggcaagtatcagtccccgtagtggccggttaattattgttcccgggagagaacatcatgcccgttaa

SEQ ID NO: 186351 - DNA, 471 bp, Klebsiella oxytoca
atgcccgttaaattactcatgtttccgttgttactcatcagctcttccgcctgcgcctggtgctttgagcaggccgcatcccgatatgggctcgatcccctgacccttcaggccatcgcgattcaggaaagccggatgaatcaaaacgccattaaccacaacaggagccggaccgggaaaatcgtcagtacggattacggcgtgatgcaggtcaactccacgaacgtgtcccggctggttcgttatggcgtaatcagctcgtataaagacttgctcagcgatccctgccttaacattcaggccggggcctgggttctcgcccgacatctgacaaagtgcggacaaacctggcaatgccttggcagttacaatgccggtttcagcccgtcactggcctccacacgccagcgatatgcccgccaggtccataccatctggctgaatctgcgccgtcatcaggccaacagttaa

SEQ ID NO: 186352 - DNA, 459 bp, Klebsiella oxytoca
atgaacagaatcatgctcaccctgctgggcagcatactgctggccggttgtcagtcccccgcgtcttcagcccgtgatgccacggcttcaccttatggtgccgccgctgacgtggctcgcgtccgtcacgcccagtacaacctgtggggggaaggggccatcaatgtcccgacagagaccctctttccgggatttatcgccgcccacagcagccggatctcgctggactgggacggggacgctgttgaactgcttgccgctctggcaagacagcgtgggatgacgttcagttacagcggtgtgcgcctgccgttaccggttaccctgcatgtgcgcgacatgacgtttgccaatgtcttacggttgattgacgcccagataagctggcgcgcacagctgcatgagcctccgggagaatttcagctcctgttcatgcccgcaacgggagggaaaaaatga

SEQ ID NO: 186353 - DNA, 777 bp, Klebsiella oxytoca
atgaaacgttttctgttcctcaccttgctcatcactcatgccgttacagcacaacagccccctccggatctgaacagttacctgaaaggaaagtcatccacctcgctgtctgatacccgttaccagatgctgaccgatgccggactgactctgggatttcggggaggaaaagcgcaacgggcatgggaactccggcaggcgctggaaagccggaccagtactcttgatgccctctatgacttcaggccactgactcaccgggagggctggttaccgccggtcatcgacgaggcccgggatgtggccaccatcaccgatgatcagatccgcaccgccagcaccatctacaccatcgtcctgccggaacgctttatcagcaatcccccctcctggcgtacctggctgtatgccgggctggacgtgcaggtgccggaaggtccggagaatatggtcaaaccggagaacgctgaacagcgccgtatcctgcgggatgccattacgcagggctggcaggaaggcagggagcgcgcagatcacaccctggaggcgagttttaaccggctaacccgggactaccgggggatgttgctttacagcgcgttgcttcgtcagggcaagatttcccgtccgaaagtcactgagcagcatcagaccgtcaccggcgataaacagcgtctggttaccggcgatcgcgttcgcagactgcaggacagggctggttttgagactgataaaacaaaatggaagcccgtaatatccagggagaaaccacaatga

SEQ ID NO: 186354 - DNA, 903 bp, Klebsiella oxytoca
atgattaaacgcgcgtttcgccgcatgactggctgggaaaaatgctcagccagtgactataaagacctgtacgataaatatggaggaaatattcttagcaatcccgacatccttcgctttattgaaaataacagtacgctgtcaaacagttatttcatccatgtctcccgaggagtggctgatgccgcggtctgcacatggggaaactatcttgccggtgacaaacgactggcctggcataacggggcatgcaaagtaccggtcaacttcgatgaagtcatttttccttgtcattcagcacgtactgatgcgttactgttcccttttaaatcaaagatcatttccgccttacggcatccgatctgccttaacggaacaaacattttcaacgcccgcagacagatttgcatagccagaccagtgaccggtaaacgacgtcagacacatcgtcggcagttaaaaaaattcattgaggcaggaggaagcgtaaagagtattaatgaattaactcattcggattttattgatatttacgccgacttattctcacagcgacgtaatatgaaacacgataataatatgctgaccagttttattcatcacgttgacgatgttttgtttggcagttacctcgaatttaaaggttcaccctgtgcaattcagctactggtaaagcgagaagatcacaatacggtctatattgattatgtgaattctggcagaagtatgtatctgaaagatcactccgttgggagtctctgcatgttcgtcaatgttaaccgggcttatgaatacgctgattcgcgggggaaaacgcttcgtttcagcttcgggaatccgactcaggactacaaaacccgctggtgtcacctgcagccgctgacccgcattctcaccctctga

SEQ ID NO: 186355 - DNA, 837 bp, Klebsiella oxytoca
atggcattcgtaacgacaaaagatggtgtcagcatttactttaaagactgggggcctaaagacgctcagcctattgttttccatcacggctggccactcagtgccgatgactgggataatcagatgctatttttcctgtcaaaaggctaccgggttattgctattgaccgtcgcgggcatggtcgttctgatcaggtcagtgaagggcacgatatggatcattacgcttctgatgtcacggcagtagtggaaagcctggacttacacaacgctgtgcacgtgggacattccacagggggcggccaggttgcgcggtatgttgcgaaatacgggcaaccccagggcagggtcgcaaaggctgtacttatcagctctgttccacccctgatgattaaaacagataataatccgggcggcacgcctgttgaagttttcgatggcttccgcaaggcactggctgctaaccgttcccagttttatctcgacgtcgccagtggacctttttacggatttaatcgcgaaggtgctgaggtgtctcaggggacgattcagaactggtggcgtcagggtatgacaggtagtgcaaaagcccattatgagggtattaaggcgttttcagagaccgatcagacagaggatttgaaagctatcacagtccccgttctggttatgcaaggtgacgacgatcaggttgttccctataaaaacgctgcgattctgcaagataaactgctttcagatagtgtgctgaaaatttatccaggtttaccacacgggatgcatacctcccatgcagatatcattaatgcagacattctgacatttatccgtgcataa

SEQ ID NO: 186356 - DNA, 1155 bp, Klebsiella oxytoca
atgtcattcgaaccctggcatttccccggtggtctgaccccggacaccttacgcaccttctttgtctggtgcgcgcgtcagtctgtcagtgatatacacatccagggcggcaatcacattgtcgtgggacgttatggaaaactggaaaaagcctcaccttttgtcattgcggaagacacactcagcaaactgactgacgctatttttaatcccgaactgcgaagcatggtgcggggcgggaacggtgttgatcgtgccctgcaactcgacggcgacatgaataaccgttacgggctggcgcgaggtgaacgtattcgcttccggtgcaacttcacccagggaaccgcgggcagggaggatgtcacgatggcgctgactatgcgtgtcattccatcagatattcccccgctgtcgtcgttgcacattgaagatgcgctgcgcgatgccctgctgccgcataaaggcctgggtctggtctgcggggaaacgggctcgggtaaaagtacattgctggcgtccacctaccgccactgttgtgacacctggcccgatcgaaaaatcatcacagccgaagatccggttgaatatgtcattggcaggcccggagatttactgcctccggtgcagtctcaggtagggcgggatgtcagcagcttcgccgaagccctgcgactggccctgcgccgcgcgccccgcattattggagtgggcgaaattcgcgatctggccacgctcagtgcggccgtggcctgcgcccagtccgggcacctctgtctgtccaccatgcacacacacagcgtgggcgaaaccatcccgcgggcgttgctgctgttcccgtcagaagttcgtgaggctgcagcccgggatctccttggcgtgatgcagtacgtcgttatccagcaactgctgcgcaccagagacggcaaacgctgtgcggtcagggagtttgtcgtgtttgacagaaccctgcgttatgcgctggcagacagagattatcgacagtggggacattatctcgatgaccagctggctcaggagcgttgcaacctggcatggaaggccttccggttatttcaacaggggattatcgatcgtgacgaagtcctgacggtcgtctctccccgcgaactgcatgagatggagagcacatcatga

SEQ ID NO: 186357 - DNA, 264 bp, Klebsiella oxytoca
atgaggtatccaccgggtttctggcgggagatccgccccctcgatttcttcggcattccggctccgatgttttccctgtacctgttctggtgccggttcccgtcgatggacacgatctatgtctgtaccggcatcctggtgacgtttcgtctgatcagttttctgggctggacaccccggctgctgtatcagcgggcggttcatctttttcgcggtacccgcattgccggccggccatggtggtaccgccatttcactgaataa

SEQ ID NO: 186358 - DNA, 3171 bp, Klebsiella oxytoca
atgcagaaacgtacttatctcaccatcactccggataaccgggcagaggctatccggcgggcaggaaagctaccagacggccggaatacactggaatacgatccggatgaaaagctctggtttgcccgggagggagccgacctgtcacggctcacggactggctgccggaaaataccgtgaccggtaacatagtcgcaacggacaacaatctctcaccccaggaagagtttgccggtgtactgaaggatgccggcttcattctgcctcgcggtatcgccatcatggacggtaaaattcagcgagtacccacccgggaggataccgacggcaaaacctcgggcgtctaccgcggctatctggacggacaccccgctggctggtatgaagaccaccgttccgcagacggacaggtaaactggaccagcaccggaaaccggacatgggatcccgcccgccagatacaggagcgggccatgagcgcccagcggcactgggaccgtgcccgcgaaacacaggccggttacgaccgtatggctgcccggctcagtgagcagtaccggcgcatgccggaggccaccgacgcacacccgtatctgcagcgtaagggcgtaccggccatgcccggcctgcgcctggatcgatacgataatctcgtcattccgctgcagaacaccgataaccacctgcgcatcctccagtacatcaagcccgatggcagcaaactgctgaaaaaagatgccgaaaagtccggtaatttttttgtggtcggcggcgaattacgcaatggccagccctttatgtacgcagagggatacgccactgcggccaccctgcatctggccagtggtctgccggtggtaatgaccgtggatgccggaaatatggtcactgtcgccggcaagctgaaggagaaatacccggacagcacgcacatcatcgccggtgatgacgacatgacccgggaaaagaacaaaggacaaatcaaggcacagcagaccgccgaacttaccggcgggccactcattatgccgcagttcactgatgacgaacgccggcgtgcacatgaaaaatcagccagcttcagcgacttcaatgatattcacgccgcccggggactggatgctgtccgggctcagttagctccggttctcgataacctttgtcccggctggcaacagccacatcagaaggatataactatgcctgacgcacagacccgccccctccaggagcaggatccaacgatgccactctctcatgaggccgctccgctatccgttaaatctgctgtacctgacacatctgcaacgccgccatctccgcccccggagaagccatccgggcaggatgccgcacctgaaccggcctccccgcgggagacttccgggcaggacaccgcacctgtaccggcttccccgcgggagacttccgggcaggacgccgcacctgaaccggcttccccgcaggagactcccggacaggatgccgtgccaggtcacactctcccgtcagatgatgaattaatgcagatgtatctgcagggagagacgcggcctgtcatgccggaggcaaaagatacccgtccgccggaggaccctttccagtctgaaccgactcccgttgcgcagaaccggacggaacaggcaacagagacggacgggatcctgctgacgcctgaacgctccccgggacagcgtcataatgcacccgagactaaaccagtgacaggccagacagacagaccgctggcagaacagctcaaccctgatgcactgctgatgcgaatgacccacgcacagcagcaggacggaacggtactttacagcgtggatgaccgcccggctttttacgatcacggcagtcatctgacgatggcgcctgacgcgtcaaaacaaaacgaagccgtcctcgccgccctcctgaccgcctccgctcactatcagggacgtattactctgacgggaagtgaagaatttaaggccagggccatttcgctcatcgccaggtatgacctgaaggtcagtatgaagtcggcaacgcagcaggccatgctggatgatgctcgccgggcgcttcatgcccgcagcgaccgcatcgatgtggcaccggctgacaccgcaccgcaggcagacgctcccgataaaaatcctcagacggcttccgccccgacagcgccaggaacagcagaggagaacctccctgcagccgtgcccagaggccagtacaccggcgtgttaactcagcacggcgcggcaccgtatcagcacagggagaacgcaagcaccagctattacgtcacgctggaaaccaacaagggtctggagacaatctggggagtggaactggagaaggctgtcaaagagttcaactgccgtacaggccagatggttaacctgaactataaggggaaagagcagatcctcattcgcgtgaaagaacaggacgccagtggcaaggaggtgatacgtgagaagcaggttcaccgtaacaactgggaaatgaagccgacacgaaaacgaagcgtcaaaccgtcttcagcccctgaagccggggaaaagctctctgcattttcttccgacacttttaccaatattcagcgccagctccccctccccaaagaactgcctgctttgcccgacatcggtacctatctgtggcaccggcctgacgggcgagccagttccattgcgggagccagtgagaatgccacgccgcccgtcgggcaggagaacgccggtcagccggtgatgacagtaacggatgacacaggtgcgaaggtgctgcagctcttcaccagtgccggaaactatctgcagggtaccgccttctataaaggacgctggcagcatgttctggccacgcttaacgggcctgacagtccacactcgatcacccttaacgccgtcacgccacaagggctacgccatattggctcagccgatgctgtcaataacgtcgaaggaaagccagtcaataatccttcgcttctcgcggtcagtctgggaaaaaacagtgtgctgccggccagacttgaaaaaccagaggaactcccaccctcgctgttccggaagatggggtttgataaagagtggacaccgcctcaggaagcctccccaaagcaggaagccagagccagggccactccggcacaaagtttgcgcccacagtaa

SEQ ID NO: 186359 - DNA, 348 bp, Klebsiella oxytoca
atgaaactctgcagaattgtcatccttaccgtagtactgacaggtggtatgcccggtgccgtgcaggcagaaacctgccgggccgccaccgctgcggccgctggccgggatgccggatacgagcaggcccgcaaagcggccgatgcctgggctgaccgggagggccaggcttctgacattctccaggactgcctttccgggatccgcgatatcagtgtcaccctgccgtcctttccgagcctggccgatctgatcaaccaggccatcaacaaggtctgccgggctgcggtcgacaaagtcaacgacaccctcccgtcggacatcgacccctggcctgaactgaaataa

SEQ ID NO: 186360 - DNA, 684 bp, Klebsiella oxytoca
gtgaaaaaaaaatccacactacccacggagaaaaccaccggcggggggccaccctcgccgtatagcaaggcgcttgagtttgccatacgtaaagagctgggcgcggatattgcccgtaagctgctgcgcaatgccttctggcagagtatcgctcaactggtcacactgctcattatcggggtgatggccatcgccctgataaatcaaccccgtgagtacttcgccacagagaaaggtcgtctcaccacgatggttcccctgcaggagccgggctggagccaagccgatgtgattgctttcggcgaggataccctgagggaagccttctccctcaacttcgtccagttccggcagcagatgagccgtgtggagccacgcttttctggcgacggctatgtggcctataaccaggccctgtcccgctccaatattctcagcaacgtcagggaccgtcgtatgaacctggcccccggaatttcccctggcgtggttcgccgacgcggcgtcaaccagcaggggcattacagctgggaaatacagtatcccgtcacactccagctgatgggccagaacaccaatctgcctgaacagcgctttatttttcagatcatgatccagcgggccgacgtgtctgaaaaaccccatggccttgaggtcgcccagctcatctcaaccaatgcgtag

SEQ ID NO: 186361 - DNA, 993 bp, Klebsiella oxytoca
atgttccgtgctattaccctgttgttactgatatccgccgtcgcccacgcgcaggatccggcgccccgccagtggtcccgggccggagggacgaccaccaccacgccgccgccttccgccgccgctacatcgaccccgccggcagacctggcgggcccggaggcgcaatcccgtcacctgaccgatgatatgaatatccccctgcccgtcgcatcacccgccctgaaaagtgcggccacggaaatcgcccctctcacgccggatgaagtacgggagatggtgaagctgcaggatggtatcgatcgggcgctggcccctgcccaggtggttccccgcatcagttctctgacggtggatctggcgccgggtgccagcctgcccctgctcaggacgtctcccgggcataccagcaatatcagcctgattgacagcaccggtgccccctggccggtggagctggagcccatcaattccgcagaggatgcatttgatgtgcgctgggtgcccggcctgccggtgatttccgttcaggctctgcgcccctacagacaggggaacctgaccctttcactgccggggctgaatgtcccggtggtggtcagcctgaccagcggtgaagcaagtccggctgaccggacctggactgtagacagtcgtctggacctgcgcattccccgccggggccccggggccagcgaggtgttgtcgccagccagtaaggtggggttatacaacagcaccctgcaggcctttctcgacggcattccgcccgcgaatgcacggcgtctgaagaccagtaacagcgtggaggaaaccaccgtctggcagatcggtgacgatctctacgttcgctcccgggccatgctgcgcgatgagtttgaagaaacgtcgtcatccgctgacggcatgcggctctggaaactgccactttcgcccctgctcacattctccgttgcgggccgcagtgtcccgttacaagtccatctggagtaa

SEQ ID NO: 186362 - DNA, 1260 bp, Klebsiella oxytoca
atgtctgcagataaagatgcgaccagtgcgtcgcgcaagacgctcatccttgccggactcgtcttatttattgcggctggcgggggatttgtactctggagttggctgctggctcccccgccggcagcgtcaaatgtctctatttcgcgtgtgactgccgccagttcacacgaggcagccgaatcaccggaataccgcagcctgctgcgcgaagccaatgaacggggtgcacaacaggcccgggccagagatgagtcgtttattgccagcattccaatggggcaggatgtcccggtagacgtcatcaccccggagccactaccggagcccgccccggctgagagccggacaacgcgccggcagaccgcccggcaggaaaaccaggacaccgccctgagcgataaccagaaagccgccctgcagcagttggtcgggcagatacgacagcgaaacaacgggactggcatggttcaggcggtggcgctgcagagtcgtgaccctggtgcttccggaatgcgggcatcccttcaggcaaccccgccagcaggcgcacgccgggatgtgccggacgtggaaattgtcccgccctatacccgtattgccggagtggttgccacagcggtcgacagtgatatccaggacgcaccggttctggtttatatcccctcagggcggtacgccggcgcagtcctgcaggctgatcgggctccactggccggggatggtgtgaatatcaccctgacgcgtatggcctggaaaggcgtgacctaccaggtcagcgcccgggcactgcaggatgaaaccctgttgccttccgtggccagcaacgtcaataaccgctacttctcacgcatcatcctgcccggaattgccggcatggccaccgaagtcgggtcgctgtatgccaactccggcacccggatcctgtcaaacggcaccaccacgatggaggggcgtaccgggacaccggatactgccgccgttctgggcgtgatggcgggcggaatgggcaaggaggccgggaacgttatccgtcaggatgccagtcgtctgccagtccgtcaggtcaccgtcacacacggggaagtcgtggccgttcagttcctgggcggggtctacagctcggatgatatccgtcagaccgccgcacagcggccaccggccagcctctccgcctctcgtctggcggaggagacacaaccactgcaacaacaggctcaggaccgggtcaatcgccggttacgccaggaggacttatga

SEQ ID NO: 186363 - DNA, 765 bp, Klebsiella oxytoca
atgagtgaactcagtcagctgttggatgaaaagccggatgagcaggaagaagaggaaacactgcctgaagaggtgacgccccggccggttgcatggtaccgaagggagtatttcggcttccccgtctggctctatgccgccggtatcgccgcactggcggcggtcctggtctgggtactgagtgatgacagtgtaacagccccgcagaccggcagttttctgatggaggcgcccgctgagccagaccccctcttacccgcggcgtctgcacagcagactgccccggccccactcccacctgccatctcatcgccttccgtcagtgccgttgaactgcaggatgtgcgggcctacgcggaagcgaaccgggaggccatcacccggcttgccggccgggttgaacaacagtcactcagactggctgaacagcagaggcacctggaaacgctggcgaaacccggcgcagccgtcagcaccgacaaacgtcccaccacggccctgcctccggctccggacgccgcgtcagtcaggtccgggacgacacggaaaccgtctgtgaagaaagcgcccgagaccggacagcggggtcctgctgtcgcgacaaaggacgttcagctggtcagcatcgccagtggcatggcctgggtgaagtggcaggataaaacctgggccgttattcccggcgaccgtctgggcagcctgaccatccgtcacatcgataccgcagagcgggctgttcacacctctgccgggatcatccgctaa

SEQ ID NO: 186364 - DNA, 528 bp, Klebsiella oxytoca
atggatgccgttcaggcgctggtgaagtttgccagcggccttcatgccagcattttcaacctggtctgggcgatggccaccctgctggccattatcggcagcgcgacctttctgaccgcacaggttcgccaggcccgcctcccgcacggaagtggcggcgggaaaattgtggcctggatcctgctctgtgccgggctggttggcctgcagcaaatgattagtgccggggcagcccagatgggctggaattccgtctcctttgatgctgtggcctatgtcagtacggccagcttcggtgccggtgccgaggcggccaatgcggtactgacgctggtcagagctctcgggggcgttttctgccttaacggctggctgctttttcgccgctccctgaaagacggtcataccggcctgactgccggccaggatgtggctggcggctgggtgcgttttatctgcggcgttctgatgatctgtaatccctatctgcttgatgccctccagtcctctctgggcctggcctggtaa

SEQ ID NO: 186365 - DNA, 417 bp, Klebsiella oxytoca
atgattttttctttgttccgtcacgccctgtccctgcccggcaatctgtcccgccggctcggcatccacctgtttttcatgtgcgaaaccgcccggcgaaggctgattcaggggctgctgttggttatcacgtctacggcctgccgtcaggtttacgcggcggacattgcggacatcctggattcgctggcaaagggcgcgaccagtggtcagaaaagtaccgtcatcatctgcatgttcctcggggtgctgtctgtcgctggcgggtttggcatgctgtacaaaaagaaaaccaatcccaatattccgaccggtggcgtctggatcgctttcctggtcgggattgccctgattggtctcggtgaaatcatccgccgcggtcagagccagctggggatgacggaggtgagcatttga

SEQ ID NO: 186366 - DNA, 507 bp, Klebsiella oxytoca
ttgatacagtcaccttttctggcggccggtccggaaaaggcggttccccgtcgcgtggcggcgggggtctgccggtgttgtggctggtccgggcagacccgtctggcgccgccgccatcccttctggcccgtgacgataccgctgacggagtctgcctgctctgctggctctggctgaacctgcaaaaccagagtgcccgctcgggtgtcctcgcctggttgccggacctgagcccggagaacgtcattcatcttcagcgtgaggccctgcgtcagagcctctcttcgcagaaaagtgcgcagcgcgaaggccgccaggtgctggtctggctggcccgccatcgtcgtgaggtcagggcgcgctggaaaacctgttcgcccgccgatttctccgtcctgctggctgaaacggccgggccccgtcgtgcctggctgagaaaggagctgacaggctgtgccctgatcctgccgccctccgccattcccgaccagagtcttttgttatga

SEQ ID NO: 186367 - DNA, 663 bp, Klebsiella oxytoca
atgttacatatatttattttaaaattaaaggggacggttttgacagttgaatcatggattgcttttatttcagccgcgttgttgataaatattactccagggcctgatattctgtttattttatcaaagtccagtcgctctggcaaaaaatctgctttctggggagggctcggactatggactgcagcactgacacatgtcactgctgttgcgattggcctgtctgctgtcatttttgcttcacaaaccttgttcacaataatcaaatacattggtgctgtttatttgatttggttaggtctgaaattgttttttagttcgcaaaattttttaattgcatctcaagctgcggaggggcagtttaaaagctttataactggtttttttgtgaatatttcaaatccaaaagcggcactttttttcatcgctttcttgcctttgtttatacatgggaatgatgctcacccacagattcagatgtttattcttggtgtgttggttgtgattgtcaagatactggttgagctgattttgatattatgctcttcttatattagagacatttttacaaaaaatgaaaaattagcaaagatgataagtaaaattacatctcttttcttcattggatttggtttgcaactcctgattttaagaaagccataa

SEQ ID NO: 186368 - DNA, 1476 bp, Klebsiella oxytoca
atgattatatatttagtgaactcacccaatgacccaaacatgtcaaaaatagcaaatgagcaatgcttccctgcacttaatatgctggttttagggacatggttaaaagagagacttcctgagtttgaggttgtgtgtaatgatggtggtattgcaggagaagaagctattttagatgatataaaaaggtttaaaccatggtttgttggggttagtgtgctcgcccccacctatgcaccggcgctccgaattgcttcggaggccaaaaaatacggtgcgtatgtaacatttgggaatgatcaggctgcacaactatcccataaaatacttgaaaatcggaaagaagttgatttcgtattaggtgccgaatatggcgagtatccgcttgagaagctaatacgtaagctagcatatgatgattgtaatttcgaagatataccttctttaacatggcgcaatgagagtggtgatgtattaggtttcgattatgataaagataaaaataaactcggtattcttaatcatgaattgattgagaatagaggcagagataatgcgttagatatatttccggtaacaaatcggttgctgtattcagatgaaatctgggatatggcattaactaattataagaaatcatttggacatttacaccatggggatttgccatcaggaatcacgactattaacagggttagaggatgtagtcgtgctaatgaaaaaataaaatgcaaacattgtgatatgttgctggatatatctttttccagtcctcttcgtttttgggaagaggtcaggctggcgaataaacaaatacaggcagaattattttatgaggtatgtgatagcctgacaagtttttcaaaatatatggagaaattagttaagtataaaccttatgatttaggttttgagccttactttttcatttacggacaggccctggatttggttcggaatgcgaatctgggtaagacacttaaaaggcttaatgtttttaaaatgaatataggcctggagtcaggttccgaccgtacgctgaaaatgatgaagggtaaacatgattcagttgaagttaattatgctgcattgaaaaagcttaaggaagcaggtatttatgtttacggttcattcgttctcggtacagagtttgaaacagatgcatcattaaaagagacgacaaaatggattaaaaaaatcatcagagaaggtttaatcagtgatatagagatacagcctattttacccactcctcaaaactattacggtaaaaagatgcttgctgatggccttcagttttcagaaaacgactggccatttaatgttgatgaagtttcgagggagtatatagaaagatattgtccagtgagctatgactcaattatcaatgctgcaagagaagtcaggcatgaagccagttgtcacaaactcaatttcggcagtgccgtatctggcagggaaaaatacatgaaataa

SEQ ID NO: 186369 - DNA, 3051 bp, Klebsiella oxytoca
atgtccgaacgcctggttcatgcacttgagtcttttattgctgccgcttcacggcataccttctcccgcgacctgcccgattactgcgatttacgcaccattatccgtctgaccgaggaggaccgcatccgtcggccagaaaccgaagcgccgtatatcttcagtacccgtgacggacactatgtttctgtgctgtctgttgagggtgcctttacggaatttgatgaagacgtggatggactggagcagtctctcgaaacctgggtcgatacccttgccaccgccctgaatgccgagtttggccgcccgggacataaaatcagtatggtttatgaacgggatccggctcagggccaggcagaaatcgaccaccttcttaccccccagtaccagagcatccgtcgtctgggcctgaacattcgcgacgtactggacgaaaaatcccgaaagctggccccctggatcgcccgggaacgttgctggctggttatctggacatcccgcgcctcactgtcctctgctgaaatcagggatgaacaggcccgcattgtcgcgatgaataaacagatccccccggcacgttttggccagatcccgaccctgtcttctctggtcagtctgaaaatacgccatgatgccttcctcgaaatgcttgaacacacgctgttcaacagtggccggggactcatgatccgcctgctcgatgcgcatgaagccgggcacgatatccgcgcacaggttgaccgggaaggcacgtcgccggagtggtatccccttctgccggatgatcacattacacctcacggagaccgtaagggggacgaccacacaccatttctggccccctggctcaattaccagctgatgagcgaagcgccggagacaaagggaaatctggtccgggtcggacagacctggcatggctccctttccatggtcatcggcccgcagcagcgccagagtttcacccgcctgttatcccatattccccgcggactcccgttcagaatacgcaccgatattgcgcccggggggatgagaaagctgggcatgacaaagactgccctgacctttctcgccgtctttccggccctgcgccctgtctgggactgtgtctgccggctggagcaggctgaccgccaggatccggttaccgtcaccaccatcaccaccagtacctgggggcggtcggaagaagaggtgaaccgtaacctgacgctgctgcagaaagcctttcaatcatggggcgtctgcgagatgacatcccagaccggcgatccgtatcgggtctggacctcgaccattctggctgcctctgctgccagcggaccgaatctgctgtatccccccctgagtgaagtgctggggatgctgccattaaaccgcgcggcaacgccctgggccggggacggtaatatccccttcatcacgctggacgggaaactctgtccggtacgtctgggcacgtcaaagcagaacaaacacaccacgctcatcaccggtgactccgggtttggcaaatccgtgctgctgaacgtcctgaatgaaatcaccatcacctcggcccagacggccctgccctttattggcatcgtggataaaggtttttccgcgcagggcctgatacagatgatcagggatgcgttgccggcacaccgcaaggacgaagccgtggggatcatcctgcagaaccatgaagacttctgccggaacccgtttgatgtacagctcggcgcccgcaaacccgtgataccggagaaagagtggctgctgaacctgctctatgccctgtgtattgacccgacaacgggcgaggcgccgaacgcccgtgatacccgccagatcctgaaccgcatcaccgatgaggcctaccgggcgaccgcagaaactcagccccggctctacacggccggcgttctggaggatgtggaccgggcactggaggaaaccgggctgctgatgaaatatgacagcgaatggttcgctaccgccccctggtacgatatccgggatatcctcttccgtgccgggcgcacccacgaagcgcagtccgcgcagtatcaggcagtaccggaactggccgatttacagcactggctcaatcatgaagacgtgcaggccgccttcgggaccgtcacccgtgacggctcagcggaaaaactgctgaactatatcgcccgctgcctgacacaggcagcctctgaatttcgtatgctgaacgggcgcacccgctgggcgctgaatccggcatcgagggttgtggccatcgacctgaataactgtatgggagacaagactgcggccgggtatctcaaaaccggcattatgtatctgttcgcagggcaggtgaccggcggtcatttcatcctgccgcagtaccgtgacgatctgctcagcactgtggatccgatgttccacagcctgcatctggcccgtctcgatcaactggatcaggagctgaaaacgaagatatatgacgaggtgcacaacgcgcgcggggtgccgtttatcttcagtgctctggaaaccaatgacagggagcaacgtaaattcgggatctgcacgatgctgtcgacacagtttctgccggatattccgccagatattctcaaatcggccaactccctgttcctgatgcaggcccgcccggaagacatgcctctgctgaaagcgcactttgacgtacctgatgtcaccctccgtcggtttatgcgtgaggggaaaggtgccgcgccggacggcagcggtacggctttcctgggcgtattcaggacgaaacaggccaccacggcccgcatcctgaaaaacactcttgggcccctggagttgtgggctcttaactccagcccgacagacagtgcgctgcgccgcaccctgtgtgaggacctgcctggcgaaacggtacgtcagctcctggcggaaaactttccgcagggcagcgcggagaaaatcattgaataccgccggcgtaaagctggtgagaacgatgccggcaatatcattcgccagctggccgctgaactgatcgaaaagcgggggtatgcgctgtga

SEQ ID NO: 186370 - DNA, 1188 bp, Klebsiella oxytoca
gtgaaaatacgtctctcattactgggcgtttcgctgtgcctgtcggccagcgcccatgcctacagtgtttatgtcactggcagcgcccccgtcaccacccaaatcatgccggcgttggggaccattgaagccaccctggcggacattctggccacgcagatacaactgggcaccgccgtggtcaatggtaatgaacaggtcgcctccgtcgtcagcgagggctttaaaacccagcgagaaatggacatcctggcccggcagaccgaacgccttgaggacgcccggaaaagcttcacggttcctgaaagcatctgttccgaatcggcctcgggcgcggctgcgcaggtggcaggcacgtcccgcgcgacagcctcatctctcagaagcgcccgggcggcagctggcggcgccctgacgggacaaacccggacacccggagaggatgctgtccgtaccgcgtcaacccatgcaggttactgtacggaagaagagttcagttcgattgggggaacgcccttttgccctgcagtctcccggcatcccggcggggatcggcaggtcaccaccctgtatgacggctccggtgaaacaggtaaacgaccggatctgacgttcagtgatgagcaaatcgacgctgccctggcgtatatgaaaaataccgcacgccgttctgcgggtcgctcgcccgagaaaatggacctgaaaaccgccgcgggacaggaataccagggggtctatacggagtatcaggggattactgatgctgccgctgagccccagctctcgcttattgcggccagtaaaccaaataccagcacccgggatgccctgagtgaaaccctgcagtcagaagcggccagaaaatattacgacgagaccacaagcagcgaagccagacggaccggcatgatgagtgaacgggaatttgaggcctttgaagtgggacgccgctatgccaataccgcctatctgaccgacctgcaggaaatggacggtgacaacctgattcgggagcttatccgcacccagaacctgtcgaactggctggcgctggggatgaaaaaccatctgatcaggctctccgtcattgagggtcagtcacttgcgctgctcgctgagcagaaataccggcctcagatggccgcgcttgaagaacgcatgaatgcagggggtgcccgtgggaaataa

SEQ ID NO: 186371 - DNA, 528 bp, Klebsiella oxytoca
gtgggaaataaaaaagcgcgtaagacagcccggattgccgttagcgttatcaatttgctgtttccggtacgtgacattgcacgtatcgtgatgacagcgccgaaacccctcctcatgacgctccggcgtacccgggaggtttttcataggcaggtgaaagaacaggctgacctgagctgggcggaggccctcgcggcctcgggctgcacggaggcggcgctggcccggcgttatcgccgcagtcagtggctgtggcgtaccgtcatgtggggaagcctgctggtcagcctcgtgctgttgacgctggtcattgggtcctggacgacgctgagtgcgtttgaggtcctgcggtccgtatcatttctttttgtactcctctcgctgacgttgctgagctttgtcaaagcgatggaggccacgttccggcgctggcagttgctgagccgccgcgtcagtatcgcggaaaaagggacattcagggattttacggttgagaacgcctggatacgccagacgatgggatactga

SEQ ID NO: 186372 - DNA, 2148 bp, Klebsiella oxytoca
atgactcttcttaaaagactcttctggggtgggctcgcacttgccctgacgacggccgcccgtgctgactcagtgacttatggcaccatcgctgatgcggcaaaaaataatgaagacctgtcccgacaggcgctgattgccgtttttggccaggtggttgccgatccgtttcaggcttcggaaatgacggtcatgggggcactgtttgccctgatgaacggtgtgctggcctgtatcgcgctgttctggtttttgactatcacgctcaagcacgttaccaccagtggcgctcagggccaggtatttggctccggtcggagttacatgtatccggtcatgactctggcaggctttatcagcatagtacccaccggctccggctggtccattgcacaactgaccatgctctgggccgcctccattatggggattggtagcgccaatctgttgacgaacaagggtgcagagatgatcgggaatggttattcactgatcacacaacctacagcagccagcacccgtaccgcatcccgcaccatcttcgagaccatgctgtgccgcaatgccatcaatgcacggcagagtgaaatggaaaactactttactcaacagatgatggagattgagccttctaaggacaatcgcggctacaccattacgaacgggaattccgtctgcggtaccgtaggcgtgcctgtcatggccagaagcagcagctggaacaataaattcgacatagcttctggcatcgatgtgacgtccatccaggatgcgcagctgcgggcgatggattcgatggtacaaacgctggatacggcggcaggtaattttgtgaacgcctatctcaatgaccgtatctcaggagaggtatcgctcccggatgcggaaaccgccatccagaatgctgcagcggcctatgaaaacagcatcaaccgggcgattaacagtcttaacgttaatgagaacagcatgcagagcaaactcattagtcagttaaaaagctacggctgggttgcactgggctcctggtaccacacttttgctaccgcaaatgaaaaaacggcagccgttgcacagcaatcccctgtcaccacgggattcaacggtaaaggggattcaggtcagcttgatacctataacgcggttatggcggcctatacacaacagcttcagaatagttcctacacgccaacgatagggatgaaagcgatcggagatgatttagcagttgttgattctagtgacccaaacaatctattaaaaacagtctttcaaggctcactcgaaagtgccgcgaatagtattgcattatcattcaacgaaacatctgacaataatcaaaccaatccgctattgcgaatgaaaaatgttggggattatacgcttggaggagctcaaatagcttttgccagctatatcggtgcaaaaataggcgtcgcatgggctacgggtactctatttggacgtgtggtcaacaccgtgaccggggcgggtgatgttgccaaaaatgccttagaggctatacagtctcctttttattttcttttatttattttaatttccatcggatttagcctctcaatttttttacctttcattccatttatatactggatagcagctgttacaaactggtttgtcagtgtacttatcggttgcactgccggacctttatgggcagctactcatataggtaccgaagcagataaaggtagtcgttccgcatatggttatgttttcttaatagatatgatgattaggccatcattaatggtatttggttttttctttgcttctctgggagtagttgctgtgggcacaattttaaacctgctgttcgctgcagccattgccaatgtacaagctgattctattactggcgttatttctttaattggaattttaatgatctacgcaagaatatgcacaacacttgtaaccagactatttggactacaggtcacaatgccagactatgtgatttcgtttctgggtgggcgtgaagccgcgaacgtcatgggaggaatggttgaatccgttaaaggtatgtttgctggattcggaagaggagcaggaaacattagcaaggcgaaacaaatagaaagtaagcaatcaaatcctgatccaaaggtagatggcataagctga

SEQ ID NO: 186373 - DNA, 633 bp, Klebsiella oxytoca
atgattaagagaaaacggagtattctagaggtcataccaatgactttattttatatgttaagagtttttggctcaccaataatcatcttcattggaataatagcagtatggattgatagtcgaaacactaccgaaacgatgatggggatagctataatcattataggtctatcaccacatatccttgcatatgcattagcaaggtccagtagaaagaaaatccgtaaaatcctcagcgccattaaaagctctgagtctttcctgcctgagccaaagtacgagttctgggagccccactctgaagcttacctcggcatcgatgctaagcgcggaacctttgtgtatgtgcgtctgattcgtcgcgggcaggttgaccttattggctttgatatgcacaactgggtgggcatcgagctcgatggacgactcctgaacatcaaaacgaagaccattgaagcacccgtgctgtcgatgggaacccgcgccggcgatggtgacaggatactgtcgctcataaacaccatgtccaacagacaataccgctacgattgctattacttcccgggatatgttgctcacaatgcgaaacgcatcgcagaagagcacaaagtctttatccctgtgtataattag

SEQ ID NO: 186374 - DNA, 747 bp, Klebsiella oxytoca
ttggatatccctcgtatatttactatcagcgaaagtgctcaccgtatccacaacccgttcacattcaaaaaaatgcatgtcctgggtgaggcgttaagaatggagcagggaacacgcattctcgacctcggcagcggctcaggcgagatgctgtgtacttgggcactggagtatggcatcacaggtactggcgtagacctgagtcagttattcagcgaacaggcgcgccaacgcgcagacgaactgggtatcagcgatcaggtcactttcatccataacgacgccgcaggatttgtcgccgaagagaaatgcgatattgcagcctgtgtcggagcgacctggataggtggcggagtcaaagggacgattgatttgctgcaaaaaagcctgaaaccaggcggacttatcctgattggtgagccgttctggcgccaggttcctgcatcagatgaagtcgcaaaaaaatgctttgcgtcatccattgacgacttcatgacgttgccggcactggtagcctcttttggtgaaaatggttatgacgtggtggaaatggttcttgccgaccaggaaggatgggaccggtacgaggcagccaaatggctgacccttcgccgctggctggatagcaacccggatgacgaaatggcaagtgaaatccgcaccatgcttgataccgcgccagtcaaccacgtcacttatacacgggaatatctgggctggggtgttttcgtgctcatggcccgataa

SEQ ID NO: 186375 - DNA, 150 bp, Klebsiella oxytoca
atgcctttaaagaaaatgaaacgtcatgccatcctccacaccatccacattccggaacgtaagctgcgtcccgtaaaatggcttgtcctcatctcgtctctgctttgtatgttacagctggcgatagaacttgtagtcatatccgaataa

SEQ ID NO: 186376 - DNA, 1128 bp, Klebsiella oxytoca
atgcaaagtccttctgcacagattgcatcccagaataaccgcagcctgatatttatttccgtcgtgatggccgctgtcctgctctggctctttttcgattatctggtctatgcatcctgtctcctgctctatcacctctggcttatcccctggcgtattgccccgtctctgttgacagaggcaccggtacatatcaacctgctggcgcgaaccggcaatgaatccagaatggtcagtttgtctgaatggcttgaggtgatggagcattctgcgggtattattttctggtacgtcctgccctttatcatcaccggccttgtcctgggtgtacgtcatccggcaatgagccaccattcccgtcgggttatcgacatttacaacctggcccggttgatggtcgcgtactcgccggccatcgccccggtgctgtgttacggcgataaaaaagaattgctgctgaacgataccaccccggcgcaggcaccggccctgtctccggaagcgtttgtccgtcagcatcacctgatacgccatgaaagcctggagcgcggggccgctgagcgtgtcttccgggaacagctgggtcgtccgctcaattcactgcacgacctgaaaaagcacgagcgggtactcttcgcgctctttggcctgcaggtattctgccaggacaggaaagcggccgtgcagctgcgcgacgacctcaaccgctcgtgcctcatcggcaacagagggtatcccgttcagcgcctcgcagacagggccttcagccgcgtcagcagggcaccaggcgtacaggagtggctttccacccatcgctatgtccggactgcactgacaggcctgtacggacgcgatctgcatattcctccgtccacgttccgctggctgaaaggtctcgaccgtacgctctggtatgccctgcataccgccgacaccaccgcggtatttgtcgaaggagccggagtggtggctgttgcgcgtgcagaaatcactgcccgtaaactcggttatccgcgaccggagccgtcctttgatgccctcctcagtacgctcacccgcgaactggaaacctttggcgaattaccttcttcttcaccggtcagcgcccgcccggttgctgacgactga

SEQ ID NO: 186377 - DNA, 831 bp, Klebsiella oxytoca
atggatcacacatataaagccctgcgcctcagccgggacgaactggctgtactgaaaataacggataaagcgccaccggagattatctgcaccctgcccgccacgggcagaaaaccggccccgcttatcatcagtatcttcgcctttgtactggctctgtgtgcactgacgctctccgtctcgcaggagctgagatcacctgcgcagctccggacttctgcgccaaaagccatgacagccacacacacggctgcgcagcccgtgttccgccagcctgaacccgcgtcagacgctgttctctcagcactccccgcccgtcccgcaccggtgcccgttccggctaatgtgatggcagccaatattcgccgggcagcagaacggcagatgtttaccgtgacgctgtcatccggccatgcccggacactttatgtgttcgccgacccgcagtgtgcgatatgccgccggctggaccccgtactccgtcaggtggctgaaacggtcaacgtcgaaatattcccggtatccgtgtacaaaggcgcgtcatcgctggcactggccacaactgcactgtgtgccggtgacgcatcccgggccgagcgctggcgttcggtgcttacgccgtccatcaccccgcctgaaaatgacgacgactgcgatctggcccgccgcgcagtggccgtaaatgaccaggcattcagggtgtacggttttgaaggcaccccctggattgtggatgaacgtggacaggcggtcccgcagtcggttgtcagggacccggcacagctgaccgcctggctggcgaatatcacgccggaggacgcgcatgaataa

SEQ ID NO: 186378 - DNA, 2160 bp, Klebsiella oxytoca
atgaataaacctgctgtcgatacccggcgtgtgaaccgggaggtgtggcaggacgggctttcaggcctgttgttcactcccgaaattttcctgctggttatcgttatcacgacgtgtatcggctggttttttcctgccacctggttgctgtctggcccctttctggtgctctgtgttccgatcgtgctgggtaatccctggcgaatgcccatgcgaatgcccgccaccatgaaccgcccggatccctccacggatatcgctgtccgctaccgttttgtgtcatggctgccgtttgggggtatacgcatcagacgcaacccgggtgccggcattctgtatctggggtttcagcggctgaaagacgcgggccgggagctctggctctccatggacgatctgacccgtcacactctttttctcggcaccaccggcgcgggtaaaacagaatttctgctcggcgtctgcctgaatgccctgtgctggggaaaaggattttcctttacggatggcaaggcccagaacgacgtggcattcgccatcggttcactggccagacgttttggccgcgaggatgacgtccgctatctgaacttcattaccggcggccgcagccgggcccaggcgctgctcgataacgaccggcgtcgcccccagaccaacaccatcaacaatttcgctattgcgcaggaaaccttcattatccagctgatgcagtccatgctgcctcaggtgggcggcagtgacggcggctggcaggagaaagccaaagcgatgatacaggctatggtgatggccctgtgctatctctgccgtcgcgagcagcgcatcatgtcccagcggatcctggtggactatctgcctctgaaaaaggtggcacagctgtactgtcaggcggttgatgaacactggcacgatgatgcccgactgccgctggagaactacctgaatctgctggccgggttcgatatcagccaggtccgccggccgtcggaatgggctccggaggccctgcagcagcacggttatcttatccagcagttcacacgaatgctgaccctgttcaatgacacctacggacatgtttttgctgagggggccggcgacgttgagctccgggactgcctccacaatgaccgcattgtggtggtcctgatcccggcgctggaactggaatcagaagaagcggccacgctgggtcgtctctactatgcccagatggccatgatcctgagccaggatctcggcgagaaaatagaaggtcccgccagcgacatactggttatccgtaaatttaaggaccgatttcccttcctcatcatcggggatgaaatcggggccacctacacggataaaatcggcgaactggccacgcagatacgttccctggggtacgggttgttccttgcaggtcaggatctgcagcgtctgattgtggcagccggcaagaaaaccggtaccctgctggccaacatgggcacccgtattgccggcacgaccgttgacccggaagaaacactgcaggttttcagcaaagcgggcggccgggagtttcgggcagaaatggctgctgttgaacgccgggagggggttatcgataccgactggggtgaaagcgaccagttgcagcttcgcgagcatgaccggattgatttatcggagctgcaggcgctcaggccaggagaaatcatcactctgtttaagggcgagcctgtacgcggtgcagcactctatatagcggatcacgataagctgacccgcaaatcgctgcacattaaccggtttatcgaggtccccgcacccacaccgtcagaaatgtgggaaatgctgccgcacagtgcccgtaaatgctggccctctccgtcaatagtcagtcatctgcgacgcattctgggtgggtaccgcaatactgcatttgttcgttactccccggaacatatgacattaaccgacgatgtgctctgcagactggccgatgaggaagacaggatggcgtacattcttgacacgccccggacacaacgaggggtgcggctgtatcagaccgccctgaatgccctgcgggacaaaagcggcacccggggacgctatcgcgctgaatccacacaactcagacaacacacgcttccggccgacgtcctgcgtcacctggtcagtgattga

SEQ ID NO: 186379 - DNA, 510 bp, Klebsiella oxytoca
atgcgacatctggtgttatgtcttgccctgctgttttccccgttcgttacaggtaccagtattgaggtgggtttttccccgtcagggacagcgctgtcgcttgtgctgcgggttattgatgacgcacaggaaacgctggacgtggaagcgtattccttcacatcaaaggacgtggccaccgccctcacccgggcagcagcccggggagtgaaggtccgggttgtggctgatgcaaagtcacacggcagcaaatattccgcgctgacgttcctggcgaatcatcaggtttcggtacgcctgaatgaccgctatgccatcatgcataacaaagtcatgattgccgacaaccgtcatgtcaaaaccggcagctttaattactctgcagcagccaataaaagcaatgccgaaaatgtgctggttattcgcgaccagcctgcactggccagagcgtatctgaaggagttcgaacgcctctgggttgaaggaaagcggcttgagcccacatactga

SEQ ID NO: 186380 - DNA, 1431 bp, Klebsiella oxytoca
atgtttaaaaggatattggtgttttcattttttttctctttcattccgtttatcaccgttgctgctgataagggtgacagtacggaactgactgcaagcaccgcgatgaaaagccccgatgaaaggctggatcgcggagattatttaaatattatcgcttctaaggagagacgtctttccggggaaccctccaataatgccctgcgctgggatgttgcgcaggatgaaatgatggcaggcaatttagataaggtcgagaaacatctcaaacctttattaagcgatcctcaatatgcgaatgatgcactttatacgcagggcatgatttgttatttacagggagattacgcccaggcagaggcacttttccagaaggggaccagagatctgaaaagtcgcatcaggctgctctatatctattatcagactggtcagtattcgaaggcgagagaattgttcgatgatgagcaactgaaatctctcagtaagaacgacatggccctgttgactttaatgaattcattcggcagtgcccagccttacaaaccggactggaaatcggataaggccgtccttccgttcatttcgatgaataatctgccagtggtctctgtcagtgtgaacggacaacccgtcaatgtcttcattgataccggggccgatttgtttgttatcaaatctgaaatggcgaagactctgggacttaaatcgcaggcaagtttaacggggacatatgccggcggaaagacagcggaaacccattattccaggttacagacgttgggtcttggagacgttacattacatgatgttcctgttgatattgccgatttcccggagtcatgggctttcaccgatgaaaaaacgggtaaaagaattgatatcgacggtattttatccactggcgtgtttcaccagtttctcaccacgatggattatccagagcgacagctggtgctgatgcccagaactaaagtcagtcagcgtggggggaccgaacatgatggcacgcatataccctttattctcgacggaacgcatttcatgatagtcaaaggtgcagttaacggtaaggagggcatgactttcttcctcgattcaggtcttgacgacccggaagcttcaattctgttgcagaaggaagcactcaattatgccggggtgaaactgcaggacggagaacactatgcgccagatgacaacaaaggtgggcttggcggaggcggttttgctgtaacccggcttcccatcgacagtgtttccgtcggcgctttacatcagaaggagttaaccggtctttttggcgtgttaccggaagatctctatttcactgaatccggtatgattctggatggttttctcagtcaccattttttaagacactacaaatggactatagattttgactcaatgatgatgacgtttcagtaa

SEQ ID NO: 186381 - DNA, 411 bp, Klebsiella oxytoca
atgaaaataaaagtactgagtttattgtttgttattttctccctcaacagcgtcggcatggcagcaccacgagaggagcattcgggaaaagttaatcaccattctgatattcaaaaagagcgtaaaggctcctcccgaccggaacataagtacgacaaagacaagtcttctcacagaccgacagctgtcaaacggaagcccggcgatcgttctcctgtttattattctgtatcagaaccgcttggaggtaaacgcatttacatgttaccaggaggagccagaaaaatgaagtcaggagagggggatgtgtatattgtcgatgatacttattatcgtcgctataacgacggatattaccatgttatatcgccttttgatggaacggagatactggattacagggggcgatga

SEQ ID NO: 186382 - DNA, 219 bp, Klebsiella oxytoca
atggcaatcattgtaaaactggatgtattactcgccgcaaggaaagtgaagtcaaaggagcttgctgatgctattggcatcacagagcagaatctttcgttgataaaacagggtaaaattaaaggttttagattttcaaccctggatgcattgtgcaaatatctcgattgtcagcccggcgatctctttagttatattccactgaaagaagaggagtga

SEQ ID NO: 186383 - DNA, 564 bp, Klebsiella oxytoca
atgtccactgatgcactggcgcaactcagccaaagaatggtctcattcaccatgatgctgctgattgctgttgtcctgttaaattcgcttgttctgtttttccccacaatatccttttcggatgatttgtacgggataagcctgtcgcttgatgaccagaggctttctgctctcaatgtcagtctgcaggcgttgccatggtggcagtccgcaggagtcggcgtgataagcctgctggttatggccccactctgttacagcctgtatcaactacgctctttgtttaaagcttatgctcgccgcaactatttttctgcccgttcggcacagcatatgagcagagtcggagcctcactgggtatctggacagtgatggatctgctcgccagtcctgttctcagttactggttgtctctggctaaccctgcaggcgaacgtgaaatagtattcggatttgaattacatcatgttgtctggatttttatttctctgtgcgtgatggcagttgcaaaaatactggaaaaggcaagtattctgtacgaagaaaataaactcttcctgtga

SEQ ID NO: 186384 - DNA, 552 bp, Klebsiella oxytoca
atgaatattaaacgcgtatttctttgcgctatggtttcctctgctctggtttctggtcctgcatttgccgcggagaccggtaccatcagtttcagcggtctgattaccgggagcacttgtaatgttgatgtcggtggtcctggtgctgatgcgaccgttgtcttaccaaccgtcagcgctgataccttagatgcgccaacgaaaaccaatggtaaaacccgtttcacacttaacctcagtggttgtacgggggcgttaacgcaggcaaaagcttatttcgagggcggtaacacggtagataacattaccgggcgtttgaaaaataccgattctactggcgctactaacgtttccctgcaactgcgtgacggccaggacaacagtgtcatcaatgcgggcgatgcggcacaggccggcacttccgccattggttacgctgatatttcttccggcagcgcttccctgccttattacgttgaatactacgcggaagatgctgtgaatgccggagctgtggcatcccaggttacctatagcctcatctacaagtaa

SEQ ID NO: 186385 - DNA, 714 bp, Klebsiella oxytoca
atggacgtcagaatcccttattccgtgcaggtcgctgctctttgcctggtcaccggtggattttctcttcaggtgcaggcgggcgttatcattaacggtacccgggttatctatcctggtgatgatagtgaaattaccgtccaggtaacaaataatggtaaacgtcctgttctggttcagagctggctggataccggcgacagccaggccaccccggacaccatcacaacgcctttcgtactgacgccgcctattaaccgactcgatgccggtaaagctcagtcgttgcgagttaccgccatcagcactgcatcacttccaaaggacagggaatctcttttctggctgaatgttctggaaattcccggccgacccggaactgattttaaagctgagaattacctccagttagcagtccgttcacgtatcaaatttttctggcgtcccgcctccctgcgtgagggcgtgacgagcgcgccaaagtcacttgactggtctgcttcatcacagggactgaaggtcactaatcccaccccttactatatttccctggcaaccgtcaccattgccgggaaaaccactgaggtggacatggtcgatccattcaacagtcgcatctttactgatatccgttcggaacgcggcaacacaatcaaggctgaatggattgatgattatggcgccatccgttctcagagttttaccgttaagtag

SEQ ID NO: 186386 - DNA, 2499 bp, Klebsiella oxytoca
atgcagggaattgcactgcctggcaaagcggcacttttgtccgtttccgttttatatgctcttgcgtttaacgccgcggcggaagaatccgctgaaataaattttgatgcctcctttcttcgcctgggtaacggccaggtccccgatttgacgcgtttctcccgcggggccagcctgtcacccggtattcaccgggtcagggtgttttttaacgaacagccggtggtgaatcaggacgtcctttatgtcacagagggtcagcgtagcgttccctgtctgtcgacggatttgctcagacagctcccgttgcgacacgagaaattgccggccagcgcatatgctgttgatgccggaacttgcatcagcctggcaacactcattcccgacgccacggtaacaaccgacagtaacgcacagacgctgaatatcctggttccccaggtctgggaagatcgcagtgccagagataccgtaccagccgcactctgggacagtggtattccggccgcgctgctgggctacagcctcaatgcctacagcagtgaaaacagcggttaccatcatgatagcctttatgccagccttaatggcggtatcaacattggcagttggtatctacgccataacggcaactggagcagggataaccataccggcagccgctatcagacgcagaacacatatctacagagggatattccaccgctcaaaggccgcatttctgttggacagattaacacctccggacagttgtttgacacacaacccttttcagggctgaaaatcgaaagcgatgagcgcatggagcccctctcccgccgtggctatgctccggaaatccgcggtatcgcccggaccagcgcccgggtgacagtccggcagaacgacagcctgatttacgaaaccaccgtcagtcccggaacatttatcattgatgacctctatcctaccggttatggcggtgacctggatgtgacggtgtatgaggcagacggtagcgagcagcattttcaggtaccgtttgcctccgtcacgcagttgctgcggccgggacagtcgcgctatgaactctctgtcggagagctgaacaatcgttccctgcacagtgacccgacactgtggcagggaacctggcagcaggggctaaacaactggctgacggtgtatggcggcatccagggcagcgaccattatcgtgcaggtcagggaggtgtgggcattgcaacgcgtttcggagcggtgagtgcggatatcactcaggcacggacctcgcttggcaataccgggcggggagacgtcactcgccaagggaagagctaccgtctcagctacaacaagaacatcacggaaacggcgagtaacgtggcactggcagcttaccgtttctccactcggggatacatggactacctgacggccatgcagacgcgggaaaccgttgcgcaggatgtctccgcagacagtattcgtcgcagtaaaagccgctatacgctaacagcgtcccagggattaccgggcggctggggccagatttacctgagttcatcggtacagaactactggaatgctggcggtatcgataaacagtatcagtttggttacagcaataattttaaccgggtgagctacgggataaatgccggacgcagctggagcgcgtacggacgctcacaggatacactatcactaaatctgagctttcctctgggaaatacccgacatgcgccgaccggacgactcagctatgaccatacccggcacgctggacacagcctgcgcaccggtatcaatggttctgctggggaggataaccgcttcagctacggcctttcgggtacggcgacaagtcagggtgtcggcaacagtgcgacggcaaatacccagtaccgggcggattttgcgtcactgaatgcggcgctgggcagcggacgacattatcgcagcgtttccggagggatgagcgggaccgttatcggtcacagtggtggtctgacattgagcccgtaccagggggatacttttgccttggtggaagcgaaaggtgctgaaggggctggtgttaatggctacagcgcgatacagattgacaaccgtggctatgcggcagtgccatacatgagcccgtaccagttgaacgatattcgtctcgatccgaaaggaacggcctccggggtggaactggagaatacctcgcagaaagtggctccacatgaaggtgctgtggtgaaaatcagctaccagacgaggcggggttatccggtgctgatcaagataatggatgcaacctctccgcttatctttggtacggaggtctatgacgctgcaggtcaggctgtaggttacgtgggtcaggggagacaaatttatgcacgtgtagatcagataagcggcgtgctgaacgtcagtgttggcagcagactgtgccagttaccttatgctctggcgcatgctgactccgggaaacttgagagcgtcagtctccgttgcgaatatttataa

SEQ ID NO: 186387 - DNA, 1050 bp, Klebsiella oxytoca
atgttgagaatatttaaacaatacagtttcctgattagtgcactgtcgggtgtggtgttatttttttctggtaattcagagacgctggcggcatgtgttatttacggcgctccgccaccagcgacgcaaacatataccctgccatttaatagcatttctcctaacgtacataacgataatgtattgttgagtgtgacaaaatatatgaaattggcagaggtaagatgcgctacgaataccacgtactgggtccataagatagagaactccttagggacaacaggagtttttgtcggtgattctcctgtctacaaaacgaacattgaagggctgggcgtttacatcactaacataaaatccaatgggataggtatttcctctacaactcaaaacagttatgtagtacctgtgattagcatgaggttaataaagttaactaactcaaccgtgagcggttctttagatgcttcaacattgcccactattagtttttatgcgacagaatccagtagcggtgcatttaacagtagcgcagtacagataacaaaactgtctgttaatgggattataaactatgttgttcccagctgtaacgcagaagataaagatatctggttaggtgaacataattcgtcagtctttaccggtaattcgacaactccatgggtagatgccagtattgtcatgacttgtgacagggcattcagtaatgcctatagcggagttcaagaaagctatgctacgggtattgttacaacgtctacacgccctgaccacttttattcagtctcgctggaatcgattaatggattcattgatagcgcgcgcggaattatggaaattgatagtggcggagccactggtgtaggcatccagatttcccggactcagtcagaacagtcctggtcagcccttaactggattgatgaacataaatccacaaccaatacatttaaaattcctctctacgcccgtttagttcagacaggcagcacagttacttcgggtcagacgaacagtaaacttctttataccgttcagtataagtaa

SEQ ID NO: 186388 - DNA, 501 bp, Klebsiella oxytoca
atgcagactgatagaagactaagtcctttgatactgacagggcttgaattcactgaaaaaaaattaaaagagaatccatcaggaggtaaatctttcatttatttacctgccatcagacttcagactgaatgttattgtcacttaacgcggttatttaacgttataggtgtttcttcacaagcagaaaacatgtttttaaaaaaacacctgaatctgagcgaccccattaacaccatcattaaaaaactattatattttagagaaacacatccatatcatgatagtaagtgcgagttttgttggtttatttcaaagataaaacccgaggagcgtcaattattttatacattaagcatatcgaacaattaccgtatcgcggccggacaacttggtatcagtgaaaaatttattcgaagaaaggtatattcatttacctccagaatgaatatatctaatcgtcgtctttttcattggtggatttcttgcttgacaagggggtga

SEQ ID NO: 186389 - DNA, 1326 bp, Klebsiella oxytoca
atgaagaatgatttatctgtatatgaacctcatagatatgttaaattaactcatcctgaatggtcgaaaaatgccacgatttatcaagtaaatatccgacagtttactaaagaaggaaattttaaatcctttgaaaaacatctggacaggattaaggaccttggggttgatattctctggcttatgccaattcaccctatcggtactgaggctcgtaaaggaacactgggaagcggttattctgttcgtgattactttgatgttaatcatgagttcggtacactcaatgatttaaaagtattagttaaaaaaattcatgaaaagggaatgtatgttattcttgattgggtggcaaaccattcatctcgtgataattatctaactatcaaacatcccgaatggtattcaaaagatcgcaagggacggtttatacccacaccgtggtatgactgggatgatattattgaatttgattataataatgctgagttacgtgagtatatgacgacagcgttaaaatactgggtaaaagagtgtgatatcgatggctacaggtgtgatgtggctggttttgttcctctcgacttttgggaaaatacccgccgggaacttgatgaaataaaaccggttttcatgctggcagagtgggaatccagagaccttttgcaaaaatctttcgatatggtctattcatggactctttgggataaaatgctgcaagcaattaacaccggaaatctgttacctcttttagaatggatggcacatcaaaccaaagcttttcctgcagatggaataagtatgtcatttattgagaatcatgataaaaatgcatgggaaggaaatcagtttgctaattttggtccagggttgaaagctgctatcgttatgactgtgatggtgaaaggtatgccattaatatacggaggccaggaggccggattggatcgctctctgtccttttttgataaggatgaaattatatggcaagaacacaatatagctgatctttataaaactttgtttcatcttaaacatattaatcgtgccttatggaatgctcagtatggtggtgagatggttaggattaaccacaatcatgaagataaggttatagctttcatcagagagaaagatgaagacgctgtaattacgatgattaattttagtgatgaaaatttgtctttacaattagagaaggacgaatatactggcttatatatagactggttcaccaaacaagaggttaatattgaaaatatgactactgttgcacttcaaccctgggggtataaagttttcagtaaagccacaaaaacagtttag

SEQ ID NO: 186390 - DNA, 1188 bp, Klebsiella oxytoca
atgataaaaaaaatcatattcatggcaacatgtattatcacctattctacagccccatatgcagcaatgcaggaaggaaaattgcttatctggggtggaacaccaggccatggtcggcaggctctggagagcataggcaaacattttcaagaagatactggcatttctgtcacagtagagcaacccaagaacatggaggaacgattccctttagtagcaagcaatggtggtggtcctgatattgttatttatgcacatgatcgatttggtggatatgcaaaatcaggcttgctatatgaggtaaatccttcaactcaattcaaagagaaaataattccattcgcctgggatgcagtgaagtataatgggaagtatgtaggttaccccatgagtattgaagctcttacgctaatatggaataaagatttaattaaatcaccaccgactaaatgggaagacatccctgcgattgacgctcaactcaaaaaacaagggaaaaaagctatcacatggaatatttcagagccctatttctcctggccattgatctcttctgctggcggatatgtgtttaaaaagactgacaccggttatgatacaaatcagataggtataaataaccatggtgctattgaaggtcttgaatttatagctaacctggttaaagatggtattattagtccagatgttgattatccacttgctgaagctagctttaacaaaggtgaaacagcaatgattatcaatggtccctggtcctgggataacattggtgccagcggcattaactacggagtaacgcttctcccaacatttaaaggacaaaatgcaaaaccgtttgttggagtcataagtataggtatcaatgcagcaagtcctaataaggaattagcgattgaatttattgaaaactatctcatgacggatgacggacttgctactatgaacaaagcaagtccattaggcgcagttacactgaagagctatcaggaaaaactggaagaagacccgcgtattttgtcacttatgttaagcgccaaaaatggagatatcatgccaaatatacccgaaatgagtgcattctggtatgcagagaaagccgcaatcacaaactctattaataaaaaacaatcacctgaagatgcacttaatgcagctaaaagtagattaatgagtgcacttgattaa

SEQ ID NO: 186391 - DNA, 303 bp, Klebsiella oxytoca
atgatgctctctgacgaacagcactggctcaaagctggcatcgaatttaacgatggagcacctgcaatcgggagtgcactcacgccgggaaattccaactgtgctacaggactctttcccggcgatccgaaggaaatctggctgcgtctgacccgcaagatgctttacgattggagtactcctcagatggacagaactggccattacttcgcttatgtcattttcccgcgggcccagtgcactattgttccgctcactacagctatcgggccagtgaccggcgctgcgctgactggctgttaa

SEQ ID NO: 186392 - DNA, 1506 bp, Klebsiella oxytoca
atgaaagtgctgagtaaaagacaaatatcgctggtaaatcatttagcacaagtagacggctggttaagcacggccgaggcggcgaaacactttcacatctcagtgagtacgctcagaagagacgttgaagctataaacgactttttcgaagataaaggtaattacatactttgtaaacctggcttaggactgcggcttgatgcttgcgaaatagtatctttgccagtcgtatctccagacgaacatgttgcgaacctattaaaaagcaaaagacttgtgggtattgctagcgatttactgacgcactcaccaacgccattatccatcagttttttgtcagacaggtatttcattagccgctcctctatcgtcgaggatttaaataaaattgataaatggttgggcaggtttgcgttagtgatgataaagaatcatacgggaacgtatgttgagggtaacgattacgatattcgcatggctctcaaggagatcataacgcatagtgttttatgtaattatcaaatgacagatagtcgcatcgacagattttctcgcgtacagctgataaaagagtttggaaaagaaaacgtcacaaactgcatcaacctcatcgcctttattgaagatgaattagcatgtgcaatcagtgagccgtactacaccaatctgttctcacatttactggttactatcagacgtatggaaaagagcaatcatcatactgatagtaacaatgttcaaactcaggataataaagaatggaaggttgccgtgaaagccatttcatggttagagaaaaaatatgctttttcatttcctgagattgaaatcagctacatctaccagtatctaatttcatccggaaaacatactgcccaactcaacctttcggatattgtttttcaagacaaagaggcagtaacttatgcaataaacctgaccagtgctctgtctcagtcgcttaaatatgatttgatatcagataaagtgctgttgaactctctggtcatgcacatcaagccgatgctaaaccgactgacttatcggatcattattcataatcctcttcttgatgaaattaaaaaagaactctctgaggttttcagtgcggtcagaaatgcgactatggcgataaataattactgcaaacacgatccaccctcagaggatgaggtggcttatctgactgtttatattcaggctgcgatagaaaaggttaaagagaacaaaaaaataatacttgtctgctcaagcggcgtcggcacatcacaactactgtatagccggatcattaaagcattccctgactgggagattgtcgacattgtgcctggaagtaggcttaaaaaaacattatctgaaaaaaaatgtgacttaatcatttccacggtaaggatagaagaaatgatgatccctgtggcttatgtatccgctcttttttcagcaaaagatattattcgtgtgacggaagctttgttcaccgaacacaaccttcaggagaaatag

SEQ ID NO: 186393 - DNA, 474 bp, Klebsiella oxytoca
atgttagataaaattgttttaagtgatctattaagcaaagcttgcgtaataactgatatgcaggcgaacagtaaaatagatgtgattgagcaactgacgcaggcgctctgtgaacaaggtgtcattgaaaataaacaaggttttatcagggatgtgctagcaagagaagctctgggctcaacgggcttcgaaaatcaaattgctattccacatggcaaatcccaatgggttaaagaaacaagaattgctgttgccaggcttaaggatactgtcgactgggaaacaatagatagttccaatgtgcgattggttattctttttgccgttaaagaagccgatagcggagtggggcatataaaagttctggctcgtatatcaattgcattaggtgacgatgaggtcgtcgaaaaactacttaatgcaaactcacaagaggaattgtaccggttaattattagcaataccggagaatag

SEQ ID NO: 186394 - DNA, 1407 bp, Klebsiella oxytoca
atgaaaatcattgcaattaccgcctgtccaactggcgttgcacatacataccttgcggaagcaaatcttaaaaagaatgcggcaaaaaaaagcattcctttactagttgaaactcatggtgctgtagacagtgaatatatttttacagatgatgatatcaagcaggcagatattgtcttaatcgctgccgataaggttattgatctctcacgatttcataataaaaacattatccgcgtctcagtgacgcgtgcagcgaaagatgcttccgggttactggatgatattgtatctggcaagttacagcccgaacgacatcttgagtcaggtatcccggaaacgccgccacaaaaggataaggataaatctctcgtttctcagatttatatccatcttattactggcgttaacttgatgattcccttcgtggttgccggtggcattctgattgccctgagcttctcatttggcattactgctgcaacacctggcgatccaaattacaaccctgttgcaaaaatgctttctgatatcggtggcggcgcagccttcgcactaatgctgcccattctttcgcttggtataagtaaatcgattagcggtaatatgggtatggtatccggggccgttggcggcatgatggcgatacaaacagggtcgggatttctcggagcactactggccggattcctggcggggtatatcacactgcttatcgtgaaatatatcaatcttcctaagtccgtagctggcctgaaaccaatactgatcgtcccgttactgagcgtttttattaccggcgcgttgatggtgttagtaattggcgagcccattaagtttcttctcgactcgctaaccttattccttcaaaacctcgggaataccaacgcagccattatggggcttttgataggcatgatggtggccttcgacatgggcggaccgctgaataaaaccgtctgtatgtttgctatcggcctgatgtcaacaggaatctatgaaccgattgctgcctgcatggcagctggcatggtaccgccgttaggcattgcgctcgccaccacgttgtttggtcgtaagtttacccgtcaggaaagagacaccggcaaagtcacctatgttcttggcctgtcttttatcacagagggtgcaatcccttatgcagtggctgatccgctacgcgtcatccctgccattgtcgcagggtccgggctcgcaggtgccctctctatggctctgggatgtgcatcaagagctccacatggcggcgtatttgtcatgtttattccgaatgtaattaccaatgttgtcagctatatcgctgccattgctgcaggcgcattactgactgcccttattcttcgttttattaagaaagacagcccagaaactgtccaggagatgtaa

SEQ ID NO: 186395 - DNA, 861 bp, Klebsiella oxytoca
atgcttatgaatatgaaagatgtattatccgtagctcagcaaaataaatttggcgttggtgcattcaatattgcctctgccgaatttgccaggctcgtcattcaggttgcagaaaagcttcgttcccccgtcattcttgaagtacatcctgatgagcatgaatttaccggggatgattttatttactatctccgcgaacttgctattaaggcaacagtacctgtcgtcatccatctggaccacgggcagacactggaacagattatgcgggccatacgcactggctacacatcagttatgatcgacgcctcagcccttccatttgaggaaaacattgcgatcacccgatatgtaacagaagtggcccatgccgccggggtatctgttgaagcggaactcggcacgatcggtgtagcggagggcagcagcgaaggtggacatgctgaaatcctttataccgatccgcagcaggctgagcagtttgtgagagagacaagggtcgactcgttagcggttgcgattggaacgtcacacgggttatacccggcgggaaaacagccgaaactggatatcgagaggctaaaagccattaagcagcgactgagtattcctttggttctgcatggtggatcaggtaataaggatgctgaggtggcagaatccatccagcacggtgttggcaaaatcaacatttccagtgatatgaaaaaagcattctatgttgccctcgaagaagaactgaaatcaagaagtcacgaacctaacgctttatatcttaagccaatggacgcggcgaaggagattgtggttcacaagatggaactgttctcctccatcggcaaggctgctctttacggttag

SEQ ID NO: 186396 - DNA, 282 bp, Klebsiella oxytoca
gtggggactgggacgaaagcctcgtgccggctgaacccggtcagttaccgtgagcatggtctgccagtgtcagagaatctgctgaagcagtacttatccgccagcggcccgagtcacaagtgggtggatgacatcatgtatcttcgcaccggtgaaggctggctttatctggccgcggttatcgatctgtggttgcggtcagtcatgccctctgggatgccagcacagcttgactgcgatacgttacagatggcgtggtggtggcgtaaacatccgggatag

SEQ ID NO: 186397 - DNA, 1233 bp, Klebsiella oxytoca
atgaagccattttcgggacgccttagcaggtatggcagcgttctattatttccactggcgatggtcatctacgatttttcagcctatctgaccacggatctcatccagccgggtatcatccacataatccgtgaactacaagctgatatcaccctggcacccgcctctgtcagtctttatatggccggaggtctggcgctccagtggctcctcggtcctctctctgaccggattggtcgccgtccggtcctgctcacgggtgcaatgatctttgccctggcctgtctgagcatgatgtttgtcaccacgattgagcaatattttattgcccgttttatacagggaaccagtatctgcttcatctccaccgttggttatgtatcaatacaggaggcctttgatgaaaaggattccattcgtattatggcggccctgacctccatcgtcttgcttgcgcctgtcatcggcccactggctggagcagctctgatgtcctttatgcactggaagctgttatttgcgatcatcggagggatgagtctgatggcctgggccctgctgatgtttaaaatgccggagacggtcaaacgtcagggccaggggtttcatcccggagatgtattatccgattttatcagcgccttcagacatcctgtagtactgacgggggccctggccctgtcgttcggtaatctgccgatgattacctgggtcgcgctctcaccggtgatcctgattgaggatggcgggatgtcacccggtatgtatgcctggactcaggtacctgtatttggcggggtgataattgccagcatcatcgtcgcgaattttatcaaagaccccacctcaccgcgctttatctggcgtaccgttccagttcagctaagcgggctgtgtatccttctgcttggtaatttgtgttggccacatgtctggttgtggtcggtgatgggaacaagtctttatgccctcgggataggaatgctgtatcccgtcctgttccgttttgcacttttttctcactctctgcctaaagggacggtgtcagccaccatcaacattgtggcgctcagtttcatggcggcctcggtggaagtggcgcgctgggtttacttccaggctggcggcagaatagcctttcactgcctggcgctgatatcgggaatcgtcgtcatgatgctggtctcgcgcttgttaaaactccgtcaacaacatctccttcagccagactga

SEQ ID NO: 186398 - DNA, 393 bp, Klebsiella oxytoca
atgttttcgtacattatgctgggaacgaaccatttgccacgcgccatcgagttctatgacccgttaatggcattgctggggcacgccaaagccggtcgtaacgaacagggggcgtcctggggcacattcaacggcaatagcacctgtggcctgtgtgtgggcaccccctttgaccagcagcctgccggggtgggcaatggaacgatggtggcgctcaatgcccgctccgtcgaacatattgcggaactgcatgccctcgctctgaccctcggcgggcgtgacgaaggcgctcccggtcaccggccgcagtacggcgacggctttcacagcgcctacgtccgcgatcccgacggcaataagctggcgtttgtttattatgcgcctgcagcttga

SEQ ID NO: 186399 - DNA, 615 bp, Klebsiella oxytoca
atgaaagtcacatggactgtcacgcctgtggggtatcagcacattgccaaacgctgcccctcctgcaatgtaaaacgcgacttcgccccttccggcgccatccgggtgaattcgcaaaagaagttgctggatatctggagcatttataaatgcacgcactgcgattacacctggaatatcgccctgttttccaggctgcacgtcagcaagattaaccgcgaactgcttcagcgcctgaggcagaacgatgctgccatggttcgctattatgccgctgatatcgcgacgctgaagcgcaaccgcgctgagctgtcggggcaacctgattttcgtattcaggagtattggtcggtcaggctgatggcttgtcagcgaataacagtgcgcgttcgggttcttcagtcttttcgcgtcagcctgctgtcgatactgaaaaagcagctcaagctgagtacggctgatatccgctggttggtcgcgacagggcagatcaagggtataccattaaaacagctcaaggcgaaaaaactgaaggcgtcagaatacgattttcagctggcggcggaaacgctgtatgcgcgacgccggattatgttaacactgcaaggtagataa

SEQ ID NO: 186400 - DNA, 252 bp, Klebsiella oxytoca
atgacacagcacgagcagttttgtcaggcttgcggaatgccgatgtccgcacctgatgcgcagggggccagcgataaatattgcgcttactgtagcgacagcgacgggaacctgaaatcctgggatgaagccgtttcaggtcttgctggctttctcgactcctggcaaaaggtaggtgtgatggaagcacgcaagcgcgccaaacgctacctgacagcgatgcctgcctgggcacataaagcggacgaataa

SEQ ID NO: 186401 - DNA, 1209 bp, Klebsiella oxytoca
atgaaaacagaacgccatcatgaaataattaaattgatcagctcagcaggatttgttcgtgttagtgccctttctgaacacttaaaagtaacgaaagaaacaattcgttcagatctcaatgagctttcccagagaggattattacatcgctgtcatggtggtgcttatatcgatattagttctctagatagcgtcaccaaaaacgaaatcatacatgtccttgaatcagtggattcactcgacacaataacaaagggacctcctgtcatgataaataacgtttgtgttttgggttcatttaatgttgacattataaattatcttccgaggcttccagatacaggggaatcattactttctggtaaattaatcttctctccgggggggaaaggttgtaaccaggctcttgcagccagctatgctgatgctaatgtaacctttattactaaaataggctccgatcattttagtgagtacgccagttcgtttatcaatgcatcaatcataaaaaaacctgtcatttataaatcagaagaggttcagacaggcaccgcctccattcttgttgatgagtctacaggtgaaaacataatagctattttccctggagctaacatgacttttttacatgatgaagtttccctccagcaagacgctatagctgaatctaacattttactattacagctcgagaccaatacagaggctttagcaagagctgttgaactcgcgaagaaaaataacatacctgtcattataaatcccgctccttataactcaggcgttaaccatttactggatggcctggattatctgacacctaatgaaaccgaggctggattactcactggtatttctgtaactgatgataaatctgccatggaagctgcaagagcaataaataaaaaaggggtgaaaaatgtcgttattacccttggcaaaaagggctctgtggcctatgacggcaaaaggttcattgtgtctccagcttttcctgcggtggtaaagaacacagctggcgccggtgatgcatttaatggagcccttgcatcagagcttgcaagagggcgctctctggagaatgcgttactctacgcaaccgcattttcatcactggccgttgaaacggctaatgcctcggatatgccggataacgaggcagtactgcatcgaataaaaacaacgcagtaccgtcagataatttcttaa

SEQ ID NO: 186402 - DNA, 762 bp, Klebsiella oxytoca
atgaacgctgatacttcctccttaaaaatcctttttatcggtgaatcatggcatatccatatgattcactcaaaaggatacgacagttttacatcaagtaaatatgaagaaggcgctacatttttactggaaaacttacgccaaaataacgtctccgttacttatatgccagctcatcaggtacagatttctttcccacaagagcaggcagaactggagcaatatgatgccatcgtcattagcgacatcggcagtaacacgttccttctgcaaaatgatactttttatcattccagaatcaaacctgacgcgctggacatgataaaagagtatgtcaaaaatggcgggggattattaatgataggtggatacctttcgtttatgggaattgaagccaaagctaattataaaaatactgtattagctgaagttcttccggtaattatgccagatggcgatgatcgtatcgaaaaacccgctggtgtgtatgcctctccggttgagcatgagcatgaaacagtcttaggtttctccgactggcccatgtttctgggctataacaaagcagtggcaaaagaaaacgcaaccgttgcattaactatcaataacgaccctctccttatttatggatgttttgaaaaaggcaggacagcctgttttatgagtgactgttcaccacactggggtagccacgaatttctgaactggaaatattacaccccgatgtggttaaacattctgcgttatatcgccagcagttaa

SEQ ID NO: 186403 - DNA, 966 bp, Klebsiella oxytoca
atgaacaaaagcaaatattctgttcctttgctgatgcttgcaacaattcttgcaggtacgctttctccaatgcagtctgctgttaatggcgaactcggtcactggctcaacgatggaaatgcctgcgcagtgatttctttcgccagtggtttagtcgtgatgttctttataattatggccaaaaaagagacccgtcagcaatttgcctctattccttcactgataaaacagcggaaaataccgctatggaactggtttgctggtctgtgtggggcaatggtggtgttttcggaaggtgcatccgccagcgcactcggtgtggcaacttttcaaacagcgttaatctcggcactcattctttctggtttactgtgtgaccgatttggtattggggttagcgagaaaaaatacttcacttcataccggattatcggagccattttcgccgttgtcgctacggtgtttgtggtttctcctcagtggcgttccacgtcgtttatccttctggccattctgccatttatggcaggtttactcgctggatggcaacctgcaggtaacgcgaaggtcgcggaagcgactggatcgatgctggtatcaatcacctggaatttcatcgtcggttttaccgtcctgggtatcgcccttctcgtcagaatctcgcttggtcacgtcagcttccagttgcctgatacatggtggatgtacctcggcggaccactggggctgatgtccattggattgatggcgattctggttcgtggacttggattattgatgctgggcgtggcctccaccgccggacagcttcttgggtcagtacttattgatgtactgattccggcgcttggcaataccgtctattttgtcaccctggtaggtacggtatttgcccttgtgggggcgattgtcaccaccatccccgacttcaaacaagcacggctggcgaaagcggaggcacagtaa

SEQ ID NO: 186404 - DNA, 327 bp, Klebsiella oxytoca
gtgagcaagagcgaaaaacgtcagcgcaccgagctgcttctggggatcagatgcacgccggaggagaaaacagaaattctggaaaaggcgaaaatcgccggtctcagtaccggggaatttctgcgccggtgcgcgctcaatcgtaaaatccagacctggagcgatcagcagaccgtccgtgaactgacgcgcctgggggctctgcagaaacacctcttcaatgaaggccgggatacggtcagtgccagctttagcaaacagtatgctgatatcctggtgaccattcgcgacacgctgctcaggctcgggcaaaggagcggcgtatga

SEQ ID NO: 186405 - DNA, 324 bp, Klebsiella oxytoca
atgacagcaaaaaaatggttttccgaaaatgatgtgaatgcggcccgcgaacgactgagtgcgctgccggatctcacacgggagcggctcacgcgtgcggaggtgctcgggcagttgcgcgacgatatccggacgttacacaggaagaaaggttacacccttccggagctgcgccagcagctggagagtgtcggcctgaccgtcagcgagaaaacgttacgggacctgctggacggtgggcgaccggcacgcagacggacaaacagtccggctgttgcagaagaaaaaaaggcgggcggtctggcaggtggaaagtcagattaa

SEQ ID NO: 186406 - DNA, 834 bp, Klebsiella oxytoca
atggcccgtttatcatccgttttccgctctgccaacgtcatccgtaaagagcgcgcgctgactaatgacgaactgatgcgcttcgttccgagcgtcttctcggaggaaaagcatgaatcccgcagcgaacgctacacctacattccgaccatcacgctgctggataatctgcgcaaagaagggttccagcctttctttgcctgccagacccgtacgcgcgatatcggcaagcgcgaacacaccaaacacatgctgcgactgcgccgcgaaggtgaaattgcgggcgaggaagtaccggaaatcattcttctcaacagccacgacggcagcagcagctaccagatgatccccggtatgttccgttttgtgtgcatgaacggcatggtctgcggaaagacttttggtgaaatccgtgtgccgcacaaaggcgacgtggtggggcaggtcattgagggggcctttgaagtgctggagattttcgacggtgtgaaagaatcgcgcagcgagatgaaagaaatcggcctcagtcgtgacgaacagcgcatttttgcggagattgcgctcaactggaaatatgacgagaaaggggaaggaaaacatatcccgctgacggctgacgatgtgttgcaggcccgccgccacgaagacaaaaaagacgatctgtggacgacttaccagcgcgttcaggagaacatgacgaagggcggcgtgtggggcaggaatgcgaaagggaagcatcagcgtacgcgccctgtaaacggcattgacggggacgttaaactgaaccgcgcactctgggagatggccgagaaaatgaaacaacttaaaagctga

SEQ ID NO: 186407 - DNA, 249 bp, Klebsiella oxytoca
atggtaattatgaccggttttgaactcagattatggcgaaagagccttggctggagccgcgacagggcagcagaagagctgggcgtttgcctgcgttcttacaaagattacgaaaacgcgtcagaagttaagcgggccatagcgttggccacgatcacgctttccgtacagggtatcatgccgctaatatcacgccctcagatcagcaaatcgaaagcccttgagatgcttcagagaatgctgccctga

SEQ ID NO: 186408 - DNA, 162 bp, Klebsiella oxytoca
atgaaactaccacgaaattcccttatctggtgcatattaatcgtgtgtttcacgctgttaatattcacatatcttacccggtcgcgcctgtgcgagattcggttaaaagacggaaacagggaggtcgcggcaagcctggcttacgaatccaacggtaagtag

SEQ ID NO: 186409 - DNA, 792 bp, Klebsiella oxytoca
atgcgtctttcatattcgattctgccttcaatattatgccttgcttcatcttatgccttagctgcgcaagagcatgcctcggatgcggcacaagcgaacaaccctctggcgaatatgactgcatttaatatgcagaactattacatcggggatgtgagcggtacggaccaggatgccaatcagttctggttccgttatgcacaacctttttcattaggtgacagtaaatggctgttgcgtggttcattaccgattaatacctatcctattgcaccaacaggtggtcataaaacaggtttaggtgatctgaacttatttgcgtcatggcttattgatactggtaatccagcagtgagttttggtttcggtccgcaaattacagcgccgacagcaaccgatgatgcactgggaacagaaaaatggtctgcaggtctggttaacgtgctcttcgatgccagttcgccaaaattccagtacggttatctggcgtcatggcagcatagttttgccggagaagataaccgcagtgacgtgaatctcggtactttccagccatttttattctatcagttgggcggaggaacctatctgcgggcagcgcctatctgggtctacaacttccagaatgacagctacagtgttccgctgggtttaggtattggacaggttattaagcaggataaaaccgtctacaacttctttgtggaaccccaaggctcggttgcagaccgtggacctggacagcctcactggcaaattttcttcgggttaaatcttcagttcctgaattaa

SEQ ID NO: 186410 - DNA, 1977 bp, Klebsiella oxytoca
atgaaactaaaacctattgtcagaagtctggcggttgccggtctgatgtcaacggttatccttcctgcctatgctgctatatctcagaaggacgcaaccgacacaactaaaaaagccaacgacgcactttataatcaactgcctttttctgacaatactgactttaccaatgctcacaaaggtttcattgcggctctgccgacagacgttatcaaaggtgaacaaggtaacgttatctgggatcctcagcagtatgcatttattaaagagggtgaaaaggctccttctactgtcaacccaagcctgtggcgccagtctcagctgattaacatcagcggtctgtttgaagtgaccgacggtgtctaccagatccgtaacctcgacctttccaacatgaccatcattgaaggtaaagaagggattacggtcgtcgacccgctggtgtctgctgaaaccgccaaagtcgggatggacctctactttaaaaaccgcggtaaaaaacctgttgtcgcaattatttacacccacagccacgttgaccactacggcggcgttcgcggtgttgtggatgaagcggacgttaaatccggtaaagtgaaggtctacgcaccggctggctttatggaagccgctgttgcagaaaacatcatggccggcaacgtcatgagtcgtcgcgccagctacatgtacggcaacctgctgaaacctgacgccaaaggtcaggttggcgcaggccttgggaccaccacatcagccggtactgttacgctgattgccccaaccaacatcattgaaaaagacggtcagaaagaagttatcgatggcctgacctatgactttatgctggccccagggtcagaagccccgtctgaaatgttgtggtatatcgaagagaaaaaactcatcgagtctgctgaagacgtcacccataccctgcacaatacctattccctgcgtggcgcgaaaattcgtgaaccgctgccgtggtcgaagtacatcaacgaagccattgttcgctggggtgataaagctgaaatcatcatggcgcagcaccactggccaacctggggtaacgagaatgttgtcgccttgctgaagagccagcgtgacctctatcgttatattaacgaccagaccctgcgtatggctaacgaaggtctgacccgtgatgaaattgcggcaaacttcaagctgccggatagcctggcgcatacctgggcgaaccgcggttactatggttccgtgagccacgacgtgaaggcaacctacgtcctgtacctcggctggttcgacggcaacccggcaaccctggacgaactgccgccagaagaagcggctaagaagttcgttgactacatgggcggtccggatgccatcatgaagaaagccaaggaagactatgcgcagggtaactaccgttgggttgctcaggtcgtcagcaagattgtctttgcggaccctaaaaaccaggaagcgcgtaaccttgaagccgatgcactggaacagctgggctatcaggcagagtcaggtccatggcgtaacttctatctgaccggcgcacaagaactccgcaatggtgtgctgaaggggccaaccccgaacacagcgagcccggatacggtgcgcgccatgaccccagaaatgttctttgactacctggcggttcatattaacgggcagaaagcgggcaatgcgaaagccgtatttaacattgacctcggtaacgatggtggtaaatacaagctggagctggaaaacggtgttctgaaccacaccgctaatgccgaagcgaaagacgccgatgcgaccatcgtgcttgaccgagcgacgctcaacaaaatcatcctgaaagaagaaaccctgaaacaggctgaagataagggcgaagtgaaggtcaccggtaacggtgcgaagctcgatgagatgctgggctatatggacaagttcgagttctggttcaatatcgtaacaccataa

SEQ ID NO: 186411 - DNA, 1188 bp, Klebsiella oxytoca
atgaaaaaacatataattctcggttctgggttgctgttttcatcattgagtcacgccagtgctctctatttttatgaagtcgcgacagaagatacagcgctcgctggtgcaggtcaggcggcacgagctcaggatgcgtctacgctgttaacgaaccctgcagggatgactcgcttaccagaccatatggtcaccggcggtctgcaggccatgggcggagacatttcctataagctggatgacgaatccgacgggcggaaaagtcccggcaatgtgatgaaacttttccccaatgccagcatgttttatacccaacgtctgagcgatacggtttccgccgggatcgggctttatggcaactatgggcttggcatcgattttggcaattgggctggtgaccgccttatcaaaaaaagtacgatggtcgcgatgaccctgagtccaggtgttgcgtggaaactcagtgatagagtgtctattggtgcggcgaccggccttaactatggctttctctcgttaacccgaaacgtcgatggcagtgacgagaatcaaagcgaccacgactgggccatgaactaccggctgggtctgctgatggcacttaccgatcagactcgcgcaggcattacctggaccagcaaaacggactaccactttaatattgacggtaaagcgcgattcccgaatctgccgaacgtggaatatgacctgcctatttctgcgcaagttcgcgctccacagcagctgatgatgagtctggtacacgacatcgacaaacaatggtcggtcatgggcgatcttgggtggcaggactggagccagtttggcagcccgcagattaccgtaaacggtaaaacgagcgaccgggctaaccgcctgaaggatacctggcatacggctatcggcgtacagtaccggccagatgagcaatggcgccttaacgcaggtgttgccttcgatagcactccctataaatcgcaaagcgatattgcgctttcattacctacaggcgatgaatggcgtttcgcgacgggcgcacaatatcagatgacgcaggccagcaatatcggatttgctgttgaatacctccacatgcagtcatccagagttaaatctgccgcatttgaaggtgaatataacaacccctggttatggtttgcgagcgtgaattatagctaccagttctga

SEQ ID NO: 186412 - DNA, 633 bp, Klebsiella oxytoca
ttgaaccacaaagtgattcaacgtctgatgaatgtgcttcgtctcaaagctgcgataagagttaagcgctacagttcatggcggggtgaacatgggcgcgctgctgacaacatcctgcaacgaaatttcaaagccagcaggcccaatgaaaaatgggtcaccgatgtcactgaattcgccgtcagtggccgcaaactctacctttcacccattattgatctcttcaataacgaagtgatctcctacagtatttcagaacgtccaaccatgccgatgatcgatgacatgctcattaaggcatttgtcagacttgatgcgggttccaatccggttcttcattcagatcagggctggcaataccgtcatcgatggtaccaatatcagttacgagagtttggcatcatccaaagtatgtcccgcaaaggcaactgcctcgataatgcctgtgcagaatgttttttcgggactttaaaatcagaatgtttttacaccagtaaatttaaggatattgatgaacttaagatagctattgaggattacatacgatactacaatacccgacgaattagccttaaatttaacggacttagcccggttgaataccgcctaaagaactatccaggcagaaattaa

SEQ ID NO: 186413 - DNA, 132 bp, Klebsiella oxytoca
atgatagtaaaacgtactcctgggtatctgagctatctgcaaaagctgatcgaaagaatagtgctgcctcagttcgtcgataattctgaccttatcccttaccgaactaaggctttcaacttttttagataa

SEQ ID NO: 186414 - DNA, 510 bp, Klebsiella oxytoca
atgtccagacgtaagtactcttttgaacagcgcctcgaagtggttatgcactatttcgctaccgatgaaggctatcgcttaacttcagctcgctttaacgttcccagaacccaggtaagaatatgggttgcagcctatgatgcttatggagagcaaggtctgcagcccagaggtaagggtgtatcaatcgatcccggtatcagagtagaagccgtgaaggctgtactgacggggcagatttcccagacgcaggctgctgcgaaatttaacgtcgctggtgcagcctctgttgggaagtggatgaaggtgttcagcgaacatggagaggaaggtcttcgttctcttcgtgtaggcaaaaagagggcacttcatatgattgatgatcccgttgcgcttgaggtagcactggaacgttctaaagataaacgtattcaggagcttgaacagaaagtacggcgtcttgagttacgggtactttatctaaaaaagttgaaagccttagttcggtaa

SEQ ID NO: 186415 - DNA, 2001 bp, Klebsiella oxytoca
atgtcagtgaccgagtctaaagcaaaagcgccggttaaaaccagcaaaaaatcggtgaaccctgccgaatccgccgccctgaaagccgcgcttgaggctgctcaggttgagatggtgccgctgtcggcgctggtcaaatccccgctgaacgttcgcacgatcccctatccggctgacagtgtccgggagatggctgactccatcatggcgatcggcctgatccagaatctggtggttcactcgctgccggacggtatgtcaggtgtggctgcaggtggccgccgtcttgccgccctgcaacagttgctcagcgagcagcgcatcgatgccgggtatctcgttgtcgccaagcgtgtcagtgacgacctggcgatggttgcctcgatggtcgagaacaaccagcgggtggccatgcatccggcagagcaaatcaacgggttccgcaccctgtcagaacaggggaaaaccccggctcaaatcggggaccagctgggctacagtgcccgtcacgttcagcgcatgctgaagctggcaaacctcgccccggaactgatcaccctgctggcagaggacaaactcgacgtggagcagtgtcaggccctgagtctggagagcgacccggcacgtcaggtgcaggtgtatgaccaggtgaaaacctcatacggcagcacacccgctcacctgctgaagcgggccatcacggatacggaaatcgccgtaacccactcccgctttgtgtttatcggtcgtgaagcgtatgaggccgccgggggcgtggtgcgtgaggatctgttcagcgcccaggagggagacggaacggctgacggggtactggttgagcgtctggttcaggagaagctggcggcggctgcgctggccatcgaacaacaggaaggctggtcatggtcactggctcgtgagggatccgtcagaaactacggcgatgaccgcgagcattatctggtgctgccggcgccggagggggaattcagcgctgaggagctgcagcgtcttgatgaactgtacgccacgctggaggcaacagaaacttttgaggatgaagccgcgattcaggtgctgattgatgagattgaaaatgcggcgtcagttcgggcgtggacaccggagcagaaagcggcctgtggcgtggtggtcagtctgtatgacggtgagctttgcgtccagcgtggtgtccagaagaagatccagacggcggtctctgacgtcggggaacacggtggcgatcaggctgccgtacatgtggtcacccgcagtatcccggatgcggcagagggcatcagcatgccgttgctgaaaaaaatgtcttcggaaaggacactggcggttcaggccgaactggttaagcagccacagaaagccgtggccctgatggtctggcggctgtgcagttgcgtgtttgactactgcaccaccacccggcatccgttcgtcctgcgccttgaggtgcatcacagcggcctgaccagtgaagccccgaacggagaggaaggtcaggcatggcggtatctgatgcaggagaaagcccgtctggaagccctgctgccggaggggtggcagaaggatttcaccaccttctttaccctcgacggacagaccctgatgtcgctgatggccttctgtactgcctgttccgtcgacggtgttcagacccgtgaatgtggacatacccgccgcagtgacctcgatggcgtggaggcggcgctcgggttccatctgcgcgactggtggcagccgacagcggataacttcctcgggctgctcagcaaggcccagattgtggcggcgctgaaggaggccgggctgaccggagccgcctcggatgccgaaaaaatgaagaagggtgatgctgccagccatgcggaacagtggctctccggctcccgctgggtaccgggctggatgcagtccccggatgccgcaaagccggacgatgcacatgctgcccctgacactgacgaaccgacttcacacgctgcctga

SEQ ID NO: 186416 - DNA, 213 bp, Klebsiella oxytoca
atgaattcccaatccgaaccgacaataattattaacggcactacacttactgatgcacaagtaatgactctccgctgcgcctgttctaatttcggctcagatctgcttgagaatggtcttggcaatgatgaaagcggtaaggcaatgagtgctggctatctggccagactacgcgaattagataaattactgcatttacactgtaagtcttag

SEQ ID NO: 186417 - DNA, 1017 bp, Klebsiella oxytoca
atgaccgacggcgtgacccgggctgatgtcgacaaaacaatgtggctcgtgacactggcggatatcattacaaataacagtacccgccaggaggaaaatctggtcgtcattctgagcagggaggaatcgtgggacccggcttctgaacgtaattccgacgcgttgtatcgggcctcctgcataatgacactgtatctggccgatactgaacagacgaagactcagactttcactgcaaactactggcctctactgagttccctgcacctgtttacagaggaattcagactggaagagcgcctgcggggacacggcctgggtacctggatcacgcagcagtttgtgctctgggccagaggtctgccgcctgaaacccgggtctggccgatagacatttcgaaggctgatgaaaaaagcgaagaaaaccagatccggagggacaggctgtggcatgcaatggggttccggttcccggccgggcaaaactgctcaatgccgctgcgggtagacgaactgcagttgccgcggagcaggagttcaacgctccgggtggagcccctggcatccggggtacgccggctggaagagggttaccgcgggctgcaggaaaaaatcttgcagctggaaggggaaatattgtcgaaaaaacagttaattggttcaataaagaagcatccttttcttcatctattgcacaggaaatggcgccagctcccggacgggaaatgtgatgccctgccgctgcgggcagaaaaactgtctctgccgcagagcggggattctgacctggagttggagcaaccggcaaccggggtcatccggctggctaccctgtgtgctcagtcgcagaaaaggatccttgagctggaaagagatcttgcctcgcaaagtgaggagctcgctgacctgcaggcacatccattttctgacatgctggagaaatttgacaaccagagctggttctgggtgggcgtgttggcttttctgggctttatctactggatgttgggggcatga

SEQ ID NO: 186418 - DNA, 264 bp, Klebsiella oxytoca
atggatgagaaagaagtgaatttttcactcagctatgagcagctgacccggatagcggaggcgcgtatccgggaatgcgagctggccagccagggcgctaaatacctcagcgaatcgggtaaggccagcgccattctgggattctggtatgaactggcgattactggggcgccagtgaaaaattacgaacaaaccaaagcgctcattgacgccgaacatcagcgcctcagaaaactcatctggccggaggctgataagcaatga

SEQ ID NO: 186419 - DNA, 1215 bp, Klebsiella oxytoca
atgactcaggcgcgccgaccatcgccgctgcagcgccgggtgctgattgtgctggccgccctcgatgtaaaatgtccggggccggtggccacgcgggatattgaacgggtgctggagcagggtggggacgccccggtgtacgggccgaacctgcgcgcctcctgccgtcgcatggaagccgcaggctggctgcgcaccctgcgcgcgccgaacctgcagctggccgtcgagctgacgggcgccggccgggctctggccgccccgcttctggctgacgaacaggcgcgcgtcctgggcgagcagcgcgcgacggcggtccgggttctgcccctggtcccgcgcagccaggcggatgaggctgacgaccggccggtggagctggacggtcgctggcacctggcgtatcggggcgactacgtgatccgtctcgatggcaccacctgcctgcagctgtggtgcgcggccgggcaggtgacgcgcctgacgggcgatcccctgcaggtcgccaactggatgcaggcctgtcacgatgcggggattgcggtccgggtgcagatcaatgagagcgccacgacggaggagggcacgcggaacgttacctcgccggcggaccagaccggcacctggtaccgccagctggacgccgcgctgcaggcggaggggataaccggcctgaatgaggagatcaggcaggccgttaccacgcctgccgggccgttccgcgtcctgccggcgccggcgcgcctgctgcaggttctgcgcgacagtccggaggccttcccgctcacggcggccggctgtgaggatgatacgcagaccgcgctggctgatctgctggcccgcgcaggatttaccgccggccaggtccaggagctgcagtggcaccgcgttcgctggccacaaatgagtcaggaagaagctgaccggcgcgaactggacagcctgctggacgaactggaactgcgccagctatactgcaaccgcgaacagctgacggagattgtgttttcgccggtccgtaaacccggcgagagctggactgaacgtctgaagtggctcctgatgacggacggattcgggttctgcagtccgctgtcccgtgacgcggccgaccgggcgctgactattctgaccggctacaccgggcgggaggtggcggagcatctggccacggtgattatgtgggacgacgccggtgcgggagagaggacctga

SEQ ID NO: 186420 - DNA, 510 bp, Klebsiella oxytoca
atggattttttcagccatgtttcagatgtctttgtgactttattttgcaggcaacgctcaacggctttgcgactggtttctcggacagccagaactgatgctcatcaattcgatcattcggggcgctatcgagcgcatcgtgtaataaagtttcctgttctgtcacccaggctgacgggcaagcagaaagtgagtatcgaggataatctcctcttattcactcttttcaggtttagcgcctgccggcacttcgtttttttcatgctgacacgcgttttcatggcgccgatggtggtgacaccccgtaccaggtttcacactcctgcgtgtgagcagatcgtcttcacaaacaggatgttcagattatcaatcagggtggccagtctggtttcagtgactttcatggttcagcttttgttccttgtggtggttggggtcggtcccggctctcatgcaccaggtggagctcgtcagccgggtttttgtgtcgcgtgctacctcacctgctga

SEQ ID NO: 186421 - DNA, 1458 bp, Klebsiella oxytoca
atgaaaatcaatacatttacaattgtttttgttccaggagagaagatataccggcaattatataaacacataaagtccggaattgactctggacgttattcttctggagataaactaccttccaccagacaccttgcaactgaactgggaatatccagaacaagcgtattaaatgcttacaatgaattaattgcaaccggctatttaatcagccagaaaggttcaggttatgaggttaattccgtcattaacactgacattattaatacagagaagagcaagaaaattagattaaaatataaaaaagaaaagtatacaccttttaataccgaatcaatggacatgtctttttttcctgcctataaaatggccaagataatttcaaaagttgggagaaaaaaaccattatccttaatttatactgatcagtatgataaattcggaagccaggacttgagaaacgaaatatgtaattatgtatatgaaaaaaaaggaattaattgttctttggagcaagtaattatcacatctggttctctagagtcatttgaaatgtgtataaatatcctcactgaaccagggcagaccgtgagtctggaagccccttgcttttcgacacatatctattacttaaagaataatggaagaaatgtaagattcttacaggttgacagggaaggcgcttgttgcaatgacatatcaacaggaacaaaatttgtttttattactcctgaatgtcaatatccttttgggatgattatgagtaatgaaagaaaaaatgattttattcagtgggcatcagataattgcgggtggattattgaggatgacttcgatagtaactccgttgttaataatagacatgagcctactattttttcatatgataaaaaccatagaacattgtatttcggtaacttctcacaagttatagagcgcgcgttaaatatcggatacatcattttacctaaagagttgatttctttcttcaggaaaaccgaatatgtgccaaaggtgtcctatcttccgcaacttattatggctgaattcattaaatcaggtgatttttaccgcaatttattaaaggcgagaaaaatttgttctgaaaaaagacatgctttcgtaaatatgctaaaaaaatacctttctgtgtatgggaacactattgaaaataacgccggaagcgttgttgtttttatattaaatgctaaaatatctgatgcaacaattgcgtcatcggcgaggctaaaaggggtcaacataaagatactctcctccatttttcatgatatccctctcaatggtttcatttttggatttattcactttaacaaagatgagcttaaaaaatccgttattattttaagagatatatgtgcattgtactgtcaacaaaactgtgttgatttgacattatacagcccccttaaagaataccctaacaatgacgttaagtaa

SEQ ID NO: 186422 - DNA, 1422 bp, Klebsiella oxytoca
atgagaatagattttatagatattaaacttaatgactgcaatgtgatttataaacaattgtactcttttattaaaggtaaaattattactggagaatactcgcaaggtgatgtacttccttcaagccgaaaactggctacagttatgaacatatctcgcacaagcgtggttaacgcatataatttgttgatagccgaaggctatgtttctgctatagctggctctggacacgtaattaatgcactaccgattgcaaaatatgaatgtagaaaaaacaaaactatgaataaagttcgttctcgacgtttccttccattcaatcctgaaccggttgatctttcacttacagcctccaggaggtgggctatgaccacatcaaaaataggcagagagaatgctgttaatatattttctctttatcaaaatgaaaagttcggatatattgggttaagagagagcataagtaaatacctttatgaattaaaagggatagagtgtgttcctgagcaaatatttattacatcaggaacaatggagtctattgaactgtgtgttaatctcttaacatcttcaaaatcatccttaggcattgaagatccatgttacccacctattttacattttttttccaggagcaatcgcaagctaaactttatgcatattgatcagaatggggcaaatcctaattcactatcatcagaatgcaaagctgccattattactccaggaagtcagttcccacttggtattactatgagtactaagcggaagattaattttattgaatgggcagaaaaaaatgatggttggatatttgaggatagctatgacagtgaattaaatgattatggaaaacgagagaagacaatattttctatggatagaaatggcagaacaatttattttggtgggttttcaagggtattaataagtgagttacgcgttggctatttcattctgccaattagtttaatcagtacttttttaaatatagaatatagttcaaaggtatctagccttccacaaattattctttcagagtttattaactcaggagagttttatcaaaacctagtcaaaattaaaaaaatatgccgaaaaaaaaagaaatattttgtaatgttactcaatgaatgtctgagtaactatgggcaggcttacgacaatcgctctggaagctttgttgtatttgtgttaaaacggtcacttccagataatattatttcgttatatgcaaaagaaaaaggaattgatctcagggcaatttctacaatgagtcataactcaggggtaaatgggtggttgatggggtttatttatctgagtatcgatatattaagaaaatctgtttttattctgaaggatattctgtccacatattgtacgatgcataatatcgaccaggaaaacactaaattatga

SEQ ID NO: 186423 - DNA, 159 bp, Klebsiella oxytoca
atgactgacatctccgaacctgtattcgttcagaccttcatggcaaaagcccccattaacactttcaataaatccgttctgggacggcgtgccggactggatatgtcgcagcttaactccatttatacaaccagatatggactgaccccatgcccgtag

SEQ ID NO: 186424 - DNA, 555 bp, Klebsiella oxytoca
atgaaagtttatttcatttcagatgactcctttttcctcctgggagttgaggcggttattgcgagaaaaatagattgcccggttgagtttgttgatgttaaaaaagcaatgacgtatatcaacccttccccagatgatatactggtggtagctatcgataatatcgatcggcggggggaggttatgagtttcagctttataaaacattgtcgcgtcatgttgttgataaatatcaagctgaatcaaacaacgcggcgaacatacccatggataattaagaaaggaattagccctagtgaattagcactcattattgacaaggctaaaaaatcagaaaagcatttcgagagcgtatcgagaaaatgtaaacaagttgtttattccctctgtaaaggatcgcatattagtgaagtatcacaacattttaagttatcaagtaagcacatttatcaaatgaagcgtacgttactcataaaatttggaatttcacaatgtaactcgacgaacgtgttaatttgccgtgatattttacaaggtacatcgatacacgattga

SEQ ID NO: 186425 - DNA, 546 bp, Klebsiella oxytoca
atgaaattaaatcgtctagtcctgtcaactctggtttcttcttcactactgtctgcaggcgtaatggccgccgatactggcactattgattttgtgggctcagtcaccgggacaacctgtgatgtctcaattgatggcggttccgctgatgcaaccgttacgctgacgactaccggtgtatcaagtctggcagcagccggtagcacctcaggtgatacgacctttacgatgcaattgaccggatgttctgcagcagggtcaactcgggcattcttccagccgggacctaatgtgaccgcagaaaagcgactggctaacactactaacactgctggcggtggcgctcaaaacgtaacgttacaacttcttgaagcagacggtacctctgtaattgaagtcggagagcatacacaaaacggacagggatatcagaccattaccggaacaaacgctacgctgccatatatcgtgcgttactatgcggaagatactgtaactgcaggcgcagttacttctcaggtgacatacaacctttcttatcaataa

SEQ ID NO: 186426 - DNA, 714 bp, Klebsiella oxytoca
atgaaacccagcagtgcgaaaatgatttgtggtgtcgcagtctgtttattcgctacccttttttccccggtgattctggcgggcgtggtactggatgggacacgcgtcatttaccctgccgataagcgcgacattacagttaaagttaccaatatggggaaacgcgcggttcttatccagagttggcttgataatggtgagtccgaagctgcgccggataaaatcattaccccttttatgctgacgccgcctattaaccgggtagaatctaacaaagcgcaatcattacgtatcagtgcggttagtacctcttcgttacctcaggatcgagaatccgttttctggttaaacgtacttgaaatcccggctaaaccagaaaaaggtcaggctgttgaaaattatctgcagatggctattcgtacgcgagttaaattattttaccgcccgaccacgcttaatattcgtgcgcctgaggcagcaaaaagtttaatctggtcaatttccggcaatcaactttcggttaataacccctcgccgtattacatttctttaacagatgtgacgattaacggtaaaaaaacagaggttgacatggtctatccaaagagcagtcgctctttcaacatatcgggggttaatcgcagcaacacgttaaaggccgcctggattgatgactatggtgcccgtcgtgagcagagtttttccgtcaattag

SEQ ID NO: 186427 - DNA, 2511 bp, Klebsiella oxytoca
atgaagggattactgaacccggcaaaatatacattgttaacactaagtgtggctgcagcattatctcatcccattgatgtgtgggccgtcaccccggatgagttagagtttgatccgtcatttcttaacttaagtgacagcagtcaggctgacctcagccgtttttcgcgaggaggttctgctctgccggggatttatccggtacgtatttttctgaataatgagctgattcaattacagaaagtaacatttaaatccgggaatgatggtgtcgttcatccttgtttgaattcaggacttatttcacaactgcccctcaacacaaccaatattccggaaagcttaaccacgggtggagaggacaattgtgtcgacctgaatgctttcattccagaagccagggttttttttgacagcagcgaacagagtcttaatattcaggtccctcagatctgggtcaataaaatggcccgaggctctgttcctccctcggcgtgggatggtggggtgccggccattctgcttggttatagtaccagtgcttatcagagtgaaagctacggcaggacatacaaaagtgtctacagcagtctgaatagtgggctgaatatcggtaactggtttcttcgccataacgggaactggaaatggaatgatagcaccggcggacattatcagcgcattaatacctatgtacagcgggatgttccttcaattaaaggacgttttcaggttggtcaaacttatacatccgggcaaatatttgactcactttctttttctggtgccaaacttgagagcgatgagcgaatggagccgaattcacgccgggggtatgccccggaagtacgtggcattgcgcgcaccagcgcacaggtatccgttcatcaggacggaatcttattatacgaaacgacggtaagccccggtgagtttgttattgacgatctgtacccgacaggatatggcggtgacctcgacatcactatccgtgaagctgatggctcagaacagcattttcaggtgccttatgcaccggtcacatcacagttacggcccggaatgtcaaggtatgagttagccgctggagaactgagaaacgattaccttaataactccccgtcgctatggcagggctcctggcagtatggcttgagtaatcgggtaacaatgtacggcggcggccagggtagcgagcactactttgcaggccaggcgggtacagctgtttcatctctggccggctcggttggagtggatattacccatgcacgcagtgagttgagcgataaagatacccggacgggggaaagctatcgggtaagctacagtaaaaacttccgagaaacccggagtaatttttctctggctgcgtatcgcttctcaaccagcggttatatggatttaatgactgccatggagtcacgaaatactctgaataaagggggcagcagcgatagcattcgccgcacaaaaagcagatttaccctttcagcttcacaggggcttcctgaaaggtgggggcagctatttatcagcgcttccatgcaaaattactggaatgacgacagtaccgataaacaatatcagattggctataataaccgctggaaaagcctctcctggggaataaatgctaatcggagctatacctcaatgggcgagtcacaggacagtattatgctgagcttcaaccttcctctgggaagtggcccacgaatgcctcatggtcgactcagctactctggtacagaaggtggcagagaaagctggcaggctggaataagcggcgccgctggtgaaaattacgaattaggctatggcatcagtgggacgacaaccaataaaggaggagggagcagtggctcggctaatttgtcctaccgttcaccgtggaccgcactctccgggagctacagcacaggacggaattataacagcctgtcagccggtatgagcggaacacttatcgggcatggcggtggtctcactgtaaccccatatcagggggatacctttgctctcgtagaggcaaaaggggccgaaggggcgaaagtgggcggctatagcggtgtatacgttgactggaatggttatgccgcagtcccctatctcagtgcctatcagatgaatagtgtctctgtcgatctgcaggggacagagttaggcgtcgaactagacagtacaatgcaaaaagttgctccccgggataaggccgtagtgaaattaagttacaacgcccgaagcggtcgtccgttgctgattaatgtcagatatcagggagaaacacttccctttggctcagagttgcgtgatgaaaaaggaactgttgttggctatgctggccagggtgggcaggttttcgcccgtgtgcagcgtgaccacggccagatacaggctaaatggggcaatggtgccaaccagagctgcaaaatagattatcaacttccatacataaataaaaaagttcgtgctatgactctctatgaatttaaagccagttgtcgctaa

SEQ ID NO: 186428 - DNA, 1209 bp, Klebsiella oxytoca
atgactaaaaccatacctattataatcattactctactatctggtatatttctgataacagggaactcatgggctgcatgtcgattcgaatccgggagagatgtcacgaataaagtaagggaaataccaatcaatgaaaataaccagccaacaacgttatccggcacccctggtggaaacgatgtcaactttgggccgatttttttccgttttggagggtctgacattattgaggagaacattttatgtgatagtggtacagcatatataatatatgaacttgtagatactcctcagggagggccagtacgtacatacggtactcgagaaatgtacagaacaaatctggatggataccttgcaaccttgggggataattataaatacggtcgaaaaacctcaaggaaattatacttcagtcaagggaaatcttatgttactacaggggctagtgtctcggtagaagttcttaatttcgggcgaagcaatagagttaactatggtgtcattgagggaagtagcctaccatccggtagggtttatatcgccgagactgccgatgctgattatgacagtacgacattgaaattaggtgaatttaaatttactggttcagtcaccatacaaaacccgacctgtgatgttcctgctaacaaagtagtaacaatgagcgatgtaaataacataatgaacgggatgatgagcacttcaccatgggttgatagcagtatcaccgtagtatgcaacggtgaatttcatggtggagatctatactattcccaatcaaaaaaatataaccctgacagtggagagtgggatttacatgggtatcaatactcgggagtgccgcaaagcacctcagcttatatattaattaaacccgtccatggttacgagtcgggtacaatgacatgggacgacggtgatcccagacccatagaatggagtagaaatgcggtcatagcgattgaaaatatacctggtgagtcagcaacagggataggtatccagctttcgagaaaccaaactgaggctggtatgttattatataggtcagaggatgacgccctcttggcttcctcttctccaatagagcctggagtgacaacatttaatataccattatatgcccgatatattcagacaaaaaataacaggacttatggacttgcaagatcccgggttacttatactctgtattataagtaa

SEQ ID NO: 186429 - DNA, 540 bp, Klebsiella oxytoca
atgaagaaaattaagataaatatattttcccttccatttttattgttactgatctctggctgtgataatggttccccggctgactccagtgacagaatgtcagttattggagggaaggcaagcatagttttacctgaaggttatgtaaaaatgcctgaatcgttgctggagatcaaatacccgcagaaagcacagcgtccccaagaagcatggtatctggaaagtgaaggaggaaaggtatccatcgctttcagtgtgactggaagcgccatatcagatgcccaggttccacagtttgctggtatgatgaaagaacagttaaaagcttttacacctgaaatagtgaatgtaacgattgaaggtcgaaaaatgagccgacttgaaatgacaacgccggctgctgatggcaatatatttaatgtaatgcaattatcatccttcaacggaaaaatgatgatttctacgtttaacgtaacagaagatctgaaagacaagtacagcgagcaaggtaaaaaggccctgtcatccctgaggtattaa

SEQ ID NO: 186430 - DNA, 924 bp, Klebsiella oxytoca
atgtttcataaaatgaggaacgtggaccttaatctgttaagtgtatttaataccgttgtgcaggagaaaagtgtgactcgcgcagctgaaattttaggaatatcacagccggctgttagtaatgcactttccagactgaaggagatatttggcgaagagctttttgtacgcgttggccgtggcgttaaacccaccgagagggcatatcaaatttcccagtcatttcatcgagccctgcagttagtgtatgatgagttaccaggtgtaacttttcgccctgaaactagcaatctaatatttaacattagcataagtagcccccttgataaacttttattacctttattttcaaacgcaatttctaaatattctccggggataaaaatgaaatttaattcttttcaaaaccagcaaaacagaaatcaatcttattatagagaaaacttttttttcttagactacgaaaaaataactgaacctggggtagtaaatctcccactttttaacgacaatatggttctcgtctctcgagccaatcatcccagagcgatgaagggcatgtcggagaaacagatttatcaagaggagcatgctattgtctcactcgaaagagcctcttcattcagtgctccgtggtatagtaaaacgaaccaacacacatgtatatcatttcagggtaatgaaatggttagcgttctaagtgcggtatcccgaacagacatggtggccatcgcaccttactggttagctaatgaatttgaggataattttgatttacagttattcccacttccgttagatccaaactttcgggtatgctatctgtcatggctcgaggcttcaaattgtgataaggctgaccgctggatggttgagtttataattaaaacatgtagggaattaaatgaacaatttattttataa

SEQ ID NO: 186431 - DNA, 576 bp, Klebsiella oxytoca
atgacgactcatgttatttcggataatccacttctgcttattggtgtaagcgagggcattcagagtgaacttgatttacaagatcgcaataaaataaaaattcactacccaagttcctcacataaggaaataaaaaggaatgatataatactgatctgcatttacaataaaaatatcaggatgagaattataaaaaaaatagcagctcgatcaaataacattataatcatggttaactgtttatttcaaacggagagttgtcgattttatccgttattggtgtcaagaaaaatatcacttatcgaaatttacaatcttaattttttgatagaaaaaaaattaaaaatggaaaaattaaaagtaaacaggaatgtttatgcgatctttaaagaattgtataatggcaaagccattaaggaaataataaaagatagaaatatgaacaatctgaatttttccaacttgaaaaataaaataataaaaaaattcggcataataaaaatgaatgataaaagcataattcattgcatggaatatctcgtgattaatcaagtgttaaactctgtagtggaataa

SEQ ID NO: 186432 - DNA, 2985 bp, Klebsiella oxytoca
atgccacggagacaaatactcagtagtgaagaaaaagaacgtttgttggttgtatcggatgatgacgttcttctgacccgcatgtgctttttgagcgaacatgacctcgcgcttattaataagcaccgcagaccagctaaccgcctgggctttgctgttttactctgctatttgcgagggccgggatttcctcccgacaaaaatatgtcccctcacaacggtgttgttgcccggctggcggctcatttgaaacttcagtctgatttgtggagcgagtacgcctcaagagaggtcactcgttgggaacatctggctgaactctaccgctacctggaattatccccattcaaccgggcactgcaaaaaaactgcattcgccacctttatccccacgccatgcggacagacagaggttttttacttgcagaagaaatgctctcttggctccacaataataaggttattttcccttcagttgaggtcatcgaacgaactctggctgaagcagcaacgcttgccgacagagcggttttttccgcactgacggcgccccttgaaccggggcaaaaagcggcactagaccgtctgctgatctcagaaggtgaacaaccctcacggttggcatggctgcttcagccgccgggaaaaattaatggcaaaaatgtcctgcaacatatcaacaggttaaatgcgatagagtcgctggctctgcctgacggtattgcgctttccgttcaccagaaccggctcctgaaactcgcacgcgaaggcaggaaaatgagcagccgggacctagcaaaatttacggatgttcgccgttatgcttcgctggtttgtatcatatcggaagctagggccacccttactgacgaaattattgatctgcacgagcgtattctgggtagcctgttcagcagggcaaaacgtacgcaggccgaacgactccagcaaacgggaaagctgattcagagtaagctgaaacaatacgtttccgtcgggcaggcattgcttaacgccagagaatccggggaagatccctgggccgcaatagaagacgtccttccctggcaggaattcatcaacagcgtggaagagacgcggttcctgtcacgtaaggacaacttcgaaccgttgcatctaatcactgaaaaatacagtacgctgcgtaaatatgccccccggatgctgtccgcgttgcagttcagggctgcacccgccgcaatgccgctcagtgacgcactggataccgtcagagagatgtatcgaaagcaactccgaaaagtaccgctttccgcgccaaccgggttcatcccggaaagctggagaaaagttgtgataactcccaccggcattgaccgaaaatattacgaattttgcgtgttgaatgaactaaagggagccttacgatcaggtgacatctgggtaaagggatctcgccgctacaggaatttcgatgattatctgatcccgtctggcgattttgacaaatccctccgggataaccagctcccccttactgttccgaccgattgccatgaatatatcaaaagtcgtatgacgcttctggcatcgcgcctggaggaagtcaatgcgatggcgctggccggtgatttgcccgacgttgatatatcggataaaggcgtgaaaattaccccgctggataacagtgtcccttcagcagtatccccttttggtgatctggtttatggcatgctacctcaccccaaaattactgaaatgctggatgaagtggacagctggacaggttttacccgccatttcacacatctcaaaaataatcacgtcagacctaaagacagaaagttgttactgaccaccatcctggcagatggtatcaaccttgggctgacaaaaatggccgaatcctgtccgggaacgacaagatcgtcacttgagggcatccaggcatggtacatcagggatgaaacctattcagcggcgctggccgagttggttaatgcgcagaaaaaacggcctctggcagaattctggggcgatggatcaacgtcatcgtctgacggacagaactttcgggtggggagtcacgggcgttatgcgggtcaggtcaatctgaaatatggtcaggagccaggcgtgcagatttatacgcatatttcggaccaatacagcccgttttacaccaaagtcatcagtcgcgtgcgggactcaactcacgtgcttgatggtctgctgtaccacgaaaccgatctggaaattacagagcattacaccgacactgcaggcttcactgagcacgttttcgcactaatgcatctgctcggattcgcatttgcgccaaggatccgggatcttcatgacaagcggctgtttattcatggaaaagctgagttgtatcctgggcttcagtcaatcatccccacaaccagtctgaatctaaaggaaattgaaacccactggaatgaggtgctgcgcctggcaagttctataaagcagggaacggtaacagcatcactgatgatgaaaaaactggccagctatccgaaacagaatggtctggcaaaggctctaagggagatcgggcgtatcgaaaggtcattatttatgctggactggttccgggatccttccctgcgccgacgtgtacaggcggggttgaataaaggtgaggcccgcaatgcccttgcgcgggctgtctttatgcaccgactgggggaaatcagagatcggggtctggaaaatcaaagctaccgggccagtgggctgacattactgactgcggcgatctcactgtggaatacggtatatatagaaagagctatcgatgctctgaagcgaaaggggattccgataaatgaacagcttattgcgcatctgtccccgctgggatgggagcacataaatttgagcggggattacgtctggcgaacaaatatcaagctgggacagggtaagtaccgctcgttacgctcagtggatagtagtctgtacaaaaaacaggcttag

SEQ ID NO: 186433 - DNA, 309 bp, Klebsiella oxytoca
atgaacgtatcagtaatactcaaagccatatccaacgatgcccgacgccagatccttggctggctcaagcatccacttgagcactttacgcctgtcactcaggctgatgtggatctggtggcaacgggggtatgtgtgagtcagatcacgaaaaaactggatatgacgcagtcaactgcatcgatatatctcaatacattacagaaagcagacctggtaattgctacccgtattgggaaatggacttactaccgcaggaatgaggcagttatcaagcagttcgcccagtacatctctgacgatctttaa

SEQ ID NO: 186434 - DNA, 1116 bp, Klebsiella oxytoca
atgcgtaaacttaattcccctctcgccttcagacacggcatcgagatcccaaaccgggtaatgatggctccgatgacatctaaagcggcatcctgggaagggtatattgaagatgaagacctggctttctttggccatcgttctaaagccgcgtccatcctggtgaccggcgcgactgcggtgagtaagtacggtgaaaaatttccgtttcagatgtccctctatgacgacagctttattccggggatgcgccagcttgctgagcgaatgaagcgtcacggtaataaagctctggtgcaaatctatcactcgggtttgcgatcggtcgtgtcactggaaaaacatggcaaggtatacgggccaagtaacgtcaagtttgatgagatcccatatgaaatcactgaacttaccgaagatgaagtatgggacgttgtgcgcatgttcggggcagcgacaagacgtgcatacatggcgggctttgatggcgtggagattcacggcgcttacagtcatctcattcagcaatttttctcaccttattcgaataaacggactgattttttcggcggaacactgaagaagcggatgaacttcgcactggcaatagtggatgaagtgcagaaagttgcccgtgattgctggggtgaaaactatatcgttggataccggcttacagaagagaaacgacatgccaacggtgacggctacggcatcgaggagacgttacagctgattgacgcgcttgccggcaaggaactggattacattcaggcctgtgataacagcttcaatgaagcgatatacagcactatcaaagggcgaacggttttcatcacagtgccacacacattctcagcatccgatacccagaatgaactggagcatgccgatatggtttccctggcacgggcgtgtctcatcgagcctgagtttgccagcaaaatcaatgaaggccgggaaagtgaaatcagtaccgccatcacatcgaccgcgatggcggaaagcctgcagtggccgcaccgcatgattgaatggctgctggatcccaatggtagcgaagaggttcctgaaggaattgagtacttcgagccgcttcttgaaacaagcctgagttaa

SEQ ID NO: 186435 - DNA, 1080 bp, Klebsiella oxytoca
gtgaatgatccattattccgcaccctttcattaatgcggggacctgagcttaaaaaccgtctgctcctggccccgttaaccaaccagcaaagtgaggttgacggcactgcctcacaggctgattttgactggatagaacgtgttgcaagcggcggctatagcatgattatggcgtgtgcagccaatgttcaggaaaacgggaaaacgttcaaaaaccagttggggatctggaatgacgatcaactaccgggccttcgacggatggccgacatcattcgcaagcaaggtgcggtctcctctattcagctgcatcacggtggttttcgggcaggattcaaccttaagggcggaagaagcgttggcccatcggataacctcacttataacgcccgcggccttacccgggcggaggtacatcagctgcgcgatgattttatcgctgctgcgtgcagggccaaaaaagcagggttcgacggagcagaagttcacggcgcgtttggctggattctgagtcagtttctctctttcactctgaatcaacgcacggatgaatacggtgggagccgtgaaaaccgtgcccggcttattttagagatcattgagggcatccgcagggaatgcggccaggattttcagattgggctcagactgtcgtttgaacgttatgggatggactttgacgatattctgttcgtcgccaggaaatgtctggcagaagagctgattgattatcttgaccttgcgccatgggatgtaaaattaacgctcgagagcggcacttatgccgggaaacgggccatagatatgtttgcagacctgcctcgcggcagagtgaagctgggcgcgtcaggaaagctgatgagtgcgaatgatgccagggaggttctggaggctgggcttgatttcgtcatgataggccgggccgcaatactggaaacggattttcctgaaaaggtcaaaaacgcccctaatcatacctctccgccccttccggtcactgaagcgtatcttaaaaagaatggactcagtaatgattttataaattacatgcgccactgggatagctttgtgagtgactaa

SEQ ID NO: 186436 - DNA, 396 bp, Klebsiella oxytoca
gtgaatgaagcagtagcaatcattactgttgctgctccactgccgaacgtccgctcctcgctcaaagctgcctgtcatacctgcttaaaaaacaggcttaacgtaggatattttccgttttccaagcggacccctttcagaacgtgtgccgaacagcatccggcgcagtttttctatctgtgcccgcagatgttctatttcgcgttcttcattctcgattttctcttcagcgcggaccagcgccgaacgcaggaacgactcagtctctgcaacgaggctgagttgattgtctttctgacggagcgcgtcttccagcgcggcgataagggcgagatagtcctgactcatgaccccatttataatgcggtcatgttttttttacaacattgtcagtga

SEQ ID NO: 186437 - DNA, 351 bp, Klebsiella oxytoca
atgattaatctgccatcaggtgcccgtatctggctggttgccgggatcaccgatatgcgtaaatccttcaatggtctgggagagctggtacagcatgttcttgatgataatccgttctccggccatctgttcatcttccgcgggcatcgcggcgatacggtgaaaatactctgggcggatgccgacggtctgtgcctgttcaccaaacggctggaagatggccagttcctctggcccgccgtccgcgacggcaaaatcgccatcacccgctcacaactcgctatgctcctcgataagctggactggcgtcagccaaaagcagcccgttttaactcactgacaatgttgtaa

SEQ ID NO: 186438 - DNA, 792 bp, Klebsiella oxytoca
atggtgtttccggtatcaatagaacttcgtgtgtcagccattacggtgatggcctctttactactttcaggctgcacaatggcaccggcatatcagagaccggaagcccccgtgccattagcctggtcacataaagacacttctgttgaaggtatgtatacaacggcagcaaacgggccttttttcacagacagcaagctgcagcaactgataaaactgaccatcgacaataacaaggacctcgaactttctgcactgaacctgaaaaaatcaggtgttcagtatggggtagaaagactatcctggttgccagcagtcagcctgaccgcagaaaaaaccgcagctcatgagcctgcagggagctttgataccgttgataccggttcggtaacgtatcatcaatacaacgttaaactggtctcagcttcctgggaagtggacttctgggggcgtttgcgaagcctcagggaagcatccctcaatgaatatcttgctgcgggagcttcatcaagagccctgaagatcagcctcattgagcaggtggtcagtgcctatctgatctatttcaccgaccaggaaaacattagtattgcccgtcagaaactggacaatctccagcagctccggcacatgcaacagcaagcctataatgccggagacatgactaaaaatgcgcttatggacgctgatagtgcggtaaacgacgcacagtcagaattgaaccagacagagttgcaggtacaacaggatttaaagggagtgcggacgaattcctggaccttcaggggttaa

SEQ ID NO: 186439 - DNA, 660 bp, Klebsiella oxytoca
atggataccgccaaccggctgtggccttcactacagcacaataaccttacgcttctctcacgactgctgaacctggcggcggagaacgctgaactgttttttacccgcagacgtcattcccgaagcgagcgccgccgggtcctgcagcgggccgttgcacacgccttcatgcaacccgaatggcagcatctgaagaaactgcatcacggtgagatcgacctctttatcagccgggggctggccacaggtaatgtcatccgctatttacgggaaaccgcagaagtatgtctgcgcatgtcggctatcgatctcccgtgtttttcctgcgcgctggatgaacttcgccatcagggattcacaattgatacccggcttcccgaacggcgatgcctgctgactcaaaccgcgttcctgcgtttctctccggcagggcaactgacacaaccgctcgatatcctggccggtcatgacgaggaagctctgcgttgcgtgcggcgtacgttcaccaataacggctttcaggttatccagcggggaacgccagcccgccggctgacacaactccacattggcagcgacagtctgagtgaagatatctgggcctggcaccactgccacactcagcgacatgttcatggagacgatgctgtctttctctga

SEQ ID NO: 186440 - DNA, 453 bp, Klebsiella oxytoca
atggaaacgcccgatgacatgttgttacccgacccctttatcgattatcccgatccccgaccggagatcgcggtcctctccgccgacctctccgccgacagtcttgaccatcatgacagcggcgttgattacacccgggtctatctggcccgactgaacagcaggcgcaccctgcgcccgccaccctacagggagccgcctatgcccaaagccaaatcctacaaactttctcctctgcacactgaccgcctgacccagaccactctctgtatcgccttcaggctgcgtactgaagtccgcccgcgcgatgtcctgcatgcgctgatcgaccagctttgtgaaggggatgacagcaccgtggaaaccctgggattacttatccagaaaaaccagcaacgcgaacgtaatcgtgaccgccgccgccgtcagaaacaactcatggccagccagtaa

SEQ ID NO: 186441 - DNA, 990 bp, Klebsiella oxytoca
atgaaaaaaatgttgtttgtcatgccggcactgctgaccggctgtacggggttttccccactgagatcacccgcgccggagctccaggtcccggcactggtgtttgttgacgggcagatacgcagctctgcagaaacggtggcacatacccagcagcaggtgcaggcgaccgtgccggcgccatcccgcgcagccccgatccccccgatacccgcgactgctacttctggcgtgccggcaatgtcgccttccacctcgcaagacacactgaccggtcccgcagccccggcagcgacaacggcagccgggctgcgtgtaaccggcacaccacaaaaaccggcggttatcagcctgcccggcgtcagtaacctgacaacagagcagtggatacgccgtattctgcctgatggctggcagctgcagtacgaaaatgccctgcgccagacgctcagcacccgacacaagactatctggcagaatgatgaatggacacgggtactcgagcgtctgctggtctcacaaaatattcagggccatctggactggcatgcccggatgctgaccctgtctcgtcccggcgttcagccagccgtccccgtgacatctttcgcccctgccgccacgccagcgccgcgtaatccgttccggcaggggcgtgaagacgatacctccatcacccctccagccccaataccggtcgcacctgccggtccggtctggaaagccgaacccggcagcaccctgcggaccaccctcacgcagtgggcctccacggccagctgcagtggtggcaaatggctggttatctggcccgtcgcggttgactatccagtttctgcgcctctgacctttaacgggccatttgaacaggtgatgaccgggctgtttaccctctatcagaaagccgcggttcccctgtatgccggtgtcagtcgccagcagtgtgtgatttccgtcagtgataaaccttttccgggaggcacgccgtga

SEQ ID NO: 186442 - DNA, 417 bp, Klebsiella oxytoca
atgctggcaccgttactgctgctggtactgcttgtgaccggcggctggtatcagagacacgcagaatcccggttaacgccgtctgacctgaccgcgagacagaccgcgagtgagatactgatgctggccgatgcggtcaatgactggcggtaccgttacgagggtacaccagccctgcaggacctggatctgccctggcccctgcctgccgggatccacttcactgtgcacaacgaccggctttttatctggacccgggaacaacctggcctgctcagcgccctgcgtgctgcagcccgtcagtcggttctcgtcctgaccgtcagtaacggtaccctgctgatggcatccggcacgccgatgggtgtccctctgccttcaggtatcactgacagtgacattgtctatctgaattaa

SEQ ID NO: 186443 - DNA, 1647 bp, Klebsiella oxytoca
atgaaattaccgttccgatccggcgcggtctggctgatgacatcccttttgtcgctcgccggctgttctgccatgtatgacgacatcagtcaggaagccgccggcatcacccgccagagcgataccgcgctgcaaacccaccaggtgacagaagcacctccggtgacgtggcttgacagccagtgggtcaatccacaccccctgaccgtcagtgaaaaaaccagaagcgtcccggcctgcagcatcacgctggtatctgctgttcccctcacgctgtcggccgccgcgcaacgtattaccgcatcctgtggcctgccggtgacgatccagccccccgccgggctgtcagcccacggtgagacccgccagttaaacggttcgctcccgcttccggatgccagtggccggacgccactggccactgccggcgccatgccctcctcccggttaatagcggtcacctcgccggatatcgggcccctgagctggcaggggccactgggcgggctgctggatacgctgtccacccgctccgggatgcactggcgccatgaagggggccagataacgtttttcagccagacaaccgaaacctttcagatagcggtgttaaatgccagtacgtccatggatgccagcgtgaccggggggacgtccgccagtgccggtgtttccggcggaggctcgaacagcaactccctgtccggcaatcaggatacctcccagaaaaccacggtacgtctggcatctgaactctatgacgacttgcgtaaagccgtggaaactatgctgacaccagacagcggtcgttactatctgagcacggccagcagtacgctgaccgtcactgacaccccggaggtgctcgcccgcgtacgccattatatcgagaccgagaacagccgccttaaccggcaggtcaccctgaaggtggaggtttacagtgtgaccgcgaagaaagcgaacgagctggggctggactggaaagcggtctataactcggtgaccggcattggtgcctctctgaccggcagctttgcctccggcagcagcaccgcgtccagtgccggtatgagtattctcgactcggccaccggacgggcggcccgctggcgcggttctgaggtctttatcaaagcccttgcggagcagggtaatctggccgtcgtgacgacccagaccagcaccaccaccaatatggtgccggttccagttcaggtggctgaccagacggtctatctggcctccaccaaaaccaccacctcagactcctacagctccacagagctgacgccgggaagtatcaccaccggctttaacatgacgatgatgccgtacgttcgggataacggcgatatccagttgcagttcagttttaacctttctgacagcccgaccatccgtacggtgacctcctcagatggaaacacctcgattgaaatgccctacaccaagcttcgttccctggcgcagcgggtcaacatgaaatccgggcaaacactcattctttccggctatgagtccactgccgcccaggacacgcgtgaagggacgttcacaccgaagaactggttgttcggtggtggacgcggcgtttctgaccagcgcgcaacactggtcattctcatcacgccggttctgtcctga

SEQ ID NO: 186444 - DNA, 1233 bp, Klebsiella oxytoca
atgcactattttactgtcggaaaataccgtctggcggcgggtctctcctggtccgtgctgaccggaggacgtccgggccgtcagttacgcgcgctgaccggccgacgaaatccatgtgtgctggttcgtcagggagagatgcagtacgccggcgtgggagaaggccgggaacgcgcctggtctgtcgccgttgccgccctaccggccctgggccagaacggatatgccctgattaaattaccggatgaacggtggctgtttctggccgccgtggacggtatgcccgccctgcagggagatataaccggtgacagtgtcacctgtatcagggcgcgcgatcgttttctggcgtttcacgacgcccctgtctccggatggcaggaaaccgggacagaggcggcacccgcagacattaccgccctgctgcccccccgcctcccgaccgccgcccggctgtttattcccggacagcgtgtccgccggtgtcttctcgccggactggctgccgtggcgatctggtatgcctgggattactggcagggggtacagcgccgggaagcgcagcgtctggccgcccaggtccgtaaacaggccccgaaaaaaaccggggtgcgccgtgttgcccttccccacccctgggcaaccctgtcgacaccacaacatctgctcggcgagtgcctgacggccgtcagaaatcttcccctgacgcttgccggctggacgctgaaaggtggggaatgccggggagacggtattcgcgcggaatatcatttccaggccggcagtacgcttacccgtttcagagaaaatgcacttgccctgatccccccaccggttgtgatgacccgtgatgatggccagagcggagaaatacgctggcccatccctgcaggagaaatgacggatgaacatccgggggatcagaccgaacagctcacgccgtttatatccagtctccaggcgcgcagcgtctcgcttcagctgaaagccgatcctccactgcggcgtccttcacagaccattgacggcgaagttgtccgttatatccagggctgggagtcctggtcattttccgtcacctcgccacgggctccggatcgctggtttccgttacagaaagggatacgcatcacggatattgcgttcagtctgagcgcggccacctccatcacctggaaaacgagcggacagatttttgccgtaaaggagaacccccatgaagatgaaaaataa

SEQ ID NO: 186445 - DNA, 423 bp, Klebsiella oxytoca
atgaagatgaaaaataacctctccggcctgcttctgctggcagcctctttcgccggccattccgccacggtgggcgagctggaaagtgttcaggaaaacaacctgctgctggaagcgcgcctgaaaggtgcacgtatgctggcggaaatggcaaaacacaatgagccggctcagccgctctctgttctgccccggggcgccacgcccgcctctccgtccgcccctgtcagcatgctgaccggtattcacgggaaagggggtgtgctgacggcagagctgcagcgcaacgggctgactcatgagttacgtaacggcaatccgtggccggggagccgtctcacggtaaaaagtatcaccctgaaaggcgtcacactgagtgacggcactgtgattgttcccggtcaggagatccatcatgaatga

SEQ ID NO: 186446 - DNA, 1521 bp, Klebsiella oxytoca
atgaatgacataccggtgctccctccggtaccggcagccatagccgacgccgtggtcattgatgaccatgcgtctcctccggtggtgctggttgaccgcgaacagaaaacggatgctgctgttcaggcgtgggtggaaacactgtgccgtagtcacccggaggtggacgtgacgtttgccgggcgaacggagctggccgccttttcaggcaatccggcggcggcagagggacagtcggagacccaggacaaggtgatccgtctgtttcgtcaggcctgcgaggtcggtgcgtcagatattcatctcattactgagggcaattctggcctgatccgcatgcgcgtcaacggggagctgtacaccgtctccgaaccccctgcgcgggaaattatgaccatggccaccacgatttacggcacgatgtgtgatgcgtctgagccgcacctggttgaaacccgtgaacaggatgcgcggctgaaatcaacatttttgcgtcaggcaggcctgtttggcgcgcggtacagccaccgtcccaaggtgggaggactgctgattgtcatgcggaccattccggacgatggtgacgctgccccgacgctcgatgcgctgggatttttgcctgagcagattaacctgattgaggagctggagcggcggccggaaggcgttaatgcgctgtccggacctaccggttcgggcaagtccacgaccctgcgctgcctgagtgcccggtttattcagcgcacccggggaagacgtaatctgataaccattgaagatccgcctgaagggcgtattgccggcggaatacagacgccggttatcgcggataaatcctcccaggacgacaccatgcgggcgtggcagacgggcatccagtcatccatgcgtctggatccggatgccctgctgattggtgaactgagggactacgcctcctccctggccgggatcagcgcagccctgtcaggacactgggtactgaccaccttccacacaacagacccgctcagtatcctcacgcgtctgcagatttacgggcatcctcccgcgctgctggccgacccgggattatttgtctctctgatttcccagcggctggccccggtgctgtgtaccgcgtgtcggatcccctggacggaagccgtcaggcaaaaccacatcaccgaaaaacagcaggcttatatccgaaactgggtcgacgtgacacacgtccacttccgtaatcccgacggctgcccggcctgccgtaaaaaggtcatggggcaggaaatcagccacggcctgcgggggcgtacggtgattgccgaaatcgtccctaccgatcgcggcctgatggaaacctggttcgataaaggcgttctggcggccaggatgtactggaaaaatcgcggcggtattacccgctgcgaacacatgcgacgcagagtggcggaaggcatgattgatccgctgatggctgatgatatctgcccgctcaatgaggacagccgattgtacggggaggtggcagatgattaa

SEQ ID NO: 186447 - DNA, 1077 bp, Klebsiella oxytoca
atgattaacgccctgcaggtacaggtctggctccagagacaattgtttctcgcccaggccagggtacagctctatgaaattctgctgctccagcttcgcaaccggcgtggtgtggatacggcgctggagaatatccgggaagtctattcaaaggggggaacccgttccaacgcccacacgcaactggccagcgaagcactggctgccctggcagataaccgtccgggacaccgtatcgaagatgtgctgaggcgctggttacccagtaatgaagccgccctgttacataccggactccgtaccggggccctggagtcctctcttgagcaggctattatcacggcacggacattcgccgtcattcgttcggctaccctgcagtgcatcgcttatcccctgtttttcctggccctgatgaccggcattgtcggcacgttcagcagtgaagtgatgccggttctgctgaaaatcgttccggaatcacgcctgaccggtccactggcattcatgcacgggctgtcacaggtggtcaacacctacgggctgctgatcctgctgagcggtgttgctgttatggcgctcattgcctggtctctgcctgactataccgccgggggccgccgtttcctggacaaactcccgccctggtctgtttaccggacactgcagggggccgcgttcctcaccaacatgggttcgctcatgaaagcccaggtcaaccaggccgagtcactgctgatcctgcagggatttgccagtccgtggctgcagcagcgaatcgccgccacgcgccgcgaactggccggaggggcctccttcggagaggccctgagccggaccggctacggcttcccgtcggaggatgcgatcgcgcatatccggttgctggttattggcgatggggccgcagaggcactggcgcgatttggtgagtggtggattggtgaagccgcccgtcaggtggcgctcattaccctgctgattaaggccttctgcctgctgaccatgctgatgttcatcatcaccatggcactggccatcgagacgctgcagtcccttctcagcctcccggcctga

SEQ ID NO: 186448 - DNA, 600 bp, Klebsiella oxytoca
atgcaaacttcttctgctctttctctccagtctgtccagtctgaccagtctgtccggcgtcaacccgcacgtggggtgaactccctggatgcttccatcaccgtggtggcgataattgttatcctggccgtacttctggggttctattattccttttcaaaaagctccgcctccggcacagagcttaccaatatccagagcctgatgaccaacaccagttccatgctcaaaacccgtaacggttatgtcgacgtcagcatcgatgcactgtaccgcgccggtggcgtgccgagcgccatgagctacgacatgtccggagggacgctgaacaacacgtggggcggtgaggtcaaggtggccaccggtaccggcagttccggcgcaacggtctctaacgagaatctggcctttaccctgacgtacgaaaaggttccggaatccgcctgtgtgaatattgccaatcagttaagccggacaggggctatcgccggtatcactgtcaacggttccgtggtggataaagatgattccattgcggatatcactggctactgctctgacgaagacgacaacaccctggcgttcacttccgttcgctga

SEQ ID NO: 186449 - DNA, 501 bp, Klebsiella oxytoca
atgaaagtgcttctgtccctgctgttacttctctccagcgcaaaatcggcggccttctgttttgaggcggccggcgcccgctacagcattgacccgctcctgctacgggcgatagcgaccgtagagagccagctgaatgccagagccatcaaccataaccgggataaaaaaaccggaaaaatcctcagcagcgattacggcgtgatgcagattaactccacccatatcgccgggctgcgctccgccggcattatcaggagccatcaggatctgctggataatccctgtctgaacgtccagaccggagcatggatcctggcgcgacattttcagacctgccgggttagctggaactgcctgggcagttacaacgccgggtttaaggaccgaaacgatgctatccgcgaggcatacgccagccgggtatatcaacattatcgcagactgatgcgggatgaacggggtatatccctctcccccggaggccgccatgctgattag

SEQ ID NO: 186450 - DNA, 627 bp, Klebsiella oxytoca
atgctgattagtattgccatattgcttgcctgctgtctgaccggaggactgaccggtctggcgtacctgggcgcccgggagaagcatcgcctcctgcacagaggaacactacctgtcgcgaccggctggatgctgtgttttctggtgacaggatcgctctgttttatggccgggtatcccgctccagtcgatgtacttgtgctgtcactgctctcggtcgcctgctgcatcactgactcactgcgatgctggatcccacatgcgttcacgctgcccggtctgctggctggcctgctctggcagtttctggtgatggactcaccgtggtggctcccggtaaccggtatggtcagcgcgactctgccttttcttcttttgcgtatcggacattatctctgcggtatccggggagaacatctttacccgggcagcggcgatatcgtcctgatggccacgtttggcgtctggctcggtcccgctgccgccctcattatccagtttgccggactactgctgtttatgttctggctactgattacccgcagaaccgtagggcctctgggaccttttctttgtctgagtgccggcgccagcatgctgatgcatgccgtttatccttttttctga

SEQ ID NO: 186451 - DNA, 1308 bp, Klebsiella oxytoca
atgacattctcccgaaaccagccggcccgcggaatcaactcgctggatgcctcgctggcttttgtcgccatttttgccgtgatggccgtctttctggccatgattaataactggcagacagagcgtgaaaatcaggttatcgcccaacagacaagccgcgtggcggatgcggcgaaaaagtatattggcgataattataacagcctgtcgtccgccgcccccaccacactgacaaccgccacactggtgaatgccggataccttaacagcacgctggcagaacgaaacagtgcctcacaaacctatgcgataggtatccgccggatgaataacagtggcctgctcgacgccctgctggtcacccttgatggccgcgtcctgacctacaaagagatgcgcagcatctcagcaagtatcagcgggctgggtggctatattgaggacggcaacacggcgaccggcgcactgggcggatgggaagtcagtctggctgactacagcctgacctcttccgcagggcatctggcggtggcgctgacggcggataccctgaatggcgtgaacgaagaaagcgatcgactttaccgcttctcagtgaacggacatccggattacaaccgcatgcacaccgacattgatatgaaccggagtaatctgcgggatgcgtctgacgtctccaccaccacattaacagctgatcaacaggtctccctggctacgagtggcttttttggctggcggcaagacagttccggcgcgctggccaccgggttttactatgagaatgacgggtcagactggatccgcaccgtcaataacgcgtcgctctcaaccggcggcacgctgaaagggggaacgattcagtctgaagggatggtcatagccggcacgtatacgatgccgggtaaaaccgtgactgcaggtgatgcctgtaccgcgtctgcgctgggtatttcggggcagatttcagacactaccggtctgatagcccatgacagcactggcggcacactttcttgtcagtccggtgtctggcgtaagaacaacttaaatggtatcaaagcacctccaccacaagaaataggttgccggttaacaggtagtaattcacgagcgtatgcacgcgctgacagtgaggggcaactatggactcgctgggataataccaactggattaggggctcaagtgagatgacttcaacccggtttgtcagggtctatgcgggaggcatgtatgcctccacttctagtggaagtactggttcttcacaagcagactacacatgttcagctgtgtgggtttggtga

SEQ ID NO: 186452 - DNA, 246 bp, Klebsiella oxytoca
atgactttccagaccagatactcagttcagtcgtacaacatagggaaaaacgtgaatgatgtggatattgggatccatgcgtattgctcctggacctacttaaatggctcgccacttggtggtttccagaggattgtttccgataactcaaaccgttggttcgtgacaaataccaaatggggtaattatgagtcgggaggtacaattattgtaacctgcctcgatttaccaggggcgggtatttaa

SEQ ID NO: 186453 - DNA, 3183 bp, Klebsiella oxytoca
atgtctgaaatgaagataaagtttaatcctgatttagcacatcagagagatgcgattaatgctgtaattggtgtatttgaaggacaagaaacatttcaatcaaatttttctgtttcatcaaatgcgcttacgagcgagcaattaggcttattcgccagaaataatgacattggtgtagcaaatgctcttacccttttaccagaagagctttatgaaaatacacgaaatgttcagcttataaatggcttaccgcaaactgaaacgtcaaaacaagctctttcaagtctcgatttcactatcgagatggaaacaggaacgggtaaaacctacgtttacctgcgtagtgtatttgaactcaatcaacgttatggactaaccaagttcattattgttgttccgtcaattgcgatcaaagagggtgtctataaatctctacaaatgacagaagagcattttagaaaagagtataaaaacgttcagtatgattattttgtatacgactcctctaagcgtgagcaagtaagaaacttcgcaactaatgattatattcagattatggtcattaacattgacgctttcagtaagtcttttactgaccctgagaaagagactactgcaaacttgattcaccgaaccgatgatcgattgaacggtatgaagcctattgaattcattcaagcgactaaccctgttgttttaattgatgaacctcaatccgtggcatctacagttaatcgtaaaaatgctatcgccagcttaaacccactatgcacgtttcgttattccgcgacgttgacagaaaagtttaacttactttataaacttgactcgattgatgcttattcccgtcagcttgttaaacagattgaagttgcttcactagaagttcaagactatcacaaccaggcttatatcaaattgattggtgtcgataacaagaagtcaccaatcactgcaaaagttgagattgatactcaaactcaaacgggtaaactacagccacgtaaaatcatcacggttaggagtggaacggatttatttgaagcttctggtggccgaactgtttacgaaggttatgtgatcaacgacatctactgtgagcaaggtagtgagtatatcgactttacaagccgtagcgatattatcggactaggacaagcaataggggaagttgatgaagacacgtataagcgtttacaactctctaaaaccgttgaagaacatctagagaaagagcttaaatttttcaagaaaatcacgactggtgttgatcctatggatcattcaaaggtgttgagccagaaggggattaaagttctcagtttgttttttatcgataaagtagcgaactaccgaggctatactaaagatggtgtgccaatccagggtaaattcgcacaatggttcgaagaagaattcattcagcaactgagaaaaccaaagtatcgtgtcttatacccaacggtgtgggataaggatagctctggtaagcctttattgaacgagcaagctctgaaggaattagcaagcacagttcacaatggctattttgctcaagataagaagaaagatgcctcaggaaaccctcttttcgctgaatccaagctagcggcaaatggtgaaggtggtaaaactacggctgatgaatccgcttataacctgattatgaaagataaagaaagattactttctattgatgagaaattacgttttatctttagccactcagcattaaaggaaggttgggataaccctaacgtgttccagatatgtacgctaaacgaaaccaactcagtcatgaaaaaacgacaagagatcggtcgaggtttgcgtttagccgtggatcaatcaggtgaacgtgttccatacggttttgaggtgaatactcttacagtaatggcgaacgagtcttacgagcagtttgtatcggaacttcaaaaagagattgaaaaagaagaaggtattaaattcggggctattgagaagcatcaatttgcaaatatccttatctctcaggagcttgataagaaaaagttcctcggagctaaaaaatctgaagagatctatcagcatctaactggctatggttacatcgataagaacggtaagatccaagattcccttaaggctgaccttgctgataacactgtaagtcttcctgaagacgtaaaggaatattcagatgcaattttagcgattttaacgaaagtatctaaaggcttgagtattaagaaacacgaagagaagaagactgcaactctacgtgaagataatggtaaacaggttgtccttggtgatgatttcaaggctctttgggatcgtatcaagtataaaacgacttataaagtagattttagcgttgctgaattgattgaacaatgtatcaaagaaattcgcgcatcagtagctgtagcaagtgcgaaatttgaatacaagaaagtcaaagtcgctataaaagaagcggaacttgaaacatttgatgaagagtcaaagattcaatactaccgtaatagaaacttcctattgcctgatgttgtgacttatctggagtcgaatacaaacctaactcgtaagaccgtagttcaaattttgctcggtttgggcgataaactggaagcattcaagaacaatcctcaacgattcattgaactggcgagcgaagtgatccgaaaaaaaatgcgactcgcaattgtcgatgggataacttaccaccgtatcggtgatgaagattattatgcccaagagttgttccaggaagaagagctgacgggttatctcaaaaatatggttgaagcgaaaaagtcggtttacgactacattatttgtgactcagacacagagagtgaatttgcttcaaaacttgaatattcgaacgatgttaagctttatgcaaaacttccttcgtggttcaatattgacacccctctaggcaattataaccctgattgggcgcttttaatcgataaaggcgatggtacgggtgatcagctctactttgtagtagaaacgaaatcaagtatcttctctgatgatctgagagcatctgaacaagcaaaaattaactgtggtatggctcactttgaagcattgtcgaaagataaagagggtaatgcccttgagaatcctgctaagtttgtcaaggctgattcttataacaccttctcaacacatctagaagaataa

SEQ ID NO: 186454 - DNA, 282 bp, Klebsiella oxytoca
atgccgcccatatccaccagcttcaccgctttctccacggcatcggcgaaatccttcgcccggtacatggcgagcgtgggcgacagcttttcgtgggcaaaaggctcgctgtcgtcgatgtcccggacttcgccaatcaggattttggtgtccgcaggcaccgcgatcccggccattccggcaatattgaccgctgactgcccgacaatagccgcgttgagcgcgccgtttttcagcagaatctcctgcacggccttcagctcctgcccctgcagcaggtag

SEQ ID NO: 186455 - DNA, 1416 bp, Klebsiella oxytoca
atgttacttcctgtgattatggcgggtggcaccggtagccgcctgtggccgatgtcccgtgaactctatccaaaacagtttctccgactgtacgggcagaactccatgttgcaggaaaccatctcgcgcctctccggcctggatacccatgagcctatggttatctgcaatgaagagcaccgcttcctggtggctgaacaactgagacagctcggtaaactgtcaaaaaatatcatccttgagccggtgggccgcaacacggcaccggccatcgccctcgcggcgctgcaggccacgcagaatggcgatgacccgctgatgcttgtcctggcagcggaccatatcatcaataatcagcaggtcttccacgacgccattcgcgtcgcggagcagtatgcgcaggctgaccatctggtcaccttcggtatcgttccgaacacccccgaaaccggctacggctatatccagcgcggtgatgcgctgggggaaggggaacacacgccttatcaggtcgcccgctttgtcgagaagccggacctggagcgtgcgcaggcctatctggcctccggagaatattactggaacagcggcatgttcatgttccgggcgaaaaagtatctctccgaactggcaaaattccgcccggatattctcgaagtctgcacggctgcggtccgcgccgccgacagcggcagcgactttatcagcatcccccatgaggtgttcagcacctgtcccgacgaatccgttgactatgcggtgatggaaaagaccgccgatgcggtggtggtggggctggatgccgactggagcgacgtcggctcatggtcagccctgtgggacgtcagcccgaaagatgagctgggcaacgtgctgaccggcgatgcctgggtgcacaacagccagaactgctacatcaacagcgacgaaaagctggtggcggctatcggcgttgaggacctggtgatcgtcagcaccaaggatgcggtgctggtgatgaataaaaaccgcgcccaggacgtgaaaaaggtcgtggagtacctgaaggccaaccagcgcagcgaatacaaacgacaccgcgaaatctaccgtccgtggggccgctgtgacgtggtggtccagacgccgcgcttcaacgttaaccgtatcaccgtcaagccgggcggggcgttctccatgcagatgcaccaccaccgcgccgagcactgggtgatcctcgccgggacggggcagataacggtcaacggcaagcagttcctgctgactgaaaatcagtcgacctttattcccattggtgccgagcactgcctcgagaacccgggacgtatcccgctggaagtgctggagatccagtccggctcctatctgggcgaagacgacattatccgtattaaagaccagtatggtcgttgctaa

SEQ ID NO: 186456 - DNA, 1383 bp, Klebsiella oxytoca
atgacacagctaacttgttttaaagcctacgatatccgcggcgaactgggcgaagaattaaacgaagatatcgcctaccgtatcggacgcgcctacggtgaatttctgaagccgaaaacgatcgtggtgggtggcgatgtgcgtctgaccagcgagtcgctgaagctggcgctggccagaggcctgatggatgcgggaacggacgtgctggatattgggctgagcgggaccgaagagatttacttcgccaccttccacctgggcgtggacggcgggatagaggtgacggccagccataacccgatgaactacaacggcatgaagctggtgcgtgaaaacgcgaagcccatcagcggtgacaccgggctgcgcgatatccagcgcctggcggaagagaaccagtttgcgccggtggatgcgtcccgtcgcggcaccctgcgtcagatatcggtgctgcaggagtacgtggaccacctgatgggctacgtgaacctggccagcttcacccgtccgctgaagctggtggtgaactccggcaacggcgcagccggtcacgtgattgatgaagtggagaaacgttttgtggcggcaggcgtgccggtgacctttatcaaggtgcatcaccagccggacggccacttcccgaacggtatcccgaacccgctgctgccggagtgccggcaggacaccgcggatgcggtgcgcgagcacggcgcggacatgggtatcgcctttgacggtgacttcgaccgctgctttatgtttgataacgatgcagaatttatcgaaggctattatattgttggcctgctggcggaagcgttcctgcagaagcagccgggcgcccggattattcacgacccgcgtctgacgtggaatacggtggatatggtgacccgcagcggcggcacgccggtgatgtcgaagaccgggcacgcgttcattaaagagcggatgcgtcaggaagatgcgatttacggcggggagatgagcgcacaccactatttccgcgatttcgcctactgcgacagcgggatgatcccgtggctgctggtggcggagctgctgtgtctgaagaacagcccgctgaaggcgctggtggcggaccggcaggcggcgttcccggcgtcgggggaaataaaccgcaagctggagaacgcggcggcggcaatagcgcgcatccgtgagcgctatgaaccggatgccgtcaacgtggacaccacagacggcatcagtattgaatatccggagtggcgttttaagctgcgcagctcgaacaccgagccggtagtgcgtctcaacgtggagtcaaaagctgataccgcgttgatgaaggagaaaactgccgagttgctcaatatgttaaaagaggaatcgctttga

SEQ ID NO: 186457 - DNA, 1221 bp, Klebsiella oxytoca
atgccgaaggtagcaacaaaactcactgacacagagatcaaaaaggccaagcccacagagaaagagttcacgctatgggatggagacggcttgttcctacgtatcaaaccaagtggtaagaaaatctggcatctagcctatgccgctccagtgtcaaagaagcgctcgaaaatgagtcttggattttatccgcacttaacgcttgctcaagcaagagctttgcgcgacgaatatttatctttgctagcgaatggtatagatccacaatctcataacgaacaaaaagctaacgcgctaaaagatgcggctgaacacacactgcagacagttgcgaagcagtggcttgaagagaaggtcaaaacttccggcatctcagaagatcacgcaaaagacatctggcgcagccttgaaaaaaacatcttccccggtcttgggcatcttccaattaaagaaatacgtccaaagcttttaaaacagcatcttgaccctatagaacagagaggtgtgcttgagacgctacgccgcatcatttcccgactaaatgaaatattccgctgggcagcaacagaagaactcatcgagttcaacccagcggataacctcggtcaccgtttcagtaagcctaagaagcaaaatatgccagctctacctccaaatgagctaccgcgattcatgattgctttatctaacgcctctatccgtcttgagacgcgtctgctgattgaatggcagttgttgacttgggttcgtcccggtgaagccgttcgggcgcgttggggagatattgatgtaaagaataaattttggaacatcccgccagagttcatgaagatgaaacggcctcataaagttccgcttagcaaagaagcactacgcatcctcgaaaaaatgcagccaatcagcgggcatcgtgagtgggttttccccagcatcaaagcacctcttaatcatatgcatgagcaaacagctaatgccgccataattagaatgggattcggaggtgaactggttgctcacggtatgcgttctatagccagaacagccgcagaggaatctggtaagttcagaacagaagttcttgaggcagctctcgctcattcaaaaaaagatgaaattatcgctgcttataaccgtgcggaatatttagttgaacgtgccgagctaatgcaatggtggagtgattacgttcaagcacaaaaatataagtttatggttgcttaa

SEQ ID NO: 186458 - DNA, 777 bp, Klebsiella oxytoca
atgaagatgtctaccttgaaactgattactgttttaataatattggttgtttggtatttgtatttttctcactttaatcattgggataaccctttagatctcctaaataaagagaagtggatggggttttctgatgataaaggggattggggaactttcggtgatttcgttggtggagtattaaatccccttctcacattcataactattgttatgcttataaactctctaaaattacagagggaagctaacgaaatattgattaaagatgaaagaaggcaagaaaaagatctcatgttaaagaggtttgaggatagcttttataatctcatatcttcggagcgggaagagtttagctctttttctataactataaataatactgagtttaagtcatctaatgcggtctcggaaatcgagcaagctatatgggattttattcaagcacagataagtgataatggagaatgcgaagttattgaggttagacgttttatagataacatagataatgagtcttctatgtctatattttcaatggtaaggtgtgtgtatgttgttttcaaagttgtaaaggaaaagtgcccagaagaacaccgagactattatcttgatatttttgttaatatgatgcctgtaaagttagttaatttggtttctataatgtctgtttatatggactggaagagtatttcttatattaatggtaatgggaaagggttcatagataacgaaggtgttcagaagtatataaatactttgaaagatctccactga

SEQ ID NO: 186459 - DNA, 828 bp, Klebsiella oxytoca
atgattaatctagatatggatgttgtagtcggtcatgggcaagatgattttgaagagctagaaatgacttctggcataaaagttttcagtggggcttcggatataacacaaattacagcaagcacaatattagataattcggttcctaaaaaatcaacatctatacatgggcttaggaatatttttaaacatactttcgatggttcttttggacagaaattttgtgtcaggatagaagatccagaaaaaataaccagatttaacgaaattgggaaaactgttttttttgatgttatgtcttattacatctccaaagggatgggagaggttcataatctaactaatcaagcttcgatagatcttgtaaatgagcttgaacctttagagagaactctcctgaataggattcaggatcctattgaaaacatgcatcgcactgttgataaacaagggtataatgtcctattaagaaggagaactccacaaaggaaaattatcgtagctaaaatggattcggctactttatataatataaatattgaacatgagtctcctcaaccagtacaagaaaatgtcataataacaagatttaatatgttaactggaacaggtaggcttttacttgacaggcaatctgattctattgcttttaggcatgctttaaattgggagcatgttcttcaaagccaaaaaaacaaattttcaaggaatcttgatgttaacaacaggggcggtagagatgctttcataccaataacaatctctgctattgaattaagaaatcacataggcgaacttaaaacttacattatacaagaagtcctttaa

SEQ ID NO: 186460 - DNA, 870 bp, Klebsiella oxytoca
atgagcaaggttatagattttagcagtggaaatttgttcgacaaggtatatgagcatctagctttaccagaatcgacattgcttggcacaagaatcactaagaagatgattctagagaataatgatctctcaagtagcgataagaagctggtaaatgatgtaattcaatccgttgaatggctgaatactcttaagcctgaaacgttaaacataccaacttatgttaccgaaacggtagaatatatcgaggtggctgttcttaaagtcactctcaaagccgacacaacaaaccgtggaaagttgaagagcatagcaaagctcttccatacattgatcccctacccggttatcttgctgtttgagctaaatggagaactggcgattagcctagcagataagcgaattaatcaggctgatagttcaaagttggtcattgagttttcttacaacagccagtggttcaacgttggaagcttgaaggacaatgagaaagaattcttgaacggtttttcgctgaagaatgcatcaagcgtcaactactacgaactgtatcaagacttcatcgctaagctcatttctcttgaaactagttatattttatatagttatcttaaaaatagctgtacaaatattgaacgccgatcatcacaagcaaacaaagtcgatacatttgatgaacatttattaacagcgttaagcaacgaagagaagacaagacttctcaaagagttagcatcacttgaaggtgaattgagcaatattagaaacaagttaaagaaagagctgcaaatgagtgagaaaatgcgtctcaatgtacaagcaagaaaagtaaaacacgcaatttcagcaatcacttctcagtttgtataa

SEQ ID NO: 186461 - DNA, 3315 bp, Klebsiella oxytoca
atgctcattgataacgtaacgaccaaagtttcagatacccttaccgatgcgattcaacagaacgataagctttccgtcatgatggggcttttttctatctatgcttttgagcatctcaaagactctttaaacaagttagattcggcacgcttgctattctcacaagcaaaaggatttgatgctcttgatagctcttcaccttttggctcactcaatggatctgagctagaaaataagtttcgtaatcagctaaaccaaaaggcaatagcaaaagagttttcctgttggttagagaataaagcctctgtgcgtttggttaaacaacccggggctgttcatcaacacataacgcacatttcctcaacttcaaactcattagcgattagcggtgctcaattcaacggacaaggaatcggtctcactgaaactaatggtttcgatatgatcagccttgctagttccgaacaagcacaagagttacttggtttcttcaatcgggtatggagtagtaaagggcaagttattgaagcaaaggaacaattaaaggccgaaatatctaaactaacagcagataatacaccgcagtttatctacttccttactctgtataacatttttaaaggctttgttggtgaactccgggaagagaacattttaaaaaccaaaactggttttaaagatacgattgtctggaataagctctataagtttcaacgagatggtgtattaggcgcaattgataaacttgaacattttaacggctgcatcattgctgatagtgtcggtttaggtaagacgttcgaagctcttgctgtcatcaaatactacgaattacgcaatgataaagttttggtgctatgtcctaagaaactgcgtgataactggctcatctacactcagaacgataagcgtaatttgttagcaaatgaccgtttcaactacgatgtgttaaatcatactgatatgagccgcattactggctattcaggtgagataaacctagaaactatcaattggggtaattatgatctcgttgtgattgatgaatctcacaacttccgaaacaacaactctaaaaaagatggtcgaaatcgttatcaacgacttcttgaagatgttatccaggcaggtgtaaaaactaaagttttgatgctttctgctacgcctgtaaataaccgcttgaatgatataaagaaccaagtggctttcatcacagaagccaatgaccaagcattaatcgaccatggcataaacagcatcgagagcacgttaagacaagcacaatcacgtttttcacgctgggctgaacaagatcctgatgttcgaacatcgaaagaccttttggactcgatgaatttcgactatttcaaattactggatatttatacaatagctcgttctcgtaagcatatagagaaatattacggaactgaggatattggtaaatttcctacaaggcttttaccaatcaacttgaagccttccatagaccttaaagaccaattcccatcgttggaagaagtgaataagacaatccgtagactttcattggcgttttactcgcctatgaaatatgtacgaatggataagaaagcggaatatgcaagacgttatgaccaagaagtaaagggcggtaaaagcgtattcaaacaagtagaccgtgaagaaagtttgatccaccttatccgtatcaatctcttgaaacgaatggaaagttcgattcattcgttcacgctcacgtcagaaaaattattagcacaagttgaagctttattgtcaaaaatccatagctttaacgctaatattcagccgacacttactgacgaactgacagaatattttgttgcaccgccaattgaaaatattgatgatcttgagtttgactcaccagaacttgctccttatatcataggaaacaaaactaaggtgaggattcaagatcttgatttggtgcggtttgcacaagatttagaagcagatagagtctttttgcaagagattgttcgtgtatcaaagaacatcgaccctaaacgtgatgcaaaactaggtatgctcaaacaggcgtatcttgaaaaatgccagaaaccgttcaatggcaataacaagaaagtaattatctttaccgcatttgctgataccgcagagtatctatacgaaaatatttccagttgggtttatcaaaacttgggtctccatactgcgataatcacaggtcaacgcacagatacaaccttaagttgcattgatggtaagaagttcaaaactgatctgaacagtttgctgacgcatttctcacctagatcgaaagaacgtgagaaggtttacccagagtttaaagaagaggtagacattctaattgctactgactgtatttcagaaggtcagaacttgcaggactgtgactatctaattaactacgatattcactggaacccagttcgtattattcaacgttttggacgtatagaccgtttaggttctattaacgacacaattcaacttgtgaacttctggccaaatatggagttggacgagtatatcaatctagaggctagagttagtgggcgtatggtattgctcgatatttctgcaacaggtgaagaaaacgtcatcgagcaagatccaaagctcaacaagggaatgaatgacttagagtaccgcagaaagcaacttgaacaactccaaaatgctgtagttgatttagaagaaatctcaggtggtgtgtccataactgacttaacgctgaacgattttagaatggatctctcaagtttcctcagtgataaatcaaaaggtaatacagatactctagaacaagctccattcgggctgtttgcacctgtcattatcagcaaagaatcgtttgagtcagaatctagccaatttgcaggtctaaaagatgaaattcaatcaggggttattttctgtctgaaagacattaaaggaaaagtccaagtggaagaaagctattcactcgccccttactatctcgtttatgtgtctgatgaagaaaaaatattactttcatttacccaatcaaaacagattctggatctatgcaagaaactaggttcagagttcaaatcctttgaagattctgcatactcttatcaagagtttgagaagagaactcaagacggaatgaaaatggctcattaccagaatcttctctgcaaggcggttgaaaatattgcaggtaaaagtgaagaaatcggtgcgacaagtttgtttagtcgaggtggaacagttttatctgcatcaagctctcaaaatgtaaatgattttgaagtagcaagctataccgtcattctgtag

SEQ ID NO: 186462 - DNA, 858 bp, Klebsiella oxytoca
atgctgctggctattcccgccagcgcctggtcagcttcgaccactaacagcctgaaggagcgcgattatatcgataccgtgctcgacgatccgttattcagccagtctcatctgaatttatcctttaaaaactactggaaatatcttaaggaagaagagaccgagccgaagaaagtccataatgcctggggtcagggcgtcgccgtcgattatcagtccggctattttgccgatattattggctttgatgccacatactacggggcggtaaagctcggcgccagcgattactttaactcccgcggcgtactctataacaacggcagcggaaataacaaaagcaacgctgaaggcttttccaaatttggtcaacgcaatatcaagctgcagtatcgcctggcggacactcatctgaacgcccgctggggctggcagacgatgaaaaactttggcgtcatctccaactcgacccgcctctctccaaccacctacctgggctggaccggcgcggtgaactacggtcccttcacgctgcgcggcgcgtacatcgaaagcgcgatggatcgtaactcgccggataagaaacgcttccagaccaacagcggacagtacattaaccatatcgccagcggcgatattctgtggcaaagcgagcacctgaacatgcagtacggctatggtgaaagcgacaactatctgcgccgccatattctgtttaccaatattaagccgataaaagcgctgaacatcggtactcaggtctacgccactcacgcgctggacgagtataaagcgatgccggcaaataagcgtgactttgacgatgatgcctggcacatcgccatggatgtgaagtag

SEQ ID NO: 186463 - DNA, 399 bp, Klebsiella oxytoca
atgggctgggaacttcacatagtaagaacagggaattggttcgatagcgcaagtaatccaataagccgtgaagaatggctccagcttgttaatgacgatgaagaactatccatagataacaagaacggtgattcttatgctatatggaacggtcagagtgaacatgatgagccttggcttgactggagtgatggaaggatttcaactaagaatcctgacgaggctctgtattgtaagatgctgcagatcgctgagaaactaaatgctgtagtcgttgacgaggatgatcataaatacttattaccaagtgatcttatgaatccatcaagggcaaactcattgcctacttgtaaaacacaatctttatgggcaaggctgatttcaaaagtggaaaaataa

SEQ ID NO: 186464 - DNA, 681 bp, Klebsiella oxytoca
atgagcatgcaggtgcaggcgcacgtcatagcgttttttgatttcgctgaccagcgcaaaggcggcccccggggtgagaatgcccgacatgtctttaatcgcgatggagtcgacgccggtctccagcagctgttcagtcaggtccagccaggtctgcagggtgtgggccggactggtggtgtaggagagcgtcccctgagcgtgggcgccgtggctgcgcaccgcctgcagggcggctttcatgttgcgcgggtcgttcatggcgtcgaagacgcggaacacgtccatgccgtttttgacggcgcgctcaacgaagcgctccaccacgtcatcggcgtagtggcggtagccgagcaggttctggccgcggagcagcatctgcagcggggtcttcggcatggcctttttgagctcgcgcaggcggacccacgggtcctcgccgaggaagcggatgcaggcgtcaaaggtggcgccgccccagcattcgagggagccgtagcccgcgtcgtcgagctgagcggcaaccggcagcatatcgtcgaggcgcaggcgggtggcgaaaagggactggtgggcgtcgcgcaggacgacatcggtaatggcaacggtcatggattcctccgtgaattaagggttaaggcggcgatggtggtggatggcggcggcaatcaccggctttaa

SEQ ID NO: 186465 - DNA, 378 bp, Klebsiella oxytoca
atgaaaagattgattacggcagcatttattattcttcctttagcgagttgtaccgtttatggaaacaaatctattaaagacgaaacacagcagaatatagcctctaagattatcaagggtaaaactactcaacaagatatccttcgtttttatggggagcctcagactaaagaaactaacgatggtaaagaaatgtggggctattccgttatgtccggtgaatcccagatttcaaattacataccgggattagcattattaaagaacagcagcacagcgcacatgaaagatcttgagatctggtttaaaggtgatgttgttgaacgctatacctttagacaaacggcaagtaaaacttctcgcggtttgttagattaa

SEQ ID NO: 186466 - DNA, 495 bp, Klebsiella oxytoca
atgaaaaccgaaaacattatttttcttttttgggcagtgatttttatcctgattctctgccaactgttttactttggccctaaaaaaagaagatatctcaatacttatacagaggtattagatggtgatgtcctctcatatgaatgtcaaaacaccggtgtagtcattgatactaaaaaacacacagtacgtattttcaatacagataaggacagcactttcaaatacgacaacatcagggaaataaattatacgctatccgaagctggaaaaatttatagcacaggtaataatctaaactctatgataaagtccgctggagctaacagtaatgaacaaatgttagctaatcagcgttccggtatttttatactgacagatgatataaaaaatccttcatggaaaatcaatctaccaatgaaaaacaaaacatcatcgaccaatcacgagatctgcgatcgctggcttctcatttttaataaatacgttttataa

SEQ ID NO: 186467 - DNA, 771 bp, Klebsiella oxytoca
atgcaaaaggctggcatcgatgcgcatatcgatcacagatcactgaaagaacaaaaagcagagtttgacgctatcctgccccctctcagaacggttgagcaagaggcgcaggcaatcagcttagacagaccgccgactatccatagaggccatagccgcaatccagagcgacaagcacgctttgacgtgctccaagaagtgaaagtatcacaagaggcaaaagcacttaaccacattgaacagaaacagcttaagccctcgccgttggctccagcttcctcccctgccgcatctttgcaagatgctacacagggaggcaatgaaaacaacccgcaaaatagactcggcgaagttggcgaatatcttcaatctaaactcaataaagaagataaagcagatcttaatgctgataatgaaatcaaagttcacaccactaaaaataatagtaaaagcagttcagcagcggctataggttcaacatcaaatattaatttaaccgatgagaaagtagataagaatctacacttaacagaagcacaaaaagaagagttagaggatttagaaaataaagaaacagcagcgaagaaaaaagcttatctgatgggcggcgctgtcgttcctgaattttctcaagataacaaaacacagtcaaaaagtgagtttaaaaataagcttcatatagcaaaactatcaatatcattaactgaacagagatttaatgaagaacgtgaagcatatgagaacagaagaaaccgaccaataacgcgctaa

SEQ ID NO: 186468 - DNA, 186 bp, Klebsiella oxytoca
atgaatgataatgataaaaaaatagaagtggcagcgtctgaacttgttagattgattattagaaagctacaagatgaaaatacggatgttatatgtagaacgagcttatttataacttacaatcttttttctcatgaaagcgattttactgttgtttatgacacgttagggggagatctggaatga

SEQ ID NO: 186469 - DNA, 336 bp, Klebsiella oxytoca
atgattggaaattataacaatgattacgactatgatgataatgagtatttaaatgatgacactatagaaatccctttgagctgtgaagatgacgaatatagagaggattatttaagagaacaagagcaagaacaaaaatctgttttacagaaaatgattgagtataaaaatgaaaatgcattttttggtcatttatacgaaatgtccggtgtttttggttttactgttgttttattgttagggtttatttttacgctgccgattttgtttatagctggattgattgcgttttttattacattgaaagaaaagaggggtgcgaaaaatggcgtttaa

SEQ ID NO: 186470 - DNA, 336 bp, Klebsiella oxytoca
atggatacaaactcagaccgggaagcaattgaatatctatttaagaataaaaaagagttatttcagcattacttctccacattcaataacaatagctacaatcatagtattcaaatctggcaccaaggcaatgataatacgtggatcgactggggtgaaacaaactctatacgcataaacatcaacccctacaaaattcgtgagggtttctttttaatcggctttgactatcgtgacatcacaaataatgaaaggttacatgttgccagcaacaaagatgggtatgagtactttaataagtgtttggaaaatagtacgcatgtatggatgcaatag

SEQ ID NO: 186471 - DNA, 414 bp, Klebsiella oxytoca
atgaataacttaagacctaacccgaaccctcgaaaagagggaacggcggacatgatgaaccgcctaaatttctatgatacgtctttcacttgcttgcattttctaatgatagatttcgataatgacatgcaagaaatgaaaagaaaaaaagattttcatcctttgatgcttttgaataaacacgatagagagagcttagatttagagatacgaaacattattagaatatcacttgcaagcaaaatgttaaatattaaaagcgaaaagttattgagcgctgatttatattttgaaaaacaagatgagttagatatgggcgaagatgcgagaatagtcagttatgtgtttagagactttgtaaaacaaagaatagaagcagcgattaaaactattgaagaagagagaagtatatga

SEQ ID NO: 186472 - DNA, 336 bp, Klebsiella oxytoca; identical to SEQ ID NO: 186470

SEQ ID NO: 186473 - DNA, 498 bp, Klebsiella oxytoca
atgatcagtgaagtaagtaaattgcgaattaaacaagctcccaaactgattgctgaagaaataacacctaaagattacgacgcaggatttaaggttttaaagctagattctactaatattcgaacctgggacgcagactttgacaacctagaacaagtgcttcaacaagccatcaagtcaatcaaagaaggtcgttctagcgaagatattttatatgaaatatttctaaaatatggctatgaattaaccacccctgtagaaaccgaaaatgtgaacggaaaaacagtctatgtcgttggtgcaggtgctttgattgtttgcttggatgatgaaattacgactgaaacgatcgaaggtatagccaatcttaaagctgagctagctccagaaacgactcaaatagtctttaaagatgaagggtttgctgatgattgcgttaagaccaatgctattcagattttgaagcaagctggcatcgacgatcttaagagcatttaa

SEQ ID NO: 186474 - DNA, 240 bp, Klebsiella oxytoca
atgtcaatccaaagattattatttgggggcaatatggtggtgctttttatctgggcttgcgtcaggttttattcaaagattatagagaaatcgcgaaagagggggattggtggtgtcgtcttgatggggatgagttttatattgatgatccacgagattttctctccgctattccaggcaattttgatcatgtctataatgcttcatttcaatattatttcacctacgatgattatataa

SEQ ID NO: 186475 - DNA, 303 bp, Klebsiella oxytoca
atgatcgttttttggtcaaaaagcgcagaaaaacagctcgccgcaatagattcccgctatcaggagagaatcaaagaaaagctacgcaccatggatgataaaaatgcgccggctccggacattaaaaaactcaagcagtcgggatccgaagatcattatcaattgcgtgtcggtgattatcgaatcatcttcacacagtttgagggggtacctgaaagctgctatgtcgtagtaataaaacgcagaacctcaacaacctatcttcacgaggaggcaacgctttatggcagtgcaactcattaa

SEQ ID NO: 186476 - DNA, 405 bp, Klebsiella oxytoca
atggcagtgcaactcattaaggatgacgagggcaatccacagtatgtggtgatcccctataacgaatacttccagatgcgcctgaaaatggcggaatacgatgatgaaaaagaggaggagtgggaagacgttccctacgaatctgatgaatacgacgatattccattgcctgacagcgtttgcgacatcatgcatcgtgagaaagtcagcctgcaggcggcctggcgcattttgcgcggcctgtcgcagcaggaggtggccaataagctcgggattagccagtcggcggtatcccagctagaagctatcgactcccgcccgcaaaagcgcacccgcgaaaagctggcggcaatatacggctgcacccaggagcagatcagcctgtatctgccaaaagagggttaa

SEQ ID NO: 186477 - DNA, 1206 bp, Klebsiella oxytoca
atgtctcttcgttcattgcaggcgctatgcctgaccagcttttttattgccgacgttcgcgatgggctcgggccttttctggggattttcctgacgcaacatcactggcgaccggatgacatcggtctgttgatgaccgcgggcggcgttgccggattgctggcgacgcttcccgcagggttcatcaccgatgcttcgcggaacaagcgtcttatgctcgcgatactgtgcatcatgattaccgggacgacgctgctgctctggttcagccagggcagcagcgtcgtcgccatctcgcaaatcgtcagcggcatatgtgcggcatttattggcccgcttattaccgggatcactctggggctgacggggcaagacggctttagtacccagatgggtaaaaatgaggctttcaaccatgcgggtaattttacgaccgcattgattgcgggcgggatcgcctggcgctggggtattggcggtattttcatcctgatggcctcgaccatgttgctcacgctctttgccctgacggctattcgtcgtgatgatatcgacaacgctcgggcgcgcgggcttgaaacgacggactccccccagatacctgacttctcggtgctgaccaaaaacagggcgcttttaattactgggttgacgctgctgctttttcatttagccaatgccgcgttgctgcccatgctcagcatgcggatcgctgcggcaccaggcgcgatcaatcccggcctgtatgccgcggcgacggtgattatttcccagttggtgatgatcccggtggccatctggaccgtaggtcgaattgataaatatgggtactggcgactgattatgctggctctgctgatcatgccagtcagggctgcgctggcggcaagcacggcggcaccgtggatgatggtgccggtgcaaatactggacggctgcgccgcaggggtactgggcgtagtggtgccgagctttattgtggcgctgctgcgcggcagcgggcacgtcaatgctggccaaagcgtggtaatgctgatgcagggtgccggcgcggcgatgagtccggcattgacgggaatgattgccggttattactcgttcgcgacggcgttcagcgtgctgagcgttatcgctctggcggcgctgcttatctggtggcgcagcgcgccgacgctctctgcgccggcttttatggcgacgaaataa

SEQ ID NO: 186478 - DNA, 321 bp, Klebsiella oxytoca
gtgctcgccatatttcaagggccccatagttatgtttcccctacctggtatcaaaccgctcccgcggttcccacatggaactatacttccgttcactgctatggcaacgtaagccttttatctgtcgatgaattacgcattgtgatggaagcgttggtccataaatttgaaccggcgcttcaggtcaaagaaaagcttgggcagcatcgttctcaggccgatcagcgaggaacgctacaggggttaatcaacagccaatcctcagagtccgttgcgctggctgactatatgcttaaggtgaagaaaggcattggcgcttga

SEQ ID NO: 186479 - DNA, 321 bp, Klebsiella oxytoca
atgcaaaaatggagtcagcccctgatttggggaatggtcatcgccgtcatcggcccgattatggccagcttttttggcctggcgtttacctattttggaacgctgagcgtagtctggttcgcggttttattatggttcctctatttttacgcgatttatctgctctgtacgcgaccgcacgatgagcgctttgtgcaggtatacatgctgattatgagtattcttatgctgccctgggggctggtgctgatttttacctttttcgccagcgcgaccgccgctcataaccgacgagtttcatccagtaacgacgatacataa

SEQ ID NO: 186480 - DNA, 201 bp, Klebsiella oxytoca
gtgaacctgtatcccgggttgaggcgtaaacgccttacccgggctacttacccgcaggcggcggtgaacctgtatcccgggttgaggcgtaaacgccttacctgggctacttacccgcaggccgcggtgaacctgtatcccgggttgaggcgtaaacgccttacccgggctacccgcccgcaggtggcggtgagcctgtag

SEQ ID NO: 186481 - DNA, 231 bp, Klebsiella oxytoca
atgacgacccggcatcaggtgagtctggttacaggggtattgatactcgccattatcctgccggtcgcgctgagcatctggctggcaatgcagcaggccaaagagcaattttatagcgaactggacaacttttccgtccgcgtactggcccgcgttcagcaggttgccgatcaggcaagagaggcgctgaacgaagctgatgcgcatgcggataccacctgcagtccgtag

SEQ ID NO: 186482 - DNA, 123 bp, Klebsiella oxytoca
atgcttgtagcccggtcgcgcgccgtggagaacatcggaagcggtattgcacgtggcttcccggaggcggcgcttaacgcccctgtccgggctaccgatccgcagaaagcggtaaacccgtag

SEQ ID NO: 186483 - DNA, 132 bp, Klebsiella oxytoca
atgtcccacgtctgtgtgcattcccgccatagttcaggccgcatcattattatctgcgacgcaaattattttgggtgttacgacctggtgcacaattttaaaaacaacgtttattaccaattacagcgctaa

SEQ ID NO: 186484 - DNA, 828 bp, Klebsiella oxytoca
atgaatgaaggtcttacagactcagttaaacaagcgctggagcaaaggctcaaaaatcctttgtggggatttattcttctggcgtggatgtggttcaattggcctaacttagcgatgttgttcatgagtgatgcgcctgtaaagttcagaatcgattatatcctttcgcaggagtatttctatctgcattacatgattgcccccatcctttctggcagtattttggctataatctcgccatatgcacagtggctcctttctcaggcgcataagtgggctgatgatagatatagtgccaacacattcaaaatcaaagagagagattttcaagaagcaatagacctgtcaactttaaaagtaaaagctgatagagctgaagatttagcaaaagcaaaaagtgatgctgacatacaagagcaaattgagcgagggaggcgcgaagaattaaaaactaaagaactagaatcaattaaaaatgcactgtccgacgaattagaaaatttgaagacttcagtttctttacaacaagctgaaattgatagcctttcgaaagacaaagcaaggatccaggatttaattgttgagtcattgtttattatggaaaatattttcagtatttcagattctagttcaatccagaagattaaaaaggaggtagagaaactttactctgctagtgaaatagaaatatcttctatattgaatgctatcaatgcgaaaagagaacttacacctcaacaaacaatgatattttttgataagctggatgaaaaattaaaaaaagataggttaaaggcaggggtaacaagttctttagacaatgaatga

SEQ ID NO: 186485 - DNA, 192 bp, Klebsiella oxytoca
atggaaaatacaattaacgaaccaattacctattacgactctaacggctgtctaattatcggggctaaccttatcgggaagattcatcctcagctaatggaaaagctaatcagacgttcgggggatgactcaaaacgtagcctgcaagcccgaatcacatcttacctcgaagaggttttaaccaatgtgtaa

SEQ ID NO: 186486 - DNA, 564 bp, Klebsiella oxytoca
atgaccactttaaatcaagctgtatcaattaaccaaccagtagcttcagtcagtcacctgttaccattcgaacaaaagcagcatgttgaaaagctgtattttccgaaagtacaacaggcttctgaaaagatgtctaaagctgaggttgaatatcaggacgctgtagaatctcgttcagtgttgattaatcagaaagctgctgaatatcttgctaacccgtccgaaagacacggattcattgtgaagcaggtttatccaactaaccagcaacaagtgattcaaagcatggctgatgctggctatatggtacaccgggtgggaatgggcttaatctatttcatctcatctaaaaagaatgctctgaaagacgcaactgataaggcaaccgctgaagctgaatcaaccattgataagatgattgaacgtctgaaggtaaaagcctctgaagctgtccaccagcgaaacaagattgttattgaagcctgtaaagctctggatgctgtaaaagactttaccgattacctgaacgtgattgtaaccgattctgaagaggtgaccgaataa

SEQ ID NO: 186487 - DNA, 330 bp, Klebsiella oxytoca; identical to SEQ ID NO: 97553

SEQ ID NO: 186488 - DNA, 867 bp, Klebsiella oxytoca
  misc_feature (853)..(862): n is a, c, g, or t
atgagcctgaatcactctttcctcataggctcagatgagtcaagtgagcttatgctaaacatttctggtcttgatgctaacgctaaagaagtggattccttatgtgccaatttctttgcacactgtgctaagactggcacacccaaattcacatgtaagctgacaatacaaaatcttcaaaatctttatagccatctatccagctatagcatggtatgtgatagcacttcttcaaagactggaagattcattgaggtcagagataattataatgagataatcagcattcttgaacacgctgataataattcattagttatggccttgcagcaccttgtaagcagtaagttaaccaataatgacatcaatacaatattagggagaaaggaatctctcgagacctacgagaaaatgctcactgagcctgatagttataaggaggcagactggcaacgtttttttgaaaccaatgaatggatttttggttatggcttaaagtataaattcctaaaaattcttcaaagggaagctcacatatcaagaactgatttaaacggcggaaatgatgtaattgctgattttcttatatctgactcaagattcaccaagattgtggaattaaaaacaccaacaacaaaacttttcactaagcgacaagggcgctctgatacatggttcttatccagtgaattaaccgacgctgttagtcagatattggcgcaaaaggcaaattgggagattgaatctcagtctagaaattacactacggatggtgaacttatacatgaagatacatttgatacagaatgcattttaattataggttcattatcttcaattgagggtaatgagnnnnnnnnnnggtaa

SEQ ID NO: 186489 - DNA, 144 bp, Klebsiella oxytoca
atgaacaagacaaaagcagtgcggattaaaaagacagataatcaactggtgaaactgaaagcggttaatgctggagcaaccatcagaaagactctggaaaatatgattctaatgtcctatgtaaaacacattaatgttatctga

SEQ ID NO: 186490 - DNA, 585 bp, Klebsiella oxytoca
atgtacaaagctaaagtattcaatggagtcaagactccggctggaaagccaattacaaataaaggcttcttctcagatgaccacgatttaatagatacccccgaataccgcgaatctcttaaaaacaccctcatcgaattaggttacaccagcttcaataaacctttacccgcaagcaataaaccttaccgcagaagaggaacaccccgtaaggctatggagaatacacttcagcaatatttcattaataaagactcagtaagtaaccttccttcaaaagttgaggatgtattcacgggttgcgttaatagctgtccagataaactatccccaactttctgtttcaatctattgaagcaattaagcgttatcacagcaaccgctgtagaggatgaaacaggatttagtaaaagctggtgtaatgatattactcaggcattacagttagcaatcacaatgattgagcattgtcatgataaaggcgaaattcaggtaatgtttaacagtgactatgtaaacgatgaattggattctgacagggaattagaagacgtccttgatttacacattcaaaaggcagcataa

SEQ ID NO: 186491 - DNA, 951 bp, Klebsiella oxytoca
atgtatcttcgattacataccgagcaatggactatgaacaactcaccagtgctgaaacttcaagagatggcaagctcaaactcaactgacattgaagatttgctgtcacgagcaaaaatgatatcggtcaagctggatttgcaagaaatatctgattggcttgagcacgagctaaatggctacccctcatttgagctactccctgagtatagaatcataaagaatgctcgcatcagggcattcaatccatatgcgggatggattccttatcagcttggtaatattactgaggaatctcgcgatatctacgaaatccttacaacagttcatataaacaacccagtatcaatgctttccgaatatgctaaaagagaaagcactctatatagtgaattgccagctgcgcagactgaatacttgcaggaaataagcgattgtgattttagcatggcatgggcaattaacccaactcaaataacaaaaatactatctaatgttaaatcaagaattcttgactgggctttattgcttgaaaagaaaaatgtattaggtgaagggttacttttttcgcaagaagaaaagagggaggttttaggaatgactgttaacaatattaataactttaacggcaacgtacataatgctggtgctattggtgctggtaacacaggagatattcaccaacagaacagtattacttcaggtgattttaactcccttgtgcgtcagcttaaagagcacgggctggatgatgctgatgtcacagagctggagcagcttgttaaacagactgataaaccgacttcaaaagatgaggttgaaaagggctttgggtcttggattggtaagattacgggaaaggctttcactggagggcttaaaatcgctggtgcggcagctcctgctttactaactaatgcgctttgccattactttaacattcctgtctga

SEQ ID NO: 186492 - DNA, 447 bp, Klebsiella oxytoca
atgatggataaccttattgatgatatcgaccgacaaattttagcctgtctggtggaggatgcgcgcgtatcgctgaaggtgctgagcggccgcattggcctgacatcgcccagcacggcggagcgtctgaaaaggcttgaggagcgcggggtgattcagggatatggcgcgcgggtgaatcttgcggcgttaggctatacgctgcaggcgctggtgcgcgtacggccgttgcctgggttgttacataaagtggataagtatattcaggcgatgccggagtgcattgaaagcgacaaagtgaccggcgaagattgctttgtcatcaggctggtggtgcggtcgatagagcagttggatacgctgctcgacgggctggcggagcatgcccagtgcaatacgtcgattgtgaaaagctcgccggtgaagcgccggctgccgccgatgtag

SEQ ID NO: 186493 - DNA, 897 bp, Klebsiella oxytoca
atgcgtgatttacataaaggcgtctggcaaatgattctggcaatgctaatttccggatcgattggcgcgtttgttttactttccggcctgccggtgacggaagtcgtgttctggcgctgtcttatcggggccattgcgctgtttatttttattcggatgagtcgaaaaccgtttagccctctcacccgcattacgctgctgctggctatcctcggcggcatagctttagtggtgaactggctgctgctcttcgcagcctatgaacggatctctattggtctttctaccgtggtgtataacacccagccgtttatgctggtattgatggggatgcttttcggtgagcgcgtcagcctggtaaaatgggggtggctgttcctcgcctttggcggcgtggtcattttgctctccaccgagttaaccggcgcacgtggcgccgactggctcgccggtatcggcctggcgctggccgcggccttcttctatgcgctaacggcgatgattgcccgcaagctcaaatccattgcgccgcagcatattgcctttattcaggtgctgacgggcgtcgcgatgcttctgccgtttgcccgcatgccgtcattttccggtgattttccatggcctgtcttgctgacgctgggcatcgtccataccggcattatgtatcagctcctctatagcgcgattcagaagctgcctacgcccattaccggctcgctgtcgtttatctatccggtggtggcgattattgtcgataatctggtattcggaaactcgctgaacctgacgcagctggcgggcggcgcgctgatcctgttggccgcggcgggcaataacctgggctggggcgaaaaaaaaccccgccaatgcggggtgggtatcaaaacagcgaattag

SEQ ID NO: 186494 - DNA, 3744 bp, Klebsiella oxytoca
atgagtaaattcctggaccggtttcgctacttcaaacagaagggtgaaacctttgccgatgggcacggccagcttctaaaaaccaaccgggactgggaggatggataccgtcaacgttggcagcacgataaagttgtgcgctccacccacggtgtcaactgcaccggttcgtgcagctggaagatttatgtcaaaaatggcctggtcacctgggaaacccagcagaccgactatccgcgcacccgtccggatatgccaaaccacgagcctcgcggttgcccgcgcggcgccagctactcctggtatctttacagcgccaaccgcctgaagtatccgctgatgcgcaaacgcctgatgaaaatgtggcgtgaagcgaaagttcagcacagcgatccggtggatgcctgggcctctattattgaagacgccgacaaagcgaaaagctttaagcaggcgcgcggccgcggcggtttcgtgcgttcgtcctggcaggaagtgaacgagctgattgccgcctcaaacgtctacaccgtcaaaacctacggcccggaccgcgtggcgggcttctcgcctattccggcgatgtcgatggtctcctatgcctccggcgcgcgctatctgtcgctgatcggcggcacctgcctgagcttctacgactggtactgcgacctgccgcctgcgtcaccgcagacctggggcgagcagaccgacgtgccggaatccgccgactggtataactccagctatattatcgcctggggttctaacgttccgcagacccgtaccccggatgcccacttctttaccgaagtgcgctacaaaggtaccaaaaccgttgccatcacccctgactacgccgaaatcgccaagctctgcgatctgtggctggcgccgaagcagggtaccgatgcggcgatggcgctggcgatgggccacgtcatgctgcgcgagttccatcttgacaaaccgagccagtatttcaccgattacgtgcgccgctacaccgacatgccgatgctggtgatgcttgaagagcgcgacggctattacgcggcgggccgcatgctgcgcgcggctgacctggtggatgcattaggtcaggaaacgaacccggaatggaaaaccgtcgcttttgatgagaagggcgaaatcaccgtaccgaacggctctatcggcttccgctggggcgacaaaggcaagtggaacctggaacagcgcgacggcaaaaccggcgaagacgttgagctgtgcctgagcctgctgggcggccacgacgatatcgccaacgtcggcttcccgtattttggcggtgaaggcaccgagcactttaataaagtcgagctggaaaacgtgctgctgcacaaactgccggtcaaacgcctgcagaaggccgatggctctagcgtgctggtcactaccgtctacgacctgaccatggcgaactacggtctggatcgcggtcttggcgatgaaaactgcgccagcagctacgatgacgtcaaagcgtataccccggcgtgggcggagaaaatcaccggcgtttcccgggcgcacattatccgtaccgcgcgggagtttgccgataacgccgataagacccacggccgttcgatgatcatcgtcggcgccggtctgaaccactggttccacctcgatatgaactatcgcggtcttatcaatatgctgatcttctgcggctgcgtcggtcagagcggcggcggctgggcgcactatgttggccaggaaaaactgcgtccgcagaccggatggcagccgctggcgtttgctctcgactggcagcgtccggcgcgtcatatgaacagcacgtcgtacttctataaccactccagccagtggcgctatgaaacggtgaccgcgcaggagctgctgtcaccgttagcggataaatcccgctacagcggccacctgattgacttcaacgtgcgcgctgaacgtatgggctggctgccgtcggcgccgcagctgggcaccaacccgctgcgcatcgcggaagaggcgaagaaagcgggcatgacgccggtcgattacaccgtcaaatccctgaaagagggttccattcgctttgccgcagagcagccggaaaacggtaaaaaccatccgcgcaacctgtttatctggcgttctaacctgctgggctcttccggtaagggtcacgagtacatgctgaagtacctgctgggtacggaaaacggtattcagggcaaagatctcggtaagcagggcggcgtgaagccggaagaagtggagtggaaagacaacggtctcgacggcaagctggatctggtggtgacactcgatttccgtctgtcgagcacctgcctctattccgacatcgtgctgccgaccgccacctggtatgaaaaagacgacatgaatacctcggatatgcatccgtttattcatccgctgtcagccgccgtcgacccggcctgggaatcgaaaagcgactgggatatctacaaagatattgcgaagaaattctctgaagtctgcgtggggcacctcggcaaagagaccgatgtggtgacgctgcctatccagcacgactccgccgccgaactggcgcagccgctggacgttaaggactggaaaaaaggcgaatgtgacctgattcctgggaaaaccgcgccgcatattctgaccgtcgagcgcgattatccggcgacatacgaacgctttacttctatcggtccgctgatggagaaaatcggcaacggcggtaaaggcatcgcctggaatacccagagcgaaatggatctgctgcgcaagctcaactacaccaaagcggacggcccggcgaaaggccagccgatgcttaacaccgcgattgatgcggccgagatgatcctgaccctggcgccggagaccaacggccacgtggcggtgaaagcctgggcggcgctcagcgagtttaccggccgcgaccatacgcacctggcgacgaataaagaggaagagaaaatccgcttccgcgatattcaggcgcagccgcgcaagattatctccagccccacctggtctggcctcgaagatgaacatgtctcttataacgccggctacaccaacgttcacgaactgatcccgtggcgtacgctgtccggtcgtcagtccctgtatcaggatcaccagtggatgcgcgatttcggtgaaagcctgctggtgtaccgtccgccaatcgacacccgctccgtgaaagcggtgatgggggccaaatccaacggcaacccggagaaggcgttgaacttcctgacgccgcaccagaagtggggtatccactccacctacagcgacaacctgctgatgctgaccctgtcgcgcggcgggccgattgtgtggatgagcgaagcggacgctaaagatctggggattgaggataacgactggatcgaagtgttcaacagcaacggcgcgctgaccgcccgcgcggtggtcagccagcgcgtgccggccgggatgaccatgatgtaccacgctcaggagcgtatcgtaaacctgccgggttccgagatcaccgggcaacgcggcgggatccacaactccgtgacccgtattacgccgaagccgacccatatgatcggcggctatgcccagctggcctacggctttaactactacggcacggtagggtctaaccgcgatgagtttgtggtggtacgtaagatgaagaatattaactggttagatggcgaaggtaacgaccaggtacaggagagcgtaaaatga

SEQ ID NO: 186495 - DNA, 825 bp, Klebsiella oxytoca
atgcgtgacgatatcaaactctggcgggacagcaaactccacggtgggatggagatcctgcgagcatcctgctatgaacatagctatccgccgcatttccataatgaatatgtgatcgctgcttttgcacgtggcgcacagcgtacccgtatttgccgtgaacgaggcgttgcggctgcgggtacggtgatggtcatcatgcctggcgaggtgcataccggtgaagcagtgcagcgcgatgaggggtgggattactgcgctatttatccctccgcaagcctgattgacgaagtcgcggaaacggtgatgggtggaaagggagaagtcaatttcggcggtgaaggaatgcgatacgatccgcttatggcacggagcgtacttaaggcttccgccgtgctgggggccagccgcgattcgctggaaaaagagtgcactctctatcaggtgcttaatcaactagtggggcgctatgccgaacgcagcgtgcgcggagggcgaagacccgctgtgagggctgatattcgtcgggcgatagattttttgcactgcgcatatccgcagtcgctgtcggtcaaagagatcgcgacggtcgccgggctgagcgagttttattttatgcgcacttttcaggcacagacggggttatcggtgcatcaatatttgacccaactgcgactggtcagagcaaaaggattattagcgaaaggtgcaggtgctgcgcaggtcgcaacggaggtcggtttttatgaccaaagtcatttgattaagtacttccgcttgcattttggcaccactccgggcctcttcgccgccgcgtctatttaa

SEQ ID NO: 186496 - DNA, 744 bp, Klebsiella oxytoca
atgttaattacaatcaaaacttcggcaaagaatggagcatcagcgcaattccgtgagggcgtcatcgcttgtctccccaccattcccggttactggagcatcggtttcgccgccggcgctatcgggacactatccggtttttccactcttcaaacggcgctgctggccagcgccctgtatgcaggttcggcgcagttcctgttttattcgctttgggcgaccggtgcagaaattgcatccgttgtgttaagcatactgctggttaacctgcgctatctgttgatgagttcagccataagcatcttctttcgtccctacacggtgctgcaaaaaatcatcagcggactgctgctgacggatgaaaccttcggcgtagcggtacaacatggtggagggaaaaacattatcacttacccatggatgctcggactcaatctgactgcatggctaaactggatcctcgcctgcgtgtcaggcgccatattagcctcagcgcttccatcatcgttgatggaaggattgagctttagtctggtgtcgatgttcatcggcctggttttggccctgtggtttgccagccagcgcaaaatgctggaaatgttcagcattagtatcgcggtactcatcacgctatttacctccggacatatcgatatgagtctcgtcgttatcgccgcagcctctgtagcggcaacgctggctaccgctgggttgtatctgttcagtaacaaagaggggaaataa

SEQ ID NO: 186497 - DNA, 321 bp, Klebsiella oxytoca
atggatcgcaatattatcctggctattcttgcttcagcgctggtaaccgcactcatgcgtacggcgccgattcttctcctttcacgctttcgtctgccatcggctcagcagcaatggcttagctttattccgtctgccattatggcggctattgtgacggcagaactggttggcaagccggtattaacctcatctggtatcagtatttcagcgctggccgctcttgccgcgacgcttgttgggctggtcacgcgcagtcttttcgccaccgtgatcgtaggtatggtagccttttcatccttcagctatttcctgctctag

SEQ ID NO: 186498 - DNA, 1860 bp, Klebsiella oxytoca
gtgaccaatcgcggggagcgcttcgcgggcaaagaagtggtgcaaatctacctccaggcgccgcagggcgcgctcggcaaaccggccaaggtgctggtggcttttgccaaaactcgcctgctgcaaccgggggaaggcgaaaccttaacgttatcgatcccgctggagcgttttgcctccctggacgatagcggagctaccggacatccacactgttatgtaatggagccagggctttatcgcttgctgcttggtaacagcgtgcgcgatctacagccgatgccggttgacggcgaggcggggtacgcgcagaaaacgctgcggatcctctcctgccatcagcaggtgctggcccctacggtgccttttgtgcgcattaaacccgcagccggcggcggcgatgggcgctatcagatcgagtgggaggacgtgccgcggcgggagattaatctgcgaacgcgcattgaggaacgcctgccggagagtattccccttaccggcaaccaggggctgactctcaacgacgtggctgaagggcgtaccacgatgaacgcgtttgttgctcagctgtctgttgaggagctggcctgcctggtgcgtggagaaggcatgtgtagccacaaagtgacccccggcgtcgcgtcggcttttggcggcgtggccgacagcctgctggaaaaaggtattcctctggcatcgaccgccgacggcccatccgggattcgcatggataacggcgcgaaggccactttgcttcccagcggtacattattggcctccagctgggacccgatcctcgtggaacgcttatacgtgatggaaggtaaagagctgctgcgcaacggcattgatctgctgctggggccggggatgaacatccagcgccatccgctgaacgggcgtaattttgagtacttttccgaagatccgctgctcaccgggatgatggcggcggcggtggttcgcggcattcgcagcggtggcgggattgccaccctcaagcactttgcctgcaacaatcaggagttcgccagagccaaagcggattcggtggtgtcggagcgcgcgctgcgtgaaatctatctcaaaggttttgagtatgcggtgaaatccggcggcgcaaatgcggtaatgaccgcttataacccggtcaacggccatcatgccgcatccaactacgatctcaccaccaccgtactgcgcgaggagtggggctttcgcgggatcgtgatgaccgactggtgggcaacgatgaacgatcccgtcgatggcggcgcggcgagcacccacaacaccgcggcgatgatccgcgcgcagaacgacctttacatggtggtcaataataacggcgcggaagttaatgcggggggagataacaccctggcggcgctggcgacaggcgagctaacgctcggtgagcttcagcgctgcgcgataaacatcctcgactttatgatgcagacgcaggtctttaagagcggggagatgccgcgggcggggattattcgcctggcggcggatcctgcgtgcgatggggcctgtcctggcgcaattaaaattgccgagcagtcgcggctgcgctacgacgaggaactggtgctgagcgttgagcgaacagcggtttatgacgtgctggtgagcgttcacgctaatggtgcgccgctcgcacaaaccgcctgcaacctgctgcttaatgaacaatttgtggcgacgatccagaccaacggtacgctcggtcgtgagattgtgcagaagctgtgtcggattgagctacagtcggggaaatatcgcgtaggctttgattttatcaagccgggtctggtggtggactggctggagctcaggctcgttaatgactaa

SEQ ID NO: 186499 - DNA, 369 bp, Klebsiella oxytoca
atgcagcaggttcatttcgtcggcggtgagccgatagccaccctccacgtcggcgttgtcccgatcctctcccgcggtacgcccgaaaacaatcactgcctggctggagaaagcgcgcgcctgacgaatctgctcatcgctcagcggcatctcctgctggtaccagggttctgctgcccagccccctccgccattatcaaaggggtgttgttcaacccagcgctcgtagagtccggccagctgcgtattcagccccacgccgtttcgcgcacgcatcgcctgcagcaaggttgtgctgctcactacgttaaccgccccgccggaaccggtaccgctgcgatagtagttaatctgcgtacggccaaataa

SEQ ID NO: 186500 - DNA, 660 bp, Klebsiella oxytoca
atgctgcgcgtaatcgatacagaaacctgcggattgcagggaggcattgttgaaatcgcctcggtagatattatcgacggacacatcaccaatcccatgagccacctggttcgccccgaccggcctatcagcccgcaggcgatggcgattcaccatatcaccgaggagatggtcgccgataagccgtggatcgaggagattgtgccgctgtatatgggcagtccgtggtatgtcgcccataatgccagctttgaccgccgggtgttgccggaaatgcagggcgagtggatctgcacgatgaagctggcgcgccgcctgtggccaggcatcaagtacagcaatatggggctgtataaatcgcgcaagctcagcgttgcgacgccaccgggactgcatcatcaccgggcgctgtacgattgctatatcaccgcggccctgctgctcgatatcatcaacacctccggctggacgcctgaggagatggcgaccattaccggccgcccggcgctgctctccacctttacctttggcaaataccgcggcaagccggtctcggaagtggcggaaaacgatcctggctatttacgctggctgtttaataacctggatcgcatgagccccgagctgcgcctgacgctgaagcactatctcggggagtaa

SEQ ID NO: 186501 - DNA, 387 bp, Klebsiella oxytoca
ttgaagcagcctgaaaattttagtactcaatacaagccgcagaagaataagcagatgccaccaaaagcgaaacggatcccccatgccatgacattacatggcgacacgcgaatcgataattactactggctgcgcgatgacgatcgctcgcaggcggaagtgctggattatctgcgccaggaaaatgagtacggcaaaaaagtgatgtcttcgcaaagtagcctgcaggacagggtactcaaggagattatcgaccgtattccgcagcgcgaagtatcagccccctacagcaaaaatggctatcgctaccgtcaggtctacgagccgggctgcgagtacgcgatttatcaacgccagccggtagtcaaagaggagtgggatgaatga

SEQ ID NO: 186502 - DNA, 174 bp, Klebsiella oxytoca
atggatatgataatgccgaatggccgcgagccggaaagctatgggaggggggagttatggtgcggtcatacctggcagagctgcgttattaacgtgtctactgttacggtaacgatatttatgcgcggacgttgcttggcttacggagaaaaacagtttaaatctcccgaatag

SEQ ID NO: 186503 - DNA, 1593 bp, Klebsiella oxytoca
atgcaaaatatagtgcctttcaaaaggacaatgctcgccagcctgttaaccttagcagccagcgcagcgtccagtgcatatgcagcaccagctaccaccaccgcaccagagaatgcgccaaaacaaaacacctctaaaccgaatattgtcgttatttttggtgatgatattggttactggaacctgagcacttataaccagggcaccatggggtataaaacgccgaatattgatagtattgccgcagaaggagctaagtttacctcctattatgctgagcaaagctcaactgctggtcgttctgcatttattaccggccagatgccgtttcgtaccgggatgagtaaagtcggtatgcctggcgcgccgcagggtctgcaaaaagaagacattacgattgccaccgcgcttaaacagctcggttatgccaccggccagtttggtaaaaaccaccttggcgatcgcgatgagttcctgcctaccgcacacggttttgatgagtttctcggcaacctgtaccacctgaacgctgaagaagaaccggagaacccggactatccgaaagacccggctttccgtaaagaatttggcccacgcggcgtgattaagagcaccgctgacggcaagattgaagataccggtccgctgaccgtgaaacgtatgggtacggttgacgaagagacgcttgccgccaacaacgactttatggaacgtcaggtaaaagccggtaagccattctttacctggtttaacaccacccgtatgcacaataaaacccacctgaaagatggcagcatcggaaaaaccggtctggggacgtatgccgacggtatggttgaacacgatgccatgattggtgaagtgctgaagaagattaaagacctcggcatcgaagacaacaccattctcgtttacaccaccgataacggcccaatgaccgccacctggcctgatgcgggtgaaacgccgttccgcggtgagaaaaacaccggctgggaaggcggcttccgcgtaccggcgatgattcgctggccggggcatattaagccggggacaatcgttgacggcatgttcgctagctacgactggttcccaacgctggtcgcggccgccggggacgctaacatcaaagatgaactgctgaaaggctataagacgacctcgatgacctacaaggtacatctggatggttataaccagctcgacttcctgcagggtaaaggcgacaaccagcgtaaagaattcttctactggagtgatgacggcgacctgctggccatgcgctatggccgctggaaagcgcactttatgatccaggagcacaccggtctggatctgtggaaatatccgttcaccaaactgcgtacgccaatgatcttcgatctggagatcgatccgctggagaaaggcagcgacggtatgggctacaactcatggttctacgatcgtctgttcctgatgggcggcgcgcagaagtatgccaaagagatgctggccaccttcaaagagttcccgccgcgtcaaaaaccgggttcgttcaccatttccgatgcttcagccatgcttgagcagggttccggtattaataaataa

SEQ ID NO: 186504 - DNA, 1296 bp, Klebsiella oxytoca
atgaagtacagcacaacactacccgttaccgcgttaccctctgccgagaaatataacggcaaaggccctgaatataagcgccgcttccacgtgatggccaagcctaccggctcgacctgtaaccttgactgttcctactgtttctatctgcacaaagaagatctgctgcaccaggacaggcataccggcatgagcgatgagacgctcgaacagtttgttcgccagtatattgaagggcaagacggtgagcaggtggtcttctcctggcagggcggcgaaccgaccctgatggggctcgaatttttcgaaaaagtggttaagtttcaaaagcagtaccaaaaatccggccagcgcatcgagaacgacttacaaacaaatggtgtcttgctgaacgataaatgggctgaattcctcaaaaaacatcattttctggtgggtctgtcgattgatggcccgcgggaacttcatgaccgctaccgcgtcacgcgtagcggcaaaccgacctttgataaggtgatggccggggttgaggcgcttaagcgtcacggcgtaccgtttaacgccctggtgaccgtcaaccgcaccaatgcccgctacccgcttgaagtctatcgctttatgacccaggaactgggcgcgacctacgtacagtttaacccgtgcgtggaaccggttgattttaaacagaccgccccgcagttctggcgcgatgacaccattccgctgaccggtagccgccgcgctcaccccggcgatctcgactctgtcgtgaccgattggtcggttgacccggatgactggggccgcttcctgattgcggtgttcgaggagtgggttaacaacgatttaggccgcgttcaggtcaatctgtttgaaacggcggtggcgcaaacgctgggcatgcccgcgcaaatctgcacccactccgaattctgcggcaaagggctggcgattgaaaaaaacggtgatatctactcctgcgaccactatgtttacccggaataccagataggcaatatcgctaatacgccactgtcacatctggcgttctccgagcggcagaaagcctttggcatgggcaagcgcgatacgctgccgaaatattgccaggcctgcccgtatttaaaaatgtgctggggcgagtgtccgaaaaaccgcatcgtgcgcgcgccggacggcgaagcgggtctcaactatctgtgcccgggcatcaaagccttcttcaactacgccgagccgatgctggtgggattagccaccttaatcaaacgtgactattcaggattaaaacgatga

SEQ ID NO: 186505 - DNA, 999 bp, Klebsiella oxytoca
atgatgcagcgcgagaagctattagaacttgagcagaaaatgaaccagcaggtgctgggccaggaagagctggtgcgcatgttgataatcgccctgctctgcgacggtcacgttctgctggaagggctaccggggctggcgaagacccgcgccgtgcgcgaactcgcccgccacgtggagggcgattaccgccgcattcagttcactcccgacctgctgccttctgatatcaccggcagcgaaatatatcagcaaaatgccactcgcgaagaagaccaatttaaattccgtcccggcccggtgtttggcaacctgattctggccgatgaaatcaaccgcgcctccgcccgcgttcagtctgccctgctggaagcgatggaagaacgccatgtgaccgtggcgggcaaaacctggccgctgccgggggtgtttatggttctcgccacgcagaacccggtagatcaggaaggcacctggcccctgccggaagcccagcttgaccgcttcctgatgaaagtgcaggtcggctatccctctaaagagaacgaacagaaggtgatgcagctggttcgcggcgagcagcagcaaaaataccagctgttgagccaaaatcagccgagcgcccccgccgacaccctgatgctgacgcaacaggagatcgccgggtgctggcaggcgattgcccatattcacgtcgcgccgaccgttgaaaactatatcgtcaatctggtggatctcagccgccaccctgaaaacgtcagcgatacgctggcaagctatctgacctttgggataagcccacgcggtacgctggcgctggagcgctgcggtcgcgcccaggcgtggctggaaggccgggacgcggttttgccggaagacatcaaaaagatagcccctgcggtgctgcgtcaccgtctgatgctgagctaccaggccaacgccgacaactgcaccccggacgatgcggtacaaatgctgctcgacgcggtggtggcgtaa

SEQ ID NO: 186506 - DNA, 906 bp, Klebsiella oxytoca
atgagcgatgccgtccgcgtctcgcgtgatagcctgctaaaactggcggcgcaggcgcgttctattatcaatccgccagggcaaattccgccgagcgcactggccggggagcgcatttcgcggcagcaaggtcgcgggcttaattttgacagtctgcgccgctaccagcccggtgatgacgttcgcctgatggactggcaggccaccgcgcgtatgcgtacgccgtggatccgcctgtacaatgaagaaaaagagcgtccggtctttttgcttgtcgatcagcgtcgggatatgtttttttctacccgcgtgcagaccaaatcggtggcggcggcaaaaattgccgcgctgctggcatggcgcagctggcacgacggtgaccgcctgggcggcgcggtatttggtgacaaagactacgcgctgcgcgcctgtcgcccgccgaacgcgaccctgccccactttctggacgacatcgtcgagtataaccacgccgtcgccgacgcctatcctcatgaagcgccaaatccgctgtcgctggccgatatgctgcgctacagcctgccgctgatctctaccgggagctgggttgcggtgattagcgattttcacgatctggataaccagtgcgatgccctgctggccgcactgcgccgccggggggagatcagcgcctttgtgacgctcgacgatctccatctgcggctgccgacccacggccagcttgccgcgcggtacgaaggcctggaggcaaccttctccctttccccctcccgccgcgacgagatcgtgcacagcgtcaccgcccggctggcgcagcaggagacgcgtcttgccaggattggcgtgcgggtcaatcaaatcgtggtcacccgcgatctcctgcaacagctacagcgaggtgtctga

SEQ ID NO: 186507 - DNA, 441 bp, Klebsiella oxytoca
atgctggagaaaggttttaccgtcccccatctggcggagccggcgctgcccggttcgccctcctggtttccgctgccgccgggctggattgtgctcggcatcctggttctgcttgccgggctgaccgtcgccctgtttcgctatgcccgctggcggcggaatgtctggcgtcgccaggcgttaagcgccctgtctcagtcgcataccgccgatagctggctgctgctgattaaacgcattttgctggttcatcacccgcgcgaagcgataagcgccgcgtctaacccgacgcaatggctgcaacagataccgctggacgacgcgctgcgcgaacagcttagcctgcgctattgccagcgtgaaaaccagttgaatgacgacgataacgcgcgtctgcgtgcgcagttacatgcatggatagagcgattaccctatgtctga

SEQ ID NO: 186508 - DNA, 978 bp, Klebsiella oxytoca
atgtctgaatatctctcacgcgtggattttgtctggccctgggtctggctgctgctgctgctgccgttggtgggccgcttttttatggctaaagcgcggccgctaaaggagtacgtgcgcgtgccgtttttacctgcgcttatccacgagatccagcccaacagccagcctgtgcgcagcggtaagcttgccgccgtggcgttctggctggtgtgggggctgctggtttgcgccatggcgcgtccggaatggcttaccccgccgcagcatattgaaaaaccgatgcgtaacatcatgctgattttagacgtctctggctcgatggcgaaaaacgatgtcgccgggggcagtacccgtctggaagcggtacaggcctcggtgaaaaaatttgtcgccgcccgccagtccgaccggattgggctggtgatttttgctaacggcgcatggcccttcgcgccaattagcgaagataaacaggcgctggaaacccgtatcaaccagctttctccgggcatggtggggcagcagaccgcgattggcgacgcgctgggagtcacggtcaaactgttcgattccgcgcaaaacgcagacgccagtaagctggcgattattctcaccgacggcaatgataccgcttcacagctgacgccgcgtcttgccgccaaactggccgccgcgcatcacgtacaggtgcacaccatcgcttttggcgacgtgaacagcaccggggacgataaagttgacctgccgctgctcgccgaaatcgcgcagatgaccggtggacgcgcgtggaccgccgaaagcagcggcgcgtcgctggacgccgtgtggcaggaaattgacgctatcacgccggtgcaggttaaaagtatcggctggtcctggcgcgagccgctgtttggctggccgcttgccgccgcgctgttgctgctgctggcgttcgccctttatcgcgtactcagggaggaaagcgcatga

SEQ ID NO: 186509 - DNA, 1518 bp, Klebsiella oxytoca
atgagcgacttccactttttacacccctggtttttagtgctgttaccgctgtgcctcgcgctgtggtggctgccgtccgccggacgcagcgcctgggtacatatgatggataagccgcttgcccgtgcgcttatcgtcaatcaaccgcgaaaaataacccgcgtgctgccgtggatgatgatgaccgggattatcggcctcgccggtcctgcctggcagcgtcagcttcccgcggcgttaaccccgcaaagtaatgtgatggtggtgttgcagcaggataacgccatgctggcaagcgatctggcgccagaccgtcaccagcggatgcaaagtaaaatcctgtcgctgatggcgcagatgcccggcacccgctttggcctggtggtgtatcaatccggcgcgtggctcaccacgccgctgaccgtcgatcaggatttttacgccctattcctgcatgcccagtcccccgccctgcttccggcaggtgaagggtcagggctacaggctgccctggcgctggcgatgaaaaatatgccctcgccgccgcgcagcatcattctggtggcggataacatcgatgagcgcgatgcgcgctggctgataaagcagtcgctaccgctgcaaatctgggttcccggcaccgcccgcggcggaacgctaccggagaagtatgccagtcgcggcaccgatacccggcttaacgtcgcgcgctttgagcagatccgcgatggcggtattccggtcaccctggtgacgtcggacgacagcgatttttcggcgatccgcagccatatacagcagtccgtcagcgcgcaaaacaacgcgcgcatcgatctgcactggcgcaacagcggctggctggcggtcattccaattctgatcatcgtactgctgtggcgacgtcagcttttttgctggctgcttatcgcgccgctgttgatgtggcagcccgccgggcacgccgcgtcatggctggatgcgtgggtcagccccgatattcaagggcagcaggcgttcgcgcgcggggattacactaccgccgcgcagcattttaccgacccgctgcggcaggggatcgcctggtatcgggcggagaactaccccgccgccaccgccgctttccatcaggcggaacaaacgccggaagtgctgctgtggaccggtaacagctacgcgcagcaaaagcagtggcagcaggcgctcaacagctacgaccgggcgctcagcctgcggccggactggcagctggcacaggacaaccgggcgaagattgccgccatcatcatgcagctgcggcaaaaagagcgcgaccgcctgtcggcgcagggcgaggagcaggacgataaaccggatgagatcaaacacgatctcaaacccgaggaaggcgttgagcaaaaagatattcagccgcaggccggtggcaacccgcaggtgaaccagtggtatgaaaatctcagcgtttccccttccggcctgctggaaaacctctatcgcacccagtcaggagatcaacaatga

SEQ ID NO: 186510 - DNA, 1014 bp, Klebsiella oxytoca
atgaagctgctgtggttattactgattgccacgttgccctgtcaggcggccatgacggtttcgcgcgagcttatcgcgccagagcacgtagctcccggtcagccggtgcgcatagctgtgaccttctggaccgatagctggttcaacccgccgccgcagtggcctgatttccctgttgaaaatggcgcattgttgaccaccaccgaacccaatcagctgctcacccgtcatgagggcggcaccagctggagcggcattcgtatggaacgtcaggtatcggcctgggatcaggggcatctgcatattccagcctttgaactgacgcttaccggagccggacaagcgccggtgacggtgaaactgccggcgttagataaggcggtaagctggcctgacgatgtacaacagccggaccatttcctgcccgccgccagcctggcgttgagccagaaaatcaatctcttccacagcagcgatgatggacaattgcgcgccggagacgtcattgagcgtgtggtaacggtggtcgccgacgacgccgttgcaacgcagatcccgccgctgctgtacgccattcccggcacgcacacccaacgcttatcgccgcaaaataccctggtgacggcaggtcgcggcgatatccacggcgcccagcgcgtcgaaacgctgcgctatctgccggtggaagccggtaccgtgaccctcccgccgataaaattacgctggtgggataccacccatcagcagtggcaaaccgccgaactgccgggcagtaagtacaagattgccccggcgccgaacgcgggcgcggaagcggcgctcaaaggccaggcaccaacctcgtggggtctgctgtcactgtggatcgcagtgctggccgcgacggtcgcgctgctgtttttgtttcgccgttcgctgtcgcaaagcgcccggtatgtttatcaccaatggcaccgtttctggcaccccacgtcgctgccgggtctggtccctgaaaaaaggagttcccgatga

SEQ ID NO: 186511 - DNA, 1002 bp, Klebsiella oxytoca
atgaagcgtacgttgatcggtatgttattagtgagcctgtgcggcggcgctgcggcatcaccgctttccgcatggaacgatacgccggctaaacaggctatagaaacctgggtgcacgatgccaccgatgccaacaaccacgcttttattccgccggaaaagcgctatgtggtgtttgataacgacggcaccctgtggccggaagcgccgataaccttccagatccagttcgtactggatgaagtcaagcgtcttgcccctgaacatcctgaatggcaaaacgatccgctggtcagcgcggtgctgaaaaacgatctgaaaacggtggcggccgcgggcgaaaaaggcttgctcaagctgctggcttttacccacagcgatatcaccaccgacgagtttaacaagcgcgtcgccagctggatcgatacgcacaaagacgcgcggtttggctgccagtataaccaaatgggctatcagcctatgcgtcagctgctggactacctgcgtgaaaatggctttaagacgtggattatctccggcggcggcatcgattttatgcgtgtgctctctgagaagatgtacggcattccgccggaacaggtcgtcggctcgttcgcgctgggtgagttctcgttgaccaaagatggctcacaaatacgcaaaaccatgcagggtgcttttaatgacgatgcggcgaataaaccggtggcgattcatctgtttatgggccagcgcccggtggcggcttttggcaacagcgatggcgatctggcaatgatgcagtacaccgccagcaaccctgattacaaaaccttcgggctactggtgcaccataccgacgcggcgcgtgaatacgcttacgacagccatccaccggccagcggtaaactggttgaaggcttaaaagtggccaaagagaaaggctgggtggtggtcgatatacaaaaagactggaaaacggtatttgacccggcgcagtgcccggcgaaaacggcgcagtag

SEQ ID NO: 186512 - DNA, 1632 bp, Klebsiella oxytoca
atgaacagggcaatttcccgggtagtgctgtggttttttgttttgatggcttatcctttacaggctgcggagccacgtcaggcaccttcagcacaagagcgggcccgaacggtttatgttttccaccagccgatagtgatgcttcaggcgaaatttggcttgaccacgcccgaggagcgggtattacggattcgtaataccctacgttcttttagtcgtgaagatgtggcaaaacccctgataattgcgccagtgactcgctataaccagcagggacggctgatcgttatgaacggtaaaccggttatgctgctggtggaggcggatctcgacgaaggcgatgatctcactcttgaccaggcggctcagcgcgttttaatccgcctggaagcccagcgtacggcgttacgtgaccaatacgatcgccgcagcctggcgctttccgcgctgaaaaccgcgattggcgtggtggcgttattggcgttttggttcttacagtaccgctcctggcgctgggtgcgtcgtgtttatcggcgcaaaataatcgataataaagggcttattcctcaaacctggcgacgctttttaggtgaggttgaaagccgcctgtacgcgctactaatgctactgctgggtatcaccgcgacatatgttttgctccgctgggccttcagcctgtttccctggacgcgcgtctggggggagtcgctgggcgactggtcaattcgcatcgtcagccagattgcttactccatcatctcggcgctgccggggctactggtggtgctcattatctttgtgatgaccttcgtcatcctgaaaatcctcaaagttgtcctgaaccaggtcgccgcggggcgcttatatattcccggtctgcaccctgaaacggtgggggccacgcgcaagctcattgcggttatcgtctggctttttgcactgtcagccgcgtatccctttctgccgggggctaactcactggcatttaaaggtatcagcgttttttttggcctgatgctcacgctggggtccgcgggcgtgatgaatcacgccatgagcggcctggtgctgatctactcccgggcgctgcgtaaaggtgatgtgatacgcattgcggaaaacgaagggcgggtgacggaggtgggcatgctggcgacaaagattgtcacccgggaaaactacgtcattacgctacccaatgcggtggtggttagcggtaaaatcaccaaccttagcgtggagcatcccgatggcagcgtcaacctcacgttcaacgtgacaattggctatgacgcgccctggcggcaggtgcacagcatgctggaactggcggcgcggcgggcgaagtgtgtcgatcagtccgtctcgccacgggtgcgccagctagcattgatggactggtacacctcctacgagctgcaggttagactgctgccgctggcgccgaacagtcagggggacggtatgctggccggggctcgcaccgaaatacacggcctgattcaggacgtgtttaatgaatttaacgtgcaaattatgtcgccaaactttgtcttacagcctgatgagccggtaatggtgcccaaagaaaaatggtttaccgcccctgcgcagccgccgagtgaagggtaa

SEQ ID NO: 186513 - DNA, 168 bp, Klebsiella oxytoca
atgagaggttccggcctctcaccggaggccagctttcggctggtcaaattcgttgccgacgaatttgtcactcccttgtctcctgtaagcaacgcgaattattttgggtataaatataaccagttatggcccggatggcgaatcttgttcgttgttgaaatccaataa

SEQ ID NO: 186514 - DNA, 1098 bp, Klebsiella oxytoca
atgattaacacgacgactgaaaaccataaaaacctggatattgttaattcatggaacctggtctggtttctgagccttaacatcgttttttgcttgtggttgattttgaacaattttatccatactccgaatgacttttatcgggagatgatgaatatgctatgcgtagcgaccacgcttttttcagcgctgggatttacgttaagggcgttgatctccagaaaatatctcgccaggctgctaccgacatacgcgttactacaaggtatcctctggggagccatgttctatctgatggtcaaacattacaataacccctcattaacgctttcattgctcatcagcacgctgttacccgccaccatctcattttatatctccggaactgtattgttattgtttagcgtaccgataagcatcgccatgctgttaagcgaaatcaccgcttatgaaaaatttaactttctgcaactgtctggctctgtcattatttttattatcgtcatcactgctcgctacatattgcttgaatggtacacccgaacgcaacaaagtgaatatgccaagaatctcctcattaaaaaactcacccaccttgcccatcgtgacgccttaaccggattattaaataaaagcagcctgttaacccattttgaggaacaggcacaactattgccgcattcaggcggtaatttatttatgatcataatggatattgactatttcaaacaatataacgatttatatgggcatattgccggtgatgaatgtttattaagcgttgcaaaatgcatcagccagtctttacgtaaaacatccgacacagcgtttcgctttggcggagaagagtttgtcgtattgactcattgcaatgagatggctgaagccgtgatgattgcagaacgcattcgaaccaatattcaaaaagcgaagatcccgcatcgtggctctcaactttcgccctggctcagcgccagctttggcgttgctcaatgggtgaagggttattcatttgccgtactggcagaaaaagccgataaggagctctacaaagcaaaacaggccggacgtaaccaggtttcttcagcaaaaaggtga

SEQ ID NO: 186515 - DNA, 390 bp, Klebsiella oxytoca
atgcgaaagctccatcaaattatactctcgggcgtagttgccccctgcaaaacatcgcctccgggcattttacgcaaacttcatgtaatacagatccccatcatctacaataagcacccggggtcaccggtagactctacgagctataccttactacattataaaaataagtccctgctcaaaaaaatatatcgccagctaaaaaaagaacacctgcaaaaaagtcatatcgacgaactggtcgatacccaaagccagacctatcaggcatactgttctttagtcaggctttacaagataaacgtaataaacaatcgttatctgaaagagagaaatatttcaggactgcatacgctgagcgaaatgctgaatacgatcattgaagactaa

SEQ ID NO: 186516 - DNA, 1188 bp, Klebsiella oxytoca
atgaaaaaaaatataattattatctgtgggttatttttttccacagtaagtcatgccagcgcgctctatttttatgaagtgggtacggaagatgctgcgttggctggagcgggtcaggccgcacgtgcgcaggatgcatcaacgctgttaactaacccggcagggatgacgcgattacccgatcatatgctgacggggggagtacaggctatgggaggcgatatatcctatcaactggataatgaatcgagcgggcgtcaaagtccgggcaacgtcatgaatctgtttcctaatgccagtatgttctatacgcaacgtctgaatgattccgtgtcagcaggactgggcctttacggtaactatgggcttggtattgattttggtgaatgggcaggcgatcgacttatcaaaaaaagtacgatggtagcgatgacgctcagcccgggaattgcctggaagctcagtgataacgtttccgtcggcgccgctgtggggcttaattacggctacctttctttaacccggaatgttgatcgccatgatgaacgacaaaatgaccatgactgggcgatgaactaccggctgggcatattgatggatcttaccgaccagactcgagcgggaataacctggacaagtaaaactgactatcactttagtatcgacggcaaggcgcgttttccgaacttgccaaacgttgagtacgatcttcccgttgccgctcaagtccgcgcgcctcagcaggtcatgttgagtgtggttcatgatgtaaataaatattggtccgtgatgggcgatcttggttggcaggactggagtcagtttggtagcccggagattacgattaatggccaagcgggcaatagaaacaaccggttaaaagatacctggcatacggcattaggcgttcagttccggcctgaagatcgatggcgccttaacgcgggtatcgcttttgacagcacgccatataaaacacaaagcgatgttgctctaactctacctaccggtgatgagtggcgttttgcgaccggggcgcaatatcaaatgacctcggcgagtaatatcggatttgcggttgaatatctgcacatgcaatcatctcaggtgaactcagcagccttcgctggagaatataataaaccctggctatggttcgccagcgtaaactacagctatcagttctga

SEQ ID NO: 186517 - DNA, 1269 bp, Klebsiella oxytoca
atgtctctcaacgacacgaaaatccgcagtctcaagccttctgaaaaatccttcaaagtctccgattcacacggtctatacctcttggtcaatccaggcggctcacgtctctggtatcttaagtatcgaattaacggtaaagaatcccgccttggcttaggcgcttatcccgatgtatccctttccgacgcccggcaacaacgagacggtatccgcaagttgctggcgcagaacattaaccccgctcagcaacgtatagccgaaagagccgcccgctcaccggaaaaggtctttaagacagtggcgctggcgtggcataaaagcaataaaaaatggtcgcagaataccgctgaccgtctgcttgccagcatgcacaatcatatttttccggttatcggacatctgtccgtcacggaacttaaaccccgtcatttcattgacctgctgaaaagcattgagaaaaaaggtctgctggaagtcgcgtcccgcacgcggcagcacctctgtaacatcatgcgtcatgcggttcatcagggattcattgacagcaacccggcggcaaaccttgacggcgtgacagcgccccccgttaagcgccactaccccgccctgccgctggaacgcctgccggaattgctggggcgcattgatggttatcagcagggacgagggttaacccgtcaagcggtccttctgacccttcacctgtttatccgttccagtgaactgcgtttcgcccgatggagcgagtttgatttcaggaactgtatctggaccatccccgctacccgcgaagctcttcccggtgttcgttattccggacgcggagccaaaatgcgcacgccccacattgttccattatcccggcaagccatcgttatcctgaaacaagtagaggaaatctcaggtcatctggaactagtgttccccggtgaccataacccttacaggccaatgtgtgaaaatacagtcaacaaggcactgcgactgatgggctatgacacaaaaatggacatttgcggccatggctttcgggcaatggcatgcagcgccttaatggaatccggactctggtcgaaggatgctgttgaacgccaaatgagtcatcaggaacgcaacagcgtgcggatagcttatatccacaaagctgaacatctggaagcccgtaaagcgatgatgcagtggtggtctgattatctttatacgtgccgggaaaactatgttcccccatatatatatagtaaaaatatcagtcatgaagctacctga

SEQ ID NO: 186518 - DNA, 393 bp, Klebsiella oxytoca; identical to SEQ ID NO: 83372

SEQ ID NO: 186519 - DNA, 324 bp, Klebsiella oxytoca
atgagacattctgcagacgcacagggcgtagcttacggcaatacgatgtcttatataaccggctttctcctgtcggtcattctgacggtgatcccgttctggctggttatggacagtggtgtttccgcagggatcatcgcaggcggggtcatgacgtgtgccgttgttcaggtgctggtacatctggtgtattttcttcacctgaatgcttcttctgaaatgcgctggaacctcgtaaccattgtcttttccgctgccattatctttatcattattaccgggtcgttgtggatcatgtggaatctcaatcatcagatgatgtga

SEQ ID NO: 186520 - DNA, 618 bp, Klebsiella oxytoca; identical to SEQ ID NO: 83370

SEQ ID NO: 186521 - DNA, 936 bp, Klebsiella oxytoca
atgattatcgctatcccgactggtgtgaaaatcttcaactggttgttcaccatgtatcaggggcgcattcagatgcactccgctatgttatggacggtaggttttattgtcaccttttctatagggggtatgaccggcgtcctgctggccgtgccgggagctgactttgtcctgcacaacagcctgttcctgattgcccacttccataatgtcattatcggcggagtggtgttcggcagtatggctggtgtgtcctactggttcccgaaagcgacggggttcaccctgaatgaaaaatggaacaagagggcgttctggttctggatcatcggattttatgtggcgtttatgccgctctatgtgctggggttcatggggatgacccgccgcttgagtcagaatattgacccccagttccatcccctgctggtcgtggcagccagcggtgctgcgctgatagcctgcgggatactgtgccaggtcattatgttctgggtgtcggtgcgcgaccgccacgaaaaccgggatatgaccggcgacccgtggggcggacggacactggagtggtccacctcttccccgccgccattctataactttgctgaagtgccttttgtccacgaacgtgatgcgttctgggaaatgaaggaaagaggggaggcatacaagcaacctgctaactatgccgaaatccatatgccgaaaaacagcggggcggggctgattattggtctgctctgcatcgggtttggcttcggggctatctggcatatctggtggctggcgggattgtcattcctcgggattatcctgacctgggttattaaaagcttcgatgaagatgtggattattacgtacccgtcgccgagataaaaaaaatcgaggatcagcactttgcagaaataaacaaagccggtgtgacatatggtaagtga

SEQ ID NO: 186522 - DNA, 1023 bp, Klebsiella oxytoca
atgctcacaggaaaactgacgctggatgccatacctgaggacccgattgtcagggtaacgatcgttgctattctgatacttggtgtggcaattgttgccgccatcacatattacggtaagtggaaatatttatggtccgaatggctgacctccgttgaccataaaaagctcgggatcatgtacatcatcgtcgcgttcgtgatgttactgcgcggcttttccgatgcaatcatgatgcgcagccagcaggtactggcctcatccggagtggaaggggcggggtatctgccgccctggcactacgatcaaatttttacgggtcacggtgtaatcatgatttttttcgtggcgatgcctttcgttatcggcctgatgaatattgtggtgcccctgcagattggcgcgcgtgatgtggcttttcctttcctgaacaacctgagtttctggttaacggtggtaggcgtggtgctggttaatctctgcctgggagtgggggagtttgcgaccaccggctggctggcatatccgccgctttcggagttagcgtacagtcccggtgtcggggtggattactggatatggacactccagctgtcggggatcgggaccacactgaccgggattaacttcttcgtcaccatactgaaaatgcgtgcaccgggtatgacgatgtttaagatgccggtgttcacctgggcgtcgttgtgtaccaacgtgctgattatcgcttctttccctgtgctgaccgtcacgctgacattgctgacccttgaccgctatctgggcttccatttcttcaccaatgatatgggcggcaacatgatgatgtacgtcaacctgatttgggcgtggggccatccggaagtgtatatcctggtgttgccggtcttcggggtctactcggaagtggtggcaaccttttccaggaaacgtctgttcggttatacctcgctggtgtgggcaactgtcgccatcactttgctttccttcctggtatggctgcatcacttcttcaccatgtga

SEQ ID NO: 186523 - DNA, 927 bp, Klebsiella oxytoca
atgcgatatcataaatataagaccattgtgaagtgcctgccggtaataacagggacgttattactaagcggatgtcatgctgttttacttgatcccaaagggcaaatcgctattgaacaacgggcgctaatcattacggctttttgtctgatgttagtggtcgttattcccgtggttctgatggcagttgtgtttacctggaaataccggaccacgaataccacggcgaaatatacgcctgactggtcccactccaataaagtggaggcggtggtctggacggtgcccgtcctgattattctgtttctggccgtgctgacatggaagtccacccatgcgcttgacccatccaggccactgacctctgcggtgaaacccatcgatatcgaagtcatctccctggactggaaatggttgtttatttatccccaacagggcattgccaccgtcaatcagattgtattcccggtaaatacccccttgaatttgcgtattacatccaattccgtgatgaatggcttttttattccggcactcggcagccagatttatgcgatgccgggcatgcagacccggctgcatctgatcgccggtgaaacgggaaccttcaacggaatctcgtccagttacagcggcaggggcttttccggcatgaaatttaaagcgactgccgtaccggataataccgcgtttgaacagtggatcgctgatgtgaagaaatcaccggatatgctgctcggtccggctgattttgaaaaactggctgagcctgacgaaaaccacccggttgaattcttctctgtcatcgatccgacgttgttcagatacgtgactgaaaaatttaaagcacacgatcacgataaggagacgggaatgactgggtcagagccggaacaacacctctcacacagagcgcggggaaattaa

SEQ ID NO: 186524 - DNA, 1533 bp, Klebsiella oxytoca
atgtctggttcagcatttccacctctgtccggattcaaactggttgttgcggcaatcgtgctctcgctcgggaattttatggtggtactcgataccaccattactaacgtcgcgatgcccacaatatccggttacctgggcgtgtcgacaacagaaggaatctggatcatcaccgcctatgcggtggctgaagccatcacggtgccgctgaccggctggctggcgatgcagttcggtcaggtgcgcgtattccttttttctgttgttgcatttgtgattttttctgtctgctgcggtctttcctggtcactaccgagcctggccattttccgtgtgctgcaggggcttgccggtggcccgctgatcccgctttcttccacgttgctgcttgcagccttcccgaagaaacaggccaacattgccgtggcgctctggggaatgatgacggtagtagcgcctatattcggtccgatactgggtgggcttatctcggataactggagctggcagtgggtattttacatcaatatcggctttggtctgattgtggggtttgggacctggtgggtgctgaaggggaaagaaacacatatcagccgttcccggctggacagcgtggggctgggtctgctcgtcatctttgtggcagcctttcagatcatgctggataaaggacgtgaactggactggttttcctcggatattatcattgtctgcgccattgtggccgctattgccctgatctcgctgattatctgggagctcaccgctgagcaaccggtgctggatctgagcgtatttaagtcacgtaactgggtggtatctaccgtcacgctctgtctgatgttcggtattttcttcgggaatatcgtgctgacccccctctggttacagcaatggatgggatacacggcaacctgggccgggtatgcgacgggccccatggggatcctggccgtcctgagctcgcccataattggtcgtctgctgccgaaggtcgatccccgtctgctggtgagctatggcatgggggtactggcggtctcctttgtgatgcgtgccctgctgacgtcgcaggctgactttatgtcagttgccgttcccatgttcgttctgggggccggagttcccgcctgccttatcacgctcacctcgctgggcgtgtccgaactgccgccggagaaagtggcagccggttccgggctgcagaacttcctgcgtgtcatgtgcatggcggtaggctcttccctgacccagacctactgggaacatatgacaaaatttaaccgagcggagctggtgacggcaatcaatcctgacgtgccagggattgtcagcaacacgctgggcgcggccggtattccgacagacacgtcagcggctctgttttcgagaatgatcgacagtcaggccatcatgctggcaacgaacgatttctatcagtcggccaccgttctgatgctggggtccataggcattatctggctaatcaaaaaaccgaaaggaccgcttcagaagatgtcgggccattaa

SEQ ID NO: 186525 - DNA, 1200 bp, Klebsiella oxytoca
atgactgaagataaagataaaaacggcccacaggatatggacagggctccggataacacgaatgcaaaaccggatagcggtgataaaaaaaagcatcgccgtaaattattcgctttgtttggtggcgtcctgattcttatcgccatcggttatgccatctggctgattttctttgccggtaaatccgtctcaacggataacgcctataccgctgccgaagtcgcagacgtcacgccgcttgtcggcggaccggtgaagaaagtaaatgtggtcaacacgcagcttgtgcatgccggtgatgtactggtcgtgcttgatgagacggacgccagaattgcggtgtcacaggctgaagctgagcttggcagcgcccggcggaaggtgatgcagattatggccaatgacaccgctctgggcggacagcttgattcgcgtgaagcaggtattcagagcgccgaacatgatgtggcgagggcacgagcccggtttgataaggccacccttgatgagcgacgtcgccggaatctggtgaaagccggggccgtatctgagcaggattttacggatgcgcagacagaattacgggaggcaacggccgcgctgggagaagcggaagccagtctgaaagctgctcgcgctggcagtgtcgaagcaaaaggatcccggcaggcgaacgaggccctgtttctgaacagtaccgttgaaactaaccccattgtggtggcggccagaacccgtctcgatcaggcccgtataaacctggcgcgtatggttatccgggccccggtggatggagtggtaacacagcgctcagtggatatcgggcagcatgttcaggctggaaaccggctgatgcgggttgtgcccatcgaggatatttatgttgatgcgaatttcaaggaaggtcagctcagcgacgtcagaccgggccagaaggtagagctgacttcagacctgtacggcagcggtgttgtttatcacggcgtggttcagggatttgacggaggctccggttccgcgctttcactgataccggcgcagaatgccacgggtaactggattaaggtcgtgcagcgactgccggtgcgtgttcgtctggagcgggaagaactgcgtaaaaatcctctgcgcatcgggctgtccatggaagtgacggtggacctgacatcgaatgccagagatgaccacacggagaaataa

SEQ ID NO: 186526 - DNA, 1275 bp, Klebsiella oxytoca; identical to SEQ ID NO: 100204

SEQ ID NO: 186527 - DNA, 675 bp, Klebsiella oxytoca
atgtcggtatcaacaaagacctcaattgacactagaagaaaaaataaaatactttctaatgatatagttagtaacttacctgaaaaagcacaacgcgtgcttgaaggagcaaaagctatttttctggaaagaggctatgcagcagcatcaacagatatgatccaacaggctgccggagtctcaaaatcaaccgtatatgcatattatccaaataaagaagcattatttacagcagtgattgaaatagaatgtgagcgttttcttcaaaaagtacataaaattaaaatttcgggaaaagatatttatgataaattatttaaaatagcccgaacgtatctggatattgtgctttcggaaaatggcctcgctctctaccgtgttgtagcttctgaagcaccgcgttttcctgaattaggtagacgtttctatttagcaggtccagaaaagataaataacattgttgaagaaatactacaacaagctgaatctaaaggagaaatctcgttaggtggtattgggcgaaatgcagttgcttccttattcgtgaatatggtacgcggtgagcctcaaatacagtgcttaatgcatccaaaatcttccacttctgctgcacagcgtgatcaatgggcaaaggatgcggtcaatgcctttttattagcctttcgtaaaggataa

SEQ ID NO: 186528 - DNA, 477 bp, Klebsiella oxytoca; identical to SEQ ID NO: 83363

SEQ ID NO: 186529 - DNA, 927 bp, Klebsiella oxytoca
atgttgaaaagcagcgagatcataaacggttcgcttccgaaacctgactgggtaaccatacaagaagccgttaacataattaatacagagagcaacgaaagaatcaaagagagtgatatttaccgttatgcattatataataaaattaatctcgccatatactttcaatctccaattattctgcgaaaaataaaatatgcatttcaaaaagtaaaaatgcatccagctagagggacattgattcatcgtttatgtctgctagaaaaaaatagctttattaatggatgggactcaattttcagtactgagggcagatacgtccactccacacaaaatattattgatacatcacttattgggtttgaatgtattttaataaagcgatttctcgcatgctcattgaatataccattaccaattattgggaaaaacacggtaaattatggcatcactgttactatgtccaatgaagtttttcagctgtttgaaaaaacaacctggaagtgtagaattgaacatcaaataaaaaacctaccaacagatctggcgtttgatattatggagagaatttcttcagagggaacgataaatcaaaatacaaagcaagaatatttccccctctataatttgcctcaggattcctgctttgttattcgttactcagagattgagaaactaattagcacccaggttacagagaaatccctcccctcttcaactagaatatccacacccttgtcaaggttattttggctcgcttgtaggcacaatgatgttatcagtccattaataaaacaaccctataaattattgacaatttttgaagaatgggcggcagctgatggtatcactgaccgtctaagcggtgatactttaaaaacagcactagagcgtggctcccctccgtcctcatccttattaaattga

SEQ ID NO: 186530 - DNA, 588 bp, Klebsiella oxytoca; identical to SEQ ID NO: 83361

SEQ ID NO: 186531 - DNA, 222 bp, Klebsiella oxytoca
atgagaaaacccaattatcacgtctttatcactcagggaagtcagcccgatgcacagggcgagaaaaacacgtactggaccagggttggtgtggccttcgcacataacggtaagcctggcctgaatatcgtgctgatccccggtattgcggtttcaggcaggctggtactgcttgaaccgagagaagagagtgacatttcacaggatgccgcagccgtttaa

SEQ ID NO: 186532 - DNA, 645 bp, Klebsiella oxytoca; identical to SEQ ID NO: 121178

SEQ ID NO: 186533 - DNA, 273 bp, Klebsiella oxytoca; identical to SEQ ID NO: 121179

SEQ ID NO: 186534 - DNA, 2748 bp, Klebsiella oxytoca
atggctacgctgaataaagcactcacgcggcctgccgccattatgggtattcctctggtgccgttcgttctcgtcagcggggccatcgtcctgctggcagtctatgtcagctattacctggcgattatgctcattcctgcatgggcggaaatgaaaaataaaacccgaaaggacattcattatttcagtctgctctggctggcgtttaaaacccgtgggcggcttttcaccaatacccattttggcgcgaatgccctgctggcaaaccagtacgataacgttgatgtctcggagtttattcagaaaatgaaattaaacgagcgtattacgctggataaatatattccgtactcctcccatattcacccttacgtcatcagaaaccgtcaccgtgatttggttgccacctgggagctggacggcacagtctttgaatgtgaagacgaacatcacctgaccctgatggccacgcacctgaataacgttattcgttcgtatgagggtctgccggtaacattctatattcaccggctccgtgaaaaataccatgatgtttttgaagcctgttcgggtattcccttttccgatgaggtaacacgtcggtattaccagccggtaaaagacaaaccgttctggcggcaccggctgtttttcaccgtctgctacgcgccgttctctcagattgagaagaaaaccatgaaagcgcagtcgcacagtaaacgccaggcagcactggatgacgcgctcaaaatcatgctggaataccgcgaagcactggaatcttcattatcccgctatatggcaacgccgctggggatatatgaagaaaacgggcgggtgtattcctcacaactggcgttcttccatcgtctgcttaccggtcagtggcagaaggtggccgtaacgcgctcaccattttatgaaacgctcagtacgccagacgtctttttcaccaccgacaccggtgaatgccagacggtcagcggttcccgtttcttccgcagcctggagattaaggattattccccggaaacccataccggtatgctggatgcgctgctgtacgccgaaagcgagtatgttctgacgcagtcctttacctgcatggcacgggatgaggcgcagaatcatatccgtctggcggaaaaacggcttaactccacggacgacgacgcgacttcccagcgcgaagagctgattgtcctgcgcgacctgctccagtccggacatgtgtcgtgcggtaaattccacttttccctgctgatctcctcagacagtgccggacaggtggtgaaggacactaacgttctggcccagcccttcgccgatcttggtattatgacaacgctctccaccctgtcactgcccgccgcgtatctggcgcaactgccgggcgtgtatacgctgcgaccccgactggtggccgtcagcagccagaattttgccgatatagcctgcctgcataacttccatccccacaaacgcagcggtaatccgtggggggaagccatcgccatcctcacatctcccggcggtggcgggtattacctgaacctgcacgacagccaggccgggcgggatgacaccggtgagaaaacgccggggaatacggcgattatcgggaaaaccggatccggcaaaaccctgctgatgaccattatgcaacaactgatgcagaagtaccgtaacccggcgtcgtttgcgccttctgccaccatcaaacggctgaccacggtgtatttcgataaggaccgggcggcggagatggcgatccgccaggcgggcgggcgttatttccgcatccataccggcgagcccaccggcttcaacccgtttgcgctggagccaacccgccggaacatcagtttcatcaaacggctggtgcgcatgctgtgccgccgcaacggtaagccgctcgatccgcgcgatgaggagcggatcagtgccgccgtggacaccatcatgctggactatccgccggagtaccgccggtacgggatcacccggctgctggaagtgctgccggagccgccgaccacagacgcccgcaccaacgggctgcgtattcgcctgaaacagtgggcgcaggggggcgagttcggctgggtgtttgataacgaggccgatactttcaccatcagcgatgtcgataactttggtatcgacggcaccgaatttctggatgatgacgatattcgcggccccgtgaccttttacctgctgtaccgtgtgaccagtcttctggatggtcgccgcctggtgatgtttatggatgagttctggcgctggctggccgatgtcgaattttcccgcttctccctcaatatgctgaaagtcatccgaaagctgaacggtatcttcgttccggcaacacagtcaccggatgaaatcgtcagacaccccatcgccccggcgattattgagcagtgcggtacccagattttcctcgccaacccgaaagccagccatgcggattacgtggagaaaatgaaagtgccggaaagtgtttatgacacggtcaggagcctggatccgggcgagcattatatggtcatcctgaaaacaccgctgcgggccggggaaacccgcccgtttgtggcgatggcgaaaatggatctgtccgggatgggtaaattcacccggcttctcagcggcagtgaggacaacctgaaaatattcgatgccatttatcaggatggtatgcgacctgatgaatggaaagatactttttttgaccgggcaatctga

SEQ ID NO: 186535 - DNA, 729 bp, Klebsiella oxytoca
atgcgttccaggaatcaccgtctggcattattgttatttttctcggcgcaggcgttcagcgccggaataccggttttcgacgccgtgcagaataccgaatccattaaccagtggatgcagaaactacagcaatgggagggtacggttacccattataaaagcgaacttaatgcgtataagaagcaactggctaccgcaaccggcgtgcgggatattcagggttttctcagtgatgcccgaagcctgaaaaccgatattgataatctccgtaagaacggtatttcactggatgatctgctgaccacgaagaacagttcatattcttatgaactgcaacacctttacagtaaatacaaatcgttcagcgtatgcagcgaggaacaggaaggaataaaatatcaggccctggccgacagttgcaaacagataatcctcaatcaggcaatggcgattgagaataccactgacgttgaaaacaggattaacagcacactcagcgatatatcagacttatctgaccgtatatcgaatgcgcaggactcgaaagagtctcaggatctggctaacgccatcgcggcgaaaagcgtacagttaaatgcgctgacgaatcagtgggagatgtctgtcaggcaggctgaacagcgaacgacattgctggaacagcaaagacagaaagcctttgaacagcagcagctaacggcacctgttgctgaccttaataatttataa

SEQ ID NO: 186536 - DNA, 276 bp, Klebsiella oxytoca
gtgctcagatccttattcaccttatgcacactctcaggcgtgatattactgtccggctgcaaggaaaccaaatccgaagcctggtataagcaacatcctgacgaaacttatgcggtttatacgcaatgcctgaaggatggcgaggcaagcgataactgcgaatttgcccaccgggcagcacttatgtttgcacaggaaggccagcccggggttaaggaaaaattcgaggcgatatttcagcaggaagctgcaaaacgaaatgcagtgacacagtaa

SEQ ID NO: 186537 - DNA, 1032 bp, Klebsiella oxytoca
atgtccggtggtatttttgttggtatggacaaaaacatcatggatggactgaatgctgtactggaaggtcagtcttccacttacggcacgatgatcagcgtcatcattgtcagctcttttaccttatttatactgtatcgcggttatcagacactggctggcaaactccggaccccggttgaagatgtcgtctgggatgtggggcgaatgttgctgatcaccacctttgtgttaaaccgggatggctggcttgatatggcggtagcggctatccagggactcaaagacggtgtcagcggcgatgataatatctgggcgctgctcgatactgtctggggaaaggcacaggcgctggggcaaaagttatttaatatggacacatcaacttacgtcaaactgaatggcggccttgccgaagtgctggtatggggcggctctattgtcctgctgatggcagccacctttgtcaacctgctcgccgaaatcaccatcctgttaatgaccaccaccgcgccgctctttattttctgcctgctgtacggttttcttaaaccgatgtttgataactggctgaaaacgatttttgcggcaatattaacgatcatgttttccgccttatccatccgtatcgccattaattacctgaataagatactggatgctgcaacaaaaacatccgctgaaaccaatatggtcacgctggcggcgcagtgcctgctggccgggattgcggcaggtgtggtggtctggttctccgcgaggctcgccagcgcactcagcggggccgctgtacaggcggtgctgcagggggcagccatgagtggcctgagcggactggcgaataaatcctccagccttgccgggccgggcgtcagaggcagtgcccgcctggctgcgaaaggcggcatggccgtcgccgcggcgaccggcaggctcaccggcgcaggcgcgggtaaaaccgtgagcgcctggcagaaacgcaccaccgccatcgaaagcatgaaacgcctgaaccggcagcgtcaccgttaa

SEQ ID NO: 186538 - DNA, 141 bp, Klebsiella oxytoca; identical to SEQ ID NO: 121184

SEQ ID NO: 186539 - DNA, 891 bp, Klebsiella oxytoca; identical to SEQ ID NO: 121186

SEQ ID NO: 186540 - DNA, 1305 bp, Klebsiella oxytoca
atgaccgacaaatctttcccggacgaaccggaaaaaaccaccgcagaacgggaagcggaagcccgtgaacgcgcccgcgcggcaatggcatatcaggagccggagcagaaaacgccgcccggtcagccggaagtgacccgtttccgtaaagcttcaggtcgccgcacgctgatcgtcagcctgctgagtctggtcctggtcatcgcgctggcatccggtggcgatcgtcttctcagcgccctgaaaacgggtgatgagaaagaatctggcaccgcgccgccctcctccggtacggtgcagcatgagcgtaagaatctgggtctggacagtaacccgtttggcctgttcgggcctgggaggcaggaaagcacagaccctgccagtcagagcgccccggccactccagctctgccgcccgggccgcccgccctgaacaaggcggcagcactggcagacgggctgaacagcgacagtacagggtcaggcgacgatacacgcacgtcccgaagcggatcgcgcagcaacgcgggaacgtcgggcagcccgtcagcctccacggcgtacacatcctgtcagtctgtactggtcagtggcgaagatggacgtctgcgctgcccggatacgacagcaccggcaggcagcaataacaacgacaatccgggcgttgccagtgtcactggtgtcaggcggctgggcctcgatcccgatctctatatcccggtggatcgttatattccgtgttcgatgatgcggcgcttcgtatccgatgttggcggtcatatctcctgcctgatcggtgagaatgtctggagcgccagtaaccacgtgaagctgatcccggcaggaacggtcgcccgtggcgtctaccgcactggcgcactgcaacacgggcgcagccggatgtttgtgctgtggacggagctgcgcacgccggagcccggcagcctgcaaatcccgctcaccgatacgcaggccaccggcccgctcggtgaggcgggtatcgcgggctggatcgacagccatttctgggcgcgtttcggcaacgccctgatgctcagtaccgtgcaggacgtggcggcagcggcatcagatgccgcgccgggtaaagaccgcaataccgactataccgaaaacacccgcgccgccacggcggaaatggcgaaaacgacgctggaaaacagcatcaatatcccgcccacgatgtacctgaaccagggcgatgtgatcggcatcatgaccggtacggatattgatttttcctctgtttatcaactacggctgaaaaagaaatggtatgaacgctga

SEQ ID NO: 186541 - DNA, 1020 bp, Klebsiella oxytoca
atgaacgctgaaaacctgtcactggattttatgaaaaaccggctgtttggcgactttcttgctcaggatggcctgacagaaattgctgttaaccggccgggtgagctgcatacaaaaattcggggaaaatggcaaaaacaggcatcccccatcacgttgcgtcagtgccatgcttttgccagagcgctggcgtcctggcatgacgataatattgacgatacatcacccatcctttctgcaacattaggatctggcgaacgtattcaggcgattattcctccggcctgtgaacgtaatacggtgtccattacgctgcgcaaaccctcgtttgagcagaaaacacatcagtcatggattgatgcgggattttatcagcgcgtggccggtcaggaaaaaacggaaagtcaggataatgcactaatccggttatatcacagcggggatattccccactttatggaaaaggcggtggaatacggcaaaacgatttttattgtgggtgaaaccggctccggcaaaaccacctatatgaaaacgctgctgcattatattccgctgcatctccgtctggtaacgattgaggataatcccgaaatccgtttttatcaccacagcaattatgttcatcttttttacccggcggatgccggggataatgctattgtcacgcccggcaggctgatccgtgctaattatcgtatgaaccctgaccggatattactggcggaaattcgtgggcgggaagcgtgggacgcgctgaaaattgtcggctccgggcatgaggggttaatcacctccctgcatgcgggctgtccggcagaatgtattgaagggatcattgaccgctgttatgaaaaccccgactgccggaacattccttttgatgtgttgttacgcaaggtacttaaaagcattgatgtcatcgtcagcattgatatacacggcgatgtgcgccggatgagtgatatttactttaagccagttcatttaaacagcacgaaagagacattcagaaaataa

SEQ ID NO: 186542 - DNA, 1860 bp, Klebsiella oxytoca
atgattttaaataagcacgccgtttcactgtctccgataatgaatggcgctctgcccttcattgcttttatgcaacagaatcagcttatgctggcgttattagcggggctgacgatgccgtttttggccttgatgaaaagcgatgaaccgcagaaagccccgttatggaaaaggttgattatcgctttttccctgttgtgttttctctccggcacactggccccgatagtcatcggatccttccagtggctgtttaagaccagactcaccagtgataatacagtactggcctggtcagcacggattactttcactgtgaccgggattatttttcatattatgcttcgccgggtattcacgcctgaactggacagaataaagaaacgccttgttaaaaaaaccacccttgaacgggaattgcgcaccgatgtccgcaccgtaaaatccctgctgccggaaacactgcattataacccgctggattatatcgacctgaataaaggtatttttactggtatggacagcgagaaggagccgttgtatctcccgttaaaggactggcagaaacaacacgcggatattatcggcaccacaggagccggtaaaggggttgctgctggtatattgctttatcaaagcattctggccggtgaaggtgtgtttgttatggaccccaaggatgatgaatgggcaccgcatctttaccgcaaagcctgcgaggatgcaggcaaaccctttgccttaatcgacctgcgaaaaaagcaataccagctaaacctgattgaagatattacgcccgaggaactggaagaattgttcgttgcaggtttcagtctggcagaaaaaggacaggaagctgacttttatcggatcgacgaccggaaagccgcccgaatagccgcacaatttgtcatccataatacagcctcaaccattcgagaagtttataacggagactatgttcaaagtattgcagataagataaaagcctttttcggcaagattgaggaactggccttgctcaatgccatcaatgcccctaccggattttcgcttaataagatatttgatgaaggcggttgctgttacgtcatcggttcaatgcgaaacagcaaaataattaccgcacagcgcatgctgctggttcgcctgtaccagttagcagaaaggcgcgaccgtgtaacagacataccccgccccattgctatttatctttcagaactgaaataccatttatccaggccagcactggagggattaggtgcggcgcgggataaaggtgtgcatattattatggatcaccagtccattgccgatttaaaagactgcccggcagatttgaaaggtgacgccgttgtcggtgcggtcgttgagaacgctaaattcaaactggtttaccgggttatggacccggatacggcggaatgggttgcaagaatgtcaggcactattctggtggatgatgaactccgtaaggctaaaacggataatatgctgacggagaccatcgacagtgagcgtaccattcgccaggccgaacgtttctttattgacagtaatatgatcctgaacctgcccgattttgtcagctttatctttacgacaaaaacgctaccttctgcctcactgatttcaccgataaagatcagaaagcgtcagctaaaaatcttctcggtttcccctgatattaccgcatcggcggcaccggtgaaaatcgcactggattttgacgaggatgataaaccatccatacaggatgtaatgacaacgcacccgggtctttttttcaacgaaagcgaagtcaaaccggcagagccccaacctcatgagggagaacacctgtccccgctggatttttaa

SEQ ID NO: 186543 - DNA, 1926 bp, Klebsiella oxytoca
atgaagcttgaagcaattcggttatctggtttccagtcttttggcaaagaaccaactgaactaagcttggaagatgtgacctatctcattggtcctaatggatcaggtaaaacagcagcacttcaggctttatgccgactttttgcgtttgatccaacattgcgtcgtgtccagcgaacagatttccatgtcccttttgatgaggatgaatttcctcctgagagacagttgtggattgaagctgactttctgtttcacgaacttgcggaggacgaggataacagtactgtggctccttattttggtcacatgcgacttgatgagccagaaggtattccacgtgtgcgttttcgcctcactgctactatgggaacagatggggatatagaagaaaacttagtatatgttttggatgtcagtcctgatagctcacctcaaaccacagctcaagtaaccagggcagagcgtaataatattcaagttcactacttaccagccagacgggaccctgcagaccatattgcttacggtgctaacgctttactcggacgtttactccgtgctgttcgttgggatgatgaacgtaatacgattagaggattaaccaaccagataagcgacagcctagcagctaatccctccatcaatgctttcagtgaaagtttgaaattaacttgggcaaccctacacaaaggtaaatttttctcagatcctaaaattacatttgtggcttcggagattgaagcattgctacgccatttatcggtttcatttactcccggccatgatggctcgcttgtcgatttttctcggttgagcgatggtcaaaaatcgatgctttacctttctcttgttctatcatctcaagcgatcggtagagctgttctcgcagaggaagatgttacatttgatcccgacaagttgcgccctccgatttttacgctggtcgcagtggaagaaccagagaatagcctttctccccattacctgggacgtatcgtcagtgccttgaataccatggcaaaaaatattgatgctcaagccttaattgctactcatgcaccatcaatgttacgaagagttgatcctaaatttatacgttatctacgacttactgaggaaagaaaaacacgaattacgtgtatcaaattgccccctaaaacagatgaagcacataaatttgtgagagaggctgtacaagcattccctgagatctatttctcacgcttggttgtgcttggtgaaggagatagtgaaggaatcgtactgcctcgtttgctccaagttaaaggcactcctgtggatgaatcagctattacggtagcaccgttaggtggcaggcatgtaaatcatttctggcggttgctttcagcactgcagattccctatctgactttgcttgatctggatgtagctcggtatggcgctggatgggggcgaattaaatacgttaacgatcagcttgcagcatttgagccggagaaagtacttcctacagaatggaaaattacaaaatggaatgatgaaactacgccaataagaactcaccatttttttaataaaggcactcaagacattttcaaagaacttgaaaaccgatctgtgtttttttcctttcctatggatttggacttttccatgttgctagcttatcccgaagcttatggagttgaaaaagaggagccggatgagtcaacaataaaagcagtgcttggcaaaagctatgacaatatttctcaatatagcgtagatgaacagagttttttcgctacatatcatctacgttttaaattaggtagtaagcccgccgcacacattgatgctctagcgaaactaagcgacaaaaaattaattgcgaatatgccagagtcgcttaatagactagttgatgccgttattgccaaacttggagaattacctgaatga

SEQ ID NO: 186544 - DNA, 1668 bp, Klebsiella oxytoca
atgattcctattgaagcatggcaacccgcagatggattaacgctggaaccaaatgcaaaacgagcagcaaaagcccgcaaacgttgcttagctcttaccgctggaccgggcgcaggtaaaactgaaatgcttgcgcagcgggcagatttcctgttacggacagggacatgtcggtatccgaagcggattctcgctatctccttcaaggttgatgctagtagaaatctaaaagagcgcgtcgaacggcgctgtggtgcagaccttgcctcccgtttcgatagttatactttccatgcatttgccaagcgaataattgatcgctttagaccagtactgaaaggaagagaggcattagattcagactatacgatcgttgataagaaaatcagtatttctcgttcccaaatcgaatttagtgatcttgttccgttggctattaaaatattgcaaaactcaaaaattgctcgtaattctattcgtcagacttacagcgatattttccttgatgaatttcaggattgtacaaatttgcaatatgaattggttaaacttgcttttctagggactaaaatccggcttactgcagtaggtgataccaagcaaaaaatcatgggttgggcgggagcgatggatggtatattccaaacatttactgatgatttcaatgcagttccacttaacatgtaccgaaatttccggtcaaagccacaattgctgcgagtacaaaacgaaataattcgtcggcttgatcttgcatctgtcatgccagatgaacaattgaatggtgacgaaggtgagattcatgtcgagagtttcagaaacagtcaagaagaagccatttatttggcaaatattattaatgactggattaataaagaaggattggcaccaacagaaattgccgtcttagtttctaagcagttagatctctatgctgaccacctaatgatggagctggaattacgaggaattccatatcgaaacgagcagcaaatgcaggatattactgttgagccagttgcacgtttaatcgtagattatctttcatgcctctatggaaagcgtgaacccaaggcttggatccgtctgatgaatcagctgattccttttgctgatgaagaagtacagtcctgtgcgcgaaaggaccttgatcgtttgttaaaaaaacagcgcaaagaagcaactagtgctgaacagcttgattcacctttttcttgttggtggaagtttgtaaaggagtttttaaaacatattggcactgatacaatcgtagccctatcacctgattacgaatcacacaagcgtctacaggaagtttttcgtgataccaaagcaaggattgaagagttgcttgaaattgaatcagatttgccacaagctcttggacggtttacggatgaccaagcagtcagaattttaaccattcacaaaagcaaagggcttgagttcgattctgtaattataatggcggtggaaaacgagattttctttggtaaccaagatgagaatcgatgtgcattcttcgttggtgtttcacggacgaagagacgattatttttaactcatgctgcacagcgtgaacggcctgctaatgccaaacgttgggaagtccatcgaactgttcaatccgaatatattggttatgttacaccatttattaaacggtaa

SEQ ID NO: 186545 - DNA, 1467 bp, Klebsiella oxytoca
ttgggcgctatcgatggtgaagcgaaaagatacacacatataactggtgatttttcacaagacctatcagatcttgttaactttaaaatgaagcttcctaatcggactgatgggaaattagagactcctccgccagcatattattttttaccattctatattgatcagataaaaagctggagttcaccttgggattcatttgaaaacttaggtcagtatgccaactggaaaaaatcgttaataaagtattttactggctatctgaaaccagaacattttgaattagaagaagaaatttatgaatatagtgaggtaaaaaaagaatcaacagcaaaaatagaaaaatttcaaagcgcagttgacgtcatagttgataattctgctgatatcaccatagcattagataatgagaaatttagcgaaattcagaaagagataaatactgagcttcaagagtttatcgattaccaaaggaggctttatgatgctcaggctacgattacctcaaatatatatgatctcgaaaaacagtatgaattagccaccagttctgcaaacgaactcgaagaagattataagtttgcggtcgaatctataccgacagatcatttagagtgcccattgtgtggtactcttcacgataactcactgactaacagagcattgcttctttcagagaaggattcgctacttgacgaggcaaactcaatagcatcagaaatagaggcgcttagatcctcattatttgagttaaatgaggtagctcaatttgctactaatgaaattgaaagaattaataagaagtatctcaccgatgacaatgcgggcgaaaaaacactcattacacaagtaattgatgctatttcgaaagaaaaggtctcaagaagtattcaagttaaaattgataatgaagatcttaaaatcagcaaagccaataactctgtcgccgaattgaaaaaagatcagagaaaacttctttcaaacaaggataaggaagaactgaattcttcttttatgtcaaagctattgggaaatattgaagcactaggatcaacaggagtaaatcttagcaaagtgaaatcacctactgattataaacagttacttggtggcggtgctgctgaggctgccaggggattgcttgcttatcaactctccgtactgcaacaaatacatagtgctaaaacttgcatagtgcctcctttcgtcattgatacacccaaccagcaagaacaggcggggcatcgttatgaaaccgtcatcaaagaactaatgcgcagtatcccagaggactatcagataatactgtgtgcaatggagaataatgcattaaatgaatttaaaaatgatgccaatgttattacattaaattctggaaagttattggattcttcccaatatgactctctaagatctgagtataaaaacattcaattggctgtaagagaaacgagggatgatgattaa

SEQ ID NO: 186546 - DNA, 1179 bp, Klebsiella oxytoca
atggctgtttactatctcagtactcgtattaactctaatgtccctgctgatgctttgttatatgacctgtgcatttatcgcatggattccagcaggaataaatcgccccttgtggatgtgaagcaacagccgtttctgggaaattatgaaacacagagtcacatgaccggaaatataaatgagtcactctcaacaatttatattatggaaatgaatctttaccgaaaaaccatgttgcatacgcactgtgtaacgcctgttccgttcactaagatgtacacgctggaagaatttacgtcaggcaaagcctggtctccggtgaagcgggagaacccctgttattttgagtcaaaagggacaatgaaacctgagagtcaggggggcgaaacaaagcagattaaaatcaccatcccggaacgtccatttattgcaaaggaataccccattggcaatcccagagacccttttgataaaaatttaatagaacgtcaaatagatgaaagatttaacggatttgatttccctaatcaaatagcagcaagtgtatgtgggcctgctgcatttttttactgtttgcaaaaggatcgccccgatgtgtatacgcaagctgcccgtgaactttggcggtacgggaaaactaaaataggtgacttaatcatctcacctggtgaaggctgtcgtcaccctacaggtgcattttactatgatgatggcaggccaaagatagccggtactgactggatgacactagctgggctcagggattcagagaataccatgctgagctttgatgctcttgattcgccagtggctggcatcacaatgtggcaaacactgacggaatggtttgaaaaggccggttatgaaatagtctttagtaatgtagggatcactcaggcgggtgtccagggaatcagagatttaaatcaatatattgagcgaggctataaagtcgttacgttaataaacgatggacttcttgtaaatagtacaaataaaacaattttacctacacactgggttgtctggaatggttcagtcacacaagatcccaacggatatattagtttggaattgttttcttggggaaaacaaagaaattggataaaacctaaaaaagatttgcaattttttatcaagagattttttggagggatggtttttaaaccattaaaataa

SEQ ID NO: 186547 - DNA, 699 bp, Klebsiella oxytoca
atgagtgaaaaattgacgccgaagcagcgtgaagtgaatcgggtggtggaagcgctcacccaggctattgggcagcataagctgcgtccagggacgcgtttgatcgaagcgcaaattgttgaggcgctacaggctaaccgtaatcatgtgcagaccgcgcttcagcggatggcaggccaggggattgtgacgattgaaccgaattacggggcaatggttgcgcggccaacggcaaagcaggcccgcgaggtctttattgcccgtaacgccatcgagtgcgcgattatgtcctgcatcacgccggagaaaatggcgcttttcgccgaagagatcgcctgtcaacagcacaacgagcaccagtcgctgcacgcgcaggatcggcggcgtattgtttatgagctgggtgcattccacgagctgatggcaagaatcgctgataatgacgtgctgcgcgatatcctgaataatttaatggtgctgagttcgttgattgtaatgctctatcagcaggatgtgacgacgcattgtcagtgcgatgaacacagcaatatcattgccgcgctgaaggccggggattcgcttcgcgcccaggatctgatgcgagagcatcttaacgacctactgcagcagctcaacctggacgaaaccccgcagaattttatgacgctgtcgcaggcgctggagatgggggaagggtaa

SEQ ID NO: 186548 - DNA, 1227 bp, Klebsiella oxytoca
atgaatgagcgctatttattgactaacgttcgccttgagcagggctttattcgtcgtcagggcgttgtgcagggaaccgaatgcgcagagtttaccctcgatattatcgatggcagaattcacgcgctctacgccggtacgcagcacctgccagacgttgctgcgcaggacggcagaggatatctgatgctgccggttacccgcgatgagcatatccatctggataaaaccttttatggcggtccatggcgagcggcgcgggagaacggggcgcaggacatctttgagatgatcgctcttgagcaggagatactgcccgagctgctaccgacctcggtacagcgtacccacgcgcttcttcagttattacagcagcagggcacaacttatgttcgcagtcattgcaatatcgagccggtaagcggcctgcaaagcttgcggcatttgctggaggcgttggcaccctggagggagcagttacagtgtgagattgtggcgttcccgcagcacgggctattgcgttcaggctcgctgtcgctgatgcgcaaagcgctggcgatggggtgtgagtgggtcggtggcctggatccgtcaaaagtcgatggcgatatggtccgttcgctggaggcgaccctggaactggccgtcgaagcgggaaagggtattgattaccatctgcatgaggataaatccaccggcattgcctgtatccgctatttactggatgccatggagcaggagccggtgctgcgagggaagctgacgctgagccacgcttattgcctggcgcaaattgatcgcgaggagcttagcgaactggcaggcaggatggcggcgcttggcgtatcgctggcgacctgtctgccgataggcaaggatgtcatgccgctgccgtttttgcgcgagcgcggcgtacggttgttaagtggtactgatagcgttatcgatcactggtcgccgtttggttcggccagtatgctggaaaaagcgcatgactgggcgcggctttatactcgcggcacggagtttgagctaagccgggcgctggctatcgccaccggcaattgtttacctttagccgacagtggcgagagggtatggccgaaactcaacgatgaggccagttttatcttgttgaatgctgcctgttcggcgcaagttgttgcgcgcttgcctgccgttgaggcagtctactttcgtgggaaaagagtctggatcagagagtaa

SEQ ID NO: 186549 - DNA, 1491 bp, Klebsiella oxytoca
atgagtgagaaaataacgcgtatttgcgccgcctgggtggtgggttaccgcgagggcgatcactgcctgtatgccgacggtgaagtggtctatcagggagataaaatactctttgttggccacgattatccgggccctgttgatgaagagattcacgttggcaacagtctggttggccctggttttatagacctggacgcactgggcgatttagataccaccgtactggcgtttgataaccagcctggctggcaaaaaggacggatcgttgcgaatgactggcgacgccgcgacctgtatacccgcgaacagctcgatttcgccaaacgttatgcttacagccagctactgcgcaacgggattaccagctttgcgccaataacgtcaattctctatcgccagtgggcggaagatttcgacgaatatctttatgcggcggacgtcgccgagtctctcggcgcgcgcgcctggctcggcccggcgtttatgtccggatattatgtcaccgatgccgcagggcacttcagccgtcgggaagaccgcgtgcaggccagacgcggccttgatgacgcacaacgctttttcctgcgtttgcagcagcgtgacgttccgacaatcagcggattgctggcgccggacagaatagaaggcggcgatccgcagtggctcagcgaactggccggattggtacatgagttaggctgcccgacgcgtctgcactgctgtcagagtgagctggaaatcaacgaaattgctcgccgctataatggcaagagttcgctggaggtactggaggacgccgggctgttaaaccgacatatgctgttaccacacggccagtatctgggcggtgctgagcccagcgcgccacgaatagcgcaggacattgagcgtctggcgcgttccggggcgacggtggtttcctgtccgctggtatccgggcgtcatgcaaaatatcttgaacagtatccgcagcttaaggccgctggggtcaatatggcgctcggcaccgatacattcccgccggatatgttcagcaatatgcatctgggtacgatcctgacgcgagtcgtgaccggcgacatgtcagctgccagcagcgccgattactaccgcatggccacccttggcggagcgcaggcgctggggcgtgacgacctggggcggctcgcagctggctgccaggcggatatgatcgtggtggatctgacgcagcccgcattaggtcagatattcgaccctatcgccgcgctggtgctcagcggcaacgggcgcgatgttagcggaacaatcattgccgggcgtaaggtatattgggagggccgtctggttcaggcgggttatgacctcgcggaactgcatgctgaatcgcagcgcgtttttgcccatctcctggacagctacccggaacgtacggttaaccacccgccgcttaccgaaattgtcccgtctacctttcctctctgcctgcggaggcacgccgatgaatga

SEQ ID NO: 186550 - DNA, 1191 bp, Klebsiella oxytoca
atgaccaccattttgcttaaaggcgccacgccttttgactcctcttcacccgttgacctgctgcttgaggagggaaagattgccgcccgagcggcagagctggaacctcctgaagaggcgactgtggttgacggccgcggttatcaggtctttcccggtctggtggatggtcatgcgcatctggataaaacgctgctgggacgtgagtggtacgtcaacgacgttccgcgcgatctggcggcaatcattgccaacgaacgcgcctatcggcatgaacgaatgcccgatgctcagatccagtccgagcgtatcgcccggcgaggtattgccgcgggcacctcgtttattcgtacccatgtggatattgataatgaaattggcctggccaatcttgaaggggtgcttgagactcgcagaattctggcgcagcaggtcgatatcgagattgttgcttttccgcaaagcggtattttgcaaaaccctggcagtgaagcccttctggatcgggcgctggaaatgggggcggatctgatcggcggtctggacccgtgcgcttttgaccgcgacccgcagcgccatctggatatcatttttagactggcctgccagcataataaaaaaatcgatattcatctgcacgaacgcggtgaactcggcgcatttagccttgagctgatcctggcgtttatccgccgttatcagaagcagaatgcggtcaccatcagccacggtttttgtctggggatgctggaacccgctcgtcagcagcgatttgccgaagagatggcagagctgggcgtcagcgttgcaacaaccgcgcctgccgatattgccgtgccgccgtgggaactgctcgatagcgtaggggttgcgatatgcgccgggaatgatggcgtacgcgatacctggagcccttacggtaacggcgatatgattcagcgggcagtgactatgggtctgcgttaccgctggcgtaaagatagtgaaatctcgcgcgccgcccgtagcgtgacccacggcggcgcgcgggtcatggcgctggaacattacggacttgagcctggctgtcgcgcggacctggtactgatccccggtcgcagtatggtggaagcgctggtggaagctccgcgcgagcggaaagtgtttaaaggcggcgtgctggtagcggaaaacggggagtgcctgttttga

SEQ ID NO: 186551 - DNA, 1035 bp, Klebsiella oxytoca
atgaacgagccgtcgggcctggccccggaagttgtgaccattcgcgacctgcatattcgcttcaatctggggcgggagaaaaaaacgtcgctgtttcgtccggcggcgaaaaaaacgctgcatgcggtacgcggtatcagtctctctatccgtcagggagagacgttcagcatcgtgggcgagtcggggtgcggaaaatcgacagtcgcccgtgcgctggccggactctatcaacctgcctccggtgaaataaactatgcctggcgcagcccgcaaatggctggaactgcggggcaaaatggcacccagatgatctttcaggatccctatgccagcctgaatccgcgctggcgcatcgcccgttcgctggcggaaccgctggtgctggcgaaaaaggtcggtaccacgcgccaggctcgggaatactgcggcgacctgctgacccaggttggtctttccgccggcgatctggataaatttccccatgaattctccggcggccagcgccagaggatttccattgcccgcgcgctggcaacacagccaggttttctgatttgcgacgaaccgacatcggcgctggatgtgtcggttcaggcccaggtgctcaacctgatgcgcaaactgcaacgggaaaacggcctgacctacttttttatcagccataatatggcggtgatctcccatatctccgacagggtcggcgtgatgtatctcgggagattggttgagcagggcagcgtagaggagatcttcacccatccggcgcacccttatacgcgcatgttgatggcagctatcccacagtttgatgcgccatccagcgcgcgcgaaccgatacgcggagaagcgcccagcccgctggcgccaccgccaggctgcgcgttcgcaccgcgttgcccctatgctaaaccgctgtgtcaccaggccatgccgcccgcgcacagccttagcgataatcatcaactggaatgccatttcccgatcgaagtgatggccggttccgcctctattccacttgcgaaggtatcgtag

SEQ ID NO: 186552 - DNA, 984 bp, Klebsiella oxytoca
atgacggcttctccacaggcgttactggaagtgaaaaatttgagcattgaattcctgcatcgcaaaggcaacctccaggcgattcatgagttgacgctatcgatgcagccaggagagatcctcggtatggtcggcgagtcgggcgcggggaaatccctgactggtgcggcgattgccgggttgctgcaaagtcccggacgcattcgggcgggtgaaatctggtttgccaatcgacgcatcgataaccttgacgaagaagccaggcgtctgctgcgtggtaaggcaataggctgtatttttcaggatccgctcaccagcctgaacccggttttgaccatcgggcagcaactgatagaaaccattcgtacccatcttcctttatcggcaaacgaggcgcgggagcgcgcggtttccctgcttactgaagtgggaattaatagcccacgtcagcgtatcgatcaatatccacaccagctctcgggtggaatgcgtcagcgcgtggtcattgcgctggcgctgtgcgttgacccgcaactggtgattgccgatgaaccgaccaccgcgctggatgtatcggtgcaggctcaggttctgggcgtactgcgtcgtttgtgcgaacagcacggcaccgccgtgatgctcattacccatgatatgggcgtggtggcggaggtgtgctcaagagtggcggtgatgtacgccgggcggattgttgaaaccggaccgatcgcgcaggtggttcgtcatcctcaacacccctacacccggggattgattcagtccattccatcaatgagcgagcgtcgcgaatacctgacgcaaattgatggcgcgatgccgcgtctgaatgcgctgccgcagggctgcgctttccattcacgctgtctgcatgccagcgcgcaatgccgcgaccaccagccaaagatgcagcagcgacaccaggctgagttggcctgttttcatccgcaaggagaaccgctatga

SEQ ID NO: 186553 - DNA, 969 bp, Klebsiella oxytoca
atgcaaactcgtcattattcaaatacgacggctgggcaaaaactggctccccgaatcgcagcgcgctggcgtgcctttattgatagcgattttttatggctcttctggaaaagtaaaagcgcggtcatcgctttcacctgctgtatgttgattttactttgctcattattcagccactggattgcgccgcataatgtttttgataccgctggttttgacttaatggattcagaactaccgcccgcgtggatgagtggcggcgatccccgcttctggttgggcaccgatgttcaggggcgagatatactctccctgatgctttatgggctgaatatttcgctgattatcggcggcctgagcgttctggcttcggtggctattggcgtggggttgggggtactgagcgggtatttcggcggcatcgtagatacgctgatcatgaggtttgctgacgctatgctcagtattcctaccatcatgttcacgctactggtcagcggggtggctcgcgtggcaattccgaaagagtatatcggccattttgccccggctatcctgattggcgctattgctctgaccggatggatgcagtacgcccgcacggtacgcggcctgaccttgctggagaaagggcgggaatatgttatggcctctcaaattagcggcggcagccatctgcatatcatgctggcgcacattgtgcccaacgtcatgcgcccggtgttggtgatggcgaccctacatctgggtgtcgcgattctcaccgaagccaccatgtcatttctcggcgtcggaatgcctccagaccagccttcgctgggaacacttattaatgaaggcaatcagtacctcttttccgggcaatggtggatcgttctgttcccggccacgctgttggtcatactttcgctggcgtttaacgttctcggcgactggttgctcaacgcgctcaaccctaagctgcgctaa

SEQ ID NO: 186554 - DNA, 963 bp, Klebsiella oxytoca
atgttctttttattgcgtaagctgtttcaggctgcgatgttactggccggcgtagcgctgatctcgtttattctgtttcagtatcttggtgacccggtggcaaatatgctgccggaaagcgccacggaagtagaacgaatgcaactacgcgccagcctgggattaaatgatccggtttttgtgcagttcttacattatctttcccgtttacttcacggtaatttcggcatttcatattacaaccaggtatccgtctttcagctgatcatggagcgactgccggccacgctggaactggtgtttgtcgcggtcataatatcgctggcagtcggctttccgcttggcgtttgggtcgccattacgcgcaataaactattgcgtgagggggtgcaaattctctcgttgattggggtttcgctgccgtggtttcttattggcattatgctgattatcgtgttttcagtatggctaggttggtttccctccagcggccgcggtgaaaccgttaaaataggtttctggtcgaccggtttgctgaccgcatcaggctggcgctcgattgtgcttccggcgctttccctggcgctgtcgatgattaccatcattatgcgtctggtacgaacagaaatgctggaagtgatgaaggctgattatattaaatttgcgcgcgcacgcggtattgagaattaccgtatctggtttcgccatgcgctgcgtaatgccttattgccggttgtcacggtaattggtttgcaaattggtgggctaatcgcctttgcaatagttattgagaccgtttttcaatggccgggtatgggactattacttattcagtcgatcaactatgtcgatgtcccggtgctatccggctacctattattcatcgctctgatatttattatgataaataccatcgtcgacctgctttattatctgattgatccccgtatgcgtgcgcaataa

SEQ ID NO: 186555 - DNA, 1584 bp, Klebsiella oxytoca
atgaaaaaaatagtgttatcgctgctggctgtaagcgttatcggactgatgagtcagcaggcgagcgcggagaatgtggttcgctgggcgaccgatgccgacatcccaacgctggatccggatgcctacgcctctaccaaggcattaacctttcagaaccatatctatgaagcgctggtgcagcgcgatgataatttgcaaattcaaccgtggctggcaaccagctggcagcagaccgacgatacgacaattcgttttaagctgcgtgaaggcgtcaaatttcataatggcaatgactttaccgccgatgatgttgtcgcttcggttgcccgggtgaccgaccctgcatcagggatccgcgctaacgcttcgacgattaaggatgccgtggccgtcgacaaatataccgtcgatatccatctggtgaagaaaaccggtatcgcgctgaatgaactgaccggcgtgatgatcatggataaagagtggctggcggagcacaacgcactcaagccaaccgatatcagccagggaacggaggggtacgctaccaataacactaacggcaccgggccatttattctgcaaagccgccagcgggatacccagatggtgctggtgcgtaacccgaactggtggaacgcggcccacggcagcaacatcgataaaattattttcaaaccggtgacctccgacgctacgcgcctgtcagggctgctggcgggagagtacgacctggtgacgtcggtcccgctacaggatattccgcgcctgcagagcaattcccggatcaatatgcagatcagcccttcgctgcgggtggactatttaagcctcaatatgcgcgataagctcaatgctaagaatgacaaagccgagaacccgctgaaagatttgcgtgtccgccaggctttgctgatggcgattaaccgcgaggcgattacccagaaggttatgcgtgggctgacaaaacccaccaataactatctggcgccggatattccgggttacaacgccgccagcagtccggatattccgtttgatccgcaaaaagccagggcattactggccgaggcggggtatccaaacgggtttaatctggcctttgattgccctgagggcacctatgttaatgcggcgcaatggtgccaggcggtacaaagcttctgggcaaagattggcgtgaaaaccaacctcaacgtccatccagccagcgtctacgatccgattctggtcaatggccgtaccgacgtgggggtgttaggatgggcaaacctgccgattatggacccctatagcgtcgcagttcagctattgcatactaacgatggcaaaaatatgggcacctttaatattccgcgctacagcaatagcgaagccgacaagcttatcgatcaatcggtcggtgagctggataataaaaaacgtattgcgctacttagccaggcggtggcaattgccaataaagatttgccttttttaccgatgcatttcgaacctgtggtatgggcactgagtaaaaatctacaattaaaacagacgccagataatgtacagcgcctgtggtacgctaacgttacaccataa

SEQ ID NO: 186556 - DNA, 405 bp, Klebsiella oxytoca
atgacaaacgtacatgagcaggccgttgagattgtaaaaaatttcctggaggcgtcaatggcgccggaccccgatcgcgccgctgcgctgatggcggaaaacgtgcagatcacctttaccggtaagcggcggatggctcgtgtccatgaggtcaccgcgtttaatgctgaccgttaccgctgggttaagaaacagcccggcgaattcgaatggatggcgaaaggtgacgatcacacggtgatctactgcaccggtaccctctatggttgctggccggacggacgtgagtttgaaggaaaccgctatcttgaccgctatgaagtgaagggcggggagataaccatgatggacgtctggaatgacagcgccgaatggatccttgcgcatcaattgcagaaaaaataa

SEQ ID NO: 186557 - DNA, 900 bp, Klebsiella oxytoca
atgccgacacctgacatcctctgggagcttaactatcaccagcgtttcccgtggcgttctgccgcggatactccggcagtcagctggccggaagggaaacggctcgcactgtatgtggctatcaacctcgaacacttcgcgtttggctgtcaggagggagcgaagctctcacaggcggcaaatcaactcgatattctcaactatagctggcgagattacgggaaccgggttggcgcctggtatttggccgatctgtttgctgaactgacgattccacctgcggttatcagtaacacggccattctggattactgcccggaccttttgtatcggtggctttcgctgcccggaagcgaactgatcgctcatgggcacaccaactctcagcgccagggcgatctggccccggcggatgaagaacatctgattagctactgccagaagcggttgagtgaatttcagggtaaaccggttgcggggtggctctctccgtggatttctgaaagccaccagactcccgattttcttcaccgccacgggttcagctataacctgaactgggcgcacgacgatatgccgacccccatgcaaaccgccagcggaacgttactgtcggtaccttatccgcaggaaatcaacgatattccgaccatcattcccaacggcgtctccatcgagaccttttgccggatggtagaggatcagttcagcgagctccaccagcgtagccgccagcagccgcaaatcatgggcattgcgctgcacccctatatcgttggccagcctttccgtttttatcacttaaagcaaaccctgacgcgactggtcgcccagtgcgatgacgtctggctaaccactccaggtgacatcgccgcgcgctatctgtcacaggcttcataa

SEQ ID NO: 186558 - DNA, 669 bp, Klebsiella oxytoca
atgaaccgctatgaaaaagagtatcggcagttgctggcaaatggcgctatcgcctgggctggcgaaggttattcccgggccaaagaacagcaggagcgcgtttttagctggcttcacttacagcactatttcccacaacccggcgcgcctgtccttgagctggggtgcgggaatggcgcgatggccgcgcagtattttgcggaacgaggctattcggtgtggggggtagattggtccgcaaccgcgatccgctgggcagaaaatcgttttcagcaagcggggctcgcggctcaattttttgtcggggatgtctgccatattcatcagtgtcaggatgcgacctttgagctcattgttgatggcagctgtgtgcattgcctgattgacgatgcccggcatctttgctttgcggaagtcagaagattgctcaggccgggaggacggtttgtcatcggttccatgtgcggaactccgcgtcatccggaagacatggctgcttatgatcccattcgccatcatttgctcaaagagggtcaaccctggcgtacgctgcggccgctccaggctctcctggaagagatcggcgatgaacattttgatgtgcttgaggtgaacgtcaatgagaacccatggtgggatcatgcgaccgtggtatgttccgtaaaataa

SEQ ID NO: 186559 - DNA, 1029 bp, Klebsiella oxytoca
atgaacgcgacaaccttaccgatactggatctggcccgctacgcggaccccgctgaaaaagcggcgtttctcgccgacctgcgccacgccgcccgcgatattggtttcttttatctgattaaccacggcgtcgatgaatcgctgcagcaggccgtgcagcagcaatcccgcgccttttttgccctgcccgacgatcaaaagcagagggtggcaatgattcactctccgcattttcgcggctacaaccgcgccgcgtcggaattaacccgcggtcaacccgactggcgcgagcagttcgatatcggcgccgagcgcccggccctgcagcttagcgaacgcgcgccgcgctggcagcgcctgcaggggccgaatctctggccagaggcgttgccctcgctcaaacccacattactgacctggcaacgggaaatgacccaggttgggatcaccctgctgcgcgcctttgccgaagcgctgcgcctgccgctggatgccttcgatggcctgtatggcgataagcccaatgaacatatcaagctgatccgctatcccggccagcaggagacccagagcgcccagggcgttggcgcgcataaggactccggcttcctcagcttcctgctgcaggatgagcagaaaggattgcaggtcgaagtctcccctgaccgctggattgatgcgaccccactggcgggcagctttgtggtgaatatcggcgagctgctggagctggcaaccaacggctatctgcgggcaacggtgcaccgtgtcgtttcgccgcccgccgaccagcagcggctgtcgatcgcctttttcctcggcgcccagttggatgccgtggtccccgtctacacgctgcctgacgagctggcccgcgaagccctcggaccggatagcgacccgcaaaacccgctgctgcgcgaggtgggctggaattacctgaaagggcgtctgcgttcgcatcctgatgtcgccgagcgctactaccaggatgtttttcgcgaacgcgccgagcaattgatcgtgtag

SEQ ID NO: 186560 - DNA, 606 bp, Klebsiella oxytoca
atgaatatttctttgctgacggcctacgctttgacggtcctggcgctgatcgccacgccaggaccggtggtgctgttagtgaccggtacggcggcgcgcgaaggctatgccagcgcggtgcgcacgatgattggcgggaatctggcgtctctggtgctgctgaccgtggctgccgcgatgctgaacggcatgctgacgctcgatccgcgagcgctaatgctgctggcgacgatcgggtcgctgtatattatttggcttgcggtggcaatgttgcgtgaagaggcggttacgcaggaggcgtcaaaaaagcgtagcggggtgatagcagggtttgcgactgcgttaagcaatcccaaagatattctcttttttgccgcgttttttccgcagtttatccatattaccgatagcttcggcttcagcctggggctattgacggcggtgtgggtgattatcgacctgagcgtgctctcgctttacatcctggcggttcgccgatggttaacggcgtgttacgccagacgagtgacgatggtctcggcgctttttctgttattgttggcgttctatggactgggttacaacgtgtggcagctaactcattag

SEQ ID NO: 186561 - DNA, 972 bp, Klebsiella oxytoca
atgtccatgccgccgctctacgccctgcgcgcttttgaaaccgccgctcgccttggttcattcagcagggccgccgcttccctgaacgtgacgccaggcgccgtcagtcgtcacgtcagcggcctggagtcatggtttgaatgccggctttttcttcgccatgggccaaaagtcacgctgaccgatgccggatatcagctggcgaaagcgttagatcagagtttttcatcaatagaacgggcctgccaggctctgcgccgtcaggctggcaaactccgtctgaaggcgccgtcaacgctctcgatgcgctggctactggacgtgctgcagctgtttcgccagcagcatcagcgcccggaaatagaaatgagcagcctgtggatggaccgcgacagcgtcgatttcactcaggagcctttcgactgcgcgatcctgttagggaacggaaattttggcgacgagaacaacggctgcctgctctttgctgaatggctaattccgctttgcgcaccggggatgatggagcaggccagacaagatttgtcggcctgtacgctgattcatccatcaaccgatcgccgggactggcggcgctggctgcagcatgatgaccggcttgcgccgaatatcgatcggggtatcgtctttgacacccttgaacaaggaaccatggccgcgatgagcggccatggcgtcagcattggcgatctgctgcttaatctgcccgcgatccgcgcggggctgctggccttgcccttctccacagcgatagccaccggcgagagctactactttgtatggccgaaaaacacgctctgcccgcagccgatcgccctattgcatcgctttttaaaccagcatattcccggcccgctccccgatgacattatccgcctcggagaggcccccgggttacagaacgtggaccgccgtcaccagcagatagcccgtcgcgccccagatcattgctga

SEQ ID NO: 186562 - DNA, 252 bp, Klebsiella oxytoca
atgattcagatgcgagcagaagctttgcgcattaagaacatagggtgcggcacaatgtgggcacggactgtcaggatagcctatgcccgccgggaaaataagtaccggtacgctagcgcgaatgatggagaagccttattgcagcctcttttgcctggcgccgtaggggcacaaggtgaatttgcagagacttcttcgattgcagatgagcagcatcgggttctgattaccggggcatttaatattctttga

SEQ ID NO: 186563 - DNA, 1185 bp, Klebsiella oxytoca
atgcaacaacctgggaaaggatttttagtctggctggctggactcagcgtactgggctttctggcgaccgatatgtatcttccggctttcgccgccatgcaacaagatttgaacacttctgcggcctccgtcagcgccagcctgagcttgttcctggcaggctttgcgctgggccagcttttctgggggcccctttccgatcgctatggccgcaagccggtgctgttgagcgggctggccatttttgctatcggctgtctggggatgctgtgggttcgcgatgccaacctgatgctcgcgctgcgatttattcaggccctgggggtttgcgctgccgcggtgacctggcaggcgatggtcaccgattattatccagcgcaaagaaccaaccggattttcgccgccattatgccgctggtcggtttatcgccggcgctggcgccgctgctcggcagctggctgctggtccattttgaatggcaggctatttttgccgtgctgttcgcaattaccctgctgctgatgctgcccgccctgcgtctgaagccagcgaacaaaccggttgccagcgcccagcagaagctcacgtttctcaccctgctgcgctcgcgcgagtatagcggtaacgtgctcatctacgccgcctgttccgccagcttttttgcctggctgacgggctcgccgtttattcttcatgaaatgggctatggcccgacagttatcggcctgagctacgttccgcaaactatcgcgtttctggtgggcggttatggctgccgcgcggcgctgcaaaaatggcagggccagcaaattctgccctggctgctggcgattttcgccctcagcgtcgccgccacctggctggtaggcctgcgggaaaacgccacgctcgttggtttgatgattccgttctgcgccatggcggtggtgaatggcggtatttaccctatcgtcgtcgcgcaggccctgaagccattcccacaggcgaccggccgcgccgctgcgctgcaaaacaccctacagcttggcctctgtttccttaccagcctgctggtctcgacgctgattgccaccccgctgcaaacgaccaccagcgtgatgctggtctccatcgtgctggccgggatgggctaccgcatgcagtacaaagctgagcatctggcaacaaaatcgtcacatgcttaa

SEQ ID NO: 186564 - DNA, 450 bp, Klebsiella oxytoca
atggcaggtaaagcgcaaaaccggcgaaatcatctgtccccatggacgattaaagatattcagtatgttgaacaacattatgggcggcttccgacagaggagatcgccataaaactggggcgaagcgctggcgctatgcaacgaatagcgcttacatccggggtgggtaaaccgggttcccggccctggattgaagacgaacggtcgctgatccgtctgcattatcataaggggctggattatatgcaggtactgttgcccggcagaacaaggctggcaatttacgcacaagcctgccatctgggcgtgacggtcagtaactggagcaatcaggaacgtcagtttttaaaagaccatcacggcatcatgcctgtcagtaagatcgcttccatactcggcaggagtcccgagggagtaagacggatggcttatgacatgaatctacgttaa

SEQ ID NO: 186565 - DNA, 1398 bp, Klebsiella oxytoca
atgcatgacgaacaaccctgcccggtgagaaccggcggcgatccgcgttcactgcctcagtttacggcgctgcgcgatgaaatgagcaacctgacgcacccggcacgcccggacgtcgactggaagaaggtggaaacactgtcgctctccctgttccagattaacggtgtggagctgcagaccggtgcctggtatacccttgcccgcagccatctggcgcgggtcagcgggcttaacgaggggctggacatactgaccgcgctgctgggctaccagtgggctcagctctggccgcagccggtgcatgcccgggctgaaattctgagcggactttttcagcgcgtacagaaacttttccgcacctggtcactgcagcctgctgatgtcaccgcacttgagctggctgaaaggcacctgcaggcgctggacgacattctgaagcgtcaggaactcaggcacgcctgtcatccggcacccctggtgcaacaaatacgcagtgccctgaacagactggaaaaaagtcctctgcaggaggaggccggccagggtatcgcgtttcctgagcagaggctggtacgtggtgacgaagtggctccacctgccagccggctggtctatgtcatccaccaaaatcccgacgtggaggttcaggtgacagaggctttgtcggttaagccaaaacggtggcccgtttttgtggctggcatggcagcctcactggtgctgagcgcagcaattgcctccggatggctggttctgcatcaaccggatgacgccacaaaaaccctggctgcctccgttgcctcgctgcccgaacccatgacggccccgcaaatcgctgcgttcagggaaacgggtaacggccggacagattctgccatgtggcttgagcgaatcacgaaccaggtcaacgggatcatgaaccagtcgccaggatggcggcttcgctatggtcagggactggtgtcgcaggcgaaagcgctgtggccggacgatccggcaacccgtgaactggtaaagcgctgggagcaatatcagggagcccggtcgctgccagccagccagctccagggctggcatgagggaatgacgcaactccgggcgctgtcggctaagcttgatgcgctggatcaccagaagggaaaatacctgacgggaagcgagctgaagacgatggtctggcagataacgagttcgtttgccagcgcagtgccggtcgaagagcaactgcgacagcttgttcccccccaggagaacgctaacgcgagtaatgcagaacaagtctcacgtcatctggattcgttgagtcacatactgggaaaggtgtcgaaccagggtggggatgttcattcagaaacagacccgggtgccagtgatcccggcacgttccgtcgttaa

SEQ ID NO: 186566 - DNA, 474 bp, Klebsiella oxytoca
atgtcggcaaaatcacgattttttaaaaaactgcaggaccagcatccccgcagcgaagcctttgacacaaaggcagaagcggatatcgcggcgtttcgtgagcggataagccagcttcaggcgtccatggaaacgtggcttgccggaacaggaattagcaccgaagccacaaccacttccctgattgagttcctgactggcgggagcgcgttttcgatgccgggtatgactttgcgctacgcgcagcggagtatccggtttacccccatttttctgtacgggcagggcgtgaccggctgcatggaggtctgcctgtatgcaggtggcgatatccggcccctgtaccgtctgtttatgcgcagtggcgggcagaatgactggacctggtgtccagccggcgcgcagggcgaaaatcctgcccggtttgatgaagaggcattctttacgatgattgtccctttgcttcctgagtaa

SEQ ID NO: 186567 - DNA, 708 bp, Klebsiella oxytoca
atgctcttgctttcaggttgtacagcactcttgtggggagggaataaggtcgccgagccaaaaacagagagacatattcagattcaggatagtgtaaccggtgtatttcagtataaaaacctggctgtttctgttgttcagggaaacaaaaaaacgcctgttaaaatcccttctgaaggtgtcgcctttgtcggtgaaaaaaatatatacattctgacccgggggacagatgagcttctgtccctgaataaacttgcgacccaaattcctctgatatcaggtcgggaagagaacacccttaagtttcggataaacaaaccgtcaggcagcgacagcgtgcttcagttcagcgatgcactacctgtcgacgtcaataaatcctccagaatgctttcaacagaagagttaaatactattcagcatgaaggcttccggagcaacggtgtccggtatgtcagagacgtatatatcacgggagtgattattcctaaagtgagccttaattatacttttgataagactgaatctttgggtagaacgtacaacgtacagttttattcgctggagtctggaaccgattttcaccccgtcaatctggcgaccaatattgtcgttaccccgttagcactcactgctgatattgtttttttcccgatatcattaagtctgcttcaactcattaatggtccttcaccattcggacattaa

SEQ ID NO: 186568 - DNA, 3417 bp, Klebsiella oxytoca
atgaccacgggtgattcagcatggcgcggagtctggggaagactgggcttctctgcgcttttatcaggcggaattgcctggggtatctggcactttggtgatcaaatggggctgcatactccgttacttaaagggctggtcattgccggtgccctggttttattgatgctgttgcgccatggcaaaacaattacacttgccatcaaacagggctggcatcgctttcaggcaaaacgcaaaaatgttctgcccgtcgatgaaggccgcgtcaagcagaccgcgccccgcaatgtcactgttgataccatccgtgacgccatgcgtaacctctacggtcgttgctgggggcgtaaaacacgcatcctgctgataaccggtaccgcctctgaggtggagcaactgacccccggtcttacggctcagctctggcaggaagactgcggcacactgttgctgtggggcggcgacctcaatacgccggcagccagtgcctggctgaccgcgctgcgaaaactgcgccgttgtccggtagatgggctggtgtgggtcacttctgcgtttgaccagctctcagcaccagggctggagcagccgctgccggtaccttcagacagcaccatggattcgctctcccacgccatcagcaaccgaatggatatacttggctggaaactcccgctgtatgtctggtccctgcacccgcgcgccggtaagccggaagggcgcattacgcaggcaaccggctgtctgttgcctgccggttgccgtactgaagggctggcagagcaactgtccgccctgacgccagatttgacttcacagggtcttcagcagacctgcggtgaggtgaaacataacttcctgctgacgcttgccgaccagctcattcgtgagccggaaagcgtgaccgtaccgctgtcggtgatgcttaatccgtaccgcccgctgccgctggccggtgtggtgttcagtcagccctctgatggtgccgaacgtgccgtgacgcaccactggggcatggataagcgctgggatgttttgcctgagtctgtccgcacgcttgctgccggactgcgtccgcgcaagccgggcattccatggcgcaaagtgtttgcgtctgtcgtcgccctggcgatggtgagctgggctgcattgatgggcatcgcgtatgtcaccaaccgcagccagattgacggcgcgaatgcccaggccgcacttgccgcccgacagaatcagccgctggagcagcgtctgcacgcgctgtctgaactgcagaaaacgctggcccgactgcagtaccgttcagaacacggcgtgccgtggtacgagcaggccgggctgagccagaacaatgcgctgctggccgcactctggccacgctatcaggacagcgcattgccgctgttgcgggatgcggccgcagagcatctgcagactcagctcactgcctttaatgcgctgccgccgggcaacccgctgcgcgagcagatggcaaaaaacacctatgaccagctcaaactctacctgatgctggcgcgtccggaacatatggacgccgcctggttcagcgctgcattgctgaatgactggccggtgcgtgacggtgtaaaaaacggcgtctggcagggtatggctccgtcgctgctgtcgttctatggcgcacagctggtcacacatcctgagtggaaactgcgagccgatgaaaacatggtcagccaggcgcgctccctgctggttcgcctgatgggcgtgcgtaacagcgaatcgaccctgtaccagaagatgctctcccgggtggcgcacctgtatgtcgatatgcgacttgaagacatgaccggggataccgatgcatcaaggcttttcagcaccacggaaattgtaccaggcatgtttacccgccaggcctgggagcaggccgtgcagcccgccattgagaaagtggtgaaggcgcgccgggacgagcttgactgggtgctgactgacagcaagcgtccggtcagtaagcaggatgatatctcccctgaagcactgaaaaagcgcctgacggagcgttactttgcggacttcggcggggcatggcttgagttcctcaacagcctgcgctggaatcaggccgccacgctgtcggattccattgaccagctcaccctgatggccgacgtgcggcagtcgcctctggtggcgctgatgaacaccctgaacgtgcaggggcgtaccgggcagaccggtgaagccatttcggattcgctggtgaaatcagcgaaaaacctgctcggcggtgacaaggatgccattgaccagagcgccggtgttcacggcccgctggatgcgacctttggtccggtgctggcgctgatggacaagagccgcacggggggtcaggaacaaagcctgcagtcgttcctgacccgcgcgacgcaggtgcgcctgcgcctccagcaggtgaccaatgctgccgacccgcaggcgatgacacagacactggcgcagaccgtatttcagggtaaggcggtcgacctgaccgaaacccgcgactacggcagcctgattgccgccggtctgggccaggagtggagcggttttggccgtaccgtgtttgttcagccgatggagcaggcctggcagcaggtactgaccccggcggcggaaagcctcaatgcccagtggcagcaggcagtggttgctgagtggaacagtgccttcggtggacgctatccgtttactcattccagcagtgatgtatccctgccactgctggctaaatacctcaatgcggattccgggcgtatcgcgcagttcctgcagacccgcctcaggggcgtgctgcacaaagagggcaaccactgggtgccggacagcatcaactcgcaggggctggcgtttaatccggcattcctcaatgccatcaataccctgagccatatctcggatgtggccttcaccgaaggcaatgccgggatgcactttgagctgcgcccgggtacagccgatggcgtgatgcagaccgacatgattatcgacagccagaagctgacgtatgtgaaccagttgcctgcatggaagcgcttcgcctggcctgcggataccgaagcacccggtgcagccttaagctggataagcacgcaggcaggaacccgccagtacgccgatatccctggcgcctggggctggatacgtctgctcgataaagcttcggtcagtgcttatccgggcgttgacagcagttacagtctgagctggaaagcacaggacggacgcacgctcaattacaccctgcgtaccgaggcgggtgaggggccactggcgctgctgaaactgcgtaacttccgtctgccggaaactatcttcagcacctccggtgcagcatcaccagaccaggttgccagtgcaggctatgatacagaggacatatattga

SEQ ID NO: 186569 - DNA, 1155 bp, Klebsiella oxytoca
atgagctgggagcgtcagaaatcaacaatatcgactaagcctgaagaaccttcattcatcctgtggatgatgttgggggttttctcgctgctcggttgtgtactgctgtttgtcctgcatgccaacatactggctgggccacttcaaacatttaatctttgggctgtcaccgcatgccctgcagttgtctggtttttctttttgtgtctgcgtagctggatctataacaatgcatttgacagacacgaatttgaagccaatgaggcagagtatgcgcaacaacagtggatggagtggtctggacgcaatatcgcagtattacacagtggtgtaatgctgcctgcaaatctgacaccgcaaaattttattgcagccccgccaacgctggagcagagcacatctctgacccgacgaatttgtctgcaagatcatgagacacatttttcagttctgttgaccggattaagtcctgtgctggcaaagttgcctttagatttggtacctgctgtcacgctactgacagatttccacgatgacatacaggtattgcaggatgcatttgcgcaggcctggcaggcagccattctggatctccctgttccacagttgacgatacttacgttaaagaccttcctctcactggatgagcgaattaaatcaccgacgctggatgtggatttaatccttattcaccagacacagggacaggacgcgcacagtgatgcactcgcaaccctgttgttgacctccgatgatgtagccacaaaatataaactttcgcttaatgcccgtcttttgcgtccaatggctcttgatatggcaatttcggaaaaatcgctggatacatttttctcaacacaaactcaggcctgtgccaccgccagtattgtcggcgacagagtggaatggggtaaggcattttctgatttgctcgcagcgacacaggattatggcggtcactggaaacctgaacaactccactggctggaaaaatatgccgggctcagcggccccttttctccatggataatggcagcagtcgccagcgatattgtgaacatacaaaaagcagactgtctgatgctttctacagatggcaaccagaaatttattaatacagtacaaacagggaaccgaaacgatgaccacgggtga

SEQ ID NO: 186570 - DNA, 267 bp, Klebsiella oxytoca
atgtccaaaggctttgtattgattggtgataaaaccacgcatggcggccaggtcatttctgcctcatcaacaatggtagtaaatggaaaaaatgttgccctcgtgggtgataaggtcagttgcccaatagtggggcatggcattaatgccattattgaaggatcgcctgaatggacctctgacggtaaagccgtggttgtggatggttgccactgtgaatgcggttgtcaggtgatctccagtgcactggattgtgtaataggataa

SEQ ID NO: 186571 - DNA, 567 bp, Klebsiella oxytoca
atgaaaccattttatgtattagtgttattttttacctccgctctgtgttttgctgaaactgtcactatagatccaacatcaacaactaaagcagacgatgcaaatacaatagccaatatgtatcgtatgggcatgggtgttccgaaggatatgaaaaaagcatttgaactctatcaggttgctgctgaactcggaaacacggatgctcaggttgatttgggtgatatgtattactatgggaaagaaaccactcagagctacgaaaaggccaattactggtatgagaaggctgcaaaaaataatagtgccaaagctcagatgtatttaggttacgcataccttaatggtaagggcgtcgctgtggattatgataaagccaaaagttttcttgagcttgcagttaaacaaggcgatccttcagccatgaatcatttaggtacgatgtattatgatggtaaaggaattgctgtaaatagaagaaaggccatcccactattccaaaaaagctgcgctgcaggtgattctaatgcgtgtgataagttaaaagaaattaatatagagaaataa

SEQ ID NO: 186572 - DNA, 648 bp, Klebsiella oxytoca
atgaaatcaatcaccagaataacttcggttttattacttttgggttttgctaacgcctgtgccagtgaacaacctaacagtcttaaaaccccgtgggacaaatggtactttgcctttactactccaaaagctttaccagcacaggttacattgttaaaactgttggatgttgatggttatgcatcgacatatcggactatcgatcagccgcaagggatcagtgtaggtaaatggagtgaacgtaactctgcggggaacacccagtttaataaagccgacaggttgccacagataatgatattctgctgggactcaatcattgataaaaaggtttatcagtccactttattctttactcaggatacttggaataagatgacaacctcttatcctgatgtcttagaacctgggaaaaatgcatatcggcaaacgatgttaataggattagcaccggaaggaaaagtacggatctggttgagacaatatggccattcggatatcccattaaatgatacaaaaataacgacagtttccggtaaagaccttgacatgtgcaaaggtgaaacgaactttcctaatggatatgaatatagcgagggtataaagaaatttataaatggaaaaaaatacccttatggtaattggtaa

SEQ ID NO: 186573 - DNA, 249 bp, Klebsiella oxytoca
atgttgctgccgtatttagacgtactgatgcccgtttttatcgccagaaattatttttctctacccctctcgacagcaggaaaattttcgggttattttctaaacgtgctgcacatgcagcagcgtcgctcggacggtccgggcgctaacgttaatctgaggaatctatggctgaattcagtcctgaacgccgttttacgcgtatcgatcgtctccccccgtacgtttttaatatcactgctgaactaa

SEQ ID NO: 186574 - DNA, 645 bp, Klebsiella oxytoca
atgagccagcccgcgattaccctgtggtccgacgccgattttttctcgccatatgtgatgtccgtatacgttgccctgcaggaaaagagcctgccttttaccctgaaaaccgtcaacctcgacagcggcgaacatttgcaaagcggctggaaaggctacagcgcgacgcgtcgcgtaccgctgctggagatcggggagttcttcctgagtgaatcctccgcaattaccgaatatctggatgagcgctttgcgcccccggaatgggagcggctttacccgcatgacctgcaaaagcgcgcccgggcgcgtcaggtgcaggcctggctgcgtagcgatttaatgccgattcgcgaagagcgctccacggacgtggtctttgccgcagcaaagaaacctccgctcagcgaagccgggaaaaaaagcgccgacaagctgtttgaaacggctggcgttttgctgtcccatggcgggcagaatctatttggcgaatggtccattgccgataccgacctggcgctgatgcttaatcgcctggtcctgaacggcgatgaggttcccgccgcgctggtggattacgccaccttccagtggcagcgggcgtcggttcagcgctacgtcgcactctcagccaaacgcgcgggctga

SEQ ID NO: 186575 - DNA, 288 bp, Klebsiella oxytoca
atgatcatcatcggcttccttatttatggtccagtgatgctgattggcctgcatgcgctggagctggcgccgaaaaaagccgccggcaccgccgcgggcttcaccgggctgtttggctatctcggcggctccgtggccgcgagcgccatcgttggctataccgtcgatttcttcggctgggacggtggctttatggtgatgatcggcggcagcgtgctggcggtcctgctgctgattatcgtgatgctgggtgaacgacgccatcaccaacagatgaaacaagcttaa

SEQ ID NO: 186576 - DNA, 1644 bp, Klebsiella oxytoca
atggaacttcttcttcttgtctggcgtcagtatcgctggccctttatctccgtcattgccctgtgcctgctgagcgcggtgctgggtattgggcttatcgccttcattaacctgcgcctgataacccttgtcgatacctccctgacggtcctgccggagtttctcggtctgttattgctgttgatggcggtcaccctcggctcgcagctggcgctgaccacgcttggccaccatttcgtttaccgcctgcgcggcgaatttattaagcgcattctggatacgcaaatcgagaagatcgagaaaatcggcagcgcgtcgctgctggccgggttaaccagcgatatccgtaatatcaccattgccttcgtgcgcctgccggagctggtgcagggaattattctgacctttggctccgccgcttatctggcctggctgtcaggaaaaatgatgctggttaccgccctgtggctggcgttgacaatctggggcggatttatactggtatcgcgggtttataagcatatggcgtcgctgcgcgaaagcgaagataagctgtatcacgactaccagacggtgctcgaaggtcgcaaagagcttactctcaatcgcgagcgcgccgaatatgtgtttaatcagctttatctgccggatgcgcgagaataccggcaccatattgtgcgcgccgataccttccatctgagcgcggtcaactggtcgaatattatgatgctgggcgcgattggcctggttttctggatggccaacagcctgggctgggccgatacggcggtggcggcgacctactcgttgaccctattattcctgcgcacgccgctgctctcggcggtaggcgcgctgcccactctgctcagcgcgcaggtggcattcaacaagctgaataagttttcgctcgcgccgtaccgcgctgagttcccgcagccgcaggcgcatccccactggcagacgctcgagctgcgcgacatcaccttccattatcctgacaacagttttgcggtcgggccgatcaacatgaccctcaagcgtggcgaactggtctttctgatcggcggtaacggtagcgggaaatcgacgctggctatgctgttgaccggtttgtatcagcccctttccgggcagatcctggtcgacgggcagccgatggcggcggataagccggaagattaccgcaagctgttctcggcggtgtttaccgacgtctggctgtttgacagactgctggggccggaagggaaggcggctgacccggcgctggtggagaagtggctgggttatctgcagatgaacgataagctacggctcgacgatggcaaaatcctcgacctgaagctctcaaaagggcagaaaaagcgcgtggcgctgctgctggcgttagcggaagacagagatatcatcatgcttgatgaatgggcggcggatcaggacccccatttccgccgtgagttctatcaggtgctgctgccgctgatgaaggagatgggtaaaaccctctttgctattagccatgacgatcactactttcagcacgccgacaggctgctggaaatgcgcggcggccagctgtctgagctgaccggaaatgagcgcgagctggcgacccgcgacgcggtcgcccgtaccgcctga

SEQ ID NO: 186577 - DNA, 423 bp, Klebsiella oxytoca
atgaaagtgaaaaaggttttactggttgtgtcgctggcggtttcttcgctattggcaggttgcacttctgagtcacagcgtttggcgaactgcgaagccagggggatttcccgcgatacctgctacttagcggagcaaaatcgtcaggcctcaatgaatgcagcttatgagaagcaggcgttagaaaacgccgccgctgccgttcagcatagtcagagcgcgaaggtgaacacccggcactttaacggcatggagattaaaggcaccagtaccggcttaagcattgatggtaaagcggcggcggtgattgagaaaaataaagacgcgaccgtttaccagcaggggctttacaactttattgtttacgccaacggtaaaattgccgtcactcaggacggcgtgtttaaaggctacgccaaataa

SEQ ID NO: 186578 - DNA, 3051 bp, Klebsiella oxytoca
atggagctcagtcgcaggcagttctttcgcatctgcgcgggtggtatggcagggacgaccgtagcatcgcttggttttcttccctcgttttccgctcacgcagagacgcgtcaatataaactcttaaaagctaaagaaacccgtaataactgcacctactgttcagtcggctgcgggatcctcatgtacagcttcggagataacgccaaaaacgtgcgtgaacgcatttatcacgtcgaaggcgaccccgatcatcccgtgagccgcgggtcgctgtgcccaaaaggcgcaggcgtactggactatattcacagcgataaccgattacgctatccggagtaccgcgcgccgggctcggataagtggacgcgtataagctgggatgaggccatcgatcgtatcgcgcgattgatgaaagatgaccgcgacgccaactttatcgaaaagaatgcccagggcgtcaccgtcaaccgctggacctcaaccagcatgctgtgctcttcggcggcgagtaatgaaaccgggatccttgacggtaaatttacccgcgcgctggggatggtatcgattgactgccaggcgcgcctttgccacggcccgacggtatcggcgctggcgccaacctttggtcgtggggcgatgaccaacaactgggtggatattaaaaacgccaatgtggtgctgattatgggcggcaacgcggcggaagcgcatccggtagggttcaaatgggttatcgaagccaaaattaaaaataatgcgaccgttatcgtcgttgatccgcgctttaaccgcagcgcggcggtggctgacctgtacgcgcccattcgcgccggctccgacagcgctttcctgctcggcgcgatccgctatctgatcgaacacgatcggatacagcatgagtacgtgcgtcactacaccaacgccagcatgatcgtgcgggaagattatgatttcgacgaggggctgtttagcggctttgatccgcagaagcgtcagtacgataaagtcagctggaactatgaactcgacgctaacggctacgccaggcgcgatgatacgtggaaccatccgcgctgcgtctggaatctattgaaacagcacgttgagcgctatacgccggaacttgtcaaccgcctgtgcggcacctctttacacgattttcagcgcatttgcgaactgttagccagcaccagcgctgcgaatcgaaccgcgacaatcctgtatgccctcggttggacccatcacaccaccggagcgcaaactatccgcgcggccgcgatgctacagctgctgttgggcaatatcggcatggcaggcggcggcgttaacgcgctgcgcgggcactccaatattcagggctataccgacctgggactgctttcgaccaatctgccgggatatatgccgctaccgtcggaaaaacaggttgattatcagagctatatttcacaaatcacccccgcggcgctgggcgtgaacgaagtgaattactggcaaaatacgccgaagtttttcgtcagcatgatgaaaagcttctggggcgatgccgcaaccgcggaaaacagctggggctatgactggctgccgaaatgggatcgtttatacgatgtcatgacccaggccgagctgatggcccagggcaaaatcaacggctacgtggtgcagggatttaacccgctggcggcgttcccggataaaaacaaatccgcccgcgcgctggcgaagcttaaatatctggtggtgatcgatccgctggtgaccgagtcgtcgaatttctggcagaaccacggcgaaatgaacgacgtgcgtcctgcagatatccagaccgaagtcttccgcctgccgtcctcctgcttcgccgaagagaacggttcgatcgctaattcgggccgctggctgcagtggcactgggcggcggccgaaccgccgggcgaagcgctccacgatggcaaaattctcggtcgcctgtttatgcgcctgcgcgatctgtatcggcaagagggcggcgcaaacccggcgccggtgctgaatatgtcctgggattatcacgatcccctcgacccgcagccggaagaggtcgccagggaggccaacggcaaggcgctgcgcgatatcgttgacgagcagggccgggtggttatcaaaaaaggccagcagctgagcagcttcgcgcagctaaaagatgacggttcaaccagcagctactgctgggtttattgcggctgctggaccgagcagggcaatcagatggcgaaccgcgataatagcgacccgtatggtttaggctgtacacccggctgggcatggtcctggccggcgaaccgccgcatcctctacaaccgcgcctccgcggacccggcgggtaaaccctgggatccgcagcgctcgctgctgaactgggacggcaaacgctggaccggtatggacgtcgccgactatagccaggcggcgccgggcaccaacgtcgggccgtttatcatgaatccggaaggcgtggcgcgcctgttctcgctggacaaactaaacgatggcccgttcccggaacactatgagcctgtcgaatcgccgattggcactaacccgctgcacccgaaagtggtctccagcccggtagcgcgcatctttcacgatgacctggcgaatatgggcaaggcggatgagttcccctacgtggcgacaacctactcgatcacagaactgttccgtcactggaccaagcatgcgcagctgaacgccatcgttcagcccgagcagtttgttgaaattggcgagtcgttggcgaaggaaaagggcatcgtcgcgggggacacggtaaaagtgatgtcgaagcgcgggtttattaaagccaaagcggtagtgactaagcgaatacaggcgctgactattgatggccgtacggtgaataccatcggtattccgtgccactggggttttgagggggcgacgcggaaaggattcctggccaatacgctgacgccatcggtgggggacgcgaactcgcagacgcctgaatataaagctttcctcgtgaacgtggaaaaggcgtaa

SEQ ID NO: 186579 - DNA, 147 bp, Klebsiella oxytoca
atgttttttaacaacataaaaatgtgcgcccgtatcggcccgcagtcctcacaaagaaaccggaacggcgccggcgggaaagcgtatttccgccgtaaaagaaaaatcatgcaggtgaagaaaaagaaatttaaaagacgaaaatga

SEQ ID NO: 186580 - DNA, 246 bp, Klebsiella oxytoca
atgactgaagctgtactgctgggtgaaggcttcaccctgatgttcctcggcatggggttcgtgctggcgtttctgtttctgctgattttcgccatccgcggcatgtccgccgccgtcaaccgcgtcttcccggaaccggctcccgcgctgaaggccacacctgccgccgcgcccgctgacgacttcgcccgcttaaagccggtaattgtcgccgctattcaccaccatcgccgccttaacccttaa

SEQ ID NO: 186581 - DNA, 165 bp, Klebsiella oxytoca
atgggaaacctgctcttgcaggagattgaacctaaaacgaagaccgtgctttttgaagtgacgatgagctccggttattacaaaaatgagataaataatggcgaaggctatcgctatgacatcaccagttttcgggtgtacaaaatggaactctacccatattaa

SEQ ID NO: 186582 - DNA, 2067 bp, Klebsiella oxytoca
atggctaccagcaaattaattaagggtgatactctgactgaaaccagtaatgcagcagatggtttttatcctgctactgaagacagtaagtatagctatacgtctgcccgcgtggcgcaaccggtatataacgtctataaagccgaagccgctaaaccgaaagtgtttggttactatacagactggtcacaatatgacggtcgcctccagggacaggacaccccaaataaccgcggtcggggttacgacctcgctagcgttgatccgctggcttacgacaaaattatttttggctttattggtattgttggtgataaaggtgagaagcaatacaccatcgaaaccgcggcggcgcagaccggtaaaaccactcatgagccgactttcctcgatccgtggggcgatttccagtcttatgtgaactgcaaccagtctaccagcggctgggatgtcgacccaatgaccgtcaccgaacaaactactcacggtattttaggcggtctgcgcgatctgcaggcgaaagcaaaacaactggggcatacgctggcgctgtctatgagcattggcggctggtccatgagtaacgccttccatgaaatggcgaaaaccgatgcggcgcgtaaaacgtttgctgctggggtggtaaaactgttcaaacagtttccgatgttcagcgaagtggatattgactgggaatacccgaacaatgcgggcaataacaacccgttcggtccggaagatggcgataactatgcgctgcttatcaaagagctaaaaaaacagctggatgcagcgggccgcagcgacgttaaaatttctatcgccagctccgccgtcgttcagacgctgggttattccaacgtcaaagcgctgctggaggccggtctatatggcatcaatgtgatgacctatgacttcttcggcaccccatgggcggaaacgctgactcatcacaccaacctctctccgctgaccgcaggtgggtggagcattgaaacggttgttgattatctgatcggcgaaggcttcccggctgaccgcatcaacgtaggctacgctggctatacccgcaacggccgtaacgtcgagattgagagcttctctccgctgaaaggcacctacaacccaggtgaaggtaccactaccggctcgtttgaatccggttgcaccgaatggtacgacaccatttataactatctggatctggaaaatcagaaaggacgcaacggcttcaacgtctataccgataaagtcgctaatgctgattatctctataacccgcagtcaaaactgttcatgtcgctggatacgccgcgtaccgtgaaagctaaaggggaatatgcagcgaaacgggggctgggcggcctgtttacctggaccatcgaccaggataacggcgtgctgataaatgcggcgcgtgaaggtctgggttaccagatgagtaaagaagtcatcaatatggagccgttctactttgaaggtatcaacgtcgatccggctgataatgatgacgatagcgataaggtcaaccatgcgccaaaagcggcgattgaactgctcgttgttggcggctcccgcgtgcagctgtcaggctcaggctccacggatgaagaccatgatgcactgagcttcagctggggcgtaccggcagcgattgacgtcgctgataaaacggcacaagtgattgagtttgtaacgcctgtagtgacagtagccaccgacttccagttcaccctgtttgtccgtgacgttcacaatgagccgtccactcagcagcgctttgtactgacggtcgtacctgcggcaagcagcgttgatccggaaccgactcctgagccgaccccggaaccgactcctgagccaaccccggaacctgatgactccacgacgccgtacccgctgtgggatgcgaataccgtctatggcgcaaactggggcactttcgagatcgtgagctggaaaggccacaactaccaggtgaactggtggtctcagggcaatcagccggatctgaactgcggcgcgggtaagacctggaccgacctcggcgcatactcatctctttaa

SEQ ID NO: 186583 - DNA, 132 bp, Klebsiella oxytoca
atgcttagaagctgtgatgcaaccaataaacttgcaaggaaaaagatgaatattaaaaatgaaatatggaataagaaaaaactgattactaatattctagacgctatctcacacacggataaaaggacatga

SEQ ID NO: 186584 - DNA, 423 bp, Klebsiella oxytoca
atgattgtgaaaacatacatcatcaatgacgattgcattttcaatgagcggaaatatgaattaagaaatgtctctaactcattagtcatcagaatgaccgcaatgcgtgccagatgtttaagcttcattattgaacatgcgcaggaagaggtaattggcaggcaggaactgactacagcgctgtggggaagccggggaaattatgttaatgatgccaacctgacgcagctcctctatctcattcgcaaagatctcaaaactttcggtatcaatgatctgttgattactattccccgcaagggcatccaggttaacgatcaaatctccattgcagcggcagattcagagaccagcacaaaaccagagttgtctatcatgctcttttgcaaaaaaatccaggccctcttcttctctcgtggataa

SEQ ID NO: 186585 - DNA, 534 bp, Klebsiella oxytoca
atgaacccaattcttgacggcatcctcacccttgaaggtgactacgttaatcatccgaaagacctaggcggggaaacccactggggaatcactgaagcggccgcccgcgcaaacgattacgtaggcgatatgaaagaactaacgcgcgctgaggcgtataccattcttgaaaagatgtactggattaagcccgggtttgagaaaatttcccgaatctcatgggccgtgtcgtttgaattatgcgatgccgcagttaatatcggcccgcattatccctgcacctggttacagcgctggctgaacgctttaaatcgagagcagagtttttatcaggatattgaagccgatgggattattgggaaaaagactctggagatgctgagcgctttcctcaacatacgaggtaaagagggtgagaaggttctactgaaggctcttaactgcagccagggcgcttattatctcagtattactgagagccggtcagcaaatgaagaatttatctatggctggctaaaaaatcgagttacatga

SEQ ID NO: 186586 - DNA, 348 bp, Klebsiella oxytoca
atgtcagttcccgctcagattgaaacgccgaaggcgatactgcttgaaatggaaattatttttaccgtcatcgctaccggtgcatgggggggcttcgtcagctatttgatgaagtcaaacaccagtaaagccaatcatttgcacaaaggtattatcagttgcctggcgcaaattgttatttcctgttttaccagctttctggttagcgccgtcgccattgaaaaaggcttaagccttaatatgattttacttttttccggtatcggtggggtattcgctgttcctatattaaaaatcgtgggggcaaaagttcgccagatgttaaatagtaatgatttacttaaataa

SEQ ID NO: 186587 - DNA, 948 bp, Klebsiella oxytoca
gtgaacgcaagaaatcttaaaaaagattttgattataatctggtgaaagtactggatgccgttatatcggcaggaaatgtgacaaaagcatcaaaaaaattatccgtaacaccggcggctgtttccattgcgctaaccagactgcagcttttttataatgaggaactttttgtcaggggtaaaaacgggctgatcccgacggtgaaagcgctggaagtacaccagaattttcgtcaggtcatcgacctcgtcaggatggcgttaactccagagcgtaagcatcaggaggagaaccgaatcactattcttggcggtgacattaccgaaaactattatctttcacagctttacgatgaaaaagtattcgaccgctttctgttcgggcatttttctaaccgaaacagagataatgaggagatgaagaggttactcatctccggcgattgcgatctcgcgataagcactgaagcgatcaacaatgaggcgtttgagagccgatttatcgacagctttaaagatttttgttgtatctgtagtgaagataatttgttgagcgaactgccacagctatccttgcataattttttttcttcccgtcatgccgtctatcaaactagtttattctccccaatgatgattaatgacgaaaacttatatgacagcgaggttgcttaccagggccacagactgaaagggtataagagtgattccatcaccggtatcatcagcattgtggagcgcacctcgctgatcgcgttaatgccagttaagcttgcgacattttataaaaataaccgaaattataatattaatattatccaaccgcctggcgagatgacgtttaaacccattaatatttatgcttactggcataaaaagaatcgtaagagtcagaatattgaagaagtggtgacaatgctgcatacgctctcggcatttcgtcgttga

SEQ ID NO: 186588 - DNA, 543 bp, Klebsiella oxytoca
atgagtatatatccccgtttattccttcacatttctggcgacgcagcgaagaggagtatctggtcgccaaatatcagtgatagccgggagcgggtgttgctttccagcgattattgccctaagagtaaaagaccgaaggttatgaggataaacattatgctcctggagacacttaaaggactcgaatgttctcttcatggcgacaagcgcaaagagcgggaatggcttgagcagatacttcatgaggaatttagagaaataacgcgatcgggtgtgctagttgatcgtgcagaaacaatagaggcactttcgactgaagaaaatgttccgccccttctcagtcgcgatttcagacttatcagcgttagagataatttcgcaatattacattacaggacttttcatcaagatggcagctgtgcatctcttcgttcctcatgctgggaaatgtcagagaatgaccaatggaaaatggtattccatcagggtactccgacgtcaaatggcaagaagcggacactatcgctggataatgtccaataa

SEQ ID NO: 186589 - DNA, 246 bp, Klebsiella oxytoca
atgactgcaacaacgcaaccgctaacacaacagtgccacaatagttttaccctggcacggcattgggtcagcgcagccaatgtcattttcctgtttgcaagcgcacatatccgggagccgctggagcggggaacgcccctgaaaaaaaaacggcgggccggtgatatttgctgcgcgcttttccctcactatctgctacgggacagcataccgcgtcgtatgctgtcctaccgttcttttcgttaa

SEQ ID NO: 186590 - DNA, 549 bp, Klebsiella oxytoca
atgaacacgttgtcgtttttacattccgtcattaatcaacgtctgctgctgcccgtggtatttgctctgctgaccacgccggttttggccgcaggtgacaatagtaccaatagcaaaacgccggactgccccagcggtcaggtgtatgacagcacgaaaaaacagtgcgtacctgaaaaaactagccagctcagcgatgaagacaaaacgcgttatgcctatcatctggccaaaaaaggggagtaccaggcggccctggatctgctcaacaccctgaaaaatggcgataccgcggaagcctggaattaccggggctatgccacgcgtaagctgggccgtaccgatgagggcattggctactatcagcgttcaatcgcgctcgatccgacctatgccaaagtacgtgaatacctgggtgaagcatggctggcgaaaggccgtcctgacctggcaaaagaacaattgaaaactatcgccacgctgtgcggccatagctgcgaggagtaccgggatcttcaggcagcgatcgacggtcatcctgagtcctga

SEQ ID NO: 186591 - DNA, 456 bp, Klebsiella oxytoca
atgggctggttctgttgcataaccgagaggttgtcgaagaactggttcattctgcctgtgtccgcgcgcttgaaaaaagcgcgcggttcaccctggcacacgtatagaccgctggttattcacaattctgcattccatctggatttcagaagtgcgcgcccgctgggtgcgtcagggacggggggcgtcgaaagcgatgatttactgacgccggacgcagatcaacaggatgaggctcgtctgcgcaatacgaaaattatgcagcacgtaagcgctttgccggaagcgcagcgtgagtcggtatttttagtctatgttgaaggatttacctggctggaggcgaccgacacgttgtccgtcccgattggcaccatcatgagctggctggctacagagagggcgaaaatcgccctggttgttcacgcgccgtcccctgtagaggagaagcaatattga

SEQ ID NO: 186592 - DNA, 588 bp, Klebsiella oxytoca
atgagtttaattttggcaatgtttatgttcgctctgacgatgtcaatttcgccaggtccggtgaatatggttattatatcatcgggggcgaaccatggatttagaaaaacgctcccctttatttcaggtgctactacaggatttactttattacttatactcgtcggttttggcttctacgccgtaatcgataagtatccacttttctttaactatctcaatatcgccggttcagcatttattatatatttgggttataagatagcggcatccgcacctgagttatctctgaaaaaaaacgataccccaggtttcgttcagggttttttactccagtggctcaaccctaaagcctggatcgcctgtgcatccggggtggcgctattttctgaaccagcaacccaaactatgctgatggtctttatcattatctactttttagtatgttacatctctttagccgcatgggcagtgcttggcaataacgtgtcaattttactaaataatgctcagcggatccgtgtttttaacgtgctgatgggggtattactgatcgtgaccgcgtgctatatgctctctttccaatga

SEQ ID NO: 186593 - DNA, 897 bp, Klebsiella oxytoca
atgatcgatgacatccgttacctgattgtttttgcgaaaattgtagaggcaggatcaatttcaggtggtgcagatgctttaggactgactaccgcgacggcaagcacgcatctctctaagcttgagcgaaatcttggcagcgcgttgctctacagaaatacccgcaagctctccctgactcacgatggcgcaagtttgctcgagacagcaaatgctatgctcgagctctatgaaaagggatttattgaatttaaacagcgtaccatttcaacaaccaataaactgcatatctctctccctgccgtttttcaaaatagtgtatttacgcaccatcttgccgcttttataaaagaatatccggatgtttttctgaatatttcctatagcgatacgcgtaaagatatcattgcagaaagtattgatgtggcatttcgcattggcgatctgccggacagctcactcaaagcacggcatctttttgtgttgccgcgaaaagtggtggcatcaaagcaattgttacgcaattacaaacctgtcaaccaccctgatgatttagcaaaaatgccctggattggtctgactatgcgacagaacagccgagagttcagacatactaatggagaagtggcgatcataaagtacaccccaacggtttacgttgataatgtcgaagcggcctatgcgctggcaaaacaacaggtagggttagttgctcctccagtctatctcagtaaagaggatattcagcgcgaagagatgcaggaggtactccccgactggtcattagaaccactgaaagtttatgccatttggccctccaatatctcgaccagcagtatcgcctataccttaatcaataaaatttaccacgcttttgagcatcatattttagattaa

SEQ ID NO: 186594 - DNA, 495 bp, Klebsiella oxytoca
atgcacacggagaccaaaatgatcgagagagagcatcactaccaggtgaacgttaaatggacgggaaataaaggtaatggcacgcagtcttacaaagactatgagcgaagttatgagatttcagggggcggaaaacctgtaattttggggtcatcagaccccgcatttctgggcgatgccaaatgttggaatccggaggacctgctcgttgctgttgcttcagcatgccataaattatggtatctgcatctctgctcggaagcagggataagcgttataagctatgttgaccgagcacatggaacgatgcgcgaagggaaaaaaggatgtttcaccgatattactttaaaacctgaaataacgatacgtcccggagatgacatcaatcgagcgcaggctctccatcaccgcgcgcatgatctttgtttcattgcaaattcccttaatttcccgattacatgccagccagttattactcacagccaaaatggctaa

SEQ ID NO: 186595 - DNA, 648 bp, Klebsiella oxytoca
atgagctttagagctgtttcaaccgcagacttactcgctaataagttaagagaaatgattaacaacggtagtcttcgtgatggtgaaaggcttgtcgaaagagaccttgcaagtcactttgatgtaagccgtattccaatgcgggaggcgatcagacaacttgaacatgaggggctggtggagatttttagaaatcgcggagcaattgtcagaacgttatctgttgatgatcttaatgaaatttaccagctgcgttctctgctcgagggcgaagcaatatttcagagcgtcaataatttgagtgctgataatctggcgagagcggggctgacgcacagtcttcttgcttcatgtaccaaattcgaacggcaagggcaactaaaccgtgagtttcatgatcttctctatagcgggtgcgaaaatcatcgtctactgaccatgattaatgattctcgcaatcagattgagcggtatgaatacctccagcgaaagctactctctgagacatccctgtttcaggatgaccacgcgagtattcttattgcctgccagcaacgaaacgccgaacaagcgcgaactgaagttaagcgacatattcagattgccggaaaaatgttgcaagacctggtaagtagacaaataagttaa

SEQ ID NO: 186596 - DNA, 984 bp, Klebsiella oxytoca
atgaatactgccgcctccattgcccttttgagcgcttgcccatttgtgagtctggcggcagtgccggtgaccttttccgaaactgtcctggaggccgctgggccgaaaggtcctttgaagggtacgttactcaccccaaattctaaaccaaccgcggttgttcttatcattcctggctccgggccgaccgatcgggatggaaacaacccgcttggtgtgaatgcatcgccttaccgacttcttgctgaaggtctggcggcaaaaggctttgcaacgcttcgtatcgacaaacgtggaatgttcgctagcgcaatggccgtagaggatggcaatgcggtgacgatggctgactatgttgacgacgttcgatcctgggtagaagtgcttagacgccagatgcacgcttcctgtatttgggttttaggacacagcgaaggaggcgtagtcgcccttgcctcggctcaagaagaggatctgtgcggggtggttcttattgcaacgcccgggaggccgatgggcgaggtgttgagggggcaactttacgctaatccggaaaacgaagtgctattaaagcaggcactgccgatcattgatgctctcgagcatcggcgccgggtagatatttcgaacatgcatccagcactgcaaaatctctttaatcctggggtgcagggatttttgatcaatgcgttttcatataatccgggtcagctcatttcgcgtatttccaaacccgtgttagtgctacaagggctacgcgatcttcaggtggaagaaacggatgcaagactgcttaaggccgcgaatcctcaagcgtccttaattatactgcccgatatgaaccatgttatgaaggaggtgacttcggacgatatcaaggcgaatatcgcttcatacgctgaaccagcgctccccttagctcccggtttaatcgactcaattgagcatttcctcatccacaactcaccttttcccgaaaagtaa

SEQ ID NO: 186597 - DNA, 1695 bp, Klebsiella oxytoca
atgagtaacgcaataactaaagtccacaacgccaatgcacgtcgtggcggtgatgtattgttagaagttctggaaagtgaaggggtggaatatgtgtttggtaatccaggcacaaccgaactgcccttcatggatgcgctgttaagaaaaccgtcaattcagtacgtgttagctctgcaggaagcgagcgcagtagccatggcggacggttatgcgcaggcagcaaaaaaaccaggattcctgaatctgcataccgccggtggtttaggccacggcatgggaaacctgttgaatgcaaaatgttcacagacgccactcgtggtgacagcggggcagcaggatttacgccacacgacagccgatccgctattgttgggtgatctggtgggaatgggtaaaacgttcgctaaatggtcacaggaggtgactcacgttgaccagctaccggtattagttcgccgggctttccacgattcagacgctgcaccgaaaggctccgttttcctgtcgcttccgatggatgtaatggaggcgatgagttctatcgggatcggggcgccttctactattgaccgcaatgcagtcgcgggttcgttacctttgctggcaagtaagctggcggcatttactccaggtaaagtcgcactgattgccggcgacgaaatttaccaaagtggagcggccagcgaggttgttgctcttgctgagatgcttgccgctgacgtatacggttcaacatggccaaacaggatcccctacccaacagcacaccctctctggcggggcaatctgtccactaaagcgacggaaattaacagagcattaggccagtacgatgctattttcgcacttggtggtaagtcgcttatcaccattctttatacagaaggtcaggcagtaccggagcagtgtaaagtgttccagttatcagccgatgcgggcgacctgggacgcacctacagtagtgaactctcagtggttggcgctattaaatcatcgttaatggtgctactgcccgagctggaaaaagccacggcaaactatcgaagtgattatcaacgtcgttttgaaagcgcggttaatgagtttgaattgagcagagatagtctgctagagcaggttaaggaacaacaatctgctacggtaattacgccactcgtggctgcctttgaggccgcaagggcgatcggacccgatgtggcaattgttgacgaagcgattgcaaccagcggctcgcttcgtaaatcactcaacagtccccgcgcggatcaatatgcctttttacgcggcggtggtctggggtgggggatgcctgcagctgtgggctattcactcggtttgggaagagcgcctgtggtgtgctttgtgggcgacggcgctgcgatgtactctcctcaggctctctggacggccgcacatgaaaaactgccggtaacctttattgtaatgaataacacggaatataacgtattgaaaaacttcatgcgttcacaggcggattatacttcggcacaaacagaacgctttatcgcaatggatttggttaatccggcagttgattatcaggcgctgggtgcatcgatgggactggaaaccagaaaagttcttcgtgccggggatatcgccccggcagttgaggccgcactggcgagtggcaaacctaatgtgatcgaaatcattatcagtaaaagttaa

SEQ ID NO: 186598 - DNA, 921 bp, Klebsiella oxytoca
atgaaaccgacccttaatcagttgattaacttttgcactgttgctgaaaccggaaacatcggcaaagccgccaataaactcaatatttcgcagccccccttaagccggcaaattgcccagctggaaaccatcctcggtgcaaagctatttaaccgggccgctaaaggtgtcagtttaacccttgccggagagcaatttctggtagactgccaggcggtgctggcaatgctggagcaggcctgtaataacgtacgggcagtagaatcagggcagaaaggtgttctgaaattaggtgcaacaatgtatgccagctatagcgttgtgcctcatgttgccatacagcaccgggatacctattctgatgtggaattgcattttcaggagatggtcccctctgatttacacgccgcattacaggatggcagattagacgcggcaatcagcttctccgagacggccactccgggaattcattcactggtgctcttgcgtgagccgctaatcgccgcccttcctgccaatcacccccaggttcaaagcgagcatttcaggcttgaatcactcagtgatgacccgttcatcactgttccgcgccagagtgcaccgatgctctatgattccatccttcatcagtgcctcaaggccgggtttagcccgaaaataggactggaagcctccatacagcagactgtaatgaattttgtggcccatggcgttggcgtggcgcttattcccgcaagtatggagaatgcccaattgcgtggtgtagtttaccggaggctggaaaatccgaatatggtggagaatatgctgatgtggtcgacaaagaacaaaaacccggctttaccgggttttgtgaaccagtgccgcagtatcagggataaactgcatgcaccgcaggccgaacggattaataattaa

SEQ ID NO: 186599 - DNA, 342 bp, Klebsiella oxytoca
atgaatatcgaggcatttgcttttagcaccaccagttggggtgaagtcgaaaaaacagaacatccaggggaaacaggcatggcctactggcgcacccaattttttggcgacaagccgaaccaaatccgtgtgcgaatggttgaatatactccaggttaccttgcggatcattggtgcagtaaaggtcatgtccttttatgcatggagggagagctcgaaacactgctcgcagatggccgtaaattcactttaactgcgggaatgagttatcaggtgggtgataacgcagaaccacatcagtccagaacggagactggagcaaaactctttatagtggactga

SEQ ID NO: 186600 - DNA, 618 bp, Klebsiella oxytoca
atgactgaaaaacactggtcaagaatggaatatctgcatcaaaccgtcactaaccctaatattcatataaaaggcactcacagctattacagtgactattgggatcaaggattcgagcgttccgtcgtgagatatttgcttggggacgagttcagtcgcgactgggagccacttggtagactcgataaattatatattggcaattttgtttgtattggcgccgagagcgtgatccttatggggggaaacagtacgcatcgtatggactggatcagcctttacccgttcatggaatcaataaaagaagcctacgtcagccgtggtgacaccatactgggcgatggctgctggctgggaatgcgggcgatgattatgcctggtgtgactattggtgaaggtgctgtggttgccgccggcgctgtggtaacgaaaaatgtaccaccctatgcggttgtcggcggcaacccggctagattgattaaataccgttttcctgaagacgagattacccgaatattggcactgaagttatacgaccttccggaagaaaaactggtcgccattcagccattattgtcgtcgggtgaaatcacttcactagaaaataatttacgataa

SEQ ID NO: 186601 - DNA, 1413 bp, Klebsiella oxytoca
atgaaaaaactgaatctcattgctcaggcgatgttactgaccggcgctctgagtgcttccaccatcgcggttgccaatccaggtggctatcaggatcctattctgacaatgcagggcacgccggatgtcatcaaaaaaggactggatgtggatggttacagctcagcggtctccgcgtggaactggggataccccatcgttcgcatggagcaggttgcccgcgagtacaccaatgtgccttcaccgaagccggcaaccagctatcgcgccccactgaaccagattggttgggcgaccgagctcgccacaccagccgcaaaagatatgccgacagcgaataacgatacgctgtacatgagctcggttattcagcttaatgaaccttatgttctgaccgtgccggacttacatgaccgctactatgttgttgatgtgttcaacatgtggcaggagcttgagcattatatcggacgccgtgctaccggcacgaaagcaggcaagtttgtgttcgttccgccgggctggaaaggcaagctgcctgcagatgccacggcattgtatgtgtctaccaataaaatctggctgtggggtcgcatgcgtgtgagcgagggcgagaacatgaccccaattcatgaacttcagaaagcgttcaaactacagtcactgagcggtaaggtttaccatgacacgctgccgccgatgccagcactgaaaaatgacggactggatttcttacgccaactgagctttgcgatgcagagcaaccccgtcaagccgcaggataaaggactgttcggtcagttcagtcgaatgggactgacggataaagagtttgacgagcggaatatctctccggccgttctggaaggtgtgaaacgtggacttcaggatgcaccaaatgttgcagtttccaccctggtcagcacctcacaggtgcgagatggctggagttatgtcagagggttagatgattttggctataactatccgctgcgttctctggtggccggcccctacctcggcggtcagggggaaaaagaagctgtttacccgattcgttacaatgacaaggataacaacccgctttccggccagaatacctacactattaatcttgttacccagcctcctgttaacgccttttggtcgataacaatgtacgatgcggataccaaaatgcttgtggaaaatccggtcaatcgctacaaggtcgggtctgatacaaaggggctggcgaaagagaaggatggcagcctgaagattgttatttcccatgaaaaaccaaccggtaaagatgtcaactggctgcctgcaccagagcataatttctacctgttgttccgtatgtaccagccgaaagaagcggtgatggatggttcatggaaactgccagaagttgtgaaagataactga

SEQ ID NO: 186602 - DNA, 1518 bp, Klebsiella oxytoca
atgccaataacacgcagggacttttataaactggcgctgggctccgtcgttggccttgcggtactaaaggacaacccaacagcggttgctcagagtatttccctgaagaagccccttccctatggcgcagggcaaaaaggggaaactgcaggtggtttaccaccggaaggttcgcgcagttcagtggatgattttgactatcagataaagtatcagcgcgcttttgaggccgtgctctggaatatgcccgctgcagccatttacagttttcggcgggcagcgttcgataatttaggtctgaaagataacgatattattgcctattcagagccagccaccccacatctggaagctattacagcaaacagtaccactccgtacatcacagcatttaccgatctgcaaaaaggtccggttgttctggaagttcctgaagcgggtagtgacggcagtttgtatggtcagattgtcgatgcctggcaattaaccattgcggatgttggtccggcagggttagataaaggtaacgggggaaaatatttactcactccgccagggtataagggcactatccccgagaattatctgcatgtcccttctccaaatttccgcatcgctttcgcgtttcgctctgtcccagtaaagggaaagtctatccaggatgcttatcactactctaaacgtctgcgcatgtatttcctgtccgaagcgggtcatcctccgacccagcgatttgtagatccgggaagtaaccgttacccgactttgccttactatgacgaacgccatttcagggatttacacgcagtggcaagcgttgaacccgtgcgggagcaagacaaagtgatgatgggtatgctggctaccctgggtattgaacgtggaaagccttttgcgcccgacgaaaaaaccacgaaagcgatgcgtcaggcggcgatcgacgcctggttctatatgcaatactggtttgataatttcccaaaagaaaaactattctggccagaccgccattacgcctcgttgctgctagcagatgacaacaacacattcagtttcgtttactctgatcgcattgatcttattaaccgggcagctgagtatttttggtgtacctatatgccaaaagctctcagcgattccccggcaacacagtacatgatgtgccttgctgacaacaaaggtcatcttcttgaggccggggagctctataaaattattgttccggccaaaatgcccgtgaaacagttctgggcgttgacggtttacaaccgcgacaccatgtcatttatttacagtgacactaaccgtaccactctgtcgtcctatgacctcgacaagatgagtaaaaaccacgatggtagcgtgactatctatgtcggtccagcagccccgaaaggcatggaaaataactggattccgaccagtggaaagcgtccactacccgccatgcgtttttatggcccaacagatgaactgaatagtaaaacgttcaagcttcctgatttcgaaaaagtctga

SEQ ID NO: 186603 - DNA, 387 bp, Klebsiella oxytoca
atggataatggcgtctggcgtcgcgtgatgcctctaaaggcgagaaagacgaaggtatgttttattttcctgtcgaacaagccggaccaggggattaacgtctttctggcgcaggctgacacggctaaagataatgattttagctatatgcgtaactatgtctgggggaacgagaactcgttttattttgataatgaaggcggctatgcctgtatctggaaaacggatattaaaaataaaacgacccagcgtatcttaccgattgaaggtatgattcagccttactacctgaactacaacaacgaggatatgatcgtcgcctcataccgctattattctgtacgaaataaaacgcatcattacgaaatttatatcgcgaagaaataa

SEQ ID NO: 186604 - DNA, 585 bp, Klebsiella oxytoca
atgtacatatttatgacagaaatacgcattggctatgcccgatgttcaactgaccgccaggatctggctgcacagcaggaagccctcgtcggtctgggcgtttccccggagcggatttataccgataagggactgaccggttcaaatcgccagcgtcccggtctggctcaggctctggcggcagttcgccagggagacacgctggtcgtaccgaaactggacaggctggcccgttcagttcaggatgcaggagatattgctgatgcccttcaggcccgtggcgtgaagctggcgctgggcaatagcctctacgaccctgcagatccgatgggtaagatgttctttaatgtgctggcgacgtttgccgagtttgaaggcgacctgatacgtcttcgcacgcgtgaagggatggctatcgcccgggctaaaggaaaactgcgggggaagcagccgaagctgtcagataaacagcagaaagagctttgcaggatgcacggaagcggcgagtactctatcagcgatctggttgaattattctccgtctcccgccccacggtctatcggacgctttcccgtgggaaataa

SEQ ID NO: 186605 - DNA, 318 bp, Klebsiella oxytoca
atggatagcccgttagtgatatctttcattatttttattgccgcagttggggttgggctgtggagtcagcattgcctgccccgtctttccgatagccgaaatatgctgtttattatttgtttttttctcggtctcggatccgccgcttcatgtctgtttcatctgctctatctgctgttggtcggccagcgcgcacagggcgatatcgccgcgttcggtacgcttattacgatagctgcattgtggaagccgctgaactatgtcaccggcaaggtggatgacgccgcaaataagcgtaagggaaagcggaacgagtag

SEQ ID NO: 186606 - DNA, 1047 bp, Klebsiella oxytoca
atgatgaattttagagcattactggcaattacgttactggcgataagcgctttcgcctcgagtgagacgcgtctgccgcatatcgtaatcctggcgaccggagggacgattgccggttcagcggccagcaatacccagactaccgggtacaaagccggcgcgattggcgtacagacgctgattaatgccgtgcctgagatgagcaaagtcgcccgcgttgacggcgagcaggtcgctaatatcggcagcgaaaatatgaccagcgacatcattctcaaactgtcaaagcgcgtcaatgaactgctggcacgcgatgatgtggacggcgttgtgattacccatggtaccgacaccctggacgagacgccttatttcctcaacctgacggtaaaaagcaataagccggtcgttttcacggcggcaatgcgtccggccacggccatcagcgccgacggtccgatgaatctgctggaagcggtgaccgtggcggccgacccggaagcgaagggccgcggcgttatggtagtgcttaatgaccgcatcggcgcggcgcgttttgtcactaagaccaacgccacgacgctggataccttcaaggcgccggaagagggctacctgggcgttatcgtgagcggcaaaccgcagttcgaaactcgcgtggataaaattcacaccgtgcgttcggtttttgacgtccgcaatcttaacgcgctaccgaaagtggtcattatttatggctatcaggatgaccctgaatatatgtatgacgcggcgattgcgcatcatgctgacgggattatctatgcgggcaccggcgcggggtcggtctccgtacgcagcgcggcggggatcgaaaaggcggaaaaagccggtatcgtggtggttcgcgcctcgcgtaccggtagcggcgtcgtgccggttgatgatggccagcctgggctggtagccgactcgctcaacccggcaaaagcgcgcatcctgctgatgacggcgctgacgcaaacgaaaaatccgcaggtgatccagcagtacttccacacctactga

SEQ ID NO: 186607 - DNA, 138 bp, Klebsiella oxytoca
atgtgcggacgctttgctcaatcacaaatccgtgaagtatatccgggctgcctggccgaagagtccgagtgcgatctcccctttaacccgtatcatgacaacgtggcgccgggtactaaagttttgctgctggggtag

SEQ ID NO: 186608 - DNA, 492 bp, Klebsiella oxytoca
atggctgatacgttccagaatgaggtgcccaaggcacgcattaatttaaagctggctctgcatactggaggcgtgcagaagaaagtcgagctgccgctgaaattcctcgccatcggtgatttcagtaatggcaaagaagaccggccattatcggaaagagcaaaaatcaacgtcaataaaaataacttcaacagcgtactttcggaattcagtccggaaatcagcctcacggtacagaacacgctggccggcgatggtgccgaagaaaatattcagctccgcttcgtcgatatgaaagatttcgaaccggagcaggtggcccgccaaatcccccagctccgcgccatgctggcgatgcggaatttattacgcgacctcaaatccaacctgcttaataacgccactttcagaaaagagctcgaaaaaatcctgaaagatccggcgctgacgcaggaattacgcgacgaaatgagcgcgctggccccgaaataa

SEQ ID NO: 186609 - DNA, 975 bp, Klebsiella oxytoca
atggataactggtcagcgtttttcgacggacagacccgatactttctggatatcaatgacagctcggtgaagccggatgttctgcgcttttacggcagggaagcactgagcgaacccttcagctgggacatcgagttcaccacgctgcaggcgaacatccccccggaagaggtgctgatgaaatatgcctctttccggatgcggagcggtaaaagtgtgcacggcatggtgacccgcctggaatggctttccacctcaaaggaccagtctcactaccggcttacgctcagttcgcgcctggcgctgctgggatacacccgacagtgcgcggtatatcagaatcagtccgttcctgaggtggttgagccggtgctgcgtaaacacggtctggaaggtcctgattttgaattcagactggagcgcacctacccgccgcgtgaaattatcacccagtggcgggaaacggaccttgagtttatccggcgcattctgtctgaggtgggaatttactggcgcacggagatggacgacgtgcgcggtctggatacgtacatttttgccgacagccagcttaactaccagtttgacgtgcgcctgccgtacagcgagccatcggggttgtttgacggcgcggcagagtcggtctggggcctgccatacaccgaacgttactgtttccgcctggcggaaatcttgcgtccggaaattcacggcacgcttccggcccggggtgagagccgggagaaaaacgatatctacgctcatcgggacgagcagggccgctaccgggtgaagctcgacttcgaccgggaggggacggaacccggttacgggtatctgtggctgcggatggcgaaaccgtatgccggtgaaacgctgggctggcatacgccgctcatcgatggcaccgaagtggcgattgcgtacagcaacggtgatattgacctgccgtaccggatgttgacagccagctag

SEQ ID NO: 186610 - DNA, 177 bp, Klebsiella oxytoca
atgtttgagcagcggctgaaactgcttaatgaagcggtgcttttctcggcgccggaagggatggcgctgaccagcggggagcatttgcagatgacggcgtcgaaaaacgttgccgttaacgccgtgggcgatatcagtgccggggtgatgggcaatcaccctttatgctcggcatga

SEQ ID NO: 186611 - DNA, 774 bp, Klebsiella oxytoca
atgagtctggatgcaacgatagaaaagaaaaaaggcgtgccaactcgatatttaatcctgctgatcattttcattgttaccgccgttaactatgccgaccgggcgacgttcccgaacgctggtgaggtagcgaaagagctgccgctgagcgcgatctcgatgagctatatcttctccgctttcggctgggcctacctgctgatgcggctctccggcggctggctgctcgataaatttggctcgaagaacgtctactcctgtagcctgttcttctggtcgttatttaccttcctgcaaggttttgtggatatgtttccgttggcgtgggcaaggctctcaatgttttttatgcgttttatgctgggcttctcagaaacgcctttctgcccggcaaacgcccgtatcatggcggcctggtttccgacgaaagagcgcggcaccgcctcggtgattgttaacttcgcgcagtatttttccctggcactgttctcgccgctgctgggatggctgacctttgcctggggctgggagcacgtcttcaccgtgatgggttatgtgctgaccggcccgtacggcggcgtctttaacgtatttagtaacgtcgcttccattgtaaccccgctggttatcggttacctggtgagcgagctgtactcattcaacgcagcgctggtcttcgccggatgctcggccctgatggcgatggtttgctatctgtttgtggtcagcgacatcaaacgcatggaactgcagaaatcattaacggttaagtga

SEQ ID NO: 186612 - DNA, 159 bp, Klebsiella oxytoca
atgacaaaaaaagcagcacatactcagatcaccagaactcaaatctaccgcgctgttgccagctcaaccgcgatagaaaccggtgtttctgtgcaaaaaattgagcagcaactcaaaaaaaatcaggcacaggcgaaagccgttggactcgcccgctag

SEQ ID NO: 186613 - DNA, 957 bp, Klebsiella oxytoca
gtgaggctggaggatatcatatctacatggctggatgataaaataagtctctatgttaatcttcgttcagaatactgccgaataattcgttatgctagtaaaaaagaatatcgttatgatacgtttgatatcagtgttggtagggatttttatcaacatgaaacaagtcctcaatctaaagtaaggaagtttattccttgtgggcaatctgaaataaatgagtacccagtttttagcggtagttcattttttaaatatgtctacaatggatattccagtggtttttggcgagtaaaacctacaaaaattacccacttagtaagagatagttataaccttagaaatgctaatgaggtatggggaaatactcctggcgaggttacagtgtatggtcgtgatgacaaagacaatctggcttttaataaagatatatttattccccatactgagctacagattgatggcgatagctataaaaaacttcttaaattgttagcacccgaaagtagtgagtttaaaaaggcagaaaaaagttatatccaaaactttatcactgctatattaatttataaacattgcagaaaacgcgataataaactgaaggcgatgactgcaacaggcatcttaaattcacttagaaattcttattgtgaagagattgaagaagttaaacggtcaacagttgatcgatggtttgacgagtatttcgataaagagagagattctctcacaccattaaaaaatggagggtggtctcaaaaaaaagatgatgttatatccattgtagccagatcgtactactggaatgataattttgatgtgatgtttgaattgattgccaatgatttgttagaggaggctgggagatttgatttacaaaaagcaattacccaaaaagaattaattgattatctaagggatgtttgttttttttctgcgcataaaactgctcaataa

SEQ ID NO: 186614 - DNA, 237 bp, Klebsiella oxytoca; identical to SEQ ID NO: 99379

SEQ ID NO: 186615 - DNA, 621 bp, Klebsiella oxytoca
atggaattataccaaggttcccatggtgatcacatccttgcataccgagacagagttactcaaacagttagtaatgctatcaatcaatttcctcggacaatggcattaagggtggatcttcattatccacctatttgggataatggtgatacgatatactgttttcctaaccttgaacctggagcgatatcgcgttttctgaatttgtttaaagcgattctggaagcatatgaacatcgcagaaagtttgcagggatcagagttaacaaaaatgttgtacgaaatgtctggacaagagaatattcgaagagtggtaaatgtcatttccatatttgcttattctttaacaaggatgcttactatcatttagggcatcttaagcataatggtacacttcgcaacctgatagttagagcctggtacagtgctctcagactagaaactgaagattgtcgtgatcttgtgcattttccggacaattgtcggtatgtacttaacgtaaatgatcctgattttgacatcatatacaatgagttgcttgaacgactggattacttgaccaagctcgatacgaaagtatttggtgagggagataggagtttcgggtgtagtcggggataa

SEQ ID NO: 186616 - DNA, 213 bp, Klebsiella oxytoca
atgattgctgaaccttgggtatccgtagacctgattgcagagcatctgggggtgacacgtgattcgatctaccgctggatcgaccgaaaacaactacccgcccatcgtgttgggcggttgtggaaattcaaggtgtcagaagtggatcgctgggtacgcgctggtggcgcaaacgaggttacgggaactgacccatcctcgtccaaagattga

SEQ ID NO: 186617 - DNA, 2112 bp, Klebsiella oxytoca
atgttaacccaagacaatttggccgatctattacacgttctcagttttgaaaaaaagggatcgatttatcgcaagacatttggtgctgctgtgttggaagtgaatttcacaaagaaggaaatcatttatccagaagctgctggcttgacgatcaatgaacggcagacgtgcaacttcgaagctaacgaaaatttcgttgtgttcgaatgtgtgcaccgcctgttaaaaaagggctacaaacctgagcacatcgagttggagcctaagtggaggctaggtcgtggtgccagtggtggtcgtgctgatattctgatcaaggacaacgatggtcgtcctttactgatcatcgaatgtaaaacggctggctccgaattcaaacgagcctggggcaggactctgcaacatggcgatcagctattcagctacgcacaacaaatcagcgaaacgcaatttctttgcctgtacacgtctgatctcgatgctgacgttctaacctacaccagccatatcattgcgcaccgtgacaacgaaaaatatctgatcgacaacccacttttcaaaagtttcaagtcagtcagcgatgtgaaagggcgctacgccgtctggcgtgacacctacaagcttgactacacaacaaagggcatttttgaagaaatcattcaaccgtatcacattggcaaagacaaatattctctggacgacttgcacgcaatctctgccagagatcaacagaagaagtaccacgagttcgctactattttgcggcagcataatgtgtcagggcgagaaaatgccttcgataagctagtcaatttgttcctgtgcaagctggtggatgaaattgaaaatccgtccgatctgaaattttattggaagggtgtcgcctacgacacccatttcgatctgatggatcgcctacagcagttgtatcaagcagggatgggtaagtttctcggtgaagacatcacctacatcaaccaaggagatgtaaacaatgccttgcgctttattaaacagaatccagacgctacccaacgtgctgtctggaatctattcatccaacagaagttctttaccaataacgatttctctctgatcgacgttcacaatgaaaagcttttctaccagaacgccgaagtgctactgaagatcttgcaaatgtggcaggacattcgtctgaccgatccgcacggtcacaaccagtttttgggcgatatgttcgagggtttcctcgatcagggagtcaagcagagtgaggggcagttcttcacgcccatgcctatctgccgtttcatcatgatgagtctgccgctggcctcactcatccaaagcagcgccacaccgcccaaggcgatcgattacgcctgcggcgcgggccatttcctgaccgagctggccttgcagatcaagccactggttgaaacctacaagcctgaagttgatctgactgcttatcacaagtccttgtacggcattgagaaggaataccggctgtcgaaggtggccaaagtgtcggccttcatgtacggtcagcaggagatcaacatctgttacggtgatgcgctgatcaaccagcacgaggcatttccggagatcaaggatggaacctttgacctactggtcgccaatccgccttacagtgtgcgcggttttctagaaacgttgcccgagaaggagcgcgaggcttacaccctcactgagaccatcaacgatctcgaaacatccaacagcattgaaaccttcttcattgagcgtgccaagcagttgctgagagccgatggtgtggctgccatcatcttgccatccagtatcttgtccaacggtggtagtgcctacatccgcacccgagaaatcttgatccagtatttcgatatcgtggcgattgtggaattcggcagcggtacctttggcaagacaggcacaaacaccgttaccctcttcttgcgtcgcaaaaagacagctcctgatacagctgcgcactaccgtgagcgtgtggcagaatggttcaaaggggacgatgctgatgccgattccatctacaaggatgaacatctaattgcacgctatgcagatcacgtcaatataccgctgaatgtttacaagtccttatga

SEQ ID NO: 186618 - DNA, 300 bp, Klebsiella oxytoca
atgctaaaggtcattgccgaagattttatcaaaaccgagtgcgtcgacaccgttctacctttataccgcgagctggtcgcggcaacgaagcgagagcctctttgtattgcttatgatttgtaccgggatgaaaaggatccggggcattttattttcattgaagagtggcctgatcatacggcacttgatgctcactgcgccagcgagcatttcactcggctagtacctttgattgaccaatatgcgcgtaaagctgcgcagtacattctaatggatagtttggtggatcctgagagataa

SEQ ID NO: 186619 - DNA, 240 bp, Klebsiella oxytoca
atgcacggtgtcatccagcgtgtgctgacgcatacattacggcaatttgagcgtgatggactcgtaatccgccatgattttcgtgaagttccttcaagagtcgagtacgaactgtctgatacaggtatggaattgctggttcgtatgatcccgttatggacctggatagttgagaatgccgaacgttttcgtgatggcagatttaaatattataaacagcaaaaaaataaggaagaatag

SEQ ID NO: 186620 - DNA, 195 bp, Klebsiella oxytoca
atgcgactcagattgcaatactttggcctgatttggcactctgttttaagcaaggtcacctttttggtatgggataccatactcccatcgtatgttgaagtgttgctgataaagtttaatcacacgtggtacatgcctgagaaccagaatattttcgctattaaccttctctgcagtgggtgtgtagttgaatga

SEQ ID NO: 186621 - DNA, 510 bp, Klebsiella oxytoca
atgcgtaaattgttatgcgggttgctggtttgcatatccggcgcaacttctgctgcaccctcgatagaggtcggtttctcatcaggcaaagacggccattcagctcagaacatggttttacgccttatcaacggcgcgcacaaatccattgaaatgatggcttatgagttcaaggcaccagatgttgttgttgcgatggataaagcggctgagcgaggcgtaaaagtttctgtcgttattgatcacctcgcgaacaagaacaacaaactggcacttgcggctgtttctgatgcaatcagacacggcataaacattcgtgtggatagccattaccacattcagcatgacaaggtgatgattgttgatgggcagattattggtaagcgtacagcgagaaccgtattgacggggatgtgttattcagttggcagtgtgatgcgccagggtagcagctcgctgacccggttgaccggccagtcagctatgacgtcaaggacatggcgaaggtag

SEQ ID NO: 186622 - DNA, 390 bp, Klebsiella oxytoca
atggccgggcgatttgctttgctgatggatggttcggaaggcgacaagaaggagccctatttcatccacaggaaggacggcaagccaatattcatggcagctatcggcagcgtacctttcgagcgcggggatgaagctgagggatttttgattgtgactgcagctgccgcccaaggtctggtcgatattcatgatcgccggccgttagtgttagtgccggaaaccgcacgcgaatggatgaggcaggatatcggagggaaagaggcggaggaaataattgcagatggcgctctgtcagcagatcatttcaaatggcacccggtttcccgcgcagtgggtaacgtgaagaatcaggggcctgaattgattgaggctatcaaaagactatag

SEQ ID NO: 186623 - DNA, 201 bp, Klebsiella oxytoca
atgtgcggacgcttttcccagtcaatgacccgtgaagattatatgtcctatctcgccgataaagccgatcgtgacatcgcatatgacccggagccgattggtcgatacaatatcgcgcccggtaccaaagttttgcttctgagcgaacgcgacgaacaattgcatatcgatcctgttttctggggttatgcgccaggatga

SEQ ID NO: 186624 - DNA, 1461 bp, Klebsiella oxytoca
atgccacataaaaatccacacattaacagaatccacattctttacaaatcaatggtaaaaagatacatcaatattgatgaaacattcaggataatccttgatgaaggccttaaggcatttaacttatctctgggtattgtgagtcagattgatggtgataaatacacattacttgctgtttccggagctccagatggagtatacccgggattaagccttcaattaaaaaacacctattgtaaaaaagttgtagatgagaagagaattataagcacaaagaatgccggcgtaaataaaagttacaacacacaccctgtatatataaacatgaaactcgaaagctatatttcagcacctatatgggtaagaagtaagatttggggaacaattaatttctcttcaacaaaaatcaaatctgaagattttagtagtgaagatcatgaattcatcagtcttatggctgaaggaatagcatcgcttttggaaatagatattttaactaaagaaaaagaaagtattattcaatctttagtggaatcaaatcagatacttgagaagatatttgataactccacaattggtacggctatagtttctgaagaagggcgatgggtaaaagttaaccaagcacttataaatatgcttggatatactaaggaatatttgttatccacagacttccaaatgatcacacataaagatgaccttgacattgacctcaaccttttagagtcattaaaaaaaggtaaaataccatattatgaacttgaaaaaagatatattaaattcaatcatgatagtatttggtgccttctaagcgtatcaatgatgaaagatgaagtaaacaatgtcatatattacatttctcaaatccaaaatatcgatgaccgtaagaaaatggagctagacattataaacaaacaagaagaactcacaaatgcaaatgaagaattagaaaaaatggctacattcgatgcgttaactaacatatacaaccgaagaaagttcatgattttattcaacgaagtaaaaacaaaatcagaatacaatctagaacctttctcactcgccgttatcgatatagactattttaaatcatataatgacgactttggtcatcaggaaggtgatttagcgttgaaacatgtggcactcaatttgacctatgcgttggagaaaaaagggatagttgcccgattcggcggtgaagagttcattgcgctgatcccaagcacaactgaaaatgaatgcttaatggcatgcgaaaaattaagaaaatccatcgaggatatgtcaacactacaaagaaaaataactgtgagcgttggtgctgtcaccatatccccgaaatcagattgtgtaatttcttttgacgacatattcaaaattacggactcgaagttatatgaagccaagagatcaggtagaaaccgtataaaacatgcccatttagagtattga

SEQ ID NO: 186625 - DNA, 1275 bp, Klebsiella oxytoca
atgatttctcgctggcaatggcacctgactcagacatcacgaaagatttggtttagggcaacgctttttgctatagcagctgtactcactgcgctgctatcaatagtgtttaaatccatgataccgccatcattttccgtgcgtataggtgcagaagccgttgacaatatactgaatatacttgcatcaagtatgctggcagtaacaaccttttcgctaagtatcatggttactgcttatggttcagcaacaacaaacgtaacaccacgagcgactcgccttgttgttgaggattcaacaacacaaaatgtgctggcgacttttattggctctttcttgttcagtttggtcgggataattgctctgaacatgggggcatacggagagcgcggaagggtcattctctttattgtcactctaattgttatcgcactcatcctcattacattattgcgctggatacaacatttaacctcactaggacgcgtcggagagacgaccgcaagggttgaaagtgctgcaattaaagccttctctgaacgggctcaggcacctttccttggaggtttaccgtggccagaaaacggaaaacctcccatggggactttcactctgtactccgagcaaattggttacattgaacacattgatatgggtaggctttatctttcacttgaggacagcgcaatacatgtctacctgaatgtacaacccggtaattttctacatccttcaattccggtgatgtatctcactgaaagagtttcagatgaaaaacatcataaattaatgtctgcttttactatttctgaaaccagatcattttcacaggaccccagattctgtttgtgtgtattgtcagaaatcgcaagccgggcactttctccagcagtgaatgatcctggtactgcaatcgacgtacttggacgttccgtcagaattttatcgttttatgcgcaggaaatgcaaaagagcacagatatcttatatcctaacatacatgttgcaccactctccattgacagtgtttttgatgatatcttttcacccatagccagggatggagccaccttacgtgaggttcaaataagattattaaaatccctgagcatgttggcaaacgcatggccagatatttattcagaaagcgctagaaaacatgcaagagaagctttaaattatgtagaacattctcatccattacattcagatctgcgcttattacatgaactctacgccgacacttggttaaatagttcatgtaaggatgtatga

SEQ ID NO: 186626 - DNA, 1998 bp, Klebsiella oxytoca
atgagtgaacatgacacgatccctaagaagtctcagagtcagattaataaagcagtattttatacatctgctttgttaattttccttcttgtcgcttttgcttcgctcttccccgatgcagctgacaaaaacttcaagcttctgcagcaacaaatcttcactaatgccagttggttttacatccttgctgtagcactgatcttactgagcgttacattccttggtctttctcgctatggcgatataaaacttggcccagatcacgctcagcctgatttcagctatcactcctggtttgcaatgctattttcagccggaatggggataggccttatgtttttcggcgtagccgagccggtcatgcattatctgtctccaccagtaggtacaccggagaccgtcgctgcagccaaagaggcaatgcggctgactttcttccactggggactccatgcctgggctatttacgctattgtcgcactgatacttgcctttttcagttatcgtcatggtcttccactgacattacgttccgcgctttatcctatcattggcgatcgtatctatggtcctataggccatgccgttgatattttcgctgttatcggtacagtttttggggtagcgacttcgttaggatatggcgtcctgcaggttaacgcaggtctgaaccatctgttcggtgttcccataaatgaaacagtccaagttgttctaatcgttgtgatcaccgggctcgctactatctctgtcgtatcgggactggataaaggaatacgtattttgtctgagttgaaccttggactggcagttatattactggcactaattttattgttgggcccgacagttttactcctcaaatcatttgttgaaaatacgggtggatacctttccgaactggtgagtaaaacgtttaatctttatgcctatgagccaaagtcgagtaactggctgggtggctggacattattgtactggggttggtggctttcatggtcgccgtttgtcggtatgttcatcgcacgagtttctcgtggcagaaccatccgcgagttcgtgacaggtgtgctgtttgtccccgctggattcacgctattgtggatgactgtttttggcaacagtgccatttatctgataatgaatcagggagcaacagatctcgcaaacactgttcagcaggatgttgcgcttgcgctgtttaattttcttgaacatttccctttctcgtccgtactttcatttattgccatggctatggtcatcgtcttttttgtgacatctgctgattccggagcaatggtagtggatacgctggcttctggcggcgtgaccaacacgccagtatggcaacggattttctgggcatcattgatggggatagtcgctattgctcttctcattgctggcggacttagcgcgctgcaaacggtgacaatagcaagtgctctacctttttcagtgattctgcttatctctatttatggcttgctcaaagcactgcgtcgcgatctcacaaaacgtgacagtctcagtatggcgacaatcgcccctactgcagcccgtaatcccattccatggcagcgacggctgcgtaatattgcctatcttccaaaacgttctcttgttaaacgattcatggttcaggttatcagaccagcgatgtctctggtgcaggaggaactcaataaacagggcacgcagagccatatcggtgatgaatcagaagatcgtattcgatttgaagtagatttaggcaacgaattaaactttatctatgaagtcagactgcgtggatacaattctccggcattcgcgctagcagcgatggataatgatgagctgcaatctgaacagcatcggtacttccgggcggaagtttatcttaaagaaggtggacagaattatgatgtgatgggctggaatcaggaacaattgattaacgatatacttgatcagtacgagaagcatcttcacttcctgcatcttgttcgttaa

SEQ ID NO: 186627 - DNA, 210 bp, Klebsiella oxytoca
atggggaacagtcagtactaccgtaccgcaatcaccgctgaagtcggctggctcgaatcctcaacatttctgaccatgaaggacataaagaccaatatttttgtgtatgaaaatgggtatatgtaccaacttgagggcaataatgcatgggttagcagcagtcactttatcacttggagtagccaaaattcttacgggacgacgttatga

SEQ ID NO: 186628 - DNA, 585 bp, Klebsiella oxytoca
atgcatggaagatgtagtatctacaaaatcccgttcacttcgtttgacgaggtcactctgtataacgacagtgaaattatctcctggctggaatgtggcaagcctctgcagtttttgcccagccatatcgggtttgtgcctggacaaagtgcgtacgcgtatcgagataagtggaatatcccccggagtatgcccctggccggtacggactgcagccagccgctgcgtcatatccccgatgaaatcagcgggcgactggacgacatcccggcgcagttcgtggtaaagcgttacgtccgcccgcagtacggctgtgacggctgccagcgcgtggtgtcaggccgtctgcccgcgcagattatccctaagagtatccctgaagccggtctggtggcgcaggtgctggtcagcaagtactgcgaccgccagtcgctgtatcaccagcagcgacagcggtatgcagaaccggccagtgtcgtcatcgcgagttcgccggaacgatacgtccatcccacctactgcgatcctgttgccagcggctgtgtggatgggcgtaatggcgtcgctggcggtggggagttttaa

SEQ ID NO: 186629 - DNA, 2634 bp, Klebsiella oxytoca
atggaaaatccagccagcctgttgcgacgtctgaacccttactgtgcccgcgcgatggaaggcgcggcttcgctctgccagacgcgcgcccatgcggaaatcctgcccgagcactggctgctgaagctgctggagcagggagagggtgacctgacggtgctggcacggcgctatgagtgggatatggatgccatctggcaggatttgctgggctggctggatacacttcctcgctctgttcgcagtcgcccgcagctatcagacagcattgagacgctgatgcagcaagcctggctgttcgcctcccttaacggcgaagagcatatccgcagtgtgcatctgctgatggcgatggtcgataagcctaaactggcgcgctgcgatggtctgtggccgctgctgaccctcgggcagagccagcttgagcgtcttcgcccgctgctggacgctcagtcagatgagcgcccggatgtgcagcaggaagccgaactggcacaaaatcacggtggtgaagtggagtttgtcggccgtccggtcggcgctgatataaaggagggggaactcaacccggcgctgcagaacgccctggataaattcaccctcgatgtcaccgccagagcgaaagaaggcaaaatcgacccggtgtttggtcgcgatacggaaatccgccagatggtggacattctctctcgtcgtcgcaagaacaacccgatcctggtcggcgagccgggcgtggggaagaccgccctggtggaagggctggcgctgcgtattgctgagggcaatgtgcccgatgcgctgaaggcggtgagcgtgcgcacccttgacctcggcctgctgcaggcgggggcgggcgtcaaaggtgaattcgagcagcgcctgaaaaacatcattgaagcagtgcagcagtcaccgcagccggtgctgctgttcattgacgaagcacacaccattatcggcgcaggcaaccaggcgggcggcgcggatgcggccaacctgctgaagcctgcgctcgcccgcggtgaactcagaaccatcgctgccaccacctggagcgaatacaaacagtactttgagcgcgatgccgcgctggagcgccgcttccagatggtgaaggtggacgagccggacgacgacaccgcctgcctgatgctgcgcggcctgaaatcccgctacgcgcagcaccacggggtgcatatcaccgatgaggcggtgaaggctgccgtcaccctctccagacgctacctcaccggacgtcagctgccggacaaggcagttgacctgctggatacggcgtcggcccgtatccgcatgagtctcgacaccgtgccggaagcgctgacccggcggaaggcgcagctcacggcgctcgccatggaaaagcaggcgctgctggaggatattgcagtgggcaacagcgcccacagcgaaagactggcctctatcgaacaggacgaaatccgcatcatcctggaactcgacgaactggaaacgcagtctggccaggagctgaagctgacggaacaactgcttgcctgccgcgcggatatctctcgccaggcagaaattagtgacctgcagacgcaactcactatcgtgcagcgaaacaatccgctgctgggcctcgacgtggatgcgcgaaccgtcgccacggtcatcgccgactggaccggcgtgccgctctcctcgctgatgaaggatgagcagacggagctgctgagcctggagaataacctcggcaaacgggtggtgggtcagaatgcggccctgaacgccatcgcgcagcgcctccgcgcgtcaaaaaccgggcttgcaccggaaaatggcccgcagggcgtgttcctgctgacggggccgagcggcaccggcaagaccgaaaccgcactggcgctggcggatgaactgttcggtggcgagaaatcccttatcaccatcaatctctccgaataccaggagccgcacaccgtgtcgcagctgaaaggctctcctcctggctacgtcggctacggccagggcggcatcctcaccgaagcggtgcgcaagcgcccgtacagcgtggtgctgctcgacgaagtggagaaggcgcaccgcgacgtgatgaacctgttctaccaggtctttgaccgggggtttatgcgcgacggcgaggggcgtgaaattgatttccgcaacaccgtcatcctgatgacctccaacctcggcagcgaccacatcatgcagctgctggacgaacagcccgacgccacagacagcgatttgcatgaactgttgcgtccgctgctgcgcgaccacttccagcccgcgctgctggcgcgtttccagacggtggtttaccgcccgctcacacaacccgccatgcgcatgattgtggagatgaagctgaaccaggtgagacagcgtctcagccgtcactacggtatgaaaacggatattgaagaaagtctgtacgatgcgctcaccgctgcctgcctgctgccggacaccggggcgcgcaacgtggacagcctgctcaaccagcagatattgccggtgctgagccagcaactgctgagccatctggcggcgggacagaagccacagtcgttacgccttggctggagtgaggaagagggcatcgggctggagtttgattaa

SEQ ID NO: 186630 - DNA, 642 bp, Klebsiella oxytoca
atggacagcgcaaaagagattgccagaggtatgcttgaggccattaatattgatggctctggtttttggggcgcaataggaaaaggttttatttcgtttccagtcagccttgcttatctggggtatgatttcattgatgctgagcatcgtagagataatctggatgataaattcaggctggcgcgattagtgaaaaaaggcgtatttaaccatcaggttattgagcaagtcattaaaacctccctcgaagattttgtttcacgcattcatgtcgaaaaaatatcttctattgtgaaaaatgtttccggttcgttcatggggaaaatggcatttactgaactaacaggtgtgaagttgggtgaagcaatagcatccagaggtgtatcggccttttttgctggaagtttggctggtttattgttatctgttggtgctgaaacatccagagcaatttatacatcaagagacctcgaagacagaaatcctgttttgcacaataaactccaacgtcttggtgacctggatcttctttattttattgttgaagatatcgttaagccttttgagatagcttgtgaggtaggagacagaaatcctgccgagtttgataaagtatgcgaatacttttttggaggtttatga

SEQ ID NO: 186631 - DNA, 213 bp, Klebsiella oxytoca
atgaaaatcaaggtgatttttttggtgatcctttcccggttaattcgcggggcggggatggggttgggtgtttctggtattgtatttactatttggttttttttcttatcttcaagtgaatccagatatatttggggtgtgttttcgatagcagaattttttgcaggctatcttatatatcgttttgcttatacatacgtttatgatgaataa

SEQ ID NO: 186632 - DNA, 2526 bp, Klebsiella oxytoca
gtgagcctgacagatacactgagcagtttaatccaaaccccgttaaaccgttaccaactggatattccgtcgtgtgtggcaaatattgatgtggaaggttttagcggctcagaagcgatgagtgcactgtacaggtacaccatcaacttcaccagcactgacaagaatattgatgcccgccagatgttgagtaagccggcaaccctgaccatgggcgcgggcaacctgctttccctgacggatcgcaaggtggttcacggggtggtgacccgtttcgagcgtaccggtggttccgctgatgaagcgcaatactgcattgtgctggagccgttcctggcgctgttgggcaatcagttccgtactcatcgctttttcgtcaacaagtcggtgccggaagtggtgacagaggtgctcacggagcatggcctcaaggactgggagtatgagttcaccctcaaggccgattatccgaagcgtgagcagattaaccagtaccaggaaaatgacctcgcctttatcgaacgtctgcttgcagaggtggggattttttatttcttcaccctgcagcccgatacccagaccgaagtggtgcatttcgcagacaagcagagcgcctggacgttcggtaaaacgctgccgttgaacagcccgtcagggacaaatgataatgcggccgactcggtgtgggatgtgtacgtctggcataacgtggtggagcgttcggttacggccagtgactacaaccaccgtgaagcacagaacgtcctgatgtctgtaccggctgacatgacccgcggagacggagaggggaacacctacggtgatgtgtatcactaccgcccacatcatcttgaacgtggtgataaaatcacgccggcggcagaaaccggtaacttctgggcgcgtctggagcatgaacgttttctgtcgaatcagaccacaataacgggcagtagcaccgaccacaccctcgccccggcgcaggtgctgactatcaccgaaatggctatcccgccaacgctgccccgtgaaacggagaacggtgttgttattatccgcactggctactacgccagccgtaagaatgccctgaaagtggcatggtcagccatgccgtactacgagaaccgctgctggcgccctgccgctaaaaagcgcccggtggtcagcggcacgctgacggcgcgcgtgaccagcgccaaagagaacgacatctacgcctggcaggatgcatcaggcatgtaccgggtgaagtttgatgccgaccgcgatgacaaacgtcagggcatggaaagtatgccggtgcgcttcgccaaaccctacggcggcgataaatacggcttccactttccgctgatacaggggactgaagtcgccattgcgttccatgaaggcgatccggatcgaccgtatatcgcccatgccatgcacgactcccgccacgttgaccacgtcactgaagccaatagtacgcgcaacgtcattcgaacagctggtctgaacaagctgcggatggaggacaagcgcggtgaagagcacattaagctcagtacggagtacggtgggaaaacgcagcttaatctgggtcacaacgtggatgctgacagggtattgcggggtgaaggtgcggagttacgtactgataaatgggtggccgttcgcggtggagctggtgtatttatcacagcagataaacagccgtttgccggggacaagatgctttctatgaaagaggctgtggcacagcttgaaaatgcgttaagtatcgccagaagcctttccgatgcggcagaaagtgctcaggcgtatccggcggatatccagagccagaaaatgctgacggatgcactgacagaactggtacagccggggatggtattgaatgcaccgcaaggcgttagcatcagcagtccggaaggtgtacgcgtttcctcgggtagtgccagcgtggggatcgtcgcgcaaaataatgcagacattagcgctatgaagcgcttcacggtagcggcaggtgaagctatcagtatgctggcccgtcaggcgggtatgaagctgtttgctgcgaaggggaaagtcgaaattcaggcgcaggatgatgcgctggacgccatcgccaggaaagacattacagtaacgagtgccgaaggcaaaattgaaattacagcagcaacggaactggtcgttaactgtggtggggcctatatcaagttaagtggcgggaatattgagttgggttgtcctggaaatattcttctgaaatgtgccaatgctcagaaaatgggagcagcttcgctgaacacgccagcccctgaatttccaaaaggttatggtggtgtttactctctgactgacgaagaagggaaaatcatccctcagactgaatataaagtgacgacagctgacgggcaggtattccatggaatttcagatgataatggcaaaacactgccaatttatacctcaatgccaggcaagttgaaaattgagatccttgggaccggcaatgcagtgacagggaatgaataa

SEQ ID NO: 186633 - DNA, 1584 bp, Klebsiella oxytoca
atgagtgattatcatgcatgggtagccagtaattgcgagcatttcactgatgttaatatttctgagaaaaaagttgtctgcacacgaaaacccgttccgggtataaccatcacgatcgggatgttttttgatggtacagggaataatgcgttgaatacccagaatcgtatcctggagtcctgttctcatcttgatgttggaatgaagtcagaagacgcggaagcctgtgctaaaaaactgggaataaaaattgataatgctgtaagttatattgggtattattctaacatccactggcttaatacactttactccacaaatgacgaggtagtcgagggacaaacagtttatcaacgagcagtctatgtacaggggatcggtaccgataaaggtaatagcgatagctcgataagtatggggacgggtggttggttttatggtgtcgttgaaaaaactgatgaaggtgttggtcttatcgctgaacaaatttcgaaattcctggctcttaaccaagggaaaaattttgcaattgaaaaagtccagtttgatgtttttggatttagtcgcggtgcggcggcggctcgccactttgttaaccgtgtaagaaacaacgataaagccatacagcaggccataacgaaagggcttggtggtcgaaatcagcatgggaaacctgcaggtgaaacccgctttctggggttatttgataccgtgtgcgcggtaggtacagtcagtaatctatttgatgttcatagtggtgtgaaccccggcgttgagctagaactgcctccagatattgcacagaaagtctttcagatcacggcaatgcatgagtgccgctacaacttcagcctgaacagtattaaggagtcctggccggaactggctttgccgggagttcattcggatatcggcggtggctataatccaaaagaaaaggagtatcttttccttactcagccccaaaacgaaacagtcagtgaaactatacctcccgaagtgactgatatctaccggcgttctgcagctgaaatacctgacttaaagagtctgccagcattaagtgcaataattccgagtggtgaagtaaagacagaaacctggtacgactatcttgttaacgaggataaaaaacgcggtggcatcacacaaaagcgtgttggggcggcagtaactattgaaagggtagtaactaatgactggagcaaagttagtttacgagtgatgctggatgcggcccaggaggctggaggattgttcaatcccataagaatcacagatatggatctaaaattaccatctgaacttgaggttctgtgcaaaaaagcaatggagcagggtaaagctgtaaggaatggcagccttctatacccctttactacaccagaaatacaattaattggtaaatatattcactgttctgctcactggaatcctgtggttataaaagatgtctggctggacgggaataaagtaaaaaccatatacggggcagtgaaatcatctgatttatttttctatatcaatcgtccaaatccaggttggcttcgagctgtctggaatatgcagggtgggaaatcatga

SEQ ID NO: 186634 - DNA, 648 bp, Klebsiella oxytoca
atgaaatcaatcgccagactaatttcgtttttatttcttgcgggttctgttagtgcctgtgccagtgagcaacctaacagtcttaaaaccccttgggacaaatggtattttgcctttactaccccaaaatctttgccagcacaggttacactgttaaagctgttagatgttgatggttatgcatcgacgtatcgcactatcgatcagccacaagggatcagtgtaggtaaatggagtgaacgtaactctgcggggaatacacagtttaataaagccgaaaggcttccacaaataatgatattctgctgggactcaattattgacaagaaaatatatcagtcaactttattttttacgcatgatacatgggctaaaatgattagcccttaccctgatgtcttagaacctgagaaagctgcataccgacagacgatgctgatagggttggccccggaagggaaagtacgagtctggctaagacaatatggtcattcagatattctattaaatgatacaaaaataacaactgtatcaggtaaagatcttgatatgtgcaaaggggtaaccaaaagcgattttaattatggttatgatgaagatatcttaatgtttataaaaaacaaaaaatatccttatgggtcatggtga

SEQ ID NO: 186635 - DNA, 483 bp, Klebsiella oxytoca
atgacgcagattaaccgcctttacgccagtagcgggtcagaggtgatcattgaaacgctgcagataactatcggttctgatgttcactacctctgccagggctatgaggatatcactgcgacgacggagaacggcgagaccgtaacgtttaccgcctgcgcgatggatattgcattgccagcgcgtaacgaggacggcacgcaggatttgaaatttgctctgtgtaatatcgacggcgttgtgtcaacggcgatccgcaatgcgctggcgaaccgtctttcggcgtcgctgacttaccggagttatatctccacagatttagcggcgcccgcggcggtgccgtatacgctgcaggtcaaatctggctactggacggcgacagaggtacagatcactgcaggctatatgaatgtccttgatacagcctggccgcggtaccgctatacgctccctttattccccggactgcgttatatcagctaa

SEQ ID NO: 186636 - DNA, 807 bp, Klebsiella oxytoca
atggacttatggaacttcattaacaattcatggtttgtgggaatagtgggtggtattttaagcggcctcgtaactacatggattggccgaaaattattttcggaaaaagacaaaaaagaatatattcgaaaagttgatgcaactaacaaggaaattgtttattctctacgttcagcaatttctgacaacattcatcatgaccataaaataataaatagtcttatgtcagcaactgccagaaagaatggagttttgattgcagatatttatagtcttaaagaagtaacagaagatttaatcaaagaggtaatggattctagctttataccttcagaatataagaaaagttactgcgaaaaactagcaaaagtttatttattagatgaagaaaagaaatcatctgagttacatgagaaagaaataaaaaatatattattacattactcaacgaaaaaagactcaataatcggcacctccacagcccttttaggcgttatggtgacactgattactttcttattaacaattttacaaagcaagtcggacatactagagaaaatagacaacatttttctaccatcctcaaacggtgttgtctttttactaacagctcctatttttgttgccatatcagcaatgatgattgtttttatgagaaaatggttactagccaaacaagagtattataattatacatctgcgcgcagtgcaatgagaaatgaagcattaaaagaaaagtttaaagaaatgaaatcaggctatgaccctgataaaaaaaatgacaatttacctcctcatgaaaattaa

SEQ ID NO: 186637 - DNA, 171 bp, Klebsiella oxytoca
atgcaaagtaaagaagtgatgacccgtattgagcttagtggtgtactggctaaaacattcggccgtgttcaccaccgagtaatcagaacgactcaggaagcaggcgtggcattagcggcgacaattcggggttttgagcgcttcatgattgatagcaaagacaagggctga

SEQ ID NO: 186638 - DNA, 1914 bp, Klebsiella oxytoca
atgaaatcctggtacaccatcaaagcagccagcgatgccaccagcgccaatatcagtatttacgaggagatcggcggctggggtatcactgctcaacagttctctgaagacctgaaagccctgggcgatatttcccatatcagccttcacattcactcacccggcggtgacgtgttcgacggcatcgctatctacaaccttctgaataaacatccggcaaaagtcacagtgcatatcgatggtctggccgcctctatggcctcagtcattgcgatggccggtgaccgtatcgttatgccggaaaatgctctcatgatgatccacaagccgtggggaatctccggtggtaatgccaacgatatgcgcgactatgccgagctgctggataaagttgaaaacgtcctgatcccggcttacgcccgcaaaactgggaagtctgctgaagtgctggcggccatgctggaggatgagacttggatggatggtcgtgaatgtttagcgcagggattcgccgatgaggtgttaccggcggtcagcgcaatggcctgtattgaatcgaaacgaattgaggattttgagcatatgccaaaagaaattaaagggatgatcaccggcccgaaaggctccaccggcagcgcggttccggaacagaatcgtatcaacggtattaaagatttgtttgccatgtttggcggcaagcatgatgcgctgaaaatgcagtgcctggaagatgccgactgtaccccggataaagcaaaagatctgctgctggccgaaatagggcgcaatgccacaccatcaaacaaaaactctttttcccatgtatatgtgggcaacggtaacatcgttggtgacggtattcgacagggattaaatgcccgtctgggtcatgaacgcgcggagcgtggaaacccctatgcaatgatgagcctgtttgaaatggctcaggcatcgctggtggagcgtggcatcagcatcagcggatttggcaatcgctcacagattgtgaatctggcctttacgcacagtaccagcgacttttcccaaatccttgctggtggggctgaaaagtccgtactcacaggctggcagaacagcggcgagactttccagcagtggactaaaaaaggctccctgtctaacttccatgaagcaaaacgtgtgggcctgaatggcttctctgagctgaaaaaggtgcctgagggagctgaatacaaatatgtcactaccagtgacagcggcgtacccatcgctcttgcgacgtatggcaatatcttttctattacccgccaggccattatcaatgatgacctgagtcagctgacaactatcccacaggctatgggccgtgctgctgcgcgtactgtaggaaatctggtctatctgaaactgacgacgaacagcaagtttacagacggtaagccgctgttccatgccgaccataaaaacctcattgctaaagggatggataccgagggactcaatgaagcccgtaagtctatgcgcttgcagcaggatgcgaacggcgaccctatcaacgttattcctgcctacattcttgtgccggcggcgctggaagggcttgcaaaccgcgctgtgctgtccacatcttctctgttccctgttgatcaggacggcacgctgaaccagaaccccggcatcatcaacgtggtgaaggatatggcgcaggtggtggttgagccgcgtctggacaaggccaacaacaaggaatggtatgtaaccgcagcacaaggcacagataccattgaggtggcttacctggacggtatggacgttccttatctggaacagcaggaaggcttcaccgttgatggtatcgcctggaaggtgcgcatcgatgcaggtgtggccgctctggactaccgcgggctggttaagtcgagtggggcataa

SEQ ID NO: 186639 - DNA, 195 bp, Klebsiella oxytoca
atggcagaacgaagcaataagcagcacgataaaggcggtacagttcatatcgatgctgaaaccatgaaaaaaatagaggagtatcaggaattcatccgaaagagtcacccggatatgcccgtaccaacgaaaggccagattgtacgcagcagcgttaactactggcatcaccagacgctgggggcctgggtatga

SEQ ID NO: 186640 - DNA, 468 bp, Klebsiella oxytoca
atgtctgtattcataacggttttttcaggtgttttggtttttgttatcggacaaatagttgtaaagttaataattgagccgataaatgactttaaaaaagaaaggtctaagataatctacgatctagttttctatgctaataagctagcaaatcccaaaggccctgatgatttggagatggttgaggtatgcaaagttatgaggcagcattcttccatgctacattcagtgacccacttgattccatgttatcaatatttagctttcatctttggtctacctaaaatcaaggatattaatgaagcaaccacgaaattgatatatttatcaaacggctacactggcgtccttaagaatcaagcgattttaaatgcctatgcaatgcaagaagttaaaattgctctaggtgttcctatcccacagagtgagatgctcgatccaaaaataaaaaaagagttcataaagtaa

SEQ ID NO: 186641 - DNA, 1371 bp, Klebsiella oxytoca
atgacagatgcagtaatgacagttgagacggtatccgacgctttgtttacctgttcatacctgtgggcgcatggccggaactacaaccgtacggatctggaaaaggcaatccaccagcataaagacccgacaacgcgctatggcaagctggcggtacgcttaaaacaaattgctgaaatgccatatgaggctctatgtgatgccggctatatcgataccgatcgtaaacagatgataatcgcccgtcgttctgtgctggtggatgaaatcggcgaagaggaaatgaatctctggctggccgacacccagctcatacagcgcgtattcccggatgccaccattgataaaaaacgctcaaagctaccacttacacgcggttcagagggctataacatccgtcaggactatgtgattaaacatatactcccggcacagtcactgtgcagcatttacggccccagcggttcgtataaaagctttttggctgtttcatgggcatgccatattgcagctggcgcttcgtggtctggtaagaaggtcgaacgtggcgctgtgctttacgtggttggcgagggcggtgtaggcgtaccacgtaggatcaaagcatgggaacaggtgcatggccagaaggttgataacctctggcttgttaaccgtcccgtcttcccggtgcgtgaatctgaggtgtccgaagtcattctggcagccaggcagattacagcggagtgtgatatgcctgtgcggttggtggttattgacactctggcgcgttgctttgggggtaatgacgaaaacgatgctcgcgatatgggggcatttattgaaggttgtgacgttatcaagcagaaaacaggcgccacggtgctggtggttcaccactccggtaaagatgaggctaagggagcgcgtggttccagttcgttccgggctgcgcttgacgctgagtttaatgtgaagcgagaaggagaagggcaggcccttatcctgtcatgcaccaagatgaaggatgccgaggaaccagaacgtaaagcctatgaccttcgcaccaccgaactgttcacagatgaagacggggaaatggtgtgttcgctggtagttcatgatgcgtctcgtgaggctaaggaggttgatcctgaacttgcaggcgtggagaaacttaccgataaccatatggcgctgtggcaggcaataagaagccgaatagcacggggcgaaccctgtaacagggcggttattcgtgaagatctgaaagccactggcattaacaccaaacattttactcgctggcttcagaaactgattgatgatggtctggttattcaggacgccgatttgctgacagttaaatcgctgagagaagtgggtaactaa

SEQ ID NO: 186642 - DNA, 369 bp, Klebsiella oxytoca
atgatcagcaacgtcaaattcaatgaactggaaaaacgctttgatctgctggtggagaaagtcaacgttcttgaagaaaaagtaagagcgctgactgatagtcagggcggtgaaatccctcccggtatgactcctgttgctacgctggcggctgagtatggcatttctaccaaaaaagcggaggaactggcgaaaaatacgggcgttatgttggttaagctgaaatcaggtggctttattgtgcctgatgagaaattcagggaagcggcccgactggttctacgtagcgcaaaacgaaaatacggttcggcctactggtttcatccgctgataggcaaattccaaatgagcggagggatcccgaaatga

SEQ ID NO: 186643 - DNA, 321 bp, Klebsiella oxytoca
atgcaaatcgagcaagtctctggtcaattatgggaggagaaatcagccttcctctgggggctcgaaatgactaagtcacaactgcgctatgtagctgatctaaaaaaccttgaagagcatgaagaggaattgcgtcttgcatcgcttagcgctgcccaagcaaagatcgtggcgactatgctggtgtgttatcccaatgcaatggaggacggcgaaatcaccgcgcttggacagctgtttgagtctttggcctctaatctggatagcttcttaaaagcagagtgcgagcgttttgaaagttgttcggaggttcagtcatga

SEQ ID NO: 186644 - DNA, 195 bp, Klebsiella oxytoca
atggcaaccaaagcagttaatcgaaaatcgcagactatagccgccagagttccgcatgagattgcaggcgaaattgagaattttaaggaacccggagaaagcacagggcaatttgttgttatcgcgcttgagaatgagatcaaacgtcgacagcgaaagcagaaaaaagaagttgaaaaagatgatatcaaataa

SEQ ID NO: 186645 - DNA, 918 bp, Klebsiella oxytoca
atgcaaagaagaataaacacgttgtgtccttatacactcaaatctttagatgaagttgactgcaatggagagcacgttttacttgctggccttggagttccggatagtttcacagtgaatgcatcgactcaagcaaataaggatgttaataaacttcttgatgaaccatttttatcgatgggaatgataaggtttttatcttctatttctggagtgcgttcaagaagtggtgaggtaaagccatttttctcaggtgttgcagaggatatagacgaacctgttttagtaaagctctctcctggtgaggtggtgttcaaaattcaaaagcctgtcaaacatgatcaggataataacattaatgcggtagttggttacagtgatgaggttaatgataccttagagaaagtaacaaaaaagtatactgccaaaggttttaaaattgaagcttttgaactaacaagccatgagactaaggtagctatgcggcttgaaatggatctaaaccttctatcttttcagtttgtaaaaactgcatatttaacaatggtctatctgtatggtgacgatggtataaactgtgttgcagggaatgagatacgcagaagacttctcaataaaatcccatttaactcacaaattgaagggttaggtactttggaatgggataataatctgattcctattcttcccgacgtccataaaaataaacatgtcatagcatgtattaatataggttgtgatgttctttgtgctatttcattgttcggggttttcaataaggttttaatttttaaaaacgaaaaaataaatgaaagtgacttattgggttgtgtttttaatatagactttcgacagagaaaaatcacaagagagaattttgcagaacgaatgattacaatgtttttttacagttattaa

SEQ ID NO: 186646 - DNA, 243 bp, Klebsiella oxytoca
atggctatgttatccgtagtgaaaaaagaagatcttcagtacatgcctgagcttgaccgaatgattcgcgaacctgaatgtcgggctatgaccacgctctcaaactcaactcgctggcgtatggaacaggagggaaaatttccgaagcgtatcaaaattggcccctcagcggttgcttatcggctttctgaggtgcaagcttggatcaaaggtaattggaacaacataaatgtaggagattaa

SEQ ID NO: 186647 - DNA, 1236 bp, Klebsiella oxytoca
atggctggcgagaacaagttaagcgacaaggcgctaaaagccttacatggtaaaccgcagccgcgtcaaaagatgttggccgatggtcggggactgtctgccagagtgagcaagactggcactgtaagctttgtttatttctttagacattctggccgacaaagtgctcctgtctggatgacgttaggcaagtacccagatatgacacttaaacaggccagggagaaaagggatgagtgccgggcatggctatcacagggactggatccacggatagagaacaaactcaccaaagagcgtctgttcactcctgtgacggttaagaacgctgtcgattactggtttgataattatgctagggaaaaacgcaaggagacggtgcgtatctatcgtcgctatgagagatacatcttcccctacattggggattttcctgtcgagaaatgcagcctgtcagactggataagatgctttgatcgcgtgaagaaaatcgcgccggttcagtctgccgcgatgctgattgagttaaagcagatctttaaatactgccgggtgcgccagtatgtgcgatgtaatgtgctggatgacttgagccccggtgatattggcaagtatcaaaacaagagagaacggttgcttgaagaaagctatgttgccgatctgtggggtgtttactttcatggtaagggcaaaacccgagttatgaattacaagaagcggatggctatcttgtgccttgtatttggatgcaggctcagtgaggcacgtctatccacatgggacgaatgggatttcgaaaaatggctttggacggtgccaaaagagcacagtaaaaacggcgaagagattctccggcctgtgccccagaaaatgcggcagtggatcgtaaacctgcacgaagagactaaaaggcgtaggtatattctcggggaactgaaatctgattcaaccgtcagtgcgatgggatgcacaaactttgtatctctgaaacatgaaaaacggtggtcattacatgacctgagacgaacgttctcaacaagcctcaacgacatgggagttgatttttatgttgttgagcagctgttgggacacaccataaagggggtggccggaatctataaccgcagcaagtacataccccaaaaacaggaagcgctggaccgatgggttgattaccttgatgggctagtgggtgaagaaaacacaattaaagtgatcaagaaaaggagcgcctga

SEQ ID NO: 186648 - DNA, 207 bp, Klebsiella oxytoca
atgaaactcgttgatgactggaaaagcgcatggcgttggttctccatgcatgcgctggtgctggccgggataatccccacggtatgggcagagctgccgccagacctcaaagcctcaatcccgccgggtacgatgggcgctatcacagcggtaatcgctgcatgcggtgtggttggtcgtctggttaaccagagcaagccgcaatga

SEQ ID NO: 186649 - DNA, 471 bp, Klebsiella oxytoca
atgctggaactcaataagcagcgtaaagcgtttctggacatgctcgcttggtctgaaggtacggataagccaggacagcccacaaagaaccacggctatgacgtcattgttggtggttcgttgttcagcaattacgccgaccatccccgcaggctgatcacgttaaaccccaaactaaaatccacggccgcgggtcggtatcaactgctggcaagatggtgggatgcgtaccgcaagcagcttgggctgaaagacttctctccagcatcccaggaccaggtcgctcttcagcagattaaagagcgtggggctatcccgcttatcgacagcgggaacatccggcaggcaatcgaccgctgcagcaacatctgggcctcattaccaggtgccggctatggccagtttgagcataaggccgacaacctcattgcaaaatttaaagccgccggcggcgtcgtagcggaaggttaa

SEQ ID NO: 186650 - DNA, 324 bp, Klebsiella oxytoca
atgaaaatgccctacaaacaagatttcatcgctgcgctacttgcgtccagagagcagggcataggcgcgatgctggcgtttattatggcgtacctccgggggcgctataacggcggtaagctctggaaggtgatagttgacgccttaatgtgcgcgatgatcgcctggttcatacgagacctgctcaattttatcggctggagttctgatctggcctatatcggcagcgtctttattggttatctcggaacagacacgatcggctctctgttcaaaaagctcgcagccaaaaaagcaggggtagatgatgctggaactcaataa

SEQ ID NO: 186651 - DNA, 141 bp, Klebsiella oxytoca
atgaatcatctcaccatagagaatatccgctaccgctggatgaagcttcgcctttgccgtcatcgcggcactgtattagttgactaccgcatcctcagaaactttattcgcacctgccagatccggggagagacagcatga

SEQ ID NO: 186652 - DNA, 129 bp, Klebsiella oxytoca
atggtgagcatgcatcgtattatgtctgctttggttggggtgacagtagttgcgttgatgctgatagttatgttcggatggccttattttgtacgtacgaccactgaatatatcctcagcatctggtag

SEQ ID NO: 186653 - DNA, 303 bp, Klebsiella oxytoca
atggctgagttacgtgcaggcgggttggcgatagtaattttttcagaaaataaacctgaaattggcagatgcgttgagttagtcgaaaaagtaacgaatggatatgtatttaattttcctggcgtgggtaagcatgggtggcgtgatgaaacccctggatggttagtaaagggagatgtatcgatttatacaaacacaccttcaggtggtttctcttatttctacgatgaagagctcatgccaatcgatggagaagacttctctcacgaagatgagcgacagaaggtgcgggagcatgcctaa

SEQ ID NO: 186654 - DNA, 678 bp, Klebsiella oxytoca
atgaccaattcaaccataaccagagagcagttaatcgaaaagctaaagcacaggattgcagtcactgaaaaatatccacacctggaagaggcgcagattgactcgcaaattttcaaaatagcgctggccgcaatggacggtgagccagtagcgtataccgacgagcgcaacctgggatatatctaccgaggaagggagacggcgtatctgtggggcaagcagaactcagaggcgggagatatcccgctctatcgccacgcgcagccagcgccggtagtgccggaagaaatgactatcagggacgcctgcaaatttgtccaggatatgcggttgtttgatgatgtgtccgtgatagtaatgcgcacctggaacgcctgccgcgccgccatgctcaaccatccatcaagcattcagcccaacactggtgcagctcccggcgctgaaatcaaacacccgtcaagcaattctcaggtaattggcattgacccagcatccggtccagaccgcaccgttgaggttcgctatgttgcacctcccggttacgtgatggtgcctaaggagccgacatcagaaatggtaaaaaagatgcggtatcacgttggcgggtatgaccgaaacatcaaggaaggatacaaagccatgctcgcagccgccccgcaggaggtgaatcatggctga

SEQ ID NO: 186655 - DNA, 504 bp, Klebsiella oxytoca
atgactgatatcaccgaactggcgcagagagagaaattcgaagcgtggtgggagcgcgagtataaacatctcgaatcctcgaaatataccgatgctgtgccgcatatcaaatacggtttctggatggcatatcaggccggtggcgctgagctggtagaggcgctggataagtcagaatcacggcttcatgaggtcgccgtagcgtgcgcaaccgcagagcaggcgctggagaaggcgcagcggcggaacggcgagcttgagacctatagcaaaaccgcgctcgaatttagggaagcggcgagagatgaaaaccgacacctaaagttggaactggaaattgcagagaagcgcatcgccgagcaggagtcaaagttagctaatccggtgcaattgccaaaaacaaacggctattggactgagacagaaaaggcttatgaagaagctattacgctcgcgaagcggcaaattcgcgttgccggatttcgctgtgagggggatgagtag

SEQ ID NO: 186656 - DNA, 303 bp, Klebsiella oxytoca
atgagtatgaaagtttatattgctggccctatgacaggctacaaggatttcaaccgaccagcattcaatgcgtttgccctgaagctaagcctggatggatatgtagtgctaaatccagccatccttcctggtggacttgaacagcgtgagtatatggatatctgctgcgcaatgattcgctgtgccgatgcggtttttatgttgcggggatgggagggctcagaaggcgccgttgctgaacacgcactggctaaaaagatggggctgacaatcatcacagagcagcaggagcgagcagcatga

SEQ ID NO: 186657 - DNA, 294 bp, Klebsiella oxytoca
atggctaatttactgcatggcaacccagcttttaaagcggcacaaagcaagttggctattgcgcaatttattggtagtggtgaaatgtggtcagaggctttttcctcaatgaaagatatttatgaggaagctaagcacgcagaagattttatgttttgcggtcgcgaagaatctctctcggccctgaaattcaatgacgttattttgaattatgacatgtatggcgacttagtttctgttagcgcagactctggcaatgcacgttataaaataaataccgaagtttcttactaa

SEQ ID NO: 186658 - DNA, 225 bp, Klebsiella oxytoca
atgaaaatagaattcaatgatcaagggtcggattcagtcatcacactaacgagcactgtatttgaattccgccttcacaaccgtgctgttgacacggcgatatttcttgccccttccgttcgtgctaagcgtagcggtttctttgttttaaaaacgattattaccggtaaaacctctcacgtactgcgtgcgtataaagcgattaaagcggaggcatcacgatga

SEQ ID NO: 186659 - DNA, 504 bp, Klebsiella oxytoca
atgagtaccgcaaaactggttaaaactaaagcaacgaatctgctctatacccgtaacgacgtcgctgatagcgcgaagaaagcgaccgttgagctgctgaatcgccaggtgatccagttcattgacctgtctttgattaccaaacaggctcactggaatatgcgcggtgcaaactttattgccgttcatgagatgctggacggcttccgcactgcgctcgtcgaccaccttgatacgatggcagaacgtgccgtacagcttggtggcgtagcgctgggtacgactcaggtcatcaacagcaaaagcccgctgaaaagctacccgctggatatccatagcgtccaggaccatctgaaagagctggccgaccgctatgcgatcgtcgccaacgatgtgcgtaaagccatcgatgaagccaaagatgaagataccgctgatatcttcaccgccgcttcccgcgacctggataaattcctgtggttcatcgaagccaatatcgagtaa

SEQ ID NO: 186660 - DNA, 177 bp, Klebsiella oxytoca
atgcaggagcgaaaagtttataaagggataattattggcgaagagcagacttcatatatccacggtgtagataatagctattcaatgactcttcatgtggatgagtttaataactccgggttattatatttaataagaataatatcaattgatcccttgcacgtttgtctttcttaa

SEQ ID NO: 186661 - DNA, 1689 bp, Klebsiella oxytoca
atgtcgcaaagcaaataccgccagcaggacgtacgtgcaccgcgtggcacaacgttaaatgcgaagagctggctgaccgaagctccgctgcgtatgctcatgaataacctcgacccggatgtcgccgaaaacccccatgagctggtggtgtatggcggcatcggacgcgcggcgcgcaactgggaatgctatgacgctatcgtgaaggcgctgaaaaacctggagagcgacgaaacgctgctggtgcagtccggtaagccggtgggcgtattcaaaacccatgaaaactctccgcgggtgctgatcgccaactccaacctggtgccgcactgggcaacctgggaacactttaacgagctggatgccaaagggctggcgatgtacggccagatgaccgccggcagctggatctacattggcagccagggaatcgtgcagggcacctatgaaaccttcgttgaggcaggccgccagcactaccagggcagcctgaaggggcgctgggtgttgaccgccggtctgggcggcatgggcggcgcgcagccgctggccgcgaccttagcgggcgcctgctcgttgaatatcgaatgccagcagagccgtatcgatttccgcctgcgtacccgctacgttgacgaacaggcgacgtcgctggatgacgcgctggcgcgcatcaaaaaatacaccgccgaaggccgggcgatctccatcgccctgtgcggcaacgcggcagagatcgtgccggaaatggtcaagcgcggcgtgcgcccggatatggtgaccgatcagaccagcgcccacgacccgctgcacggctatctgccgaaaggctggagctgggaagagtaccaggctaaagccgagtcggacccgcagggcactatcctggcggcgaaacgcgcaatggccgaccacgtgcaggcgatgctggcattccacgaaatgggcgtgccgacgtttgactacggcaacaacattcgccagatggcccaggagatgggcgttggcaacgcgtttgctttccctggcttcgttcccgcctatatccgcccgctattctgccgcggcatcggcccgttccgctgggttgccctgtccggtgacccgcaggacatctataaaaccgacgcgaaagtgaaggagatcgttaaagacgataagcacctgcatcactggctggatatggcacgcgagcgtatcagtttccaggggctaccggcgcgtatctgctgggtaggcctcgaatggcggcagaagctggggctggcgtttaacgaaatggtccgcagcggcgaagtctccgcgccgatcgtcattggccgcgaccatcttgactccggctccgtcgccagcccgaaccgcgagacggaagcgatgcgcgatggttccgacgccgtctccgactggccgctgctcaacgccttactgaataccgccagcggggcgacctgggtgtcgctgcaccacggcggcggcgtcgggatgggcttttcgcagcactccggcatggttatcgtctgcgacggtaccgatgaagcggcggcgcgcattgcccgcgtactgcacaacgacccggcgaccggcgtgatgcgtcatgccgacgcgggctacgatatcgcgattgagtgcgcgacagaacaaggtttgaatcttccgatggtggcagcaacgcaggggcacgctaaatga

SEQ ID NO: 186662 - DNA, 219 bp, Klebsiella oxytoca
atgcagactaaaaacacaattcccgcagagtttattgcgaactctgctttgctgaaaaatatcgaacatatggtgcaggcccagacggagaatgaagccgttagccacgatcgtttaatcgttgaggttcagcgacgcctgaatatcgagaaaaatgaaattctcgccgacttatatattcaaacgctgcatatgctacgtgccaaaagtcgtcattaa

SEQ ID NO: 186663 - DNA, 477 bp, Klebsiella oxytoca
atgaatagccaaactagcgacattaatcacgggcaaatcaccctcctccccgcagctgatagcgactttgcccagtggctgccgctgtggaaaagctaccagacgttttatcgcgtcgacattccggaggaggtgacgcgcctgacctggactcggtttttaaatccggtcgaaccgatgttttgcgcagtggcaaaacaggaaggcaagatagtgggtttcgtgcattatctcttccaccgctccacctgggccgaaagcgactactgctatcttgaagatttattcgttgatccggacgtccggggtcagcatatcggtaaacaactcattgagtatgttcaacggcaggcgcgaaaacgccactccgccaacctgtactggcatacgcatgagaccaaccttcggggccagcgtctgtataactgggttgcggaaaaaagcggcatgattgagtatcgtatgcgggtgaagtag

SEQ ID NO: 186664 - DNA, 510 bp, Klebsiella oxytoca
ttggaaaaggagtacaccctggatacgattattgttgttaaaactgtcataacgggtattggcgcaacgctgatcatggatttgtggtcatggtgtcaaaaatacatcctcaagataccgccgctgaactatgccctggtcggtcgctggatattatggctagccagaggaaagctctgccatcgcaccatcatctcaacgccggaaatggctggggagaggcttaccggctgggtatttcactacctgaccgggatcgcttttgcttttgtccctctgctactgagcggcgccgtctggctggacgccccctcgcttacattaggcctgctggcaggcgggttaaccttatttgcgccgttcatcattcttcagcccgcattgggctttggcatcgcggcgtcgcaaacacctcgcccatcgctggctcgcttgctcagcgtgctcacgcatctggcctggggattcggactctatatcgcggctctggcaatcagagcgtgggaataa

SEQ ID NO: 186665 - DNA, 1125 bp, Klebsiella oxytoca
atgaatctcacggtgacgattgcggggggcggccttagcgggctgatgctcgcccgcatactgcatgtttatggcatacccgcaataatttatgaagccgaaccctcaccagaagcgcggcgccagggtggtcaactcgatatacatgaaagcagcggccagtacgcgcttcaggaagccggccttagcgatgagtttcgcgcaatcattcatcgcgggggcggcgcaacgcgcatactctcaccgcaaggcgtcgttttattcgatcggccagataatggcatgcggcctgaagtacttcgcggcgatctgcgacagatcctgatcgactcccttccagcgggcaccctccagtgggggaagaaacttaccgagattaggccatatggtgacgggcgccacgctttaacttttgctgatggttcgacagccataagccagctgctcgtcggagccgatggcgcatggtcaaaagtacgccgcctggtatcggatgcccggccagcgtataccggtataacgttaatagagaccttcctgcatgacgttgacactcggcatcctgaagcggcaagcgcagtggggccaggcagtatgtattgtatggcgcccggtacctgcctgattgcgcaccgtgaggccggtagcattattcatacttatgcccagcttaagcgaccgcaacgttgggttgaggacatcgattttaccgatgttgaaatcgccaggcgtcggattctgcaagaatttcccggctgggaagctgaccttaccgcactcatcacggcgggagacacgcctttaatccctcgccccatttattccctgcctgatgagcatcgctggcctcgtgtccccggcgtgacgttaattggcgatgcggcacaccttatggccccaaatggttcaggtgccaatctgggtatgcttgatgccgttcagctgggaaaattcattgcggcaaacgcagacaacctcgatgccgcactgggtatgcatgagaaggagatgttcttgcgcagcaaagctgaggcggcggaaacgcacgttgcgatcgattacattctgggtgaaaacgcgccgcatgcgcttattgcgttttttcaggccgtcgacggcgaatga

SEQ ID NO: 186666 - DNA, 789 bp, Klebsiella oxytoca
atgcggaacatccattttcaccataacgcgttaacggcggcggaaatcactacccgtcgtttatgcaaactgcaccgcgtcacgctgttctcgcccgcgatctgccgggtaaaccgcggcagtaaggtcattgtgcagggtgccagcgagatgctggcaacgccgcagcagctgattattttgcccgccgaggttgagctcgaggtgattaatcagccggaaaacgggctgttttgctccgacctgctctcgcttacgccggaactgctggcggattttaagcaccgctatatgagcgaggcgcagaccggtcgtctgacgtcgctttgcgcgccgctggcgccggaaatgtcatttatgtggcaaagcgtcctgcgggcggtacgggaggggctaagcgccgaactgcagcaccatcaggcgatgggattgctgctggcgctgtatcaggctggctacgcagggccgctgctcaacgagcggcgcgaggacataaccggtcaggtcaggcaaattattatgctgtcgcctgccgaagcgtggagcgtggcgaaagtggctaaaatgctctttcttggcgaatcgacgctgcgccgtcgtttgcagctggagtcccggagcttccgccagatcgtggaagaggtccgtatggcctacgcgctggggcaattacagtctacgtcgcgacccattggcgacattgcgcaaagcagcggctacctgtcaggctcgcgctttagcgcccgttttcgtcagcactatggattattacctaagcatgtacgctga

SEQ ID NO: 186667 - DNA, 135 bp, Klebsiella oxytoca
atgtgtttattaaataaaaaaagcgcggcgtttattatttatcctatttgccgcgtacgcggcggcaaggaggagatgaaaatagccaacggggttttaaacctggcggtatccaggcgtaaaacccacaaatga

SEQ ID NO: 186668 - DNA, 3144 bp, Klebsiella oxytoca
atggcgctaagtgacttactgcaacaagcctgctttcaggcgaaaaaattaaaatccaccgtattgccctctgactatccggcatgggtcattttctttagcgtcagcgatggaaaatcacgcgcgcatactcatatctccagcggaaccagcttcgatctcgcgtggctggcgggggccagagcgctgcaggagtggcgtaaaaaacaggacagcgaaccgcagtggctgcgggttgacgtcgtggacagcgtggaaaagctcagctggcaatccctcaatgaaaaattcatggtcaccaagcgtaactattttcgctttggcctcgcgtttgatccgcagtttaattgcgcaatgcttgagcaggaaattaccggtaacgcgctgctctacgacggggataacggcgttgtggcgccgaatagcgtcaatctggaaaactacgcccggcggcggtttaagcagacgctgagctggccgcaagatccgcagcagccgctctggcgctttaaaacccagggcgtcttctgcgatcgttttggggcaaaagtgatggaacagagcggtcgaggttccggctatcgcgttatcggggaaaactggcaggacgagtgcctcgccgaggtgattaaaaaaggcaccgattatctggcccgtcaggtaaagcaagacggcctctatcattacggctggtttccctgtttcgaccgcccggtccgatcctataacgcgctgcgccacgccagctccacctattcgctgattgagggctgggaagcgacccgtcagccgtcggttcgtcaggcgatagaccgcgcgattgcgtacctggttaatacgctgatcgaagtacggacgctggacgatggccgcgaggcggcgtttctctgcgacgtgggcgatgagatcaagctcggcggtaacgcggtcagtatcctggcgctggtgaaatataccgagacgaccggagaccggcaatatctgccgctgatggcgcagctggcgaccggcatcgcctttatgcaggatccgctcagcggccagtttgttcacgtattgaatagccacgatctgtcgctgaaaggcaaattccgcatcatttattacgatggcgaagcggcttttgcccttatgcggctgtacggcctgaccaaagcgccgcagtggctggagatggtggaaaaagccttcgcctatttcattaaaaataagcactggcagcaccatgaccactggctgagctactgcgttaatgagttaacccgctttcgcccggaagagaagtactttcgctttggcctgaacaacgtgcgcgatcatcttgattttgtgctgcatcgcgtcaccacctatcccacgctgctggaattaatgatggcggcgtctgagatggtgacccgtctggacgcctcgcccgagcatcgccatctgctggcggattttgaccagcagaagttctggcaggcgctggaagttcgggcgcgctatttgctgaacggcttcttctggcctgagctggcgatgttttttaaaaatcccgcacggatcgtcaacagcttctttattcgccaccacagctaccgcgtgcgtatcgatgacgtcgagcactacctttccggctttatcgcctatcagaaataccatttagcggcaaaaaagccgctgctcccgcaggacgacgcgccgccgtcgaataacgcgatccccgtttttctgctggagacgctgcgcgacgtcggcaacggtattgaggtggcggccatgcggcgggcgaagctctttaccgaacatttgcgcaccgtgccctggatagttaccgcgacgtggaatcccgaattgtccagagcggtgcgggcgctgaaagcacgcggcgcgctgcccgaagaggtgccggtttataacctctatgagtggctcagcgattgctttgagatgaacgcgatcgctgcgctggcgccgctggtgggcaatatcgagctcaggcatgccgtcaatcccggcgcggatgtcgcggtgggtaaacacaacttcctgctgcgtccgcaggggagaatcatcgaagactatattgatagcgccggcaatattctgctgcgcaaaagctttgacgagaaaaagggcaacgtgcagctaagccagcttgaaattgccctggcgggtggtgaagtcaaacgctttgctcaggaagaggcgttttatgcgtggatgctggaaacccggctggcggaaaaagggcgctggcattttatcgtcgataaaaataaaacgtggaaaagcttcgtctgctcgcagcccgcacagcgcatggcgtgtacgctgagcgcgattattcactcccatcatcagatgtctaacggcgcgctgaaaagctcctaccggcatatcctcgaacagccggagcttgtcgatcggctgattgtcctcaccgatgagcagtggcaggacctgcagctggagggcttcccggccgcgcggatggcagtgatccccaatcatctcgataacggcaatattccggcgaacccgcagaaagcgccgtcgcagacggtcatttatctggcgcgctattcggaagagaagcagcatgccttgctgctgaacgcctttcgtaaagtgctgacggcgatccccgatgcgcagctgcacacctacggggtcgggccgctgcggcgcagcttaagcgcgcgggtggcggagtgggggctggagaaggcgatccatatcaacggcttcacctccgacatcgcgctggtgcataaaacggcctgctgcacggtgctttgttcgactcaggaggggcagtctctctccgccgtggaggcgatggcctacggtacgccgctgattagctttgccattaagtacggtccgcgcgacatcctgcaggacagggaggcggggattctggtgccctgcggcgatgaggaggccctggcggcggcgctgatcgccgttatctccgacaagtcgctgcagcaaagtatgcagcaggccgcgctgcgcaacgcccagcgctactacggcagcgctatcgccggacgctgggcggcatggctgcagacaagcgagcgacagctggatgccggtgcggagcgcggaaacgggctggaaaaaaagcgccctcgggcagttaacgttggctaa

SEQ ID NO: 186669 - DNA, 909 bp, Klebsiella oxytoca
atgaaaaaagttatcgttttgtttacttccctgcttctgatgggctggtcgctggatgccgcggcattctcctgtcaagctcccgataccgggcaaaagatggactccggctcggcgaatatttacgtcaatctggcgccttctattggcgtggggcaaaacctggttgtcgatttatcctcttcaataatctgtcgaaatgacgacggaagcgaaagcaaccaacttattgactacattaatctcaccaacggtactgcattcggtggggcattggcagcgtttaccggtagcatttattggaatacaaatagttacccactaccgctgaacagtagttcatcaaaatatatcgttaccgacaataactatctcgggttgccgttgcgtatgtaccttacagcaaccggcaccgcgggcggcgtcgtgattaatgctggcgaactcatagcgagacttaatatgcataaagttgccagcaacggaaaccccaaggattttacctggaatatctacgctaataataatgtcgtcattcccactggcggttgcgacgtgtcaacccgagatgtcaccgtcacgcttccagactatccgggcaccatggccgttccggtcacgattcactgcgcacaaaatcaaaatatcgcctattacctgacggggacaacggcggacaggagcaattccattttccgcaacactgcttccgcctcgccagcgcagggcattggcgtacagataacgcgcaatggtaccgtggtccctgccaaccgtaacgtctcgctgggtaaagtaggtacctcaccggtgaacctgggtctgaccgctacctacgcgcgaaccagcgacccgattaccgcgggtaacgtgcaatcgattataggggtaacatttgtctatgagtaa

SEQ ID NO: 186670 - DNA, 1650 bp, Klebsiella oxytoca
atggcgcaaatgaatgaaaacatcgcgaccgcaccggtctctcccttacgcgattttttcgcgaaaccccgtatcatcgccaggcccggctttaaccgctggctggtgccgccggccgcgctggcggttcatctctgcataggtatggcctatggattttccgtttactggctgcctatgtcgcagctcataggaggaagcgcgtccttgcaatgccccgtcacgatgtcgttctggcagcagctgtttgcccgcgattgcgactggaaaatctccatgctgggctggacctacacgctgttttttgtttttctcggctgttcggcggcgctgtggggcagctggcttgagaaggttggaccgcgactggtgagctttattgccactttgtgctggtgcggtggcctgctgctatccagcgtcgctatctatttccatcagctgtggctgctgtggctgggggccggggtcatcggcggaatcggtctcggactgggctatatttcaccggtttcgacgctgctgcgctggtttcctgacaagcgcggaatggcggccgggatggcgattatgggttttggcgggggagcgctggtgggggcgccgctggcaaacggtctgatgaattacttcgccggtccggccggcaacggggtatggcaaagcattctggcgctggcggcgatttatgcgctgtttatgctcgccggtacctttggctatcgcctgccgcccatgggctggcatccttcgggtgagaaggcgcaaaaaacgatccgcaataatcccacgatccaggtgcacgtccgcgttgcctgccgcactccgcagttctggctgctgtggatggtgctgtggctcaacgtcaccgcggggatcggcattctcggtatggcttcgccgatgctgcaggagatctttgccggtaaactgctgtcgctcgatctcagctggcatgagctgaacggcgagcagctgaaacgcattgcaaccatggccgcaggatttaccggcctgctcagcctgtttaacatcctgggacggtttttctgggcatcggtatccgatctgtgcgggcgaaaaatgacctttgcgatcatcttctgcctgggcgccgtgctgtacgggacgttgccgctggtgaatcacggcggctatatcgcgctttatgtctgcgcgatgtgcattatcatttcgatgtacggcggaggctttgccagtattcccgcctatctggccgacgtctttggctcacaaatggtgggcgcgattcatggacgcttgttaaccgcctggtcggcggcggggatcagcggcccggtgctggtgaactatctacgcgagtatcagctgacgcacggggttccgcccgagcgcgtctacgatattacgctgatggtgctgaccggcctgctggtgatgggttttatctgtaatcagctggtgcgtccgctgacggaagagcatgcgatgaccgcggaacagcagcagcaggcgaaaggtctgtataccatcaataaggatgcccagctcacgtgggaggctcgtccgtccacgctgctgttaaccgtaagctggttagcggtgagcgtgccgcttttatggggagtcggcaccaccctccagcaggccgtgaagttctttatgtag

SEQ ID NO: 186671 - DNA, 1032 bp, Klebsiella oxytoca; identical to SEQ ID NO: 118187

SEQ ID NO: 186672 - DNA, 1620 bp, Klebsiella oxytoca
atgcgcgacagaatcaggaccctgaggtttctgttttcaaaaggtgaaccggaaccagtacatcatgtatccgttgtcacacctgccggctaccacactccgcgtacggtcgatacgctgtgccgtagtccgttaagaaaaacctgcctgcaacaaatatgggaaaacagctcacttccggcggatgtttatcaccggctttatataacgccactgcatggcttactggccagggtacagaatgtgccggcaacacagcagggaaagtggtcgcagtcagacggcttcggggaccttacgctgcagttcacaacctgtgcggtcagactggccaaaggatacatgtttccacccggcgctgcgccagaagagcaggcagagcaaaacgtgatgtggaatgcggtcattttctggtctgcactgttctggcatttgccgctcctggcgtctctggagggtgagttgcttgacggtaaacgctggcttccgggaataaccgttccggactcgccttatcgatttcgcttccgtgaagctgacaactcttcagcttttgcagcgctggcagccggacaacttatgccagcagaggctacaggatggctggcagaaaatcccgaagctctgggtaatcttgccggttccttatggaatcagcatccggcgatgccacttatcagaagcttaatgaagcaagctgccgaaaaggtggaatcgccttcgctggaggtatccggggcaaatgagaaagttaacaccctcatagagccggctctttcagttccgcaaacgccgtctgatcaagagattgaattagaaccgtcagtagaaacaacactgaaaactacatcgccagaagctgcagatttgcagggaattcaactcgcatcttctattgcaccggtgccgatggctgatggcagcaatctcgtcagcaatgaaaaggcaggcgagagtacggaatgtgatccaaacgaaacagagaaggctgatacagagatgctgctaagccttttcagtgccattgaagagcctgatatgaccgggactgaagcatgtgatgaagagtcttcaatcagtacgagaacagaaaatgagccagaattttccccccttaatgaactacttccagatgctgataagcctgagataaatcagacagtagcagaagactctttccctgaacacgctgtagaggataacatccctttacacagcattaacattgacgcacaaaaatcagtgataaaaaaacagactggcactgaatttctcaggtggctttctgaaggacttaagagcaagcgaattgacattaatcagcctgattcgagggcgcatgcagttgcagggttcatctttctcagggttccggacatattttatctttacatcagagaaagcggagcagagctaagcagggataccatacaaatggaatttgagaagctgcatattcacaaggtgcgccggggagagcgttttattaaagcgaaactgtaccactctcctggcaaagaaggcacgtttaaacctgtaagtggatatcttgtcaagactacacaccttttcagaggagcgtcttcccctgaagacagcgggcttctgtctttcctgtga

SEQ ID NO: 186673 - DNA, 1509 bp, Klebsiella oxytoca
gtgacctggaaaacaacagccgaacaaaacgccatcatcgaatggaagggtaatcatcttgtggtaaatgcgtttgcaggcacaggaaaaacctctacgttagtgaactacgctgaagccaacccggaaagtaagatgctttacctcgcctataatcgcgctgtgcgggatgaggctgaacgcaaattcccctataacgtagaatgtaaaacgtcgcatcagcttgcatgggcccgtttcggcaggcatttccgtgaccggctgacagccagtctgcgcattacggatgtggccagaaagctcaatacccgccactggccgctggcgcggctggcgctcagcgggctgaacatgttcctctgcagtgctgaccccgagccggggctgatacatctgccgtctgaggatgatcgccacggtctcgatgcaggtaaaattctgggggcaatccaaatcctctggtatgaaatgagccgtactgattcagtctttcccgtcacgcacgacacctacctaaaactgttccagctctctcatcctgacctgtcaaaacgctgggacaccatcctcttcgacgaggcacaggacgccaatccggtgaccagtgcatttgtactgaatcagccctgccgggtcattctggtcggcgaccgttaccagcagatataccggtttcgcggggcagataatgcactgagtgccccgcagctggcgcaggcagaccggttatggctgacagcgagttttcggtttggccctgaggtcgcgcgtgtggccaacatcctgcttgaacgtgccggagaggaaaagcgcgtgacaggtaacgggggccaggatgctgtcgtcagcagccttccggcaggggctgagcatattgctgtactgagccggacggtatccggcgtgatcggcagtgccctgacggcaagccttatggagaaaaatgtcttctgggtcggggggattgaaggctacaaaacagaggagctggaagacctgtactggttctccgccgatatgcctgaaaagatgcagtccccgcgcctcagccgggactatcgggattttgatgaatactgctcaatagcaaaagccacacaggacgtggagatgaaccaggccattcgtctgctcgatgactttttcccactaccgcaaaagctggccatcatgcgccgtcaggtggtaacccatgagaaagacgctcaggtcacggtttcaaccgcacaccgcagcaaagggctggaatggccggtggtaatgctgagtgaggattttactgacattaccgacccgcttctttcggaggatgagcggcaggatgagactaacctgctgtacgtggctgtcacccgggccagaagaacgcttgtgcttaacgaactgatgcgctggctgagcgatgaaggcgggaaaaaccgcgagacgacgcacgaaaccgtaccgtccggaaatggagagagcgccgacaggcacgaagaaacgggaaaaacttctgagagtgagtaa

SEQ ID NO: 186674 - DNA, 684 bp, Klebsiella oxytoca
atgcctggcatgattaaccacgaaaaagcctttgttaagttgttcagtcagacggcccggtatcatcaccggtttaaagtgttcgaagacttcatcagctgcagcgtcatcgcgctggaaaaccggctttgcttcagtgaagcccgggagcagaagtatttgcgtatagtcggtggatacgaaaaggaggacgtcacgcgcatggcgcagctgctggcccacgttgttaacgggctgggtgacgcgtccggggacttcctgggccgcgtcttcatgcagctggagctgggtgataaatacagggggcagtttttcacgccctgggacgtggccagaatgatggcgaccatgcagctgggcgacactgaagcgctgttccgtgacaaacccttcatcaccctgagtgaacctgcgtgcggtgcgggttgcatggtactggcatttgccgatgttctgcgaaaagcggggtggccaccgcaccggtatctgtgggtctccgcgacagatatcgatccgcttgcggccggaatggcatacatacagctgtccctgtgcgggattgccggcgaagtggtggtaggcaataccctagtgaatgaacgacgccggatactttacacacccgggcattatctcggcggctggcctgttcgtctgagttcacggcactttcaggcggcataa

SEQ ID NO: 186675 - DNA, 933 bp, Klebsiella oxytoca
atgtccgaatggtgtcataaccgcctggaaatcaccggtaaatccgtctgcatcgatgtcatgctgcagtggataaacggaactgacgtaccgcgtcaccgccacgcagtgcagcagagcatacagctttttctggccggcgcggcggggatactcaagccggtgcgcaccacgtcgtatccgccctttcaggggctggtccgtgcaggtacagggctttccaccgccgccaaccaggcgtttgaaaactggctggcattgttgctgaaggatgccgttcttgatgcggaaaccatccgggccgttgaccggctgtatcaccagtcaggtctgggtgcgctgaaatgggaaaacatccccgtctcagcccgtgacgttatggcagaactgaccggccggcaatataccgactggtttggtctggtcagtgccggcgaggagtctgatgcttcggctgcctgggaacggctcagccagtatcctgaacgctcccagccctgcgacatgctggccgttataccatcccgtctggctgcagagctgaacggggccggtgggctgatgtccggtgtgtcgaccacaaccagcctctactgccggcagtacggcatggagtggccggccgggcacaatgtcaaatggcagcgccatacgccaaacagtcttacgctgcagatggatacgccctggttcccgccgtcaggtgaggttgtcggggaaatttctgcggtgtttgactgcgaggtgcgtcacagctacagcgagcccgtgagcgggctcagcggttacgactgctatgacggcggcgaacatgtcgacggacataaaggtgcggccggcgcgtctcagcccggtcaggtgctttatctcgtcagcgatgagccagcgttacctgctcaggaagcagcatcttatcgtgaggtccgggggtaa

SEQ ID NO: 186676 - DNA, 987 bp, Klebsiella oxytoca
atgaaaaaaacgacttcacacaaggcggcccgccgtccggcaaaacagactgacctttatcgccagatcaccgaccgcattgttgtcgcgctggaaaacggcgtcgcgccctggcgtaagccgtggcgcgcggctgccggcagcggtctggccggtctgcccctgaatgccacaaccggacgtcactacagcggcgtgaatgtcctgcttctctggatgtcagcggaagagcagggtttccgcaataaccgctggatgacttaccggcaggcgcagcaggctggcgggcaggtgtgtaagggagagaaagccaccctggcggtggtttataaggactggacgaagcaggcggaggatcgcgaaggcaaccgcctttatgacagtgacggtaaaccgctgatggaaaccgtgccgatgctcaaacccctgcagctgttcaacgctgagcagtgtgaggggttgccggcagaggttgcggcttctcctgaacaacccccgacggtggatgaggacggcatactctgtccggatgtgatgaacagggtgatccggatgtttaacgccacaggggttaaacaccggatgctgcctcagaaccgggcttattaccgcccgctgacggatgaaattgtgatgccggtggctgagcagttttttacggaggcggactgctggtccacgctgttgcatgagctggtacacagtaccggtcatgcgaagcgacttaaccgggaggggataacctcctcatcccgcaagttcggggatccggtgtatgcctttgaggagctcatcgccgaaatgggcagtgcgtttttgtgtgcccagctcggggtgttcggtgaggttcagcacgacagctatgtggaccactggctgaaggtgctgaaatctgacaaaaaggccctgttccgcgcctgccggcatgcccgggaagcgtcggaatatctgctggcactgcctgaaagtcaggctgtggcggcgtaa

SEQ ID NO: 186677 - DNA, 348 bp, Klebsiella oxytoca
atgggactggatatttttctctacagccagcaccggcagatcgtcgcagtaccggcaccgtatcatccggtgtgtgaactgagccgcgatttttcactgattacctgggtggataagcatgtcggtgaggtggaaaacgcgacctgtctggaactgtcacgcgagcatattcagcaactgaaagagaggctggactgtgcgattgcgacatttacagagggtattgaggataatccgcttcttcagcgccggctgcagtacgttttcaccctgcgtgacaggctggaaagcctgctcagtgattttgactttgaacatgaatacctgtggttttatgccgcatggtaa

SEQ ID NO: 186678 - DNA, 603 bp, Klebsiella oxytoca
atgctttttttcgacaataaagacctgacgaacgtcctgctgaccgcccgcatgcagggaggccagcttcatctggcaaaggatgagggtgtttatctgatgccggccaccggtgcctggcagggcaacgatccggtgccgcgtattgcgtatgccgcagggtgtcaccctcagaaaaatgaggactggtacgacacggcgcgcctgcttgccggcggcgatgatttcattgaatcactgacgataagcgacgcgatcgccacctctgtactgtccggcaggacggacctgaggatcctgattaccgacacacagatacaggtgctcaccgcagcgactgaccgggtgaaagtggcgcagtatcgccagaaggccgatcagcttctggcgagtgcagttagtcacttcagtgcctgtgtcgggcctgatgaactctgccgctggcgtgaaaacgccgtgcgtctgctgacgcaggcggccttcatcagctgtaagcgggcgaagcctgaagatcatcaaacctttctgaacgcctgtggcaggctgcaggccaggttatcgcaggtgaccccgcagggtgcgctgcgaataaccggacgttaa

SEQ ID NO: 186679 - DNA, 648 bp, Klebsiella oxytoca
atgaaagacctgtcttcttccccggcttccatgtcggttgtctacaccatcgagcacgtcagcacggttccgttgcgtcactggcatgctttcgttctggccgtaacagaaaccttctggcaattgccggtgcgtctgcgtccgggaaatatgtatctgccgtcgcttaaccgcgcggctgacctgtttccggttgctgatgtcatggcgttctgtggcgattcaggcggctgtttctggccggtcaacatgaccattgagcgggagcgcagccacaatacgctgagtatccaggagctggattttcagcatcagccctgcgatttctttgcgcgtgttgtgatggtcctgctgcataacctgtgtccggacagcttccggatacattcttcagacgagggtcgcagctgggcgttaccgttacgctggattggacaacatctcggcctgcctgagcaaccgacgctgagcgcgcctcagccggtactgaaaacaccggtaggcgagggcgcgtttgattccctgctgctgcagctgctctccggtggtgagcgggtgctgagcaatgaggactggaacgcattcgtgctggcggaattccatctgtacgaactgaagcgggtcgcggaaacatctgactcgttttaa

SEQ ID NO: 186680 - DNA, 366 bp, Klebsiella oxytoca
atgcacacagacgtttatacgcttaaaactccactggacacgctcagctggctttgcctgcttgagagtgaactcctgagcatcagggcatttcagcgtctcgatctacacacggaccgggatgaaccgaatgaactgacgtttctggaagattccatcattgggaccggcacagcttatggctggtttgtctttttacttggggaaggcgatattccgcctttgcctgatacgtctaaaaatctgctcttcatgctggacgagctgggaaaagaaattaaccggcccttctgggagaaggccgtggatgaaggtatccaggatgcccggtgtgatcgggctatagcggctctcgaacggatgtaa

SEQ ID NO: 186681 - DNA, 648 bp, Klebsiella oxytoca
atgtctgtcatctcttctgcggttttccctgaacatctccttactcagcttcagcagtctgctgacgcagttgtccggagattgaaatctttcatttatctgcatcgcaacagcagctggtatgtcaacggctcgggcaattatgccgtccgtgcgcatatctcttctgtcaaagatcagggcgttaacgtctttcttaccgttcgtacaggttgccaccgcgctgagtatgtatttcaccgcctgccggtttcctttccggagggcattctcatgactgaagcactgcacgatgtcactttccgtattctgtcgatgtctgagacgcgacgggatgtatgtcccgctcagtatggcctcgtaagtggcgttttcatccggggcgaaatcctcagagataacgtctcctgtggcgaacaggtttttgtcgcaccgctcggtgattgtgatccggctgaccccgaactctgtgtctggtgtcagtattacggatattcttcccgggttaaggccggcgacatactggatggggtggccgtttctggcataaatctcaccgatccactgtcgttagctgtgctgcaacgcctccgctttaatcctgaatatgtgtatcaggagcaatctgattcatatgcactgaactga

SEQ ID NO: 186682 - DNA, 618 bp, Klebsiella oxytoca
ttgtttatatttggatatcttcgtgcttcaacacaagaacaggatgcgttgcgtgcaaaagcgaggctcaaggactttgctcaacaacacaatcatcgcatagctggttggtatgttgaaaatgcttcaggtgcagcattgcatcgaccggaactgatgagactgcttcaggatgcagagccaggagatgcgatagttatagaacaagtagatcggctttcacgtttggatgataacggctgggagtctttaaaaaagatgattcatgagaaatcgctttcaataataagccttgatctgcctacaagtcatattgcgctatccagctcctcagctgatgactttacccgtagtatgctccgggcagtgaataatatgatgctggatatgttagccgcaattgctcgtaaagattatgaagatcgccgcagaaggcagatggagggaattacaagcgccagggagaagggaaaatacaggggaaggctggcagacaaggaaaaacatgaattaataagaactctccgcaagaaaaacggaaagtcaataaacgaaacggcaaggctcgctggcgtatcacgcatgaccgttattagagcatgtaagaataaagattga

SEQ ID NO: 186683 - DNA, 900 bp, Klebsiella oxytoca
atgtccagattcagtaaacagctgtgcaaacaacttgtcacacttgctcgtcagggacggggaagttataaaactgtggctgaccgctcaagaattgcagaacgtttttctgaacgtctgtctgaactgaatattcagattagggacgtaaaacatatcaaaacttcccatattgaaaagtatattgagagcaggaaggcagacagtttgtctctccggacgttacagaatgagatgtctgctatccgctctgttttattatcagcagggagaaataaactggccgatcccaatcataccagcctgagtaatcaggccctgggaatttctggtgctaaccgggatggaactaaactccctattacagatgaaaaacttaatgcggttgtgaattttgcgcttaaaaaagatgaaggtgttgcgctcgcggtacaactttcccgatatcttggattgagaacggaagaaaccgtgcagtccgcaaagtcgttaaaaacatggaagcagtcattgattaacaataatgagcgtgtccgtgttgttttcgggacgaaaggcgggcggccgagagaaacaacagttttcaatcgtgaaaaagttttatcaattctggataaggcaattcattatgtcagtgaacataacggaaagctgattgataaaccctctctgcataccgcaattgatcgttaccgaaatattgtaagagaggcagggatgaatggtaaaaatgcgccgcacagtttacgttatgcttactcacgggatgctgtaaatcatcatattaaaaatggaatgagtcgcgacgaagccgaggcattagtttcaatggacctgggccacggagatggccgggggcggtatatcaaacaggtttattttcgtggggaaacagaatag

SEQ ID NO: 186684 - DNA, 672 bp, Klebsiella oxytoca
atgaaagtggttgatatggatattttaaaacaacgccttatgattctgactttcggattatctaactttttattcttttatttattgttaacctctattgatctaaatatattcttaatgactaggcttgatttctcaatattacatttgcagataattaagcctctgatgatgcttttaatttttttatccataactcacttattaaataacacctcactttaccaaggattaacctgggggaaacctaacaagcagtcatttgtttttttcttgctcataattattgcttacactgcttcatactaccttacgccgaaagaacccttcgttacagaatttactaaaggtttgtcacatgaaatggcagctgtaaaaatcgcagccacaattattattttccctctactggaggaactggttttcagaggaattatcctgagttcttttttaaacgcccttggtgaaaaggcgggctatatcatcggtgggctgacagtttctgttttgtttgcagttatacacacacagtattcattgcccaccaaaatccaaatgttttcactttcattaattttctgtggagcaagatatcaaagcagagggcttcttttaccaattctactgcatgctttttgtatcgcgcttggcctatatattgagttaaaataa

SEQ ID NO: 186685 - DNA, 549 bp, Klebsiella oxytoca; identical to SEQ ID NO: 112183

SEQ ID NO: 186686 - DNA, 1272 bp, Klebsiella oxytoca
atgtttgcgctggtcgatgtgaattctttttatgcttcatgcgaaaccgttttcaggccagacctccgtggcaaacctgtggttgtactatccaataatgatggatgcataatagcccgttcagcagctgcgaagtcacttgggctaaaaatgggtgacccttggttcaaggttggccgcgaggcggaaagaagaggcgttgttgccttttccagtaattacagcctttatgctgacatgtctgacagagtgatgactattttgcagatgttagctccccgcgtagaaatatacagtattgatgaagccttttgcgatcttacgggagtaagtggtcttttatcacttgaggtttttggccatcagatacgtgagcagatcaggcgcaggacacaccttaccgtgggggtggggataggcccaacgaaaactctggctaaactggcccaatatgcaagtaaacgctggccagctacgcgaggagtagttgacctgagcaatatagggcgacagcgaaagttaatggccttggtgccagtcgaagaggtctggggtattggccgtcggctcggtaaaaaattgcagttgatggggattaacaatgcactccagctgtctgagctgtctccttcatttattcgtaagcaattttcagtggttgttgaacgaacagtaagagaactcaacggcacgccctgcctgggccttgaagagtttacagctccaaaggagcaaatcatatgctcccgctcctttggagaaaaacctacagatgaattcagcatccatcaggccgtctgcgctcatgccgaacgtgcagcagaaaagttacgcgcagagcaccagttttgtaaacgagtagcggtattcatcagtaccagtccctttgcagagaatgaatcgttctataaaaatcaggctgtaacggagcttgctgttccggcccgtgattcccgggatatcatcaaggcggctgtaagagctcttgaaacaatattcatcccggggcatcgttatcaacgcgcaggtgtaattctcaccgattttcgcagcgcggcagtatcacaacttaccctgttcgatgaccttcagcctcatcgtaatagcgatgaattaatgacactcatagacagcattaacagctctggtaagggttcagtctggtttgcagggcagggcattaaaagtgatgccacaggctggaagatgcgaagagaaagactttcgcccgcttttacaaccagattggatgatattgtcagagtaaggtaa

SEQ ID NO: 186687 - DNA, 849 bp, Klebsiella oxytoca
atggattatcaaacggttagcaaaatatttagcaggcctgtagttttggaaatagctcaaaaaaacagaacgagccttttcaaagagattatttatgaaacttatcctgtgaataaagtggaggataagtcaatattttcaatttatgacgaagtctataaaacacttttaaaaaaatacagaaacgaatatgtttataaaaatgaaatagcaaaaaaaataataaagcgtaatcataggtttaataatgttagttatgtcaatgaattcaaggtaaattcatgcatcgcagatgttgtaatatttaacaattgctctactgcatatgagatcaaaactgaacttgattctttcgaaaggttacaggatcagttatctgtttataaaaatgtttttgagtttgtatatttggttattccattgcagaaattgaaacaagcattagacttgcttgatgattgtactgggataattacattgaatagttataatgtattgagctatgaacgtattgcaaaatctaatcttatgataatgtcaaaagataaaatgtttaactgttttagaccgtctgaatatatttatcttcatgaggaaattacaggttccttacctgccggtaaagcagcacaagtaaaaaatatgtgtaagaatacctttattgaattatctattgagcaagcctatgaggaaatgctcaatattttcaaaaaaagatcattggatacatttgaaaaggagagttttggcgcattgccacaatcattattagccactcttctaaatttgagattgaatagaaagtctttgagtaacctcaaagaaaacataagagaaacaatatgttaa

SEQ ID NO: 186688 - DNA, 948 bp, Klebsiella oxytoca
atgtatcattgttatttaagaggcaaacagtatgagttgttagcggttagagcatgtatttcaaaaattgttcagaaaaacatgacggtaattattgagcctgtgagagaaagtaatcgtgatctatacagttgcttaagagaagtaagtcaattcaatgcaagggttatattaattgtaaaccctaaatgcggagagttggaacagaatcaaaggatgttagattcgctaattaatggtgctattgagatttacccctctattgagctcggttatattgtggatgataccacgagtttttcgcagctaaattctttcttcaattcttatgcacagcattcaaagtctataattcactatggcatttattccaatagcaatcagttgttacagttcgagatgtctgaccccctcttcagaacgaacatatttatagatgggaaatgtagtcaacattatatttcaaattttaatcaaaccttcaaggtattaattcatgacggtttaaatagaacatctacaaatgctggttactcaaataatacaatcgagtttttttctgatttatatgtgaactatattcgcttgggatatcaaggctttggtgatttttctattgtgggtgatcatttcagcgaaggtggtggtcaggctatgacagccgcaatacacatcacttataaagatcttgacactccagatattttaatccatcacttcctgtctgatccgcggaatctatatgaagatgttgcaattttgattgatgaggctttggaaaaattagaagattttattaataatgtaaggcctgatatccttgcgtggtccagttcgtgcggggaactaatttccatttataatacacctggacaaaacactaacttggcttatattaaaaaattatctatcaaacatcattttgaactaatgcatcatattatatag

SEQ ID NO: 186689 - DNA, 258 bp, Klebsiella oxytoca
atgttcagcgttcagccagccttcttttcggagctttttgacaccagcgtgcgctataccggcgtgtcgctcggcttccagctggcgaacatcgtcggcggcctaacgccgatgattggtaccttgctgctggtgtggtccggcggcgcatcgtggcccatctcgctgtttctcgcctgcatggcgctgattaccatcctgtgcgtctgcgtgacgcgggaaagctataacgatgagcttaatgaggtgaagaagtag

SEQ ID NO: 186690 - DNA, 1344 bp, Klebsiella oxytoca
atgaaaatcaatactacaacagtcgccattatgctgctggctattcccgccagcgcctggtcagcttcgaccactaacagcctgaaggagcgcgattatatcgataccgtgctcgacgatccgttattcagccagtcccatatgaatttatcgtttaaaaactactggaaatatcttaaggaagaagagaccgagccaaagaaagtccataatgcctggggtcagggcgtcgccgtcgattatcagtccggctattttgccgatattattggctttgatgccacttactacggagcggtaaagctcggcgccagcgattactttaactcccgcggcgtgctgtataacaacggcagcgggaataaaaagagcaacgctgaaggcttttccaaatttggtcaacgcaacgtcaagctgcagtatcgcctggcggacactcatctgaacgcccgctggggctggcagacgatgaaaaactttggcgtcatctccaactcgacccgcctctccccgaccacctatttgggctggaccggcgcggtgaactacggccccttcacgctgcgcggcgcgtacatcgaaagcgcgatggatcgtaactcgccggataagaaacgcttccagaccaacagcggacagtacattaaccatatcgccagcggcgatattctgtggcaaagcgagcacctgaacatgcagtacggctatggtgaaagcgataactatctgcgccgccatattctgtttaccaatattaagccaataaaagcgctgaacatcggtactcaggtttacgccactcacgcgctggacgagtataaagcgatgccggcgaataagcgtgactttgacgacgacgcctggcacatcgccatggatgtgaagtggcaggcggacaactggagcaccaagtggggtctgggctataccgatgcgaacaaggccaatgaagtgggcttctacccgcgccatatgagtaaaaactcgcgcgggacctttatctcaatggcctatgccggcaacgactatatgcgcgacggtgaactggttctctctaatatgtcggactataacctgacgccagagctggcgatcggtctcgccggcaacatcgcccagtttaactaccgcggcaaccacgtccgtaccggggaaattaacgccttcagccgctgggtgccgacgcacccgagactaaaaaatctcaccgtctgggcgatgttcgggccgggctggtcctataagatgaatggcaaaacgccggtgcttaccgacggccattacagccgggccaactcgctctcttcggaagtgattatcgaatataaatttaatctgttctga

SEQ ID NO: 186691 - DNA, 861 bp, Klebsiella oxytoca
atgcgtaaccacccgttaggtatttatgaaaaagcgctggcgaaggatctcagctggcctgagcggctggtgctggccaaaagctgcggttttgattttgtcgaaatgtcggtggacgagaccgacgaacgcctttcgcgcctggagtggaccccgggccagcgggcatcgctggtgagcgcgatgctggaaaccggcgtcgctattccctcaatgtgcctgtccgcccatcgccgtttcccctttggcagccgcgacgaggcggtacgcgagcgggcgcgggagattatgactaaagccatccgcctggcgcgcgatctggggattcgtactattcagctggcgggttacgacgtctattacgaagagcacgatgaaggcacccggcagcgttttgccgaagggctggcctgggcggtagaacaggccgccgccgcgcaggtgatgctggcggtggagatcatggacaccgcctttatgaactccatcagcaaatggaaaaagtgggacgagaggctttcgtcaccgtggtttaccgtctatccggacgtcggcaacctcagcgcctgggggaacgacgtcaccgccgagctgaaactgggtatcgatcgtatcgccgccatccacctgaaagatacgctgcccgtcaccgacgatagcccgggccagttccgcgacgtgccgttcggcgaaggatgcgtcgattttgtcggcatctttaagacgctgcatgagctgaactaccgcggttcgtttctgattgagatgtggacggagaaggccagcgaaccggtgctggagattatccaggcccggcgctggattgaatcacggatgcaggaaggaggtttcacatgttag

SEQ ID NO: 186692 - DNA, 1497 bp, Klebsiella oxytoca
atgcgcgattactggctggggttagactgcggtggaagctggctgaaagccggattgtatgaccgtgaaggccgggaggcaggcgtagagcgcctgccgctgcgcacgctcagtccacagccgggtagagcagagcgcgacatgtatgcgttatggcaacagtgtgctgcggttatcgccacattgctctcacgtaccggcatcgacaatacccgcatccgcggcgtaggcatctcagcgcaaggcaaaggtctgtttttactcgataaaaatgacaaaccgctgggagcggcaatcctctcatccgataggcgcgcgatgggcatcatccatcaatggcagcaggatggtattccggaacaactctaccccattacccgacaaaccttatggaccgggcatccggtctcccttttacgctggatgaaagacaatgaacctcagcgctatgcgcagataggctgcgtcatgatgacgcatgactatctgcgctggtgcttaaccggcgtgaaaggctgcgaggagagcaacatctccgagtccaacctctacaacatggccacaggccagtacgacccgcgcctgaccgagtggctgggcatcggtgaaatcgataacgcgctgccccccgttgtagggtcagccgaaatttgcggggagatcaccgctcaggcagccgctttaaccggtctggcggcgggtactcccgtcgttggcggcctgtttgacgtggtctccaccgccctttgcgccgggattgaggatgaatcggccctcaatgcggtaatgggaacctgggcggttaccagcgggatcgccaacggtttgcgcgagcacgaagcccatccttatgtctatggccgctacgtcaatgacggccagtatatcgttcacgaagccagcccgacctcgtccggcaacctcgaatggtttaccgcccagtggggcgatctctcgtttgatgagatcaatcaggccgttgccagcctgccgaaagccgggagcgaactgttttttctgccgtttctctacggcagcaacgccgggctggagatgacctgcggcttttacggcatgcaggcgctgcatacccgcgcgcacctgctgcaggcggtttatgaaggcgtggtcttcagccatatgacccatctcaaccgtatgcgcgaacgctttacaagcgttcaggctctgcgcgtcaccggcggtccggcgcactccgacgtgtggatgcaaatgctggcggacgtcagcggcttacgcattgaactgccgcaggtggaagagaccggctgctttggcgctgccctcgcggcgcgcgtcggcaccggcgtataccgcagctttagcgaagcccggcgcgcccggcagcacccggtacgcacgctgctgcccgatatgaccgcccacgcgcgctatcagcgcaaataccgccactacctgcatttgattgaagcactacagggctatcacgtccgtattaaggagcacgcattatga

SEQ ID NO: 186693 - DNA, 987 bp, Klebsiella oxytoca
atgaaattacatgttattgctcgttcattattcatagctggtctgacagttttcagcatgtcgtctctggcggcgcagtctttacgttttggttatgaaacaccgcagactgactcccaacatattgctgcgaaaaaatttaatcaattattaaaagaaaaaaccaatggcgaattggccttaaaactttttcctgacagcacattaggtaacgcacaggcgatgatcagcggggtgcgtggcggaaccattgatatggaaatgtccggttcaaacaatttcaccggcctggccccggtattcaacttacttgatgttccattcctgtttcgcgataccccacatgcgcataaaacgctcgacggtaaagtcggcgatgaactgaaaaaatcactcgagtcaaaaggactaaaagttctcgcgtactgggaaaatggctggcgtgacgttaccaactcccgtgcgccggtaaaaaaccctgccgatctaaaagggttaaaaattcgtaccaataacagcccaatgaatatcgcggcttttaaaatctttggtgcgaacccgattccgatgccgttctccgaagtctataccgggctggaaacccgcacgattgatgcccaggaacatcctattaatgttgtctggtcggccaaattctatgaagtacaaaagtacctttctctgactcaccacgcttattctcctttgctgctggtgatcaataaaaccaaattcgattctttaagcccgcagtttcaggaagcgctgctaagttccgccaaagaagccggcgactatcagcgcaaactggtcgccgaagatcagcaaaaaatcatcgacggcatgaagcaagccggagtggaagttctgaccgatatcgatcgtaaagcctttagcgatgtgctcggtagccaggtacgcgatatgttcctgaaagacagccctcagggcgcagatctcctgaaagccgttgatgaggtgcaataa

SEQ ID NO: 186694 - DNA, 1278 bp, Klebsiella oxytoca
atggccgtggtgatatttctctgctgcctgctcggcgggatcgcgattggtttacccatcgcctggtcgttactactttgcggcgcggctctgatgacatacctggatatgtttgacgtgcagattatggcgcagactctggttaacggggcagacagtttctccctgctggcgattcctttttttgttctggccggtgaaatcatgaacgcgggcggcctgtcaaagcgaatcgtcgatctgccaatgaagctggtcggccataaacccggcggcctgggctacgtaggcgttattgcagcaatgatcatggccagtctttctggctctgcggtggcggataccgccgcggtcgccgcgctgctcgtgccgatgatgcgttcggcaaactatccgatcaaccgctccgttgggttaatcgcttccggcgggatcattgcacccattattccaccctcaattccttttattatctttggcgtttccagcggtctgtctatcagcaagctgttcatggctggcatcgcaccgggaatcatgatgggcgcggcgcttatgctcacatggtggtggcaagccgggcgattaaatcttccctcccagcccaaagcaacaacgcgtgaaatctggcaatcattggtttcaggcatctgggcgctgtttttaccggtgattatcatcggcggcttccgttccgggctcttcacgccaacagaagctggggcagttgccgcgttttacgccctctttgtcgccgtcgttatctatcgggaattaatgttttccagtctttaccacgtgctggtcaatgctgccaaaacaacctctgtcgtcatgtttctggtcgccgcggcacaagtatccgcctggctgattactatcgcggaattgccaatgatggtgtcagatttgctgcagccgctggtcgactctccgcgactcttatttatcgtcattatgatctcaattatggtcgtgggtatggtgatggatttaacgccaacggtgctaattcttacccccgtattattaccgctggttaaagaagcaggcatcgaccctatttatttcggagtcatgttcatcattaactgctctatagggttaatcacaccgccggtcggtaacgttcttaacgtgatatccggcgtagcaaaattaaagtttgatgacgcggtgagaggcgtattcccgtacgttgccgtcctgatatcgctgctggttctgtttatttttattcccgagctaattaccacaccgcttaaatggattaattaa

SEQ ID NO: 186695 - DNA, 474 bp, Klebsiella oxytoca
atgaagcgggtacttgagggcatacttgcggtattaattgccgtactttcctgcattgtatttattaatgtggttttacgttatggttttgagagcagtattttgtcagtggatgaattatctcgttatctctttgtatggctgacatttatcggcgccatcgttgcatttatggataacgctcacgttcaggtcacctttgtagtggaaaaactctcgccagcgaatcaacgccgtctctcgctactgacacattcgctgattttattgttatgcatcgcactaggctggggcagtttgcaaaaagcgatgcaggactggagcgatcgctcgccaatcctcggtttaccgattggcctgatgtatatcgcttgtctgcccacaagcgttgccatcgcattaatcgaactgcgtcggctgtatcgcttaataacgcgtaacgattcctttcaacaaccacagcaaggagcctaa

SEQ ID NO: 186696 - DNA, 942 bp, Klebsiella oxytoca
atgaactcgaataataccggttacattatcggtgcgtacccctgtgccccctcatttcaccaaaagagtgaagaggaagagacggaattctggcgacagctctccgctaccccaaacattcgtgggcttgagcagccctgccttgaacatcttcatccgctcggcgacgagtggttattgcgccataccccgggacactggcagattgtcgttaccgccatcatggaaaccatgcgccgccgcggtgaaaacggcggctttgggctggcatccagcgacgaagagcagcgcaaagcctgcgtggagtactatcgtcacctgcagcagaagatcgctaaaatcaatggtaagaccgccggaaaggttattgcccttgagcttcacgccgccccgctgacgggcaatgccaacgtggatcaggctaccgacgcctttgcccgttcattaaaagagattacccgctgggactggccctgcgagctggtgctggagcactgcgacgcgatgaccggcaccgcgccgcgcaaaggatttttgccgttagaaaacgtgctggaagccattgccgactacgacatcagcatctgtatcaactgggcgcgctctgccattgaagggcagaatagtcgtttgccactaacccacgtgcatcaggccaaacgggcaggaaagctcggtgcgctgatgttctccggcacgacgcagagcggagagtacggtgagtggcaagatctccatgctccattctcacctttctgctcgcaaagcctgatgaccgagaaacatgccagggagctcattaccgccgccgatcccgattcgctgcggtttaccgggattaaattgctggaaatcaatgccagcgccgatattaatcaccgcattagtatattacgtgacggtattaatactctggcgaaagccacccagcggttgacctga

SEQ ID NO: 186697 - DNA, 465 bp, Klebsiella oxytoca
atgatctttggtcatatcgcgcagccgaatccatgtcatctgccagacgcgattgagaaagcgcttcactttttacgcaccacagactttcgcacgtacgaacccggcgtcgtggagattgatggtaaaaatatttacgcgcagatcatcgatttaaccacacgtgatgccgccgaaaatcgtcccgaggtgcatcgccgctatctggatattcaatttctggcatcgggtgaagagaaaatcggtattgctattgataccggcaataatgaaataaccgaagacttactagaacagcgcgatattattttttatcacgatagtgaacatgagtcgtttattgaaatgataccgggaagttacgcgatttttttcccgcaggatgttcatcggccaggctgtaataataatatcgctacgccaatcaggaaaatagtcattaaagttgcaatagcggctttatag

SEQ ID NO: 186698 - DNA, 381 bp, Klebsiella oxytoca
atgaaaaacaatcttattccaaggctgttgatgtctattggcgcactggtttatctgctgggaatctggcgcacctgcccattatttagcggtaaaggctattttctgggcgttctggtcatggggatgttcgcgattttagcgcatcaacgtacgatggaggagaaggggccagacgatggttttgcttcgctgtgccgccttgtgctcctgctgtcggtcggtttactgatggtcggcgcctggttcgtacccgccggatgggacgagaagatcatctacgtggcggcctggtttgtgtgcttatacggcgtttccgcgatgccccataaagcgctggccgcacaggctgcgcagaaagattcctcagaacggccttaa

SEQ ID NO: 186699 - DNA, 903 bp, Klebsiella oxytoca
atgtcagttggaaaatttccgaatctgcggctgttacacgtttttattaccgtggcgaaatatcagggctttgccaatgcgcagcaggaacttaacctgacggtttcggctatcagcaactatatgagtgaactggaagagaagctcggcatcaccctatgtcgtcgcggtagaggcggtttttctctgaccgaaaaaggggaaaccgtcctccagcaaagcatcgacctgctgaattcgatggaggattttgagcgcaatacggcgacgctgcgcggcgagcagactgggatttttaatcttggcgtaattgactcgacgattaccgacccgatgctgccgatgagcgaaatcatcgccacgtttagtgaacgcttcccgctggtgcatattaatttacaggtcagaagcccgaacgcgcttttgcagggcgtactgaataatgaactggatctcgctgtgggcaccttctctttacaggccaatagcgtggtgtctcacccactttatcgcgaacaaaactggctctattgcggtaacaaacactctctatttaccgttaagcacccgacggaagcgcttatttccgagatgcgaatggtcactcgcagctactggagcagcagcgatttagggcgcaaaggctttaagcagagcgtcgcgagtgcagaaagtatggaagcgcagctgatgctgattctgtccggcaaatacgtcggctatctgccggaacactacgctttgccctgggtgcaatcgcaaaagctgcgcgccctgctgccaacagaatatggctatcaggctcccttctcgctgattttccgccggggtcgcagcaaagaaaccttaattcgctcaatgcgagatgccgtgcgtgctggcgttaaatcacgcaaaaattag

SEQ ID NO: 186700 - DNA, 972 bp, Klebsiella oxytoca
atgacatccttaattgaacatgaatacccgcagccgcaggatggcgaaattccacgttttagtggattaccgaccttttttcgtctcccttttgcgccacaggccgccgacctggatatcggcgtggtaggcgtaccgtgggacggcggaaccacaaaccgtgcgggaactcgccacgggccacgcgagctacgcaatgcttcaagcctggtgcgtcgagtccaccagaccacccgccgttctccctatgattacgcccgcgtgggcgatctgggagatgtgcgtatcaatccggtagatatgcaggatagcctggcgcgcattgaagcctggtatcgcgcccttgatgagcagcaggtgatgcctctaaccgcgggtggcgaccatctcaccacgctgccgattttacgggcgctcgggcgggataaggggttggggatgatccattttgatgcccactcggatactaacgacagctacttcggcggcgagcgctttacccacggtactccgtttcgtcgtgcggtagaggaaggtgttctcgacccgcaacgcacggtgcaaatcggcatccgcggagcgctgttttccgccgatgagcaccgctgggcggaggagaacggtatcaccatcatccgtatggagcaggtggacgagctgggaatcgacaaggtgatgcagaggacgcgtgagattgttggcgagcagcctacctatatcagcttcgatatcgatgtgttggatccggtctatgcgcccggtaccggaacgccggaaattggcgggatgaccacgctgcaggctcagcgctgcgttcgtcagcttgctggattgaatctgattggtgctgacgtggtggaagtctcgccgccctttgaccagggcaatcttaccagcctgaccggagcgaccatgatgtttgaactcctgtgccagcttgccgacgcccatcatcggcgtatttctcaataa

SEQ ID NO: 186701 - DNA, 816 bp, Klebsiella oxytoca
atgaaaagaaatctctcattgcgctatctcgctaccgcgttggttctggcatcaggcctttttacggtggccaatgcggcggatgcgactctgtcgccgggaaaactgaaaatagcaatggaagtcgcctacccgccttttgaatcctggcaggatgacaaaattgttggttttgatgctgaactggcggcgttattaagccaaaaagcgggcctgacgctacagctggtggataccaaatttagcagtctgatcctcggcctgagcgggggacgccaggatgcggtgatctctgcgctctatattacgccggagcgaacccagcaggcggatgcgatcccttatgctaaaaccggagcctatatcatggtgcgcagcgatagcaaagttgcgccgcaaacggaaaacgaactttgtggcttaaccattgggctgcagcagggtacatcgtgggtgaaaaagctgcatgagctttcgacgagctattgccaggcgcaaggtaaaggggcgattgagattaaagagttcccgaccgcgccggagacgctgcaggcactgctctccggcaatattcaggctcaggtggatattgctggcgtagtcagcctgtttacccagcgcagcaaaggccgactgaaggtcagttccccgcagacgatatatccgcaaacgctgggtatttacatcaagaagggtaaccaggcgctggcgcagcagttgacctccgcactgaaaaccctgcgtgaaaatggtgagtacagcgccttgctgaaaaaatatgcggtatacggcatcaccgatgacacggtgcagtag

SEQ ID NO: 186702 - DNA, 282 bp, Klebsiella oxytoca
atgaaacacatgatgatttgctgcggcgccggtgtagcgaccagcaccgttgctttaaataaactgcaggatttcctgaagacagagaatattctcgataaagtccgtatttcccagggaaccgtggctgaagccaaaacccgcgacgatgtagattttattgtttctacttcgccggttgcgctttctattcccgttgttaacgctctaccgctattaaccggtatgggtactgataaagttttcagcagcgtgaaagaattaattctcgccgagggttaa

SEQ ID NO: 186703 - DNA, 1365 bp, Klebsiella oxytoca
atgtttattgttgattatattgtaggtttaggggcatcggtcatgatgccgctaatatttatgctccttggtttgatattacgcctgtcgctgagcaaagcattaaaagccggtttaatggtcggtattggttttatcggcttgagcattaccgttaatctgatgatcgattccctgaccccggtaagccatgcgctggtggagcgttttggtctgaatctcaacgtgctggacgtgggctggcctgctgccgcagcggtagcgatggggacccgggtcggcgcgctggtgattccagtgtgcgtcgcgattaacgtgttgatgctgtataccaaaaccacgcgggtgctgaacgtggatatctggaacctgtggcaccatgcctttaccggttccctggtgacgattattaccgatagcctgtggctggggatatttgccgctggtatcaactgtattattacgatggtgattgccgaccgtaccagcggcgatgttgagaaatacctgaacttgccttctatttcggtaccgcacggtttttccgcatcatttgtcccggctgcgtggttggtgaatgccattgttgaccgtatcccggttattcgtgatatcaaaattgataccgaagttatccagaaacggttatctattctcggcgatccggcctctctgggggcaattatcggcgcgctgttgggtataatcgcgggtatcgaagtgaaagctattctgcaaaccgcaataaccatggcggcggtcatgaccattattccgcggatggcgaaaatgctgatggaaggggtttatccgattagcgaacgtattcaggagatagctcagtcgcgtgccggttcattcggcaaaatcgctatcggcctggattcagccgtgagcgttgggcacccggtgacgttgtccgtgtcgatgctgatgatcccggtgatgctggtactggcggcgattattccgggcaaccagttcctgccgttcgcttctttgaccggcctaccgttcgccttcgtgttggtgacggcggtttgtcgcggtgatatgttccgcacgctgctgaccgggctgttaaccttaagtctggcgttgttgattggtaccaacctggcgccgattgtcaccagcactgcggtgagcactggcttctcgctgccgcaggggaccaccagtattagcagcgtggattatgccggggcgatgctgccgtgggcgattatccagagtttccatctgaaagagattggcgtaggtatcctgacgctgtgcactatcgtgctggtgctgtggaatcgccgtaaactggcgcaggaaaatgaacagatggccgaagcgaacgtggagggcgggaaatga

SEQ ID NO: 186704 - DNA, 456 bp, Klebsiella oxytoca
atgatgtttagcgcacagcgggtggtggagtttaccgggtctgtcagtcggagggctttactgacccgcctggcagatagcctgcaggccgacgggctggttaaaccgagttttgccgacggagtgcttgaacgggaaaaagtctatccaaccgggatatttatggagacccatagcgtcgccattccgcataccgagtttgagcatgttaaccagaccggttttgcaatcggcattaacctggcgggggttgaatttcagcgtaccgacgagcctgaagagagcgttgtcccacagatagtcgtgatgatggcgattgataaaacttgcgaaaaagtggcaattattcaatccttgttcgcattattggccgatcgcgatcgagttaacgatatcgtgaaaatgacgccagaggagattgcaaaagtgttcaccgatgccgtcgtcacgcagtaa

SEQ ID NO: 186705 - DNA, 327 bp, Klebsiella oxytoca
atgttacgaatcagcgacgtcatagagttagcgatggtcagtcgtaaaactatctataacgcaatcaacagtggccggctgaaatatcagttggtgaatgttgataatcgtcaggttcgtatgttcctcgaagaagatgttttcgaagcttttccgaaaaccaaccgtgcggtgactcaggagcaagaagtgcaggcgctacgtgaagaggtcgcttcgcttaagtttgctctggcggagctgcaaaaagcggtgaacgccatggatccggaaggcaagtacgaaatgaccagcgttaaagagccatctaaaacgcccgaccgctaa

SEQ ID NO: 186706 - DNA, 795 bp, Klebsiella oxytoca
atgaatattgatttatcggggaaagtcgcactggtcaccgcctccaccggcggtattggttacgccatcgccaaaggtctggcggctagcggtgcggaagtgatgattaatggtcgcagcgagcgtagcgtgagcgcggccatcgcccgtttgcagaatgaggttcccgacgcgaaactgcgcccggcaattgccgacttaagcagcgctgaaggcgtcaatcagctggtgcaggctgttaacggagtcgacattctggtcaataacgccggtatttacggcccgcaggatttctatgaaaccgatgatgcaacctgggagaactactggcaaaccaacgtgatgtcgggagtgcgtctttctcgcgctctgctaccggcgatggtacagaacggctggggtcgggttgtgtttatctcttcggaatcggcgcgtaacattccggcggatatgattcattacggcgtgacgaaaaccgctcagttgtcgctggcccgcgggctggcgaagtttgtcgccggtagcggcgtcaccgtcaacagcgtactgccggggccgactatctctgatggctttgctgagatgatgaaagatgaagtcgcgaaaaccgggaaatcgctggagcagttggcaaaagagttcgtgatggcgaaccgtccaggctcggtgattcaacgtgcggccacggtggaagaagtcgccaatatggtggtttatgtctgctcgactcaggcttcagcaacatcaggcgcggcgctgcgcgtggatggcggcgtggtggatgacatcgtctga

SEQ ID NO: 186707 - DNA, 909 bp, Klebsiella oxytoca
atgcaacatagtgcccatttcgcggggattatccctcctgtctcaactatttttacgcctgaaggcgatttcgatcgacaaggcaccggggcgctaattgacaacctgatcgttgcgggcgttgatggactgttttttctcggcagcggcggggagttttctcagctcaacgtagaggaacgaaaaaacattgccgctttcgccatcgcgcatgtgaatgggcgtgttccggtgctgattggtaccggcggaacgaatgctcgcgagacgatcgcgctcagccagcatgcgcagcaaaacggtgcggatgggattgtcgttatcaatccctactactggaaagtctctgaagcgaacctaatccactattttcagcaggtggctgatagcgtcacgttaccggtgattttgtataacttcccggccctgaccggccaggatctgacgccgccgttggtgaaaaaactggcggattcacgtgcgaatatcgtcggtatcaaagacaccatcgactctattgcccatttgcgcagtatgattagcctcgtgaaggcagagcatccgcgcttctccgtacttagcggatatgatgaccatctcttcaataccctgctgttgggcggcgatggcgctatttctgcgagcggcaactttgcgcctcagctttcagttggtttattgcaggcttttcgcgacggggatctggcgcaggcgtcaaaactgaaccagaccttactgcaaattccgcagatatatcagcttgatacaccatttgtgaatgttatcaaagaggctatggcgctttgcggtcagccgatttcaacctatgttctcccacctgctgcaccgcttaatacagagaaaaaagcgcagttagccactctgcttcaacgacttcaactctgctag

SEQ ID NO: 186708 - DNA, 1968 bp, Klebsiella oxytoca
atggctattgataacatcttcacgccgcaaaatgagcgtttttacgccgttaccacccatgctgctggccctcagggggcgctgccattaacgccgcaaatgctgatggagtcgccaagcggcaatctgttcggtatgacgcagaacgcgggtatgggttgggatgcgaacaaactgacgggtaaagaagtcttgattatcgggactcaaggcgggatccgcgccggggacgggcggccagtcgcgctggggtaccataccgggcactgggagattggtctgcaaatgcaggcggcggcgaaggaaattacgcgcaatgacggtatcccatttgcggcttatgtcagcgatccatgcgacggtcgttcacaggggacgcacggtatgtttgactctttaccctatcgtaatgatgcggctatggtttttcgccgcctgattcgctctttaccgacgcgtcgtgcggtcattggcgtggccacctgcgataaggggttacccgcgaccatgatcgctctggcgtcaatgcatgacctgccgacgattctggtacccggaggcgcaactctgccgccgaccgttggcgaagatgccgggaaagtacagactataggcacgcgttacgcgaatcatgaattgtcgttgcaggaagcatctgaactgggctgccgcgcctgcgcttcgccgggaggtgggtgccagtttctgggaactgccggaacgtcgcaggtggtggcggaagcgctggggctggctctgccgcattcggccctggcgccatccgggcaagatgtctggctggagatcgcccgtcagtcggcgagagccgtgatcgatcttgatcatcgggggattaccacccgagacattttgaccgataaagcgattgaaaatgcgatggttattcatgctgcgtttggcggctcaacgaacctgttgctgcatataccggcgatcgcctatgcggcaggatgcacgattcctgatgttgaacactggacgcgcattaaccgcaaggtgccgcgtctggtaagcgtactgccaaatggtcccgattatcacccgacggtacgcgctttccttgccggcggcgtacctgaggtgatgctgcatttacgccaacttggtctgttgcatgaagacgctatgacggtgacgggccagacggttggtgaaaacctggactggtggcaatcttcggaacggcgagagaagttccgtcagtgtttgcgggatcgggatggggtagatccggatgatgttattcttcctcctgcgctggcgaagtcccgtggattaacatcaacggtgtgtttcccggtcggaaatattgctcctgaaggctcggtaattaaggcaacggctattgacgcgtcggttgtagatagcgatggcatttatcgccatacggggagagcgcgggtatttgtctcagaagcgcgggccatcggcgctatcaagaagggggagattgagcagggcgatattatggtggtgattggcggaggtccttcgggcaccggcatggaagaaacctatcaactgacctcggcgttaaagcatatttcctggggaaaaacagtttcgctaattactgatgcacgcttttccggcgtctcaaccggagcttgttttggccatgttgcaccggaagcgctagctggagggcctattggtaaattacgtgataacgatattattgaaattatcgtcgatcgtaatgaattaaccggaagcgttaattttataggcacgaccgatcggccgctgacgcccgaggagggggcgtatgaactggcgatgcgctccgcgcatcctgaactgcgtgcccatgcgtttttacctgatgatacccgcctgtgggcggcgttacagtctgttagcggtggaacctggcgaggttgtatttacgataccgataaaattatcgacgtcattaacgccggtaaaaaagcgctcggactgtag

SEQ ID NO: 186709 - DNA, 1380 bp, Klebsiella oxytoca
atgcaattaacgatgaaggataaaatcggctacgggttgggtgataccgcctgtggctttgtctggcaggcgacgatgttcctgctggcctatttctatactgacgtatttggtttgtcagcaggtattatgggaacgctgtttctggtctcccgggtgcttgatgcggtaaccgacccgctaatgggtctgctggtggatcgtacccgcacccgctatggtcagttccgcccgttcctgctctggggagctatcccgttcggtattgtctgtatgttaacgttctatacgcctgatttttcagcaaatggcaaaattatatacgcctgcgtaacctacatcctgctcactctggtctataccttcgttaacgtaccttactgcgcaatgcctggggtgattaccgccgatccgaaagagcgccatgctctacaatcctggcgttttttcctcgccgcggcgggatcgctggcgataagcggtattgctttaccgttagtgggcattattggccaggggaatgagcagacaggctattttggcgccatgtgtgtactgggcctgagcggagtggtgctgttgtttgtgtgtttctgcagcacaaaggagcgctatacctttgcggtccagccgggagcttcggtggcgaaggacctgaagctgctgttgggtaacgggcagtggcgaatcatgtgcgtatttaaaatgatggcaacctgctcaaatgtggtacgcggcggagcaacgctgtacttcgttaagtacgtgatggatcacccggagctggcgacgcagtttttactctacggtagccttgccaccatgtttggctcgctatgctcttcacgtcttttaggccgcttcgatcgtgttaagtcgttcaaatggatcattgtggcttattcgctgatcagcctgctgatttttgtgacaccagcccagcatattgcacttatttttgctctcaacattctgttcttattcgtgtttaacaccaccacaccgctgcaatggctgatggcttctgatgttgtcgattatgaagagagccgcagcgggcgtcgtctggacggactggtgttctcaacctatctcttcagcctgaaaattggtctggctatcggcggagcggtcgttggctggatcctggcgttcgttaactattccgccagtaacagcgtgcagccggatgaggtactgagcacgataaaaattcttttctgcgttgtgcctgtggttctctacgttggcatgttcatcatgttgtcgctctacaagctgtccgatgcgcgagtggaggcgataagccagcagcttattaaacgccgggccacgcagagtgaggaactccctgccgccgccacagctatatcccattaa

SEQ ID NO: 186710 - DNA, 1620 bp, Klebsiella oxytoca
atgtacactatcaccaacccgattctgacaggtttcaatccggacccttcgatctgccgccagggtgaggattattacatcgccacctcaacgttcgagtggtttccgggcgtacgtatctaccactcgcgcgatctaaaaaactggacgctggtgagcactccgctcaatcgtgtatcgatgctggatatgaaaggaaatccagattcgggcggtatttgggctccctgtctgagctatagcgacggaatgttctggctgctgtataccgatgtgaaaatcgttgattcaccgtggaagaatggccgtaactatctggttacggcaccttcgattgaggggccatggagtgagcctatctcgatgggtaacggcggctttgatccttcactgtttcacgaccgcgatgggcgtaaatactatatctatcgtccatgggggccgcgtcatcacagtaatccgcacaatactattgtgctgcaagagtattttccggcgaccggggagcttgcaaaacagcgcaaaacattgtttaccgggaccgcgctgggttataccgaaggcgctcacctctactataaagacggttggtactatttgatggtggcggaagggggcaccagctacgaacatgcggtggttatcctgcggtccaggcagattgacggcccatatgaacttcacccagaagtgacgatgatgaccagctggcatacaccggaaaacccgctgcaaaaaagcggtcatggttcgatgctggaaacgcataccggcgaatggtatatggcctggctgaccagccgccctttgcgcttacccggcgtgccgcttcttgcttctggcggacgtggatattgcccgctgggacgcgaaacgggcatcgctcgcgtcggctggcgtgacggctggccgtatgtcgaaggcggtaaacacgcgccattaacggttcccgggccgaaaatgacggaatgtgcgaccgtgaacaatggcgactggcgcgatgactttacgcatggtgcgctggatcctgagtggcaaaccttacgtattccctttgacgagacgttaggctctctgagcgcgcgtcccggttttttacgtctttatgggcatgactctttgaattcaacttttacgcaggctacggttgctcgccgctggcagcacttcacattccgcgccgaaacgcggatgcagttttcgcccgttcactttcagcagagcgcagggctgacgtgctactacaacagtaaaaactggagctattgctttgtggattttgaagaggggagaggcagaacgctgaaggttttacagctcgaccataatgttccttcttggccgctgcatgacgatcccattgtagtaccggaacacgtagaaagtatctggttacgggtcgatgtggacaagctggtatatcgctatgcctattcttttgatggcaagcagtggcatacggtaccggtaacgtatgaggcgtggaaactttcggatgattatgtcggcggacgtggtttctttaccggcgcctttgtgggcctgcattgcgaagatatcagcggtgatggttgctacgctgatttcgactattttacctaccagccgacggtaaagtag

SEQ ID NO: 186711 - DNA, 759 bp, Klebsiella oxytoca
atgccaattattcaatctgttgaacgcgcgttacagatcctgaatctgttcaatgaacagacgacagagctaaaaattaccgacatcagcaaacaaatggggttgagtaaaagcacccttcactctctgctcaaaacgctacagctgcatggatatatcgatcaaaaccctgaaaacggtaaatatcggcttggcatgaagctggttgaacggggttactttgtcgtgggtaccatggatattcgccagaaagcgaaaggctggctgactgagctctcttcacgcaccggccagaccactcacctcggcatccttgatggacgcgagggtgtctatattgaaaaaatcgaaggcaagctagctgccatcgcttactcccgtattggccgtcgcctgccagtccacgcaacggcaataggcaaagttctggtggcatggcttagcaaagaggaactggagacgctgctgatcgattattgcttcaccgcctacactcccgccaccattacctccgcagaagccctacggaaaacgctggcactgacccgcgagcaaggttacgcgtttgataacgaagaaaatgaacagggcgtccgctgcgtggcagtccctatctggaaccatgaatcgcgcgtcattgcggcattaagcctctcaacgctgacctcgcgggtgaacgatgaagagctggcgagttttcgccagcagcttcaggaagccgggctccagctttcgcgcgcgctgggttacccgggctaa

SEQ ID NO: 186712 - DNA, 771 bp, Klebsiella oxytoca
atgagtaaccggctggcgacgcttttaacgcgcggtaacgccctgacccgcgcggaatatcgggtgttgtcgtaccttactgaacatcccctgctgatcggcaatatcaccgttcgccagttggcaaaggccactttcgtctctaccgctaccattatgcgtttgtgtcagaaactgggttttagcggctacagcgaatttatctggcactgcaagcagttgctctctgaaacgcctcacattgctcctcaaacacaaatcgccgcggatttgcccggtcttttcaaccaatttatcgctaactatcagcaaacttttcactgggtcaccgcggacaaacgtgatggcttttgctcgttgctgcgcgaaaaggagagtttttttctctatggcgccggattttcttatctttttgcggaatatctgacaaagaagcttcacgtgttgggcaaaacggcgtttatctccggacccggcgatagccgcaatattttcttaagcaatgccgcactgtatcaggtgtttatcgcggtgtcgcgcagtggtgaaacagaacaggtacttgataaagcgcggatagcaaaaaatatcggcatgacggtggtcgcgtttacccgcgcatcagccaatacccttgctggcatcgccgatctgcactttgcgctgtatgacgaagcggtacattttgctgcggaggcctcaggcgtcacctcctttgagtcaaatctggtcctgctgatggatttactgctgctggaagcgaccggttaa

SEQ ID NO: 186713 - DNA, 1362 bp, Klebsiella oxytoca
atgtttaaacccccgttcattatgaccattgccggaggcggcagtacctatactccaggcatcgtaaaaagcctgatggtgcggctgagcgagtttccgctggcggaaatccgcctctatgatattgatgaaaagcggcaaaataccatcgcgccggttgttgagaaagtgatacgagaccatagcgcaaccatccgctttagcgtgacaaccgatcccgaggccgccttcagcggcgcacatttcatcttcgctcaaatgcgcgtgggccagtataaaatgcgcgagcaggatgaaaaaatcccgctgcgtcacggcgttgtcggccaggaaacctgcgggccgggcgggttagcttacggtttacgtactatcctgccgatggttgagctgattgattttgtgacccgctatgcgcatgaaaaagcctggattgttaactactccaatccggcggccatcgtagccgaaggcgtacgccgactgcgaccgaatgcgcgagtgctcaacatctgcgatatgccggtcgcggcgatgcgaaatatgggcgcgatccttggcgtcgatcgccataagctagaggtcgattacttcggtctgaaccattttggttggtttacccgcgttctggtcgatggcgaagataaactgccggagctacgtcgccatatcgccaaattcggtttattaactgaagatgccgcgaaaactgaccctcagcactccgacccgtcgtgggtgaaaacatggcgaaatatccagccaattatggataatttcccagactatttgccaaacccctatttacagtactacctgatgccaaaccagattgtcgaacatcaggatcctgactacacccgtgcgaatgaagtaatgaacggccgggagaaaaaactgtttgccgccgccgaagagtatcagcgcaccggtatcctgtcggatgcgtttcatgtcggagtacacggcgaattcatcgttgacgttgcccgctccctggcgttcaacctgcatcaacgacatctggtgatggtcgaaaaccggggcgcaataagcaacctgccctacgatgcggtagttgagatccctgcctacatcacctcagaaggtccggaacctatccgtgtgggccaggtgccgctattccatcaaaccttacttcagcagcagttggcatcagaacagctgctggtggaagcgacaattgaaggcagctacgaaaaagcgctgcaagcctttacgctcaatcgcaccgtcccgacaatggcgcatgcgaaagcaatccttgacgagatgatcgacgccaaccgcgagtattggcccgccctgcatagagcctggcgcgagggtgaagcgatataa

SEQ ID NO: 186714 - DNA, 1545 bp, Klebsiella oxytoca
atgaaacgagctgtgaacgccctacaaaactttggaaaatcactgtatggaccggtacttatcttgccgatagtgggtctgtttatcgcttttggcaacgtgctcggtaacggtaaccttgctgaatacctgcctttcctcggccatcctttcatacagaatattggccagctaatcgccaaatctgcggtatcggtactggtgaatctggcgctaatcttcgccgtgggtattcctgttggcctggccacgcgcgataaaggctacgcggcgctcatcggcctcgtgacatttatcgtctttatcaacgctatgaacatcacgcttcagctacaggataagctcgcggcacccgagcaaatgaaagcggcgggtcagagcatggttctgggcgttcaggtactcgagatgggggtcttcgccgggatccttaccggtgcgctttcaggctatctctacaataaatactcccccgtgcagttctccggggctatggcaatctactctggccactgcttcgttgccatcatcatgctgccggtctcaatgctgcttggcgtgctgatgagcgaagtgtggccgttcgttcagcacggtatcagcgcgatggccctggcgattaaaggctccggccccttcggtgtagcgatttacgggtttcttgagcgtattttggtgccgacaggactgcatcatctggtctatacccccttcctttataccgaactgggcggaacacaggaggtatgcggcacggtttatcagggcgcacgtaatatttacttcgccgaaatggcctgcccgcaggtcaaacagctcagcagcacggtggtctgggatgctcgcggcatcagcaaaatgttcggcctgcctgccgccgcgctggcgatgtacctgaccgcaaagccagagcgtaaagccgcagcaaaagcaatacttatcccggcagcgttgacctccctgctggtcggcgtgaccgagcctattgagttttctttcctgttcgttgccccgctgctgtttgttgcccatgccgtgctgaccggcctcggcatgatgctcttttcgctgtttggcgttcatgcgatcggcgcgaatggcattatcgatttcattctttataacctcccgctgggcaccgagaagtcaaactggccgatgtatatcggcgtcggtctcattatgttcgcgctctattttgtcgtattccgcttcctgatccttcaattcaatatgaagacgccgggccgtgaggatgatcaacaggagacgcggctgtatagcaaacaagagtatcaggccaaaggaaaaaacgacggactgggcgaaacaattatcgctggtcttggcgggcgtcaaaatattgacgtcgttgataactgctacacccgtttacgcgtcaccgtgaaagatgtcgacatcattgatgaacccgcgctcaaggcaacaggcgcgaaaggcatcatcaagcaaggtaataacgtccaggtggtctacggactgcacgtcaagaaaatgcgagaagccgttgagatgtttctctga

SEQ ID NO: 186715 - DNA, 630 bp, Klebsiella oxytoca
atgagcgagtgtctatcttgtagtgcaatcattgtggatgaccatcccctggcgcgcatggccattcgtagcgtgctggaaaagcagcgcattaccattatcaacgagtatgaagacggggcagcggccctaaaggcgttggcaaaaacggtggtggatattgtcgttgtggacgttgaaatccccggtattaatggcgttgagctggtggaaaaactcagagcacagggttttaccgggatattaattgtggtgtcagcaaaaaacgatcgttattacagtaaacgctgcgctcaggcgggggcgaacgcttttattagtaaaagacaggatatggataatattctggcggcgattaatgcagcgcataatggttatagctattttccttttttcctcgaagaaccgacggttgcgctaacggatagccaacgtctggaatcactctcggcgcaggaaatgaaggtgatgagttatatgctaagcggcttagacaattcgcagattggcgcagccatgtttattagcgctaaaacggtgagtacttataaaacgcggctgatggaaaagttaggctgtaaatcgttggtcgaactcctctcctttgcccatcaaaataagctgacctga

SEQ ID NO: 186716 - DNA, 3180 bp, Klebsiella oxytoca
atgaaagcgtggcgcgcaatactccttattatctggatagttagcgctcatggcgttcatgcgcagggcgagtctccggttgaactggagctgtctggctacagctacatcacgccggttccggtttatttgagcgaggatgacaggcggtggctgcagcagaaaagagcgctacgcgtgggggtttatctaccgggacagcctccgctggtgcaaaccacgcttaccggacgctaccggggaatgaatgcggattatttgacgctaatccactactcgctgaatatccgcattaccgtgctggggtatcaaaatcgcgccgatgcgattcgcgcacttagggcgggtgaaattgatacggtgctgaccggccttgatacccggccctctgtggaagaggggatccagctttctgcttcactggtccattcctggccggggctggtgacttctctggcaaacgtcatggcccccttacacagcccgcagagtacgcgcgtggcggttgttgaaggttaccctgatgctgattttattcatcaggcgtttccgaatgccgagattgccaattacgccaattatcaggaagcgctgagctctgttgcctacgggcaaaatgcgtggtttatgggggactcgctgaccaccagtacctggctgtcgcaggagttcagcctggcgttgagtacagttaaattctggtcttcgccgcagaaaacgagccactttttatttttaccagcgcaggcgcgtttgcggaagattattaacagcaccatcagcgcgatagatgaaaatctccacgggcaaattgcgcagtcgacgattgataaaggcaatctctcttttctacttgaaccgctcaatctcaccgcgcgtgaaaagcagtggttaaagagtcacaagacgctgcgggtgattattaatccatggtttgcgccgtataccatggccgatagtaatcaggaaatacgtggggtgataggggatattcttaatctgatcggtctgcaaacgggaatgcagtttgaaacggttgtcgtcaaatcgaatgaagatatgatttctgagatgaaaaagggcaactggcatattgtacaggctgctacctatgatttgagccgcgaaaacgatctctcctttacccatccttttattaccacccagtttgtcatcgtggtcagaaaggaggatgcacaggaaaccgcgcttcagccggggacccgggtggcaatcagcgccgatcacactctactgatgaaaatgaaaacccgtcatccgaatatccactgggaggaagtcgagaactccagcgtagccttaaatcttgttgcaacagggaaggttgatgccgcgatttccaatcaactgaccgctcgctaccttagcgagcactattatcctgaccagctagcgtggcttccgctagcggaagcacagccagcggcaatcagttttggtgttcctcgttctgagcctgaattaaggcagattcttgataaagcgcttgatgatattccgcagaaagaagttttgcagattgtcagtaagtggatacgcctgccggacgtccgaatagatacctgggagctatataaccggcctttctatctggtggctgctctcgcagctttgctggtggtaagtgctttactctgggtggcctacctggcactgcaagttcgcagaagaaaggcatcccagcgtttactcgagattgaaaaaaacaaagcccagaaggcaaatgaagagaagcgtgaattcctttcttacatgagccacgagatccgcacgccggttagtgcgattgtcggatttctggaacttctgcagcagtctactacccacctcacgcctgccgataaagcgtcggtcgagcatgccgcgatggcttcacgctcattgctaaaactgattggtgagattcttgacctcgaaaagatagagtctgggttacaagaggtggttgtgaagtgggtgcatacggatgccctgataagagaaaaaatattgctctttactgcacttgccgcgcaaaagggaatagcgctgtgctacgaatcgcatctggaacccaaagaagccatgcagcttgatcctcagttgttgggacaggtgctgaccaacgtgattggtaatgcggtgaagttcacccgtgatgggcgcgttcaggtgtcggcgagaaagcgcgatcgcacgctgacgatctcggtgagtgacacagggccagggatcggaagcgaagaacaaaagtccctgtttatgcccttcagccaggggaatgtgggggaacttcatcgtggttctggcctggggctggcgatttcgagagcgctgatgcagcaaatgggagggacaattgatctgcacagtgagcttaatcgggggacccgcgtggtgctaagcctgccagtgcaaacgtcatatgatgccattcctgaatccgttgcaaccgagccttcatcgtcggtcattgacagagcgctgcgagtattaatcgctgacgatcacccctccagccgtcttctactcaaacgccagctcgccaacctgggtattgctgccgatgaagccggaaatggtgaagaggcgttacgctatctccagcaggaccattacgacctggttattaccgatctcaatatgccggtgatggatggaatcaccttgacccggcaggtgcgaggatttgatagcaagctgcctatctggggactgactgcgacggcacagcagcatgaacgtgaacgttgtcttgcggcgggaatgacgggatgtctttttaaaccgattacgcttgcgcaaatttctcgactgttagccgaagtgagcgagacgagccgggctgcgtttgatgagaagcggctggcggtgctggcgcaaggcaatcggtcgctgatgctcacggctctgcgcgatgcgcagcgggaaaatcgacgcgatctgcaggccgcccgagtggccgctcgcgaggagaactatccatctgtgaaacatcatattcatcgcctcaacggtactgcccagcttctgggggctaatgaattggtcaatattgcccaacggcttgaagaccggctgcccgatgctatttcgacgacagaacttatcaacgttttggaccaaatagaaagttcgcttaataagctggaacagtccatcgaatgtttccagtcataa

SEQ ID NO: 186717 - DNA, 519 bp, Klebsiella oxytoca
atggatttgtcagacgccattttttctgatgattacttttttatcgtcggcatctgtgcgttgttaacgccggagttgattgatgaaaattactatattatagatattgaaacgataaacctgtcagaggtgcgaaagcacatatttcccggcagaaaagttattgcgtttattaccaatgatcttgactattatgcattaatgcatctgccggatttcatttttattgataaaaaatgtcgattgaatgagatcccctcatgtttactggttaagaattcaagatataactatagagtgaaatattcactttctcgtcgtgagaaagaagtgctctcttgtatgcagaaaggcctggatgctaaagaaattggtattgagctagggatgacgatgaaaacgttttatacccatcggcgcagtctgatatttaagcttcagcagaacaatcgcgtttcgctgtatcaaaatattgtgcgcagcgaatcctataagttaagcacttgcgaatataactga

SEQ ID NO: 186718 - DNA, 519 bp, Klebsiella oxytoca
atgaaaaagattgcactgatttctgcacttatgtctctgtccgtatttcaggctgcaaatgccgctgacggagttatcaattttaccggaaacattacggggacagcctgcgtggttgatacttccgctatttctcaacctgttgatctcggcactatctctaccacggcatttaccggtggtaatggtgctacggcggcggcgaagcgctttaacattgtgctgaaatcctgccctgccagcgtttccagcgccagcattcgttttgatggtaccaccagtgccgcgaatccttctattctggctcttagcaacgggcaaactgcatcgaatgttggcgtggccctttatgagcaggatagcacgacgcttattccagtaggctccacctcggcaagcgtgactttgctggaagatgtgaataataccctgacctacttcgctaaatatatggcgacgggcgcagttggtgcaggaacagcaaattcctcaacgtcatttaccgtaacttatcagtaa

SEQ ID NO: 186719 - DNA, 678 bp, Klebsiella oxytoca
atgtttcggaaagtattaaaaaaaatcgctgtgagtttgttacttatctcaacaagcgccatcagtggtgtggaaattggtggcacccgattaatttataatggcactggtcatcaagcggcgatcagcgtaagtaacccagataatacaccctatttaattcagtcatgggtcagtaaaaatgagaacagtgatgatggtgatagcctttttgtcactacgccgccgctatttaaattaaatccacatgcgcagaattctgtacgtgtgatgttagccggtaacgctgtacctcaagaccgcgaaagcgtgtattggttgaatattaaatcaataccttcttcgtcggcggaggcgaagaatgagttgttgattgctgtaaaaagtaaaatgaaacttttttatcgcccggcaggattaaaaggcgacccttcattagcttatcagcaattaaccttttccaccgcgggtggaaaactcagtgtgcataatccgactccttatagcgtgtcgctttatgatgtaaaagttaatggtaaagaattagcaaaacctccaatggttttaccattccagacgctatcgctacctcagacaacagtagcgagtggtgaagtatcgtggcgtgcgataaatgactttggaggcgttacggctcaacataaatttaaaatttag

SEQ ID NO: 186720 - DNA, 2502 bp, Klebsiella oxytoca
atgctccagtttaatacgatgtcaggttgtgcaaaattaactcagttagctgcgcttatttatttatgcatttatgtcccagcgctactggctgaggattattttgccccggattttattgaaactcgcggaaatcttcctcgtgatgttgatatctcccgttttagcaaagccgacgggcagatgcccggcgtgtatcatgtcgatgtttatctcaacggaaattacgtcgactcgcgcgacatcgtatttgtcagtcatgaaagcgatttaatgccagtgctgacccgtgcagattttacgcaatggggcgtgaagccaaatgcgcagcccaactggatggcgttggatgaatcagcgacggttgaaaatatcagcaacctactgcccggtagtcagcttcattttcagtttaatggaatgcggcttgagctctccgttccccaggagtatctgcgacgggatcctcagggttcggtatcaccggctcagtgggacgatggactaaatatgctgtttttgaactataacttttccgccgccaataaccatggcggcactgaatcgcaaaacgatagttatttaaacctgcgtagtggcattaatgtcggaccctggcggctgcgtaattattcagcctataacaacaacaacggaatgagtcgctggaacaccattgctacctcccttgagcgggatataaaaacgctgaagagccagtttagcgcgggtgatgggtatacccagtccggggtcttcgacagcgtaaattttcgtggtgttcagctctattcggatgactcaatgctgccagaaagcgtacgcgggtttgctcccgtggtgcgcggtatcgcacaaagtaacgcccaggtaaccatacgtcagggtggcaacattatctggcagtcgtatgttccgccaggcccttttgtgattgacgacctataccccactgccgccagcggcgatcttgacgtggcggtacgtgaagcggatggctcggtacatcagtttatccagcccttttccgcggtaccggtaatgcagcgggaaggccagtttaaatatgcgctggctgtggggcagtatcgggcggcaaatgatcaggataaggaaccaacgtttttgcaaacgactctgagctatggtttaccctgggataccacggtttacggcggaatactgacttcagcagattattgggctggcgcattaggaatggggaaaggatttggcgaccttggttcgctctcttttgataccacatttgcccattcgcaattacccgagaagacccaggagggggtttcgttacgcgcgcagtatgccaaggattttgcgacaactggaacctctctgagtttgatgggctaccgctactcctcatcgggctttcgtgactttcaggaagcaaacggcgatgtgaatccgttccgcatggtaagtgatgaaacgcggcttgatgacaactggcgctatcaacgtaataaacgcagtaaagctcaggtcacgctgaatcaaaggctcggtgactggggtaacgtaaatctttccgcctggcagcaggattactggggaggtgatagcgagcgcagtgtgaatgtgggatacaacaccagcgttaacaatatcaattatggcctgaactatagctattcgaaggggccatggcgcaatgacaacgatcatattgtcgcttttacgatgcagatcccgctgtcacgtttcttgtcggacagttggatgacgctctctgctagcagcaataagaaaggtgatagcgtttcgcagatgggattatccggctctgcattggaagataaaaacctgagctggaacgtgcagcagggctataacagcaaaggctccgatacgatgggcagcgcttccgtcaactataaagggcgccatggagagtatcagcttggctacagctattctcgtgatagccgccagctttcagcaggcgcgatgggcgggttggtggtgcatccatacggtatcgccgcgactcagccgctcggcgagaccatggcgctggtaaaagcggataacgccgctggagtgaaagtggcaaacaatggtggggtttataccgacagtaaaggttttgccgtggtgccatatgtgacgccctatcggcagaacagtctatcgctggataccgccacgttgaataacaacacggatgttctcaatgatactcgtacggtagtgcccacgaaaggtgctttagcgctggcagattaccccaccgtaacgggatacaaaatcatgctacagctgtccggaaaagaggtcccgtttggggcaacggccagcataaaaaatcgcgataacctgacggatggcatcgttgacgagcgccagcgggtctggctaaacggcgcaccggagaaggggaccgtggaggtgagctgggcgggtgaaagctgccgcgcaacatatcagataacctcgttttcagacaccacgcattacgttactgcaccatgccattaa

SEQ ID NO: 186721 - DNA, 1014 bp, Klebsiella oxytoca
atgaaaccgattgtcatcaccctgttttttgctgctctggggatattttctcaagctgctctggcctgggattgcacgaccccaacgccttcaaccaccgtctcgccgcagaatattacgatatcgcgcgatctccctattggtgcagttatcggcactcagcttgtgacgccaaccatcaatgcgttcagctgttacaactctgctgatggcgtaatctccaatcagaccttaggcgtgattgcgaacggcacatttgattcgatggtgaacggccggcgcgtgtataaaaccaacgttgccggtattggctatgccatctcgggttcaacgacaaaatgcgccggtggcagtgcggcggttaccggcagcaatacgatccggggcgatatcaataccgctaaactttgtgagaacaccagcggaatgattagcccgacgttaaatggcaccgtaacggtgacgttttataaaacggcaaccgaaaccggatccggcacgataaccgcgaaatccgtaggtgcgctggttttactgaataattcgctgctttggcaatcccctgaggcggaggtcaatatcaacgccttcacggtgacaactccggcctgtaagctggcgacggcagcgatacctgttgatatgagagaggtcgataaacgcgccttcagcggcaaaggttctactcctggtgacgcctatacccagtcgttcaatctcccgctcacctgcaacgctggaacccgggttagcgtcaaaatggaggggaatatttttgatgcaacaagaggagtgatcaatacgaccagcggcaataatgctgccacgggcgtgggcattcagttgctttataataatcagccgatggcgctgggttcggatgtcggcgtagggacttcctcggcaagcggtggattcagcgtacctctaaaggcgcgttattatcagactggggataagatcactaccggtaccgcgaacggcgtgctgtcatttacgatgacttatcaataa

SEQ ID NO: 186722 - DNA, 609 bp, Klebsiella oxytoca
atgcaggtaatcatgtttgacaggcagtcgatatttattcatggaatgaaaacgggtctacagcaatacattcctgaaattgatatttttggcacctgtcaggctgaacagctctggcagacgctgacggcgcatccggaagcgctgctcattctggacggtgatatgcacagtgagttttgctgcgggttgttgcaggaaaaacagcgtcgcttcccacacgctcaggtcctgctgatcgtttctgaagataataagcactggctacagcgcgcgctgtcttataatgtacgggccatcctgcagcgcgaggaaagtttgcccactttcgctcagaccatcaaccgtctccggcgggggatgccctgcttgccggacgatggattaataatggcggaggtgagcgataataaacgggttcatttaagccagcgccagcgtgagattttacagctgctggccgccggtgattcaaataaagagattagccgtacgttaaatattagcgccggcacggtaaaggcccacctcgagttgctctatcgccggcttgatgtgaagaatcgtacccaggcggcgataatttttaatagcattagcgaaacttaa

SEQ ID NO: 186723 - DNA, 429 bp, Klebsiella oxytoca
atgtccccaacgataccaccgctaagcctgcagggcctcgagtttattaagcgcgcccagggattagcgctcgtcccctatcgggacgaaagcggcctgcgcgtgattggctacggccacgttctcaacgatttcgagacgttcagccacttcacgcgcgaggtcgcggagaccttacttaccgtggatctactgcaatgccagcgcgagcttaagcgcagcctccgggttacgcttaatcaagcgcaatatgatgcgctggtctctttagcctttagctgcgggccggcgtctccagcgcttaatagtgttttgacgcatcttaaccagcagcggttcgctgaggcacttaaagcatgggaaaatattcgcagcggccgcgaacagcggcgcgaagagtgcgcacgattcaaagccagaaccgattaa

SEQ ID NO: 186724 - DNA, 132 bp, Klebsiella oxytoca
atgagaatagtttttatcatcaatacatataatgcgctcgattctttttttaaacaggaaattgagcatttgttgatattgagcaaactctattttgtcatggccgtagcgagaatcattatttctgcttag

SEQ ID NO: 186725 - DNA, 2220 bp, Klebsiella oxytoca
atgaacattattaaactttacagacgatatcgggataaatggtggtcgctgccgctcatcttacccatccttttactccccctggcaagatgggcgaacaccgttgccgtactgaatggtaatgaagtttatctttactatttacctctggcgttagtgctgagcctgatgctgtttttcggctgggctgctttaccggggatcgttgttggtttgctgctttccatcacgcgcggcatgacgctggaagattccatcggcgtgattttccattttcttattccgaccgttctttgctggggtgggtatcgcgtttttgtcccgcgaaggcagcaaatctcgcatggtaatgtgcgactgatgcctcagcgattgttctggcaaatgttgctgccatcgctgatctttcttatcctttcccaaatcgctgaatatttgggaattcatcctcgcgcgaccgggttgattgaggtcaaccctttaagtttgcgttcgcttatcaccttccaggccctgatggccggatgccttaccggcgtgccgctatgctactttattattcgaatgatccgcaacccgctctatattcggggttttgtttctcaggttcgcctgcagattgacccgaaaataaagcccttagagtttattttatgggcggcagtgctgttagttttattagtgctgctattaatgccgctgagtagtacaagcactatttttagtacaaattataccttgtccttgcttatgccggtgatgctgtggggggcgatgcgctttggctatcgcttcatttcattagtctggtcccctgttttaattgttattatccactttcattatcaatatctcccgcagtcaccgatttacagtaatcagctggctattacctcttccagctatctggtgttttcatttattatcgcctatatggcgatgctggcgacgcagcagcgaattttttatgcgcggatgcggcggatggcctttattgatccggttgtacgcttgcccaatatccgcgcgctgagccgggcgttaaataaatcctcctggtcagtgctgtgcttcttacgcattcccgagctggaaatattgggccgccattacggcgttctgttgcgcattcagtacaagcaactgctggccgagtcgcttggcgatctattgcagcccggggaggatatctatcagatggccgggcatgagctggtggtccatctgaacagtgaagactatcagcagcgagtccctctgctgtttgaacagttcaaaaagtttcgctttgtctggaacggtatgccgctgcagccgcccgtgggatttagctattgcaacgtgcgctccccggtgattcatctgcatttactgctgggtgagctcagcagcgcggccgacctttccctcgcgaccggcagtccagaaaatttacagcgccgcggagccatcaatatgcagcaggagctgaaagacaaagtcaccataatgaatcagctggtgaaggcgctggagcaggatcgtttcatactgatggcgcagccgattgttggcattcggggagatagctaccatgaagtgctgctcaggatgctgaacgacgacgatgaaatcatcatgccggatacctttttaccggtggcgcacgagtttgggctgtcggcgcgcatcgatagctgggttcttgaacatacgctcatctttatggacaagcggcgtaaaaatcttccgggaatgcgtctggcgataaatatctcacctttttcagtgagtaacagccacttccatcagcaggtaaaaacgctgcttgagcattatgacatcgaaccctggcagattatttttgagctgactgagaaccattcactgactaatcctgaacaagcacgaaaaaccctggcacagctccaggagctgggctgtcgggtagcgattgatgactttggcaccggctatgccagctacgcgcggctgaaaacgatgaatgcggatctgctgaaaatcgacggtagttttatccgtaatctggtgaccagcagtctggactatcaggccgttgcctctatttgccttctggcgaggatgaaaaatatgcaggtggtggccgaatatgtcgaaacgcccgagattcggcaggctgtggtttcgctggggattgattatatgcagggctatgatatcggcaaaccggccccgcttgaggcgctggttgaggattga

SEQ ID NO: 186726 - DNA, 2445 bp, Klebsiella oxytoca
atggctcacataagtgccgtcgtgacattacgaccaattcgattcgcattccttgtcaaacccaacgacaaccaaagattgttgaaaatcttccagataaacacatgcctgtggggcggtaagtttaaccctatcattcctattttgggccatgtccctaaatggtggagtagagatgacttaaagcctgagaacgcccaacagatagtaaacgggtatcttgatgctttcgagccggatttccttgttgagtctgaggagggtctagcggcaggactgggctatgatcctgaccgagtgcttcaactgtcggacatgctaaatcaagcagacgacccacatggcaaagcgggccttggtgttttcgatttatacaaggatctttacgaaaagcagtttcaattcgtacgtaggtataatcacaatattataaatgtaatgcctcagacgaaagcatttaagtctttctgcgcttgccttttcggaaaatttcctgaagatgctgagcttaagtattttggtcaaggattcagcgatgcttttgatcccaaacaaattgcgcttaccgcagaaacactaactgatctgtacaagcatggatttaattctgcattagaaattggtcattctaatattaatattgattatcatgaccatgcagaccaaacacttttcgttatggatgcccaggacccacgagatctcatcgactactggaatctacgcatagtaagaagaaatattctccctattccagtccaatggctcgacatactttctccatactgtaaagaatatatagaggattgccatcggccacttcctggaaacccgtacggcgtaatgctcaatgctaccgtgctgtttgcaaggtctataccatctgcaaatattgaacaaatctatactgaccacttgtgggtagatcgtgatggcgcaaatgtccggcaagattggtaccctccaatttggcgtccatctccacgttttatgacccgcagtacccgtgccactctatccgcagaagaaaaaacattcgacatgcaaattgatggtgattcttccgaagttagattcgaaagtctcgatccagatttcgcggaaagatatggattcaacgacttccgttgggcaaatgttgtaaaacttaaagattggtcaaaccaaggtcaagttgcgaccctatttcctaatgattatcggtcgcctaaaatacctaatttcaagacgatacaagaaaaaatactgcctacaacagaaggctttgttatattttgtcgctacaaaaatatgtctaacatgtggcgtttaagcgatggcacaacggcaatcagtgagtggttaaaaactaatgggattgaaagtcatgtctctgatgcagggcaagcaactcaacaaattgttagcacgcttggaggttactggggagttagtagctttgctcatgaagagatagtaaagcttctgaataaaatctcacgtcgacctatctctccttcaattcaacaccaagaatttcagaaccggatcaaagattcggtgaagggggatatatggcggaataaaaatgcagaaaccttaattgaacgcggtgcagttgagcttggcctagagttaaaatgctcgaaatgttcaacttggggatggcatgcccttagagaactcgatcatgaagtcgcatgtagtctttgcctgaagaaattccgctttccatcactagacccaagttcaagtcaattatcgcgatgggcttacaggcttactggtccgttcgctctccctgactacgctcgcggtggatatgccgcatcactgactttacgatttctcgctaaaactttcggtcatcatgacacagccgttacatggtcaactggtcaaatactgaaattggcaccaaaacaccgagtcgaggcggacctgattctctggcatcaaagaaaagttttgcatggactagatcaccatgcagagttggtatttgcagaagcaaaaagcttcagaggcgaaaactccgaagaaaaaaatgcagtggcagacgcatttgaagccgaggatgtagaaagaatgaaacaactcgcaattcgttttcctggtgctattctcgtatttgcaacaatgaaacaggccgaagatctttcccaagctgagatatcacgaattgcaaaactcgcgtcttggggccgtgaatacattcacaaacatcgaaaaacaagggcccccgtaatacttctaaccggtttagaactatttgcaccatatgcactttctaaaacgtggcgtgataaaggcggccgccatgctgaaatggaaaacggacgccgcagctatatagaaaacctccgagatctggccgatatgactcaacaactgtacctaaatatgccgtcatatagtgattggctacgagccaagtgggaaaaacgaaatccgcgccgacgatag

SEQ ID NO: 186727 - DNA, 534 bp, Klebsiella oxytoca
atgacaacctgggtggaagtcgttgatacggctgtaaagatcggatttggtggtataataacactggctggtacatttattatctcaaaaatgaatcacaaacatgaatttgataaggataaaagtcgtcgctattacgattctttagaatctgtaagcactcaaattgaggatatgacgcatatatctttacgctattgggctttaataactgaatgggttagaaataataaacagaaaggattggaacttactgaagaacggcaagaagagttaaagaaaacaaaactagatttatttgataattttaagaatttaactgttgcagagtcaaagcttttgcttttaggcttaactgatacatcagttgctttaagagactatggtgattatttaaaattaatgcgaagaaattattatgatggtaagactgacattaatgagtcagatcttgaaaatgtaagaactacgttactttacaaacgcgaagtcctgtttgattttttgtctagggattataaaaagggaatgtag

SEQ ID NO: 186728 - DNA, 924 bp, Klebsiella oxytoca
atgccattaatagataccatagttataaatctcctaagaggggctattcctgagaatgcacatgaactttgtcaggactgggtgagttataaacacacggtcgagcttgcagatagttccaaaggatcaacaatgaatgcaactagtaggcgtatcttgttcgattctaaaacgatcgatttcttttggttatttgggtttagttcatggcttacgattgagacatattgtccagccctagaagtagcatgctcacagggtattacgttagagtcggctttaaaagctgatgaagagcgaggccaatttgaaatgaattataaacaacatttggatattacaaagtctttattaagtgtcgccaatacatctgatattgaatggcctgaagatattccttatccaacaggagagcgagatagtttaaataatgttcaagaaaaagctatttttgatctagtcgcattagcactgtctttttctatacttcatgagtttaaacatgttcaagcacgagccgaagaaaaaaaatatgaaagtccccaagagaaagatgaagaagaattagcctgtgacacctgggcccgtgaatatataactaagggcgttggagcctatgcgaaaaattctaagcatacctttgaagaagtcatgcaaaaacgagcaatgggaatagctcttgctgcctttactatacatgctttaacaccagatatcgaaaaatgggggagtggagagtatccatctatagcagtaaggattcaaacaatgatagggggatacaatctttcagattcatcgtccttttggtgttttaccgcgtgtcatctcattgcggtgatgagacaggaaaaccgtaagcttgattataaagcttcaacatataaagattttgttactatactcctttcggaattaaattaa

SEQ ID NO: 186729 - DNA, 783 bp, Klebsiella oxytoca
atgattttgtacaaatacatagacaatgcatcattagatcgattctttaaagatggctacatttctataaaattcaccccgcacagtgagtttaatgatccgttcgaaagttatggatatgcacttgatgatgaatcagttgcatcattaactatgaggtatgaaatcaatcaaaaccttgcctgtttatgcctttctaaaaatccactcaatgtattgatgtggtcacattatgctgataagcatcagggctttgttgtagcaatcgacactgagaaagcaggattcgatgatgaagcaaaatgcctgattacagctccgaaaggtgaaattgtctatttagagagccgaataaaaagcaaactaaaaatcagtcaagaaaacatctatgatactgatataattagtaaattattgcttactaaatcattgcattggaaatatgaagaagaaatcagaataataaagaagacaaacttattacaaaagcaaggaacggttttaattgataaaataattgatctaaaatcgataacaggtatctatattggaatcaacaacaagatggttgatgaaataattagaaataacaatgcattagagacgttgattttaaacaagacagtgcagttatatcagtgtgaatttaagaaaagtacatgggatctcgccatagaaagttatgaatacaccaaatacccgcatgatatgcagagaatggatgtatttgattctgcagcgaaggttttaagagcgatggaacgtaaccacatagacacttga

SEQ ID NO: 186730 - DNA, 1326 bp, Klebsiella oxytoca
atgtttgaaaaagtatcggacgttttggaggcatttgttgcggcagaaatagattctctaaaagatgttgatatgcctcatatgccaaccttaggtagtgcatatgaagctataactaaggagggtgttaatcaagattatgtgattccaaaaggtttagggcttaaagttgtatctggctttatcactgttgcagatgtaatgcttcctcaacaaatagatgctatgcttgttgttggtgatggtaaaagatatggtaagacagaacaatttatttatgagatagctcaggtattatgtatattcgaaattaaaaaaactttaaggaaaaatgatttaaaggatgctttcttgcatctgcgagaattgaaaaaggcttttaccgaagatttttctcgaaaaattgatgatgaaggatttcaacctaatgtttttcttgcagggcatcatttttcgcaaattacagggagaaaagcacctggttcatataatgatctgaagcgttttgatgtaaaagaccaaattttaatgtataccttaattcaggagatttatgcaccagcaacgattattcagggatatggtggctatgaaactgaatatggtttacgtactgcatttattgattcgcttgaggaattatacgctgagtatggtaatggagcgggtttaggagttcctggcttgccatctctgataacatccaataactttagcttggtaaaaggatgtgggttaccattcataatgactaatcaagagcgtgagtgggttgttattggatcgactcgatttaaatctatccgtatgatgatggagttaatttggtctaaaatatccattttttgtgacagtcaacttccatggggagatggagtttcaatggaaaatgtcagtcccttaatgcttgctattcccgcggaacataatggacagatcggctggcgctaccctacaattgagtataaagaaaaaactcttgaaagagcagagcatattgagtgggagccaaatgctataactaataatgaatatgatatgttcatccaattaatgtgtgatggaggtatgttgaaaattaatgaggaactgtgtgaagtccttgattgcacaattgatgaagctaaagagatggcgagtaatttaacgaagacaatggaatttgtcttggatggtgatctattagagcctattaaaaaggtcatttttgttattaaaaatgatacagatggtgcatatctgtcatcaaatagggaacggtttgatgcatggtgccacaaaaaaggtatagaaccaggatatataactttaattgtaacttggtaa

SEQ ID NO: 186731 - DNA, 498 bp, Klebsiella oxytoca
atgcggttacagagttggggcgtgatgattaagagtgaatttagtacaaggttagccgagttactcgcgagaacgggtgattcgatgcgcgatcttgcccaaaaaagtgggataccttactccacaatccgcggatacattgctggggactcgctccctactgggattgaacaattacataagattgctcgtgttacaggtgtgcagcctgcttggcttttgggtggggatgttgagccttccacgcgcgatatgcgagttacaaaagaattaaaactattagtgactttggcggaacatctctctgatgtgcagagggggattctccttaaacaaaccctcgcggcattaattgatgaaaccgattatgttgaacgtgatcaagaacatactaaattattatccccatcaataattgaattagctttaaaacttgataagctatctgatgataaaaggaagtttttatttgattttttggataatgataaaaaatag

SEQ ID NO: 186732 - DNA, 522 bp, Klebsiella oxytoca
atgtgggcagtcagcctcgctgaggcatttattcatgtattccaggccgcaggcaaaatcttcctcgacatgatgaccgggcttatcccgatgctcatctgcctgctgctggccatcaatttcctgatgaagctggtcggcaccgtgcgaatggagaaagttgccaccctgctcggccgctcgcgcattctcacctacggcgtgctgccggtactcggctggttctttatgagcagccccggagcactcactttaggcaaactcctgccggagaagagcaaacccggctacgaggatgcgctaggcaccaccgcccatccgttcaccagcctgtttccccatgtagtgccgtcggaactgttcgtctggctcggcgtcgccgccgggatacagacactcggtctcccggtcacctcactggccctgcgctatatcgccgccgccatgctgattggcctgatacgcgggattatcaccgagtacctgttcctgcgcttaagcaaacgggggaacgtgccatga

SEQ ID NO: 186733 - DNA, 375 bp, Klebsiella oxytoca
atgatgacctacagtgcgcgtatcgtcgccgtcggggtgtttgttgccgatggtctgaccgacaaaatgctcatcaccttcgacagcaacgggccgaaggactgcctcgattactcgctgtcgctggaaaccttattacgcgaagagagcctgttcattctgcccggtgacaccctgttactggccggatacagctacctcattaccgctgtgggtaaagaggcacagcagtcgctatttgagctcggccatctgacgatgaaatttgacggcagcctgaatgccttccatcccggcgtggtccacctctcaggtccggtacccccgctttcgtcactgcacggggaactggtgattgcggagggacgcccatga

SEQ ID NO: 186734 - DNA, 153 bp, Klebsiella oxytoca
atgaacgttatctcggcggatatattttcggggagcacagcctatttgaccgtgagctggaagaaattcgcgggctcaccctgcggcgaaccagtgaggctgtacaacccctacagcgacagcagcaacttcgcggactgtagtcgctattga

SEQ ID NO: 186735 - DNA, 306 bp, Klebsiella oxytoca
ttgaatgctaagcggttgttgtaccgctacatactgcctcaaagtcgacaaaaacgcaccgtaattattaaccacaacagcgtatttcgcccggcgattccacataaatatgcagcgcaccgccagggctgtgcgctgcatcatttattatcagaccgccttcacgtcgatggcttcgccctgcatacgtttacgcagcgtacgcttggtacggtcgataacgtcgccggccagctgaccgcaggcggcatcaatatcgtcgccgcgggttttacgcactatcgtggtgaaaccatactccattaa

SEQ ID NO: 186736 - DNA, 234 bp, Klebsiella oxytoca
atgaaaaaagttcttataatgacgccggacatagaggggcctgtccgtaacggcggcattggtactgctttcactgcccttgccactactttggcaaaaaagggttatgatgtcgatgtattgtatacatgtggtgactattcggagtcttctgcatcaacttttagcgattggtcacgtatttatagcacctttggtattaatctgctaaggaaggtgcgaacaagttcctga

SEQ ID NO: 186737 - DNA, 264 bp, Klebsiella oxytoca
atgatttccctcataacagacggcgatgtcgtgaagaagctgggccacctgcgggtgcatctggtggcattaggcgcagcgagtcaacaaacgtatgacaagcacggatttaccgatgcttttaatgcgcagattgtccacgggatttttgattactgcggggcgacggtagccagttcgcagatgctgctgttgccggccctgaaaacggcggaggcgcatctggaggcggggcgccagctgggaagaaagatgtttgcctga

SEQ ID NO: 186738 - DNA, 633 bp, Klebsiella oxytoca
atgggagtcctgaaagaaagagatgtttctttacctcatacgggaaaggaaagcgttcgcgataggataaaatcattattcaaagggagaagtctaagaaaggtttcactcgattgggacctgccgtactctacgctaaacaattacttcagccgctcggcaaccccgagcgtagacgtgcttgttaaaatatctaaacttgaaaatgtcagtttgaattggttggcgacaggtcgagaagacatgcttgatcttggcgaatctgacacaaatcgtgcaagtctcaagcaagagaaatctagaaaggaaaggtctgtaggtgctgatgtgttagctggaggcaatgcgccattgaaagatgacaagtttcttgcccttacatgggcgatgttttttgaagcgttaagccatgatgaaaaaacacaacttattgatatctatgcaaagataggcataaagggagtgctggcgttactcagtaatgctgattcatcatctgcgtggcttaaccttgccccagaagagcaggaacggttgctacggcttaatgaccagatcaaaaaagagtcatctgagagcggtcaggtcatagcaaaatcggacctttcagatgataataagaaggccggatga

SEQ ID NO: 186739 - DNA, 240 bp, Klebsiella oxytoca
atgattactgaacgtattgctgaacatgttggtatggccaccgctgcgcaggcatggctgcaggcgcgcggtagtcgtgttacggagatgcgggtgtggatgcgccgcccgtgtctggaaatcacctgtccgccgactgaactggtgaacagggctaatcatctgattgaacgctgccccaccgggacccgctccgtgtggatggccactctcgaaggttgtcatgttatctggaggtag

SEQ ID NO: 186740 - DNA, 555 bp, Klebsiella oxytoca
gtgacccgctcaaacgcaatccagattatccatatcgccaaaggccagcttgcgctcgacgatgatacataccgctccctgttgggggcggtagttccgggcaagtcgagctgtcgcgagatgaccatcatcgagctgcagaatgttatccaggcactggaggctaaggggttcaaaagcaaacctgtgcgccgttctaagcgccgcatgtctaccccgtctgacgtgagcctgaaaatccgcgcaatatggaaaacgatgtttaacgagggttttatccgggatggtagtgatattgcgctcgaccgttttgtccagcgccagactcgcatccgtaatggtggcgctggcgtatccagccttgaatggctacgagcagacgccgaggacaacctgctagagagcctgaagcaatggcatatccgggagatgaaaaaagccatgctggcacaccatgcccgactccccgaaaacccggtcaccggtgacgaaagccgggactatgacacaatctgcagcgcttacgctgacgcagccagaaggtggataaaatga

SEQ ID NO: 186741 - DNA, 219 bp, Klebsiella oxytoca
atgggtaaaggctgggattcatcgttacgtgcggggcggcgcgatcgcctccgtcaggaagtgcttcaccgggttgccggtggccctccacccgttccacgcgattacaaaggctgcgacggcactcatgccagttattaccgcaggggctgggactccgtggatacacgagacatcgtctggcagtgcaagcgatataaggaaaagcataatgtttaa

SEQ ID NO: 186742 - DNA, 405 bp, Klebsiella oxytoca
atgtttaaattaaataccgacgggctgattcaggcgttgatccgggtatttcagtccggctggtctgtggtcgctctcatcgggttatcgctgctggtcagttgtttctatggccgtcaggcatttgttgtctggtggctgacgttctccggtgccctgttaatagcggcaagtatctggctaggaaacctgccttatcgtttacgtcagcctgaccgcccggcccgaaaatgggtgagttgtgtctcatggctgatctgggctttcggcgcttttctgctggcctttgcccccatctttgcaaccagtccggtcgtcatgctgcttaaccctctcgccggtctgactgtggtcattctgtatgcctggctggttcgtaaggaggtaataaattggatcctgtaa

SEQ ID NO: 186743 - DNA, 303 bp, Klebsiella oxytoca; identical to SEQ ID NO: 178012

SEQ ID NO: 186744 - DNA, 1587 bp, Klebsiella oxytoca
atggccggaccattgtcatcgcaggaacagttacgtaatcagtccgccagcgccattctggcgggcgagttcgacgcggatcaggtgctgctgccgtatcagcgccggtggattgcggacacgtcccagctcaagattgccgagaaatcccgtcgtaccggcctgacgtgggcggaagccgccgaggcggcgctcagcgggtcaatgtcaccggaagccgggggaaccgacaccttctatgtcggtaccaccaaagacatggcgcgtgagtttatcgacgcctgcgccatgtgggcgaaggcgtacaatctcgcggcctcagcgattggcgaggaagcgctggaggatgacgacaaggacatactggtttacgtcatcaactttgccagcggcttcaaaatcaaggcgctgtcgtccaacccctcaaacctgcgcggtatgcagggtaacgtcatcatcgatgaagcagcattccagaaagacctcgctgccgtactgaaagcggcgctggcgctgaccatgtggggctctaaggtccgcttgatctccacccataacggcattgaaaacctgttcaataccatcatcaccgacagccgtgcgggcaaaaaacggtactccgttcaccgtattgatattgagctggccatcagcgaggggttgtatcgtcgtatctgccaggtgacgaaaaagccgtggtcaccagatgccgaagcggagtggctggcgaatctgctgagcgataccgccactgaagaagacgcccgcgaggaatactattgcgagccgaagaacggcggcggcacctatctggcccgctccatccgcgagcgtgccgcgcggggctccggtcccgttctgcgtttcaccggcacggcagaattcaatgccatgccggaaatcatccgcgcactggatatgcaggagtggctggataaggtggtgctgcctgtgctgaacacgctcccgcagaacctccgccactgtctcggcgaggacttcgcgcggtcgggtcacctgacggtctttgcgccgatgaccgtcaacgacgacaccacgcgtaccgtaccgttccttgtcgagttggccaacgttccctacaagcagcaggagcaggcgctgttctttatctgcgacaggctaccgcgccgcgacggtatcaagttggatggacgggggaacggtaactatcttgccgaacaggcggcggagaagtacggcgcagaggtggaggtggtcatgccttccgtcgcccactaccgcgagaacatgccgcgcttcaaggctgcgttcgaagacgatgagctggtcctgccgaagcatgaagatgtcatcagcgacctcgggcagattgtcgttcagcgcggggtgcctggaattgatgaccgggagaataccggcagcgatggccacaagcgtcacggcgacagcgcgtatgcgatcttccttgcctttctcgccagcaaagaagactgccagcgctatgagctgcatcggcttaacaaatcccaacagcagcgcaatagcgacagtcgccgccagttgcgcatcacacgtggccttaaaaatcagcgaggactgctttga

SEQ ID NO: 186745 - DNA, 1482 bp, Klebsiella oxytoca
atgtcgtcactgggtaatattcctgctgatatccgcgttccgctggtgtacatcgatattgataattctcaggcgctcgacagcgccccggcgcagtcgcggaaaattatcgtcatcggccagcagagagcgaccggcaccgctgccgttctgacacaaaaccgtatcaccagcgacggcaccgctgaccagctctacggtaaaggctccatgctggccgggatgctcaaaaccctgcgtaaggccaacagctataccgaagtgtgggcgatgggcctggctgatatcgccgccggtgctgccgcaaaagcagagctggccattactggcccggccaccgctgcaggtacgctggccctgctggttaacggaatctcggtgcaggtcggcgtcagcgctgaagcgacagcggacaccatcgcagcctccatcatcaccgccgtcaataaactcccggacacgcaggttatcgccgagctgaaagccgcatcaacaacgtcagtcaccctgaccaccaactggcagggcgcgaccggcaatgcgatggacatccgtctcaactactaccccggcgagcagacaccggcaggcgttgccgtggctgtgactgcgttcaccggcggcaccggcaccccggatattgcggctgtcgtcgcggcgctgggcgatgactggtacaccgatatcgtgtttccgtacaacgacacgcagagcctgaacactgtccgggatgagctgctcgaacgctggggaccgctcaagatgattgaggcgcagctctggacggcgttccggggcactcatgccgaaagcggcacctttggtgaaacccgcaatgactggctgatttcctgcatcgggaccaacatcgcaccgcaaccgcactggatgtgggcgtcatcctatggcggcatagcgtcctactatctggccaacgacccggcccgtccgctgcagacgctggtgctgccgggcatcctgccgccggtcaaaacggtgcgctgggacatgccggagcgcaacctgctgctgcatgacggcatcgctacccattacgttgacgccagcgacaacgtctgcatcgagcgtgaaatcacgatgtaccgcgtcaaccagtacggcgataccgatacctcgtacctcgacgtgcagtcaccggcgacgctggggcgtatccgctacgtcatcaaaaaccgcttcaccacccgctacccgcgtcacaagctggccggtgatgatgtactcgacttgcttgatccgggccagccggtgatgacaccgaagattgcccgcgccgagctgctggatatcgcgctgactgagctgatcccggcgggtctggttgaggacttcgacgactacaaagacacgctggatgtctatctcgatggcgccgacaaaaaccgcctgaacttcatctgccacccgaacctggttaatcagctgcgtgtgctggccggtctcgtccagtacaaactttaa

SEQ ID NO: 186746 - DNA, 384 bp, Klebsiella oxytoca
atggctgagatgaaaatcactttaaagcacggttacatcgccggtaaaggcactgacgatgagatccgctacaaagaagtcaccttccgtgaactgacctcaaaagacgttatcgacgcccaactggaagctgagcgcgtggtcatcggcgagaacggcaaggccgtcgcgtactgctctgaggtccttatggggctggcactgctgcgtaagcaaatcctttgggtgggtgaaatccccggaccgctgtcgcttaaacagctttacagcttccacccggaagaccttgagctgctgtccagcagcgcgagcaaaatggatgacctcgtgacggagaccgctggccgggggcgacctgatgccgctggcgacggcgctcagtaa

SEQ ID NO: 186747 - DNA, 1794 bp, Klebsiella oxytoca
atggcaaaccgcctcaccactgaaatactcatcaatctgtcaggtaacctgaccgcgaaagcccgccagtacggagccaacatgtccgagttcgcccgtacaaatcagagggcgatgtcagttgttaaagccacctctgctgctgcaggtcgagggcttgatgcattgggtaatcgctacacaacaatgattgcgggttttgccgggggggctctgttacgaaattatcaacaattagatagacgtttaactcgaatggggattactgcaggtaaaacacgaaaagagattgctgatattttcgatacctcacaaaacgtagcgattaagtttggagtcgataccagcgaaattcagggggcctttgaggaaatcaacggccggtctggggatctgaatcttgcgctcaagaacaccgacaacataggaatggcgatagccgcttcaggagccgatggcgcgactcttggtggactcatcgctgagtataaaaaacttcagatagaagataaaaagcagactctacttgctctggatggaatgaaccggctaggtaaggaaggtgctttcgaacttaaggatgccgctgaaaaattacctgcttctctttctatgtacgccgctgttggcgggaaaggtgttaaaggcgcaatggatgtgatgaccgttgcagaatctgctatggatgtaacagccaataaagataaagcagcaacagccgtcgaaaattttattcgtgacctccagaatccaaaggttgttaagacgttgcaaaaaaatggcatcaacgttttcgatgacaatggttcaatgcgaccccttcctgacttacttcaggaaaccgctgcgagatcttcccgtggaggcataaaaaaacaacgcggacgcctcactgaagccgggtttaatcaggacagtatggatttaattgcaggcgttaccggagaggcaggcgcaaaaaaattaaaaacttatatgggcgtagttgccgatggtcagagcattattgaggatgcggcttatgcatcacaagatttcacatcagctatgcaacgcctcgcaacaaccctggaaaaattcgctaataagaatctggctaagcctattcaggaacttgcggatgtcattaataacttagacccaaaagttgtccaggaatggctggagttcggtaagaatgtagccatttcgataggtgggattattgctgcaaggaaggcgttcaagtttggtaaagatatctgggatatgttttcacctggcaaaggaaaggggataccaggagatgtagcagacgtttttggttccggggtaatgcctgtttatgtgaccaactggccagccgatggggtgggcggaaaaggagaaaataaggttgacgatcttcttgatgcttcctctgatcttcctggttggccgggaatgctcgctcgtggcggactaatcatcagcaagttgatgggtttgactgggatggaccctttttcggatgaagggcgtaacgaactccttaaaagagttcagcagaataatgagcgctcaacgatgtgggatgacttaaagaactggcttgattcatcgagtcagtcacctgcaggctatcaggacccgtcaccgtgggcttcaatgcagccccagaaccaatatgcttatccgttcctgccccagcagctgaaaggcagtatagaggtctccgttaaagatgatcgggttcaggtgaccaacgtcaaggtcaatgcccccggcgtcaccctgagcgcccagtctggcgtcagtaatgtggagcaggactga

SEQ ID NO: 186748 - DNA, 1257 bp, Klebsiella oxytoca
atggccactaaatgggaagacctgcgtgatgcctcgttccggggcgtcccgttctttttccgcgacgtcgagggcgctggcggtcgccgtgctatcccccacgcttaccccaaaaaagaggtgggctggacggaagaccacggcgcggtgctgactcagcagcagattaacgcaatcctgctcggcagtgactacatcgaccagatgaaccgcctgctggcggcgctcaataccgccggtcccggcgaactggtgcatccgtggttcggcgttcagaaggttcaggtgggccgcgttacgcatcgtctctccaccgaagaaggcggcattgtctacatttcctttgaggtgtacgaggctggcgagcagttgttcccgtccggcaccgaagacaccagcgccaccacgctcagcgcggcggataaggtcaaggaagcgctggccagcggggattattttgcggcgctcgatggcgtcggcagcatggtggacacgcttcttgaggacatggagggctttgtcaccagcatgccgaccctgccggatgcgctcagtgagtggatggaccgcctcaaccggtttaaggacctcgccggtattgtggccgccgcacctggtgaaatgatccgcgatatcaccggcctcatcagtgatatgaaagacctcgtctctgagcctccgttcgccctgcgggtctatgaccagttgcgcgacaaatgggaaggtgaccgggcagcacagtccgcaaccaaatctctggtcgataacatcagcgtgaacaccgataccggctttgccagcagcgtcacaccggcatcgacgccggagaccactgcagcgatggagaccaatatcgaagacttccggcgtctggtcatcatttccacgctggtcgctcaggctgaagcggtggccacagcaaccttcgagaccggtcaggatgcgcagaataccggcgaccagctggctgagcgtctcggcgagaccgcagcggaagctgtcgaaagcggtctccgtgaattgtggcgctcccttcgcgagctgcggttcgcggtggtgaatgatgtgcgtattcgcagcatccagctgccggagctgcgccgcgtcaccccggcccggacagtaccggtgatgctgctggcttaccgcgagaccggcgacgcggagaaccgggacgaactggtgacccgcaaccggctgcgctatccctcctttattacgccttcacagacgattgagatcatcagcaatgactga

SEQ ID NO: 186749 - DNA, 1092 bp, Klebsiella oxytoca
atgactgaagagttaaccctgaacgttgatggcaaggtctggggcggctggaccgacatgaccattaaccgctcgctggagtctgtggcgggcgagttcgacctgaccgtcaccgcccaatggtcatctgccgcgccgcgctccatcaagcccggtcagtcctgcacggtctccatcggcagcgaccgcgtcatgaccggctacatcgacgacttcattcccagctatgatgcggagaatgtctccctgcgcgtgatggggcgcgacaaaaccggcgatctggtggacagctcggtggtcgataagtccggccagtggaaaggtctgaagctggagcaactggcagccaccatctgcaagccctacggcattgaggtggtcaacgagaccgacaccggcgacgcctttggcagcatcaccctcgagcagggtgaaaccggctttgaactgctcgaccggctggccaaacagcgcggcgttctggtgacctcagacgcttacggacggctggtcatcacccgcgcatccacccggagggcgggagtaagactgaccctcggtgacaatattctggccgcccgtggccgcttcagctggcgtgagcgtgccagtcagtacatcgtcaagggctccgccagtgcgggcggtgtgacatgggatgaccagcctgtgaagatggtcggcgggcgtcagaccgtagtcagcgacccggagatcacccgctatcgtccgaagattctggttaacgaggatagtctgacggtcggcggtgccagcgcccgtggggagtggtacaagacccgcatgatgggggaagccaacaccactgaaatcaccgtggcaggctggcgggagaatggtgctaccgggccgctctggcagcctaacctgctggtgccggtgaccgatgaaatccagcaactcgatgtcacctggctgattaagacagtttcctttatggaaggcgatcaggggcgtctgactgtgctgtcactggtgccgcctgagtcgctggatatgcctgaacagaaagctaaaagtaagggtaaaaaggcgaagtcgaagacttcagtgggggtgacatgggactga

SEQ ID NO: 186750 - DNA, 540 bp, Klebsiella oxytoca
atgggactgaaggaggtcaacttttcccgctctatcgcggctataggtcgccgcctgcgcctgatggtggaccgcgcgctggtgcgcattgtgacggacagcctcggtcggcagaacctgcaggtgcagtcgctggccgatgagaccaatgacgacgttgagcgcttccagaactacgggtttaccagcgttccgcctgcgggctcagaggcgattgtcgtcgccgtgggcggacgtcgtggcggtctggtggccatcgctgtcgaggataaagggagtcgcccccgtggcggcgaagaaggcgacgttattctttatcatcaggaaggccatattattcgcctgaaaaagaatggcgtgattgaaataacagggaagacggtaaatgtggttgccgaagagagctgtgacattatcggtaaacagataaatgtcaccggccccaccaactttactgaagatattatggttaagggtaaaagcttccttaagcattttcataaagacggggatggtaaagatacttccgagcctaaatga

SEQ ID NO: 186751 - DNA, 1101 bp, Klebsiella oxytoca
atgaaaaaatatattttactattgctggtttgtctctttccaatttatggttggtcatgtgccagcggcaccaattatggtgatgtgtcgatggcgaatcttccggaacaaatattgattaatgcagggagttactcggctgggactgttctttatgactctggccaaatcacccgctcgcaaaccatggttactaactgccagggtaatatatatgctcagtttgcatggtcttccgggaataccatttcatctgttagcaatggaatatatacaactagcgtgccaggtatcggtctcagagttaaagtttggctgaatgttaccggggaatatgatggtgatactgatgatttcaatgcggattatagtcaacattatatcggcgatgcggacttctacctgggcaagccaaacggatttcttgattactgggcaggcacatattatacgccaacataccagttgcagcttgtcgccactggcggcgcgatcgccagcaatagctccctgacgctgaaggatcccgtctcctccgtttctatgaaagatagttctggaacgatggttatttcccaactgcacgtgaccggaacgacaaaaatccagttgacgccgatgggctgcacggcgagttcgactgcgctgaatttcccgatgggctcagttaaaacgagtgaatttaatctctccagaaaagcgggctccgcccagcaaacattggcgctgacctgtgagccagggactcacgtgacaatgcgtattacggcgacggaagcggagggcgataatccggatcacacggtgattgctctaacacctggcgaaaacgtggcgaccggtgtaggggttcagttgaatatcaatggcgcgccgttatctgcgaataccacctacagggtttttgatccggtcaacagaacgacggtgacaaactctggcgctgaggctagctacactgtgtttaccgatccaaataaccccggtggggcgtcagggacagacacgctgtacttttcgaccaactattacaaaacgggttctgaagtgacgccgggaaccgccaacgcgagcggaacgattacgtttacctacaactag

SEQ ID NO: 186752 - DNA, 615 bp, Klebsiella oxytoca
atgatgaatatcaatatattcgatttaaaccagaaaatcagaacggtagcgatgcaggtaaatcacgctaaaccatcgatgaaatctctaacgctattattgattacagggcttctgctgagcggcactatgccagcctgggcttatgatgcggcgaataccgtttattttaatgttactggtacgattgaagagccagtatgtgacgtgtccgtgaaaccatccaatgctatcgacctgggcacggtttcctatcaatatctgaccggaaaaccgggggcgacgagtgaagccacagcagtgtcacttgtctttgataactgctcaacaggtacggcctcagtcacgataacgtttaatggtactccatttgatagcacctatacctcgatttatgaaaatgaactgatttatggtgccaagagcgttgggctacagcttcttagtgcaaatgaacagaaaacattggggccgaacgatagctatacctacgtattcagtgatagccctgaagggcattcctttaatatgagcgccagaatgtatacaccgaatgggcgcataacggcgggaaatgtcgcctatacagtcacttttaatgtgtcatataagtga

SEQ ID NO: 186753 - DNA, 540 bp, Klebsiella oxytoca
atgaaattaaaagccaaaacacttgccaaaatattaaccttatctgctggctgctctctggtgaccatggctcaagcagcgaatacaattacttttaccggtacggtctcagataccacttgtacagccaatatcaacaatggcgccaactccattgaaatgggctctgtttcggtagcagatttaaaagctaatacctatagcgcggccaagaacttctctttcactttgagcaattgccctaccggtgaagaggggactctgacaaaagccagaattacttttggtggtgaagcagatacatttaatagcgattattttaaaaaccaggctccagtgtctccagccactaatgtcgcaatagctatttttgataatgccggggtcgtacagaagaacaatactgaaggttcagatgtcgatatttcttctggcgaggctaccattccgtttatcgttaaaatggctaagtcgggtgccgctgatccaacaaaagggccggtgcagacaacagtaacttataatgtcacctattattaa

SEQ ID NO: 186754 - DNA, 738 bp, Klebsiella oxytoca
atgaacaaaaaagttattctacggggtatgagcgccatacttcccctgtgcatcggcgactttccgttttcatttattgttggcgcgctaagcgtgagcgccgggatgagtatctggcaaagtacggcatggtcgacgattgtcatcgccggttcggcacaaatgctggcgttaaatatgctaaaaaccggagcgagccttggggtgattatattcaccacgctgattattaatcttcgccatgtgctttatagcgcctctatttccagtacggtacgcgaagcctccttctttaaaaaatgctttatggcgtatgccctgaccgatgaagtgtacgccacgacggtaaaagagatggaggagaataaaaaagataaatatcttttctatttttcagcaatgctgacgttttggttcgcctgggtactggcagatttccttggcgctctggttggcgcgtcttttccgcacattgaaaaatatggtctggacttcgcgatggtcgccgcatttatcgccatcgtggtcccacaaatcaaaagccaggcctgtaccgtcgccgcggttgttgctgccgtatccggggtacttttggtcgtactgccctactcgttaggtatcgtcgtcgcatccgtgctgggcgtaatggcgggcctgagcgtcgatctcgccgaagagcgtaaacaggcgcaggccgctgacaaactctctctcgaaggagcgctggaaaatgagtaa

SEQ ID NO: 186755 - DNA, 750 bp, Klebsiella oxytoca
gtgatcgacgagattaataggggtaatatcagcaagattttcggtgagttgatcacgctaatcgaatctgacaagcgtgaccccctgaatggaaatccgcctcctcttgaactgatattagcttactctggtgagaaattttcggtgcccgctaacgtggacattattggcacaatgaatacagcagaccgctctcttgcacagctcgataccgcattgcgccgccgtttcgactttgtgcctctactacctgatactcgtgcagagaaaaccactaatgatccacacagcgcgccattggccggattacaaataaaaacagagaagggaacgattgatgtgcgtcgaatgctgcaacgtatcaacgagcgtattgaggcgttatacaatcgcgatcactgtatcggccacgcttatttcacttcacttggagatgtatcagacgggtcaactcgcttcgatttgttgactgaaacctttcgcaaacgcatcgtgccgttattagaggagtattttttcgaggattggcgcaagattcgcttggtgcttggtgacaaccagaaaccagatacagaacaatttattactgagagcgacgcacatgaacaggatttgatcgaactatttggtaacgaccacggactcgacagttatgccactaggcgccgttatcaactacaatcgtcggcatttgttaatcccgctgcctatattggcatttatcaggctgaaatattactggctgagtga

SEQ ID NO: 186756 - DNA, 1245 bp, Klebsiella oxytoca
gtgcatgatggcgaagggttgcgtgtgttgcccagccatgttttctcttggttggaagcgcaggccttacatcaggatgaagctggtgaaactgtatggttacgtctgactcagaggtgcgggcgcagagctgtgcaggttacaagtttcgttggcgtaattcgttgcccagatgggtatcagatcgaagtgttgcccaaactcggcaaggtcaacggcgaggttgacgctcggcagttgctgatagagatgctgcgctgtctggggagttttcgccacattcagaccgatcgcgctcagttactgtcacgtcgaatgcccttgctggaggtattcatcagcgagtttttgcaggcggtagagcacgtcgtaaagcgaggcttacacagcgattactgttccaggcaagacaatctctttgccctgcgtggtaaactgcgtatgtcggcgcatctgcgccacaatctgtgtcggcgcgatcgtttttttgctgagtttgacgtattttcctctaaccgaccagaaaaccgcgtgctacacgcagctctgagatgtgccctggcgtggactgctacacaggctaacaagcaattggcgcgagaactatgttttgtgtttgccgatattcctgtctctgctcaacccgacgctgattttacgcgagtccgcttggatcgcggtatgtcgcattacgatgcagcgctaggttgggctcgtttgattctacagaatgaatcgccgcttactgggcatggtggtaatcgggctccgtccctactgtttccgatggaggcggtgttcgaggcttttgttgcgaggcacctggctcggcaacttgacaatggttacaccttgagtgtacaggctcgcagtttttctcttgtcaaacataacaaacaggactggttccgcctcaaacccgatctgctggtgcaggccgccaagcttaaccatgtagttctggataccaaatggaagctacttgacgcccacaaagccaacggaactgagaagtacgggttggatcagagtgatttctatcagttacacgcttacggtcaaagctatctcgatggtaaaggtgatgtggtgctgatctacccgaaaacggaccgtttcgatcaaccgctgccggttttcgcatttcctaatggcttacgactgtgggtgctgccattttgcctgagggagaagcgcttgctgttgccgtcatgcaatagtctccacatgttctttctcagttaa

SEQ ID NO: 186757 - DNA, 864 bp, Klebsiella oxytoca
atgaatgatcctgaagatttgaaacccttacagaactcactttccagcctgccacggtgggtatcggagcatattctgcagcagataaaacagcttacctgctatgaaccggtaatcggcattatgggcaaaaccggggcgggaaaatcgtcattatgtaatgccctgtttgccggtgaggtatcgccggtcagcgacgtgacagcctgtactcgtgaaccattgcgctttcgttttcaggttggaggtcggtttatgacactagtggatttacccggtgtgggggaaagcaatgcgcgtgatgcggaatatgccacgctgtaccgcaaacagctcccccgcttggacctggtgctgtggctgattaaggctgatgaccgggcgctggctgtggatgagcatttttaccgtaaggtatttggtgaggtataccggcataaggtgttgtttgttatcagtcagtccgacaaggttgaacccacctgcggtggtgaaaagctgtctacagagcagaaacaaaatatcagtcgcaaattctttctgctgtatgagttgttccagccgataaatcctgtctgtgcagtgtcagtccgtctgcagtggggactacggatgatggcagagcgtatgattcgctgcctgccgcgtgaggccagtagtcccgttgtggtacagctcagtacaccgcttcgtaccgatgccgttaataaaaaagcacgtgacgattttggtgaaacggtcggctcggtactggacacagtaagttccatgcccctgataccggccccggttcggaccgttatccagtctgtacgcgacatcgtcgtatcagtcgctcgtgcagtctggaatttcttcttctga

SEQ ID NO: 186758 - DNA, 711 bp, Klebsiella oxytoca
atgacacaggcagagcgccgtcatgaccggctggctgtcaggctgtcactgataatcagccgcctggttgccggtgaaacgctgaacatggcgcggctggctgcagagtttggtgtgtcagtccgtaccctgcgacgggattttcgcgaacggctgatgtacctcgacctggagtatcgacgggggcaatgccgcctgcgcagtaccggtgggggcgtacagggcgagctggatgcgctgacctttgctcaccgggcaggactggccgatatttttccgggactggaccggcgtctggcgggaatgctgctcactgccggagggatgccgtgtctggtatggcagccgccacattctgtgtcaccggccagctcactggtgttctaccgtctcgtcagtgccattaccgcctgccagcgggtactgctgctggccgagggagagcgctgtgacgggctggccccataccgcctgatatcactcgacggctgctggtacctcactggtgaacttaacgggcatatcaccgtgtatcctctggcgactatccatgcggtgacagttctgaacaccacttttaccccgcaaaaacgtctcagccagttaaccacacaggcgggttttatccgggctcttccacacttcagctgtattcgcgaagtcctgtctcctgggtcctctgaggaggagcagggcaacacactgatttaa

SEQ ID NO: 186759 - DNA, 537 bp, Klebsiella oxytoca
atgacctggcattacgagaaaaatggcatacgtcacgacaatgtgaccgaagacgacatcactggtctgattgcgctcggtgaactcaccgctgccacgctggtgtggcgacagggcatgccgggctggcaaccggtctccgccaccccgctggcttcggctctgctccacagcaccacaccacccgcgctgccggggagtcgcattccgggcggagtggtatggacgctggcatttggtcctttcattggttatgcgctcgagctgtggacggcagggctgaacggaatgtcttttgacgaggcatatgaggccgtctcgagcgggcagtactggtttatcacgctgctgctcaatatcgcactggggtatctcgatgaacgacgcctgcgtaaggccggagtggataccaccacgttcggcaaactggcctggctggtgccgttctatttgtggcggcgggcgaaaactctcgctcagaaaccggcttacttctgggtatggcttgtgatgctggtcctgaccgtctgggcctga

SEQ ID NO: 186760 - DNA, 438 bp, Klebsiella oxytoca
atgaacacgctgattaaaatactcggcattaccggcagccttctgctttgcgctggggctcaggcccaaccctataaccggacgctacctgcagtcgtcaatgacaacaacggaaatattttctggtgtgatgcgcatcgacaagttaccggaaaatgcgaagccatgtctgttgaccgtcagggcgggatggtcacggtgcgttcagcaccttttaaagactgcgaaggcggcctgtggggctggataactatcatgcacaacgatgtgtcgaagggattcaccattactccggataagaaattcggtctcaccgtaaaagatctgtgccgtccgggcacggtagtgacctttaagcccaaccagaagaagccggaatatgacgacctggtggcactttaccagggcaaagagctgtttcgctaccggcgcttctga

SEQ ID NO: 186761 - DNA, 411 bp, Klebsiella oxytoca
atgctgaaaatactgacctctgctgtacccgcccttattctgtcacttgccgcattcagtgccggtgccgctcagcttccggcaagccttatggataaagacaatcccggccaggagtactggtgccagggaaacgacatcaacacctccgtgtgctcactgaccggtgtcagcgacgaccataaatttgccctgattcaggacctgccgggcccggcctgtgaagacttaagcttcggggttattgatctggtgcgtcagaccggcgtcaacattccttacgacggtggtgactgtaagggctatgtgcaggccggttttgtgcgaggcacgaaagataatgccctgtatgtgaaaattgtccggggcagtaaaacattattgatgtacaaggttaaaactggttactga

SEQ ID NO: 186762 - DNA, 525 bp, Klebsiella oxytoca
atgccttttaaaataatttcatccggcattcaaattgaagaggaaaaaagaactgggtgcgcagaggcagttagaagatctttagaatacatttcaacattaactgatagaacaattatcggtttatttgataatgatcgggagggaaatgagcagttcaaaggattaaatcgttctatttttgaacctcatgacctgcaaaataattcccgaaaacatcaggtaaaaaatatctatgggcttattcttcctgttcctgagcatagagaacgttttgtacaaaataattctttaacgcagcgttacttcgtaattgaacaatatttccaagatgaaatattactacagcataacatgaaaggtgagtcaatattaggtactgaggtattttttgttaatgactcaagaaagaatgagttttcagagtcaaccaatgaccttccggtagaatgctttgggaattttagtattttattcgataaaatttccgatttattggctaacaatagaccagaaaacacttga

SEQ ID NO: 186763 - DNA, 126 bp, Klebsiella oxytoca; identical to SEQ ID NO: 26052

SEQ ID NO: 186764 - DNA, 291 bp, Klebsiella oxytoca
atgacaaaatcagcatcaatcaacaaaagtcacgcaaacaacacacacctgaatttcgtaaagaagcccttaagttggccgaacgtctcggtgtggccactaccgcccgtgaactcagcctttacgattcccagctctacaaacaactgcaccagacaatatcctctgagagagagcgtacaagcagcggagattgcctgcctcaaacgtcaactggctgagcgggataatgataatgagttggctattctccaaaagggcgcgacatacttcgcgaagcgcctgaaatga

SEQ ID NO: 186765 - DNA, 303 bp, Klebsiella oxytoca
atgaagtatatctttatcgaaaaatatcaggttgagttcagtatcaaagctatgtgtcgggtgctgtgcgtggcgcgcagctgctggtatgcctggtgtctgcgtcgtccccaactgagccatcggcaacagttccagtgcgtcttcaatgaagctgtctgtaaggtattcgttgaggcaaaacagcgttatggtgcggctcgtcttgcagacgagccgccgaaatacaacatcaaaacgatagcaacagttcgcgtcgtcagggcctgcgggcaaaaacctcacgtctgttcagcccgttaa

SEQ ID NO: 186766 - DNA, 312 bp, Klebsiella oxytoca
atggcgctgtggcggcgaattcacaccgaccgtggcgggcagtactgctcagcggattatcaggctctgctgaaacggcataatctgcatggcagcatgagcgcaaaaggttgctgttatgataatgcctgtgcggaaagcttctttcactcgttaaaagtcgagtgtatccacggagaacgctttatcagccgggaaatcatgcggacggcggtatttaattatattaagtgcgattacaatcgctggcggcgtcacagcgattatggcggcctcagcccgaaacagtttgaaaaccagaatctcgcttag

SEQ ID NO: 186767 - DNA, 480 bp, Klebsiella oxytoca
atggcgaaacaactgactatgtttacacctaaactgccgttaccagcactgcgtaccattaagcgagccttggttctgcttgaccagcatttgcgagaaccgggtgtggcattcacctcgactcaggctgcccgcgactggctcaggctgaaaatgggccccctggagcgcgaagtgtttgtcgtgctgtacctcaataaccagaaccagctgcttgcccacgaaacgctctttaccggcaccatcagtcacactgaggttcatcctcgcgaggtggtgaaacgtgcgctgtactttaatgcggcggcggtgatatttgcccataaccacccgtccggagaagtgactccaagccaggccgacaaggctatcactcaacgactgttacatgcactgatgctggtggagatccgggtgctcgaccaccttatcgtcggtggtacgcagatattgtcgttcgctgaacatggtctgctttga

SEQ ID NO: 186768 - DNA, 222 bp, Klebsiella oxytoca
atgaaaattatcagtaaacgccgggcgatgacgatttaccgtcagcatccggcctcccgcattgttcgattctgcactggcagataccagtggcatggcagtgtctgtcaatacaccgttaaggtggttcctgacatttccagtgtgctggcggtatacgtcgaacgccgccaggatcgcaacggaccttatacctgtctgatgagtattaccctgaactga

SEQ ID NO: 186769 - DNA, 255 bp, Klebsiella oxytoca
atgagaaaccccacatggggcctgcagcgggatatcacgccgtgcctgggagcacgtctggtgcaggagggcaaccggctgcactatctggctgactgggccagtatcaccggtaagttcagtgacgccgaatgtctgaagctggatgaggcatttccgcattttatcagccagatggaatcgatgatggccactggtgaaatgaatcctcgccacgcccgctgcgtcaccctgtaccaccggttttacctgtga

SEQ ID NO: 186770 - DNA, 876 bp, Klebsiella oxytoca
atgaaaatacttcccgttatctctcccaaaggtggagaaggcaaatccacgtttgctgcttaccttgccggttttcttgccgatgccggcctgaacacccttcttgtggatgcagactattcccagcccacagccagcagtatcttcgcgctggagcatgaatcccctttcggtctctatgaattgctgatgcagatggtcagtgaccatacgcaatgcatttcgcagaccgccataaaaaatctcgatgtcatctactctaacgacccggacgaactgttgccaaccgcgatgctccacgctgcagacggccgtctgcgcctgcgtaacatacttcagcatcctttctttaaccgttatgacgtcattattgtggattcgaaaggcgcaacaggcgtcatgaccgagctttccctcctttcctctaccggtaatgtgatgggcgttgttaaacccatccttccggatgtccgtgaatttatccgcggctcccttcatatgcttacccgcctgaaaacctatgaaaattacggtattcgccttcctgatatttccattctcgtcaactgtatcgaaaacactctgcttgaccgtgaagcaatggacggtcttgccgccatcattaacgaaaaacattacgacgcctctgcgctgggcaaccgtgacgtttatcgtttactcgatacccgtatcgaggcgctggatattttcaaactggggcacgtcaagcagcagcccgtgcatcgtctggaatacaaaacacgccgcaaaggtccggccgcagccgtcaccatgcacgacctcgcgtctgaactgttccccgagtggcagagccatttcagtgacgttctgacccgggaggtgcgtcatgtctga

SEQ ID NO: 186771 - DNA, 1371 bp, Klebsiella oxytoca
atgtctgagatgatgatgccctgctcttatgaggctgagcaggccgtactgggcggactgatgcttgataacgaccggtgggatgaggtgatactgcaaatctccccggaagatttgttttcccggccgcaccgtatggtctttcgcgtgatggccgagctggccggagaagggctaccgctcgatctcatcactattacggaacggctggagaacagaggcgaccttgaacagtgtggcggctttgcttatctggctgaaatgagtaaaaacacgccgtctgcagccaatatcctggcttacgccggggtggtggcggagaaaagccgcctgcggcagctgatgactgtgggtaacagtcttctttccgatgtgcaggccccgaaagccagctcggcgggcattcttgagtcggccgaaggtaagttgtttaacattgccgaacagggagccatgcagctcaacagtgagaccggcgttaacgaggcgctggataaactgctgacgcagctggaaagcatgtccgccagtgacggcctcaccgggacaccgacagggttcagtgaactggacgcgatgacctgtggtctccagcccggcgatctggccctgctggccgcccgtccttccatggggaaaacgtcgctggccatggccgcctgcacagcggccgtgagcgcaaaacctgacgatcacgtctttgtgttcagtcttgaaatgccctcagagcagctgatgatgcgcctgctggcgatggaaggccgggtggaactgtcccggcttcgcagcggcaacatggatgatgaagactgggctcgcgtgtccgaggcaaccggtcgcattattgagtggaaaaaccgtctgatcattgatgataccagttaccagaccccggccacactgcgcgcccgcgcccgacgctatgtccgcaaatacggcagaccctctctcatcatgctggactatctgcagcttgtccgctcccccgagcaggaaaaccgcacgcaggaaatagcggaaatttcccgctcgcttaaggcgctcggtaaagagctgggctgtccggtactggcgctttcccagctcaaccgcctggtggagcagcgggccgataaacgccccaataatggtgacctgcgtgactccggtgcgctggagcaggatgcggacctcatcatgtttatttaccgggatgaggtttataaccccggcacccctgatgccggggtggctgagatcattgtcggcaagcagcggcaggggccaaccggcacggtaaaagtcaaatttgacgggcgttacaccctcttttcggagtttcaggaaggcagctatgacttcggttaccgcagcgggaggaaacaggcatga

SEQ ID NO: 186772 - DNA, 1701 bp, Klebsiella oxytoca
atgagccgtaaaagttctaatgtgggggctgccatgctgcagcccggacgccagtcgcaggcggccggcaatatcagcgtcatgccggcggctgaaatgcccatggtcctgacgctcgaccagttaagcccgaatcctgataatccgcgaacatcacgcaatccgcgttatgacgatatcaaggcttccatccgttcgcgcgggctggacaccgtgcccaaagtcacccgtgacccggatggtgagcccgatatgtacatcttcagcgacgggggtaatacacgttatcagatcctgtcagaactgtggcaggaaaccggagaagaccggtttttccgcgtccatgtgttgttcaagccgtggccgggacggctgcagtgtgttattggccatctggcagagaatgaagtgcgcggggagctgagttttattgaaaaagcgcaggggatccacaaagcccgctctatatatgaagagcagatgggaaagacggtttcgttgcgtcagttgtcagagctactgacccatgaaggtttgccagtccattactcaacagtcagccgtatggaagatgcgctgaaatatctttatccgtggatcccagacctgcttgagtccgggcttggcaggccacaaataacgtcactgctggcgctccggcatgatgcggaacgcgtgtgggatgaattttgcctgatttcagacacaggcgacaaatccttcagcgacgtttttggccagtgttgtggccgtttcaactccccggaactgtggtctctggagatgtttcgcgatgaatttattggtgatttactgcaggcgttaccccatccggaactggactatgaccgctggatgatggaactcgatcctaaagaacgcaaccgcagacatcactttggcgagccggagacggttgcctttcccgccgcaaacaagcctgttaatgctgatcacgccctgcataccacaggctcagatgagagtgaaggcgtcccgctacctgtctccagttcacgtcctgaggtctcaggaggggctgtaacgcccgttccgggtaatgcgtcttctccttctgaaacaccgattaatgagcccccccggcatgaggttcagccagatatgtacggtgccgcgccggttatttcaggtgagagcggggatgttagcgggctggttaccctctccaatgggtacggagaagagaatggcggagaagaggacaatggggaggatggcctgctttctcttttaacaccagaacctgaagttgtcctgcaggatgacgcgccggtgagtaatgacagcatctggcatgtgccggcccatcaggacgatatcgaacacctgcagaataccgcttttcgtctggcatgggagctgggtgaggtccttggctgcgaagatgaaattcttcctcaacgcgacaaggacacgtctgccggttacgtcggggcaggtgaggtgtgttctgaagccgccgcatttctgctgggcctgaccggcgaagcgcctgtgctgcatccggcggcaggggtgtgtggtctgccggagcttttcaccggcggcccgggtgagggggaagcacctgtcctgacagatgaagatgctctgaaactgctccgcctgatgcgcgttatgcgccgtctccgggagctgcaacgcggtctgaagtacggggaggataacagtgatgaataa

SEQ ID NO: 186773 - DNA, 711 bp, Klebsiella oxytoca
atgaataactcacagcgacagttgcgactgctgaatcttgtcaggaaactgctgaagctgggccgcagcaacagtaatgcccatgaggcaggactggctctgcagcgtgcccaaaagctgatggccagatacggtatcagcgagcttgacgccggccttacatccgtgcgcgaagcgtcttcccgcacggccccttcggatgctgaaaaagttccggaatggatggtgacccttgtccggggcgtctgtcatgcctttggctgccaggcttattactcatggcgtcagacctctgccgggtatcgccgttcggtaaccttttacggattcagtgaaaaacctgagatagcagcctatgcctttgatgtgctgacgcgccagctgaaagatgccacaaattcttatctcaaaacccagagtaagcggctgaaactggccacacgccgggcgagagcggagcagttccgtgacggctgggtatgtggggtgcgtgaggtgatatcggcaactgacatcagcagcgaggagcagcaggtgatgagccactggctggaaagccgcagtatgaaaacagtcacaacccgtgaactgaaagcctgccgcggggcggatacagcacgttatcaggggtatgaagccggacaaaatgcccgtcttcatcagggtgtcagcggccggggtccggcagccattggttaccgtcaggattaa

SEQ ID NO: 186774 - DNA, 591 bp, Klebsiella oxytoca
atgatgaacagtttatctcaggctgcaaacggattattgatgcagctggttatggatctcagaagtggctatctgcgccgctgcgaatcgctgggactgaaccgggaggaaatgcagatgctgcaggggctctcgctcgaagagcttcactacctttccggcagtgaggtgtcgatcatcagtgtgggcatcaatcacggcaatctggtgcgcatgctgcagcaggcccggactgaacagaaacgactccagcgtatcgatcgggcgctggcgctgggcggctccattgaactgatggctaattacttcgggctctccagtacggacgtggcggcccgccgtcgtattgccggtatcgatgtccggccggggcgcggtaacgcactgggtgatgaggaaaacgccgccctgtggcgtcagtggcaaaagtccggcgttgaagatgcggaaagtgctgacgggctggacgtgatgatgctggctgcagaacagatgaacgtctcgctgacgtcggtctggcatgcggtccgtggctggcacaagacccggcagccttctccggcacgaacgccggtaaggaagacggcatga

SEQ ID NO: 186775 - DNA, 249 bp, Klebsiella oxytoca
atgaaatacaggatggttgcgccgggcctgcgggctccccatggtacgccgccgcaatgctgtcagaaggcgttacgtcaggttcgccgtttccggcagggggcgcgtaattacacccggctcgatgagaaaggctgcggttactacaaaatcgatctcggcccgttctggcgtctgctgagtcgcaacgaaggccggacatggcttcttctcagccacgaacgctataacagcgccatacggaaatag

SEQ ID NO: 186776 - DNA, 1239 bp, Klebsiella oxytoca
atgagtctgcctgcagaaagcctgattgcttatacgctggataaaatgaatgcccgccttgcggccagtccccggcgggatgatggcaggatacgtaacggcctgctgtttaccggaaatgtgcatgattccattccccgccggctgttgctcgacacgcggttgtcaccactggacaagatgggctggatgatgatccggctgtatgcacaaaataatgagggggcggttttccccagctatgacgaactgcagctgcagcttgcctcacccggaaaggggaaagcctcaagggaaacggtaagccgcgtcctgcttatgctgcgaataaccggctggctcagcctctgtaaacgcgtgcgggatgataaagggcgggtgcgggggaatatctatgctcagcacgatgagcccctgacgttcagcgatgcggaaatgctcgacccccgcttccttgatacggtagcggatgcctgcctgagtaaaaaccggactatcagccagaccgcccgcgaagcgctcgacgatataaaaaacgaccccaccatgcgccattatcgcagccatcttgcgctgatcgaatcgcgtctggaccgcccacagacgcccagccagatggcgaaacatcatcaccgaataccctgtcccgcaccgggttcggaaaccgaactcagtcataaacggccaggaatcgtcgctaaaaaacagggttcggataccgaactcagcccagaaagatacaacaattcactgagttcggaatccgtactgccagtaaaaacaggcggttatgaccgggttcggaaaccgaaccattacgtacgtagtatcacacacagtgtgaataaaaatacgtacgtaccgggtaaacctgtgcttcccgacagtctgcatgaacttgtgccggcagaagatattgccatgctgaccgcacagctgcaggcgctgcctgaagaacaggcacaacttgtgctgctcagcctgcaaaaggtgatggcacgccagcagctcagcaacccggttggctggttgctggccgtgatgaagaaggcgcgtgagggcaggttatacgcgccccgtcagggtggcgatatatctgacagtgtcgggcaaaaaacagttcagcgtcccgaacagcaacaatggaaacccgaaccacgcgcctctgcccgcccggtatcggaggaaaatatcagggatgtggtgaagaaaattcgggaaaaaatcataaattcatga

SEQ ID NO: 186777 - DNA, 726 bp, Klebsiella oxytoca
atgtctgatggtaaaacaaagggcggaacaaccgcttcacgagcgggggccctacagtcctctgttaatatcctgctccatacacattatgcaatccggctttgggagggcaggaaacgtgatgctccggacgagacaggggtgaaaaaaaagaggcctgaaataatcagcatgccgcaagccattgcgcgagctggtaatgcttcccgagactcagcggcagataatccctatgccgatatggctctggtacggctcgaagaagccctgcaacgagcaacacttaaaattaatgaaaacgtcagttcactggatgccatattgtcagccgtacccaaaggggtaacgctctcggaagttgaatcagccgatccgttaaatgtcagcgttttcagccgctcaccgttaggataccggtgcgtatggcttctggttggatatgatcagttagcaatgaaagctttccaggcttttcattacggactgatttcgcgttcgcaacgtgacgctatcctggacaatggtggccatgctgttcgtcaggtctatggcgtgattcagccttaccgaacacttgcagtgactcgccgtgatattgcagaaaaaaccacgcaagggcttgttgccattgagcgaaatggcgaacctgatccggatgtgttaagcggtaaaaaacgttcttcgttctcacctccgcttaaaaacaccatagcagaggaggaatga

SEQ ID NO: 186778 - DNA, 555 bp, Klebsiella oxytoca
atgattcgccctgtgttcctcctcacctccttctttttactgagcggatgcgcaacaacggactgggctgcgattaataaacaggtcagtgacacagccgcaaacctgacaaaaacgttgggcggcaacagcagcggagaaagtggcgggatgcctctgatgagcccggcggggcaacaggccctgcagtccgtcgataaaacgttctccgtgccggtcgatgtggataccgcggcggcccgcctgaagcgccattacaaatttatctccacgcaggagcttgaggcactgcggcaggccgcaaatgacggggactggaaagcggcggctgaagatgatgcgcatcccgtctgggatgccatgccgggcagctactacaaaatgggctccgactggaacggacgtgatcacctggatatcgaaatcgagaaaaacgggtccggcagcaggctctatgttgtctatcgctcatcatcagcacagcgtctggctggatccggcgtcacgaagctgatgaatgatgtccgcgctgttgcggcgggtgaaaaacgctga

SEQ ID NO: 186779 - DNA, 2010 bp, Klebsiella oxytoca
atgcaactctttctgtgtgaaaaaccctcccaggcaaaggatattgcccgcgtactgggtatcagcaagcgtgagcagggatttatcagcggcggtaacatcgttgtgacctgggcggtcggccatttactcgaaactgccagccctgaagcctatggcgagcagtatggcaggccatggcgtgccgatgttctgcctgtgctgcctgaggcctggaaaatggtcgtcaaagatcagacaaaatcgcagttcaccgttatcagtaagctgctcaaaaaggcgtctgaggtggtcatcgccaccgatgccgaccgcgagggagaagttatcgcgcgtgagctgctggaatactgccactacagtggcgcggtgcgccggctctggttatcagccctggatgaggccagtgtgaaggaagcactgggcaatattcttcccggagaaaaaacagctctgctgtatgatgccggcaagggccggagccaggctgactggctcatcggtatgaacctgacccgcctttatactctcaaagcccgtgactcaggggtgtcagaagtgctgtccgtcgggcgggtacagacgccgacgcttgccatggtggttaaccgggataatgaaatcacgtccttcgtgccaaagccctggtggcaggtacatgcgcttattgaaaaagagggcgtccggttccgggctggctgggtgcccgttgagcagtactgtgacgaggaaaagcgttgcatcaatcctcaggcagcccgggcggtgggacagctttgtcagcagcagggcagggctacggtactggaggtgacccagaagcgggagaaaacggctgcgccgctctgttttgacctgggcacccttcagcaggtctgttcccgaaaattcggcatgggcgcaaatgatgtgctcgccattgctcaggcactttacgaaacccataaagcgaccacctacccccggacagactgcggtttccttccaacttcgatgcagcaggaaatacccgacgttctggcggcagtggcaaaatccgatcccgctgtggccccggtactgaatcagctggacaggcagtttgtctcgcgtgtctggaatgacaagaaaatcaccgcgcaccatgccatcattcccacccgacaggcatttgatttgtcgcgcctcagcgccgatgagctgaaggtctaccatctgattcgccagcattatttcgcccagttccttccgctgcaggaatctgacgtgacggaggcgtctttcaatatcggtggccagctgttccgtacacgcgggaaagtcggtgtggtgacgggctggaagtcattgtttcaggctgaaaaagatgacgatgaagaggacgtcgacggtgacagtatggcgctgccggcgctggcaaaaggggatgtttgcgctgtcaccggttctgaggttaaggatatgaaaaccagtccgcccaaaccgttcacggaggggacgctgattgctgccatgaagaacgcggccagtttcgtcagtgacccgaagctcaagaaagtgctgcgtgataacgccggtctgggcacagaggcgacgcgtgcggctgtgcttgaaaccctcttcaaacgacactatctggagaaaaaagggaagcacatccactcaacgcagatggcccgggagctgattgcggccctgccggaaacgctgacgagcccgggcatgaccgcattatgggagcaggcactggatgatatttcgcaggggaaaatgtcgcttgcggtctttatgcaaaagcagctgcagtggacccgtcaccttgtcgaaaaaggccgccaggacagtgtgaaaatcaccgctcccgtcacgcctccctgcccgttatgtaaaggccccacacgtaaacgtaaaggtaaaaatggtgatttctgggggtgcatacgctatccggactgtgagggaattatcagtacaggtaagaagaaagcagcgaagcgtaaaaaaacatcggttaaggctaaaacagaataa

SEQ ID NO: 186780 - DNA, 471 bp, Klebsiella oxytoca
atgtctgcaaacaacacttctgcatctgcaaaatctgagtacttcaacctgactatcaaaggcatcgggtatctcagcaacattcgccaggttaaccatcagaatggctcgttcctcagctgcgtaatcaatgcactgagtggtccgactgataatccggcctacgtccgttttgacatttctgtcgcaggtaaagaggcaaccagccttatcgcccgctgccagaaagccgtcgatgaagacaagaaagtcctgttgggctttaacctgagtaacccgtccacggacatatttacgctgaacaaaggcgaccatgccggcgaacagcgcgtcagtctgaaagcccgcctgataaaggtggactggataaaaataggccaggacatggtttacaagactgaaaaatctgactccgtgccgccgcagaatggctctgccgcacagcaaaactacgcagagaactcattctga

SEQ ID NO: 186781 - DNA, 537 bp, Klebsiella oxytoca
atgtcctcacgcggcgttaacaaggttatccttgtcggaaatctcggccaggatcctgaagtgcgttatattcccaacggcagtgcagttgccaccctttctctggccacgtctgagagctggcgcgataagcagtccggagaacagaaagaagtgactgaatggcaccgggtggttattttcggcaagctggcagaaattgcgggtgaatatctgcgtaaaggctcccaggtttacatcgagggccagctgcgcacacgcaaatggaccgatcaggccggccaggataaatacaccacagaggtggtggtcaatattggtggcaccatgcagatgcttggcggccggcagtccggcagcggtcagaatacgtcttcccggaatgactggggccagcctcatcaaccttccggaccgactcacagtggccaggcttccggcagcagtgccggtgcgccaccgatggacttcgatgacgatataccgttcattggattcgggtatggagtaccaaaatcggcaatccatgcactctga

SEQ ID NO: 186782 - DNA, 243 bp, Klebsiella oxytoca
atgcctgttatactgaggatcaacggtttccggttctttttttattctaatgaaggtaacccgctcgaacctgcacacattcacgtaatgaaagcaggtagtgaagccaaattctggttaacgccatcagtggcactggccagtaacgatgggtttaattcacgggtattgaaagaactgacggggatcgttgaagataaccaagcattgtttctggaggcctggaatgactatttcagctaa

SEQ ID NO: 186783 - DNA, 249 bp, Klebsiella oxytoca
atgactatttcagctaaacgggtcagcttcgatgaggccacgatgtgggttgaactcaacgacgcccgtaccatcggtgtgccgctggcatggtttccacgcctgttgcatgcttcaactgaacagcttaacagctatgaactgagtccccgtggtatccactgggacgcgctggacgaagacatttctgttgcgggtttgcttgaaggccgcggcgatgtgacccatcgtccccataaagtagcctga

SEQ ID NO: 186784 - DNA, 666 bp, Klebsiella oxytoca
atgaaacgtaacacctctcacaacgtattttcaccaggcaggcttgccactgttcttcccctgctgctccttgcgggctgtgtttcccagccgcaaaagttgcagcaacgcgcgcctgccgacccgacacccggcaccaccgtcacccgcaacgttcagccggtctctccggacgagtatgcgcggacgccggaagtggtgcgctacgatcgttatctgctggtcagtaccgatccgcaggcggcccagcgtgaccctctctcgcagattattgatattcgcatcccgtcatccctgcatcctaccgtggcggatgcgctgcgttacgccctgcgccagtccggttattccctgtgcgcgaccggttccgccaacggcgtgctttaccgccaggcattgccggcggttcagtaccagctgggcccgatgcgcctgcgtactgccctgcaggttatggccggtccggcctggcagttggaagtggacgatgtacagcgggtggtctgccacagcctgcgcgacggctaccagctgccggtctcccagcttccgccgccggtcagcacctggtccacgcctgcgccgtccgccgtgtcacaaccggccatcagcgcccctcagtccgtccccgttaaacctgtcagcggagggtttctgagaaaatga

SEQ ID NO: 186785 - DNA, 759 bp, Klebsiella oxytoca
atgagcgaacagcaaccattccatactgaccccgcgccggcccgtaaaagattcagctggcgtccccgccgccgcctcatctggggcgctgccggcggtgtggcgctcgccggcattctggcgctgggctacaccgccttcagtctgggcatatcgaaccttgatgagcgtcttgcacgccttgaatctcagggcagtacagcggccactgttgagacagttgcggccctgcagtcagatgtgaccacgctcagagccggtctgcaggatacgcggaaaaaacttggcgagatgcagcaggagctgagcgctgctgcgaaacaggccggcagcgatgacgccgtgcgtcagtcattgcgaacccttcaggacgcccagcaggggctggaaacccgcctgagtgcgctgactgagcagctgacagcgctgaaatcacagccggcacccacacccgccgcacctgtcgccgcaccggtcaaaaaaaacgcgcctgctgcaaaaaagccccgtcccgctgacacacgtcgtgctgctccgtcccttcgcgtggcccgcactgcgccttttgtgctgacgggcgtggagaagcggggggcagagtcctgggctgccatcgcgccccggggctacagcagcctgtcgcaggtggccctggtcggagagggcgaaaccgttgccggctggacgctggtcagtgccggttatggtgaggcgacgtttcgggttaacggccgcctgaccgtgctcagagcagaataa

SEQ ID NO: 186786 - DNA, 723 bp, Klebsiella oxytoca
atgaaactgaaacatacctttttagccgccatgctgctgagtcccctgaccctggccgcgaccacatcaggacagacggatgtcagccgacaggaatcaacacaacggacggactccgcacagcaaaacctgcagcagcaggccggtcagtggggactcagtgccgacgattatcagcgttatcagcagctgatgaagggaccccggggtatccagtcgccgggtctcgatccgctttccaccctcggtatcgaggcgcagacgccggcagagcgccgtaagtttgctgaaaagtgggtcaaggaagagtttgcccgcacccagaaagagcttgatttccagcgtgaggtgaacgcggcctggcagcgcctgtatccgggcacactgccggtcaatatggggaacgcctccggcgtggcgcacgacagtggcggccggctggcgctgttcgtcaggtcaaaagactgcgcaacctgcgacgcgaaactgtctgccgtgctggctgacaaccggccggtggacatctatctggtcgacagccagggcagtgatgatgcgcttcgcagctgggcgcgggaccatcacattcctgtggaaaaggtccgcaaacgccagatcacgcttaaccacgacggcggccggtggatgcgctttggtaacggcctgatgccggttttactgcagcaggcgggagacggtaaatgggcaatcgcagcattctga

SEQ ID NO: 186787 - DNA, 636 bp, Klebsiella oxytoca
atgggcaatcgcagcattctgaccggcgcgctggcgctgggcttactgatggcggccgtccctgacggccatgctgaccagacggtgccggagggttacgtccgcgtggccatggcgcacggcgtgcccccggaagcgctttactcggtatcactgagcgagtcttcgcgcaaacttccccgcggcgtgcggccatggccctggaccatcaatgtggcaggcaaagggtatcgctatgagacgcgcctgcaggcctggcaggcgctgcaggtctttatgaagcgtcacccgcttaagcgcatcgatgtcggtattgcccaggtcaatctgggctggaacggtcatcattttgcctcgacgtgggatgcgtttgacccttacaccaacctgaacgccgccgccaccattctgcgtgaatgctgggcgcgtaagccaggcagctggctggatgcggccggctgctaccaccatcccgcaggtggtcagcctgctgcacgttaccgcgccattgtgagagggcatctggcaaaaatcagccctgcaccccgcatttctgcgccggcagctgaagcgccccgctcggttgctgcgctcacccccgatccaggcttcgtctggactgaacccgggagataa

SEQ ID NO: 186788 - DNA, 534 bp, Klebsiella oxytoca
atgaaaacgctgtccttactgctgtttaccctccttcccctgaccggccatgctgaactgaacgtgattgctgatctgggcggtgaagatgctgcgccgtattttgaggccgttaataaacagcccggcatgcccggcgtcagtgacgtacagccttcacgccagccgggccacggtgttccgctggctgacgggatggcgggtatgttacccgttaacacacctgaactgagcccggggaatacagcagaccggccgctgcagttgcccggcattggggcgttgtttctgatcggggatgatgctctgtcccgtgactggctgaaggccaatgccggcgcgctggctgaacatcatgcggccgggatgatagtcaacgtcacagacatggataccgtgcgcgagctgcgcgaactggcccccggtgtcagcctggccccggcttccgggagcgagctggcccgtcgcctgcagattgcgcattatccggtactcatcaccgataccggcctgacgcagcaggttaagccgtaa

SEQ ID NO: 186789 - DNA, 573 bp, Klebsiella oxytoca
atgagcgcgccaaatatcaacggtctgctgatggcacacccttatggggcggtcctactgatcgtccttttcctggtggtgatggcctttctgaacctgcgctggcgtgagaaagccagcacccgccgtcaccggcgataccgggcaacggcggggcgggtactgaataagcttaacagcctgccgggagacgggcagcgtctgacctatctgcgcaaaatcagcccctatgtctttgaagagctgttgctgtctgcctttgaacgtcagggactgaccgtagtgcgcaatgcctcttacagcggtgacggcggccttgatggccaggtcatcatcgacggcgagcactggcttatccaggccaaacggtacagtcgtgctgtttcccccgcacatgttgaggacttcgaccggcttctccagcagtccggccgccgggggctgtttatccacacgggccgtaccggaaaaatgagccgcaccattcgcacggcgtcaccgcgtctgcgcatcatcagcgggcaacgcctgctggccattctcgccggtcaggacgtccggcagtatctctga

SEQ ID NO: 186790 - DNA, 489 bp, Klebsiella oxytoca
atgcacatcttcctgaacagcctgcgctacgcgttgtggcttgtgttctgtttattccgtcatgccgttttcgtgcctgctgctttcggcggtgtctggctgctcgcctggcttgttttcggccatccggtcagtgacctgaacgaccagttgcagaaggaggcaacggcatggcgcaccgcgccgcccggacattacatgtgggaggaatgcccggtgcctgataatgcggctccgcctgatgcaaagccggcagcctgtaccgtcactgccgtttccacagaaaccgcggcgaacaattacctgctgtcattgcgggccgtatggatcatttttttcattctgtcgaatgtcctgtatgtgctctggcgcttactggcggatgccctgcgttatcactctcagtcctgcagggaagccggctccgcaaaggggacgtatacccgcagggccgacggtaaaatcataaaggaggcagacgatgagtaa

SEQ ID NO: 186791 - DNA, 2100 bp, Klebsiella oxytoca
atgagtaaccgttacgtcattgaagctctgctgcgtccggccgttgagctgaataccgccgtggtatcgggcatggcggcgtatgtctgtgtgcaggcaccctgggctgtcgccctggctccgtctgtcagctatgtcaccgcagccgggtttgcggcgctggcagtaacccgcacgcatcaggggatgaagattattcgttaccgccggaatctccgccgcctgccgcgctatgtcatgagcactaagcagatccccgtcagtcatcatcgcctgtttctcggccgggggttccgctggacccagaaacacacccagcgcctgcaggatacgctgcgccctgaagtggcccgttacctgcagccaaaccgcttttacctgggggcgcgtcagctcgaaatgatgacagagcaccgtctgccctggctgggcaagctgctgagtgctgatacgccgctgaacccggtgcggccgttaccgccggtgggcggaaacccggcgctgcacggcatcgagcccgacgaaaaagacgtcaccctggctctgggggagcgcgttggccatacggtggtgtacggcaccacgcgcgtcgggaagacccggctggcagagctgctggtcacccaggatatccggcggggtgaagtcaccatcgtgtttgatccgaaaggcgacgcagacctgatgaaacgcgtctgggcagagacccaccgggccggacgcggggacgagctgtatatttttcatcttggctggcctgaaatttcagcccgttataatgccgtcgggcgttttggtcgcgtgtcagaggtggcgtcccgcgtggccggtcagctgtcgggtgaggggaacagcgcggcattccgcgaatttgcctggcggttcgtcaacatcatcgcccgtgcgctggtcgccctgggggaacgccctgactacacgctgattatgcgctacgtgaacaatatcgccgatctctatatccgctatgcggaaaaaatcatccaggcgcagctgccggctctgcagacgcagattgagaataatcagcaggtgctgggagaggacgacgtgccccgtaacatgcaggggcagccggatgccttacgtatctgggccattgaggttgccctgagttcagaagagggtaaaaaactctatgatcccatccttgacgggctgcggtcagcggtacgttatgaccgtacttactttgacaaaatcgtggcatcgctgctgccgctgctggaaaaactgaccaccggcaagaccgccgagctgctgtcgccggattatcaggatattgacgacacgcggccgatttttgactgggaacagatcatccgtaaaaaagccgtggtgtatgtggggctcgatgcgctcagtgacagtgaagtggcgagcgcggtcggtaactccatgttcgccgatctggtgagtgtggccgggcacatttataaacatggtatcaatgcgggcctgccgggcgggaaagaagggaagtccctgattaacctgcactgcgatgagtttaacgagctgatgggggatgagtttatccctctcatcaacaaagggggcggtgccggcatgcaggtgacggcctatacccagacgtcttctgatattgaggcacgcatcgggaatgcggccaagacggcccaggtacagggtaactttaacaacctgattatgctgcgcgtcagggagaaccgcaccgccgagctgctgaccacgcagctgccgcaggtggagatttacaccaaaacgctggtctccgggcaccaggacacggccgatgtcaatgcagaccaggacttcacctcaagcacccaggaccgcgtcgggacggtaaaagtcccgctgctggagccggccgatatcgtgacgctgccgaaagggcaggcgtttgccctgctggagggcgggcagctgtggaaaatccgcatgccgctgcctgccggggatgctgatgatgtgctgatgccggaaagtattgagaaaatagcggaggagatgcggcgcagctatcacagcggcgaatcctggtggcgggatggtccggccctgaacgtgccggtcacaggaggggcgaatggctga

SEQ ID NO: 186792 - DNA, 759 bp, Klebsiella oxytoca
atggctgaggtaaaacgtcccccacagcagcagacactgccggagcgcaaacacggcattctgtataacctgctctggggctggccgtgggccctggtgggcgtggtgctgtcctcgctgctgctgagcctgctgattgaatatatcggcatcgccttcttctggccggaagccggggcggcgcacagtgaagcggtcatgaacaccgagctggggtggctgtccacagagttcacccgcagcctgctgctgtctgagccatcggtgacggttgtgcgctgggtgagcaccgcctatcagtgggcctttgtggacagtggcttcctggactgggtccggcagcagtatgcacaccagatgcacagtgacaatgccgtcacccgggaaatcaacagctggagcggctggcttgccggctacctgcgtgaatacctgctggccacggtatggatcagcattatcaccctggtacgcgtcaccatcctggtgctgtccgtgccgttgtttgtgctggtcgtggtggtggcgctggttgaggggctggggcggcgtgatctgcggcggtacggcgcggggtatgaaagttcgtttgtctatcatcatgccaagaagctggtcaaaccggccgctgtggtgcccgccatgctgtacctttcctggcccacggcagtctaccccaatctgctgttgttgccggcggctgttctgctggggatcgccgtaacggtgaccactgcgtcgttcaagaagtatctttaa

SEQ ID NO: 186793 - DNA, 516 bp, Klebsiella oxytoca; identical to SEQ ID NO: 112172

SEQ ID NO: 186794 - DNA, 348 bp, Klebsiella oxytoca
atgaactcaactcgtccggccatgcggcgcaaccgtcgtgtcccgggcatcactggcctggtattgctgacctttctggcatcagctgctgcacaggcatccgagaaagacgagcttgcgtctgttcagcgtcagctggaccaggttcaggcgtcgcttgaaagggcccgcgtggcggctgcacaggccgatccggctgaccgtggccgctttttctttgattaccgtcaggccacatccgatctcaacaccatccgcagcggcattgaccgctatctggagccctcccgcgcgcaaccgcgtgacccgtcttttgtggccggtaattaccggcgggagcggccctga

SEQ ID NO: 186795 - DNA, 243 bp, Klebsiella oxytoca
atgcccatgacatccgaacaaacgaacgcgtttaaagccggctccggcagtcttgatgtgaacatccttcatctgctctgcatcggggcactgctggcgtttctttttttatgggccgcgtgggcgctgtcggatgtctggaccggctggagtaacacaaaagtgcgggatgcggccctgggacgctttgccgtccgcaccgtgctgctgttgcttgtgtgtatctggatgtttgctagttaa

SEQ ID NO: 186796 - DNA, 387 bp, Klebsiella oxytoca
atgcaccattctgagtctgttgttgcccgcctgcgccgtctcgccagtcgtacgctgacccgcgccggtacgctggcccttctgggctggctcacctgcaaaccggcctttgcggatttaccaagcgttgaagcgcctgagtccggaggcggaagcgggctgtccggacaaatcaagggctacctgcaggacggcattgttatcggggggctggtcgtggcggccgttgcctttatcaacgttgccattgccgccctgcacaccttcaccgaagtccgcaatgagaaagccacctggaccaaattcggggccattgtggtggtgggggtggtgctgctggttgccgttatctggctgctcggcaagtctgccgacattctgttgtag

SEQ ID NO: 186797 - DNA, 357 bp, Klebsiella oxytoca
atgcagaccattcgttttttacctgaccgtctcaacagtgagcccgtggtgtttcgcgggtttaccacccatgagatggggctggcagcccttgccggcgcgggtgcgggtctgctcctgtcactgccgtttatcccgcttgccggctgggttgttgttcccaccggcctgctggtcatgccgctgctgctcgtctggttcggcggccgctggatggccaggctcaagcgcggtaagcctgagaactggctctggcagcgactggagacgaaaaaacgccggctggggatgggcaatccgaaactgatagtggatgcccggggctggtcagtgaaacgtaacaggagagcctcatga

SEQ ID NO: 186798 - DNA, 660 bp, Klebsiella oxytoca
atgagccgttttcgccatgcggtaaaagaccgtgaccagcatattcagacgctgcgcatcgcctgcgccgtgcttgcctttttccttttattcacctgtgcaggctggatgctggcacccagcaagctgaccgtgcataacccgccggatttacgtaccggcagtacgcggccctggtgggaagtgccgcccccgacggtctactcctttgcgttctacatttttcagcagctcaatgcctggccgaaaaatggcgaggtggactattccgccaaaatcaatgcgctgtcgccgtatctgacgccgtcctgtcaggatttcctgaaagcggatgcgaagaaacgcggtgacgccggggagctcaccgaccgcgtgcgagtggtgtatgaagtgcccggtcgcggttaccagtcacagagcgtgaccgtacaggatcgcgatcactggatagcccgcctggacgtggtggccgatgaatatttccatgccgagccggtcaaacgcgccctggtgcgttacccgctgaaagtggtgcgctgggaaggtgatgcggagcgcaacccgttcggtctggcgctggactgttatgccggtgtgccccagcgtctggaggcggcaccgcctgcacctaaaccggagaagtcaggagtgtttcagtga

SEQ ID NO: 186799 - DNA, 951 bp, Klebsiella oxytoca
atgagtaaaaacccccactaccgcgccgggctgatggcgctgtccttcgtcctgctgcccctggcaacactggtatcacgtcctgccggcgcagatgagctgatgaaatgggagcgtattccgctgcagatccccctgaaggtggggcaggagcgggtggtctttgtggacaaaaacgtccgcgtcggttttccgccggcgcttaacggtaaactccgtgtgcagagcaccgggggagccgtctacctgaaagccgacagcgcctttccgcagacgcgggtgcagctgcaggatgtggaaagcggcgaggttctgctgtttgatatcgccgccggtgaaaaagggccgactgagccggtgcggctggtctacagcggtgatgtcagcacgctgagtcacgccggcgatgcggccggtcagccaggtggtgcagaccgggctgcttccggatcaggctcatctgctcccaccggcagcgatgacggtactcaggcaaagcgtaaaaaaatccgctacagcgcccccatcccggtgctgctgacccgatatgccgctcagagcctttatgctccggcacgtacggtcgaggcggtcccgggtattcatccggtcaatcctcatctgccccgacgtgtcagcacgctgtatccctctgaaccattaacggtcacgccgctggctggctggggcgtggcaaaccgcagcgtggtggcactcaggctcacgaacaccggcagccgtaaggtcgttctggatccgcgcgcgctgcagggacagtttgtgtccgccaccttccagcaccgctgggtcggtccggccggcacgccggaagacaccaccacggtgtatgtggtgaccgccggtcgtccggagagcgcattcattgctgagccgtctgcactgcgtaaagcgacccgcacggtaaaacaggaggcccgctatgcagattaa

SEQ ID NO: 186800 - DNA, 1503 bp, Klebsiella oxytoca
atgcagattaaatctaatgccctggtgaagtttatcgtgccggccgtggtgattgccgggctggccgtggggcttaaaagctgcaaaaacgaaccggcagagccgtcccaggcaaaacaaagcggcggccccctgcataatctctcgccagatgaactgaaggcgctgggtgtggaaggcgatacgccggaggacaccctgcgcacgctcatcggccggctgaacgatgtgcgtgaccgccagaaaacgctggataaacagaacgcggatttggtgaaagaaaacgagcggttgcgccgacgcaatcaggacgtttcaggacaggtgaatgaggccgttaatggtctgcgcgagcagtacgacaagcggcaggcgcagcttcagaacgaacaactgagcctgacggcgaaaatccaggagctgaccgacaaactcaaaaatcctgagaccgagaaaaaaacggcggacagcgatatcccgctggggctgggcctggacggcatgggcagcagcaccggcggggcggcgtctcagggcagcgacggcatgatgtgggtcgcgccgacggaccagaaagagacggatccgcgggacgcggccagcggcaaggcatcacctcagttcccgacttcttttctgggtgaaaatgagctgacccgacagaaagcggcctatgaggagaaagtgaagggacgtaccaatgaaaaaggggcggaagagagcgcagagccggtttacacgctgccggaaaattccacgctggtcggcagccgcgccatgacggcactgcttggccgtgtgcccatcaacggcaccgtgaccgatccttatccgttcaaagtgcttatcggtaaggataacctgacggcgaacggcatcgagctgccggacgtcgaaggggcgattgtttccgggacggccagcggtgactggacgctgtcctgcgtacgcgggcaggttaacagcgtcacctttgtcttttccgacggtacggtacgcaccctccccagacccgacaccagtaacaacgctggcgggcaaaataataacgctcaggctaaacaggataccggcaccagtggcggtatcggctggatctcggatgaaaacgggatcccgtgcattggcggcgaacgtaagtccaacgcctccacctacctgcccaccatctttggcctgtcggctgccggtgcggcgggtgaagcgatgagccaggggcagtacacgacgcagaacaacgtgaatggcatttccgccaccatgaccggcgacgccggacaggcggcgctggggaaagccatttccggcggtatgtctgaaaccaccgactggatcaaacagcgttacgggatgacgtttgatgccatttatgtgccgcccggtgcccgtcttgccgtgcatatcacccgtcagctggccattgattatgaagataagggccgtaaggtgcgctacgacttcaccctgccgggtggcgtcagtgacaacggcggactggactga

SEQ ID NO: 186801 - DNA, 411 bp, Klebsiella oxytoca
atgtacagaacggttttcattctggccctgagctgtgtgatgctcagcggctgctcaacctccaaagaggaaatgctgccggcgggcgataacaccatgcttgaactgtggaacggggcggatggtggcggcagtacttcccgccagtctgcggcggcccgcgacacgctgcgacgcccgctgacgggcagcgaaacgcaggcggacgcgcaggccgaccgcagctacagccgtactcaggaaagcgaaatcacccagcagtttccccggctgcccaaccccgacatggtgatgtacctgtatccccatctggcagacggtaacacgccggtgcccggttacagcaccgtgttcccgttctacagccagacgcagtatgccatgcctggcgagcgcacggaggccctgtaa

SEQ ID NO: 186802 - DNA, 2859 bp, Klebsiella oxytoca
atgctttcactgtttacgcgtaataaatccaccaaccggcagacgccggttgatgacggccagtccgttcaggcagatgaaaccctgaccgcggccgtgaagggccggcaacccctgaagcgccccgggaaaatgacgcgccaggatgaggagaaggtttatcacgccaatccgtccatcattgactttttgccctgggcagaatttctcgatgaagagcagtgtctcctgcttgatgacggcgtgtcggtgggggccgtttatgatgtgacaccggtggcgaccgaagggcgaaccgaagagcgcctggagcagatccgggactcggttgaggatgcacttcaggacagctttgatgaacatgacgtgaatccctgggtcgtgcagttcttctgccaggacgaggacgacactgacgcgtacctggacaggctgcgcgggtatgtcaaaccgcatgcacagcgcacggcgtttaccgacgcctggctgggtgaaatggagcgccatattcgcagtatctcccggcctgagggactttttactgactcgctgattaccggccagccgtggcgcgggcagcagcgccgcacccggatggttgtttatcgctggcttgggaaaagccgggatccgatgccgccggtggcgatgctcaaccaggtgtgcgaccgggtcgttaatgccctgggcggggcggggatccgctgcacccggcagaacggcctgcaggtgcatggctggctgctgcggctgttcaatccgtcaccggactgggtggagaaaaccacgctctatcggcaggctgcttacgcagacccgcgcgagacacctgaaggcaccgtgccggtcagcaatgattttgccgaaactctgtggttcacgccgccggtttcagacccggaaaacggcgtgtggtggattgacaacaagccgcactgcgcggtggcggtggaaaaactgcgtacaccgccggagccgggcaccctgaccggcgagaaaagccggggtgaaaagaaaattaatgccctgatggatatgtttccggaagggaccatggtgtgcatgaccgtggtggtacagccccaggaccggcttgaagagcagtttaaccggctgtcgaaaaatgcggtcggtgagaataccgagtcgggccgcgtccgccaggatgtgaagacggtcaaagagtatctgggcaaccggcacaagctgtaccgggcggggatcaccttcctgctgcgcggcgacgacatgaccagcctgaagcgcaagcggctggagctgtccaccgtattgctaggggccggtctgcagccggtacggccggagtttgaagaaggtccgctgaacagctggctgcgggcgctgccgatgtgctttaacccggacagcgacaaaaaacactggtatacccgtctgacatgggttcagcacctggcaggacttttgccggtaaccgggcgggaaaccggcacggggcaccccggcttcagctttttcaaccgcggcggggataccctgacattcgatccgctcaacaagctcgaccgcacccagaacgcgcatctgctgttgttcggcccgaccggggcgggcaagtcggccacgctgtgtgccgcgctctcccagctgatggccgtccatcgtccgcggctgtttattgcggaggccggcaactcgttcggcctgctggccgacttctttgacagcctcgggctgacggtgaataaaatcagcgtcaaacccggaagcggcgtcagtctgccgccgtttgctgatgctcacaaactggtggaagaaggcctggccgcccaggccgtggatgagagcgaccttcctgatatcgacacggacgacgatggcgaggatgacaagcgtgacgttctcggtgaaatggaaatctccgcgcgcatgatgatcaccggcggcgacccgaaagaagaggctgaccttaagcgtgccgacagggcgatgatacgtgaggcgctgctgatggcggcacatgccacgtataaggaagggcggcagatgctgccgtctgacctgcagaaggcgctgtacgacattgcctctgacaacgatgagggcgtcatcaatgtccgcaatgctcagcgcaaggcgaaagcggcggaaatggcggaatccctgggcatgttcactcaggccgggagctttgaggcggagctgttcaaccgcgaaggggagctgtggccggaagcggacgtgacgctggtcgacctggggcatctggcccgtgagggttacgaggcgcagatggccctgaccatggtctcgatgaccaacatgatcaacaacatcgcggagcgtgaccagttcctgggccgggatattgtcttcacggtggatgaggcgcatatcgtcacggtcaacccgctgctgtcgccctacatgaccaaggtggtcaagatgtggcgtaagctcggtgcctggctgtggctggccacccagaaccttaaagactacccggatattgccgaaaaaatgctgaacatggcggaatggtggatttgtctgaccatgcccccggaggaggtcaaagatatcagccgtttccgcgcgctcacgccggagcaggaatcggtgctgctttccgccagtaaactgtcggggtgttatacggaaggcgtggtgctggcgaaacggatcgaagcgctgtttcgtgccgtgccgcccagtctcttcctggcactgggcatgacggaaaaagaagagaaagccgaacgccgggcgctgatgaatgaatttcactgcagcgaactcgaggcggcaaaacgcgtcgcgcagaatctggaccgtctgcgcggtctgacggagaaacaacaggagcctgccacggtatga

SEQ ID NO: 186803 - DNA, 378 bp, Klebsiella oxytoca
atgatgacactgaagtaccctgaacccgccattcatgagcacagtggcggtgcgcttttcaccctgtcgcctcagggggagcccggcgtgctcccggcgacacatcagcatctggtgaggctgcgggcgatgctcaggcagcgcctgaccggaccggtcaaaatgacgtgtcatccgcaccgggtgggactcagcagcagcgtggccatctatcttgagggaaagctgaagcaggcggtgaatattcttatcactgtgacgggacagacgagctggccgcaggaagaggagtatgcgcatccgcgctggtatatcacggtgccggattcggctgacctggtgtatctgatgctgtggattaacgggcttgacgtataa

SEQ ID NO: 186804 - DNA, 276 bp, Klebsiella oxytoca; identical to SEQ ID NO: 143144

SEQ ID NO: 186805 - DNA, 990 bp, Klebsiella oxytoca; identical to SEQ ID NO: 143145

SEQ ID NO: 186806 - DNA, 399 bp, Klebsiella oxytoca
atgaaactgacctctcttgttttcctgccggctctgctgccggcatccgtactggccggcacggtcgccttcactgacagtcagcatctgccgacaaatctgccgccggacgtgccggtggtccttcttgatggtcctgaccggctgcaggccgacatgttcggggaactgcctgcagacccgcagcaggccgaagcacaggtcaggcaggtgatggcatcatctgcctggcaacaaaaacagctgcagctgaatgattcctatcgccaggtggtccgggcctgggaactgggcattaaaaaagtgccggccgtggtgtttgatgaccgcgatgtggtgtacggcaccacggatgttgatgtggccacttccctgcgtaatcggggaggtggtcagtga

SEQ ID NO: 186807 - DNA, 993 bp, Klebsiella oxytoca
gtgaatacaacaccttcccgcatcagaaccacggtgtgctcgctggcggttgccacggtactgggtacggcaacagcgccagctgctgttgcagcacttaacacggcgcagattattgccagcgccgtgtcgcaaaactgtatcagctggcgagtgagcggcatctgttactggctgttctgcactccctttggctgcaaagtgcgtacgtcggtcaaagtcactcacttcataccccagacagtcgtttcgacctatgtcgcgccgggcggtaacccgtggcaggaaatggcgtttgtcagccagaccgccggcggactggagagtgcggtgacccgcgggttatccggtgtttctgccggaggagccaatccggccgacatgaaaaatcccggccagcgcaagtccgccgtgcgtttcaagtatgccgatgcgattggccacccggccacctccctgattggcggcagtattccgggctattcctgtgacaccgcagccaccccgttaatgccttacttcctgagtacgctggattcggcggcctggcgcacgggcgtgccggagtccctgtatccggaagcgcttgtacccggccagcgggaaataggcagtcaggcagcggcgaacatgtggggcaacatctatccccgttcggggtttatcagccagaccgatgatgacaaagcctctgccgtggtggcgcagcgtgtggcagacattatcacccgcgccgggcagccccatgtttatcaggtgcttaagggcaaccgccatgacgggtactggccaccgggtgaggtcacggaaaacaccggcacgcgcaatcacaaatggcagcggctggctccccacatgacacagtcctgtgccgtcttcccggacgggagccacaccgccgcgagcgataacaacgaagcctttgcgctctggcagccctacagctgctgcaaaaagcgcgggcagaaatttctgggcagcactgatatctga

SEQ ID NO: 186808 - DNA, 1476 bp, Klebsiella oxytoca
atgaggaaaaccgtgaaaaaatcaccttcattttcagccgttcgcgtaagcctgctgctgaccggctccctgctgacagtcctcccggccgcgcacgcggccgatgatgacaataccatcctgggcatgtccctgccgcaggtgaacaacagcgccatcggttacggtaagtccgtcgatggtgccgtgtctgacaaactgttctacaccctcggcggcggctcggttatttcccagccggccacgcgcggcaatatgcaaaagctggggctgaataccggctggagcagtgacctgatgtgcggcaactttgacctgaaaaccaccgtcggcaaccagctcaacggcgtaacatccggctttaaaaacctgatgggcgacgtgattcagggggccaccggcgcggtggccagtctgccggcgatggtcattcagcgggccaaccccggtctgtacgacatgctcaccaacggcgttcttcaggccaatgtgtcattcgacaaggcgcagcttaactgccagaacatggcgaaaaagatgatggacttcagcgacagcagtaactggacgcagcaggccatgatggatgaatacaagtctgttgtgaacagcggagatactgacgcggttcgtgcagatgaggcggggcggaaagtcaccggcacgtcgggcaacaactggattggtggtcagaaacgtgggggggcggggcagcccgccatccgtgtcacccatgaccttgtcgctgccggctacaacatgatgaacggtttacctgtcaccgctaattcgactgtcggcgaaagcaactgtaacggtggcgcatgctctaaattcggcagtgctgaagaggcggcggccatgaccgtgaaggtactgggcgatcgctcgatgcgcacctgtgccaacgcgagcgaatgtaccagcggtgatgcggatgaccagcccggtacgaccgttgccggcaccggctttgccccactgctggaagaggcaactaaagccaacgctgagcagctggtcaggctcgtcaacggtacggaaaagcccacggccgcgaatctggctaagctgaaaaccggcggactgccggtgacggccggcgtgattaaagccctgcagcgtgatccggataacgcggccctgaccgcccgtcttgccggcgagctggccatgtctgacacggtggaaacggcgctgctgatgcgtcgcatgatggttaccggtatgtcggagccgaatgccgctgcccagccaaaggccattgataccgccggtcagcgtatcgaggcgctggatcgggaaatcgcggcgctgaaaaacgagatggagatgaagcgtgaactgtcacgtaattcagtgctgaccattatcgacagggagaatcagcgcgtcgaaaccaacccgcagacccagtcagatgacaataccgacagtcgcttcaaccagatggcagcgccgcagtcggctgaatga

SEQ ID NO: 186809 - DNA, 339 bp, Klebsiella oxytoca
atgcgtaataaaacgactgtcaggaaagtccttacccgtgccggcatcttcctcgcctgcatggcgctgttcatggtggtctcactgatgatggctgacaccgccatgaaacatccgactgaagctgctgcattccggagctggatgcagtcgacgcgttacggctggctgatgtggcgactggcgctgtatgcgctggttgcgtggggcctctggaaaatccggcatgcgccgggcttccgggaggcataccggcggccgctgctgcgcatcagtgtggtcagtgtgctttttatcgcgttgtgtgagtacgcgatgtttaccggtccgggagtctga

SEQ ID NO: 186810 - DNA, 1524 bp, Klebsiella oxytoca
atgacgacaaacagctatcttgagtattttctcacgctgctcggctgggtgatcaataacggtctgtggaatgtcctgctgagcaccggcctttttgtccttccgctggcgtttaaggtggtgggtatctggctcagggtccgtgaagagggggaggatgaaggcaacaaggggatgctgtcgctgccccgtatcgagaacgcgctgtatgccggcttcctggtgatgattgcctgctgcgtaccgctgattaatgtcagcctcagtacgatgcagtacgacacaacccgggcaaagagctgtggtgtgtggacgcccaaagcgccggatgaaagcggctatgccggcgtggtcaccagtctcaacgaccagacggctgcagcaccggtatggtgggtgctgattcataaactctcaaaaggggtaacccaggcggccgtggcgaccattccctgccgccctgacatgcgccagatccgctttgaagtgcagcatacgcgtatcgacaacaaagcgctggcgcaggagctgcaggacttcaccaacgactgctattcggttgcgttgtatctgtggaagcaacaggatcagggccagacaaaggacaaaaccacgctgcgtgatatcgaatggattggcagcagtacattcctgagccggtattatccttcgttgcagtccaaactgccccgggctgcgttcccatggtctgacagccgggacagcggccgacccaataccggaagaggaggctatcccacctgcagcgaatggtggagcagtgcggataccggtctgaaagcccgcgtgaaggaccaggctgacccggatatgtggctgcgtatctcggccgccatgaaaatgtcaggctttaacgacagtgactatcaggaagctgtcatacggcgcctggtcagcccggagagcctgacggtctcacagagtggccatgtgtatgccggctatggcggcaacgccgattttaccctggataatgcagcggcacgcgtggcggctattggcgggacatctctcggcagtctggcagcattcccggcgttcgatgcgatgcgacaggcgctgccaatggtgcaggctatcctgctgatggcaatatatgtcatgctgccgctgattctggcgtttgcggcttacgagttcaagaccgttattacgctgacctttgtaatattcgccctgaacttcctgacgttctggtgggaactggcgcgctggctcgacagctggctgttaaccgcgttgtacagttcggatacacacagccgcttcaatatggcgggactgcagaacagctcagatgacctcattatgaatctggtgatgggagcgatgtttattgtactgcctgccgtttggctgggagctctttcgtgggcaggggccagcgtgggtgtcgctgttagcgctgcctttcaaaagggtactgaaactgctcagaatacaggcgggaaacttggagaagctgctggtaatgctatcggcagtaaagcaaccaaagggtag

SEQ ID NO: 186811 - DNA, 432 bp, Klebsiella oxytoca
atgccaattcctttagaacagacgatgtgttgggataaaagttcgcagaaaaattcagcaaacacaccggttttgatgatggcggctatcgccagacttacaggtagcaatccatcactggcatgcgttccgttgtttggtgatggggtttcatgtggtttcccttctccagcacaggattatgtcgaaaaacgtctttccctcgatgacctttgcatccgctatccggaaagtacctatctggtgcgagcagagggggattcgatgcttaatgccgggattaaagacggtgatttactaatagtggagtgtattcgtgaggcaaagcacggtgacattgtcattgcagccgtagatggggagtttacctgtaagggggccgcttggaaaacgaatctatggtcactcccgtttttgcaacaccgattttga

SEQ ID NO: 186812 - DNA, 630 bp, Klebsiella oxytoca
atggcacgctttcttatctgcagttttgcgctggttctgctttatccatccggcatcgatatgtatctggtcggtctgccgcgcattgcgcaggatctgggggccagtgaagcgcagctgcatatcgccttttcggtttatctggcgggaatggccgcggcaatgctgtttgcgggtcgtatcgccgataaatcaggacgcaagccggtggcgattttcggtgccgtggtcttcatactggcctcccttctctgctcgcaggcgcaggtcagcgcccacttcctggctgggcgctttattcaggggatcggcgcgggcagctgctacgtcgtcgcctttgcggtgctgcgcgataccctcgacgatcgccgccgggcgaaagtgctttccctccttaacggtatcacctgcattattccggttctggcgccggtactcggccacctgattatgctgaaatacccctggcagagcctgttctataccatgaccggcatgggcgttctggtggggctgctgtcgatatttattttgcgggaaacgcgtccaacatccgttccgcaggcggcgcagcaaaatgtcgccccgaatcgctgcttaaccgctttttcctcagccgaattatcataa

SEQ ID NO: 186813 - DNA, 204 bp, Klebsiella oxytoca
atgaaaatcaccgtagaacaaccctcagccagagaactggtcgatcgctcgcgagttctggtgcatgtgatgctcgaacatcctgatgatatcggcccgaattatgcgttgcttctcatccttgctgaccagctacaactgttaagagatgcttttgaagaagatgaggtgagacggcttagagacgagaaattacctcagtaa

SEQ ID NO: 186814 - DNA, 939 bp, Klebsiella oxytoca
atgaaaaattatgtattgattctatcaagtatgtatgatttttccacggatttggttgttcagcgactggaaaataatggcgataattttattaggttaaacaaagagcaattaagtgattatgagatttttttagatcccataaatacaatcctaagggtgaaaggtgaatatgttgatgtagaaacatctaatgtaaaatcagtttggtttcgacaaccagtttttctaagaaatactccagggcgtagcattgatataaatgagcagctttcattatcacaatggaatgcttttcttaggggattaatggtttttgataaggcgtattggatgaattggccgcaagcaacatatgctgctgaatctaagccatatcagctaatgattgcaaaaaagatagggttttctgtacctcaaacgattattagtaattctcttggttttgagaaactcccttcaacgaagtttattataaagtcgatggataccgttttacttaaagaaaatgatgattgctattttacatacacatcgaaagctaatcctgcggactttactttagacaaaaccaaacaagcaccgataacgtttcaagaatatattgaggataagttagatattagagttactattgttggctccaaagtatatgccgttgcaataaaatctaatggtaatgctatctctgatgattggagaaccttaaaaaaagaagatcttgaatatatcgacattgaacttcctgttagaattaaaaaactttgcatagagtatgttaagttacttgggttgaattatggtgctattgattttatcaaaacaaaagacgaatatatatttattgaaataaatccaactggcgagtggggatggctttctaatgataaaagagaaattgattacgatattgcaaagaaattatctgaggctaattaa

SEQ ID NO: 186815 - DNA, 609 bp, Klebsiella oxytoca
atgttttctagaattattgaggaagttttcccatttctttatttttactatattgccaacaaaaaaacagttagtgtgtatgatatcaccttttcaaactttgagttttactcaggattatcggatgaaaaaatagtcgagagacttgagagcgagcataatagagccaaggagatagatgataagacttttaaatttacattggcattaagtatatcattaagtattataagtgccggtgccagtggggttgttaaatttcttcctgaaagtcacttaagtccatatatatcgtttgtattttttctttcttctttttatatgctgtgtggaggtcttatctcattgggttcattaaaaactctaccaaaatttgggtatggaacgtattttgagatcaacaaaaatagagaatctttaattaaggctattattggtcaggaaaaggttaatataatacggcatataaggaatgagctttcttatatgagtttgcgaaatgggtttttactaatcctctttgctcttattttgtgtttatttatattggctaccagtttttttgtgagtcacttacgatttgaaccgttgacatcttactgtctatga

SEQ ID NO: 186816 - DNA, 1044 bp, Klebsiella oxytoca
atgacagcatcagaccgtactcttaccacctcccttccgctgcgccggggctcggaagggtttaacaccagtcaggattatctggttaaaggacttattcccgccggggcgctgtgcagtatttacggccccggcggctcttttaaatcctttctggcggtatcgctggcgtgccatattgccagcggtacgtcatggggcggaaggcgagtcaatcaaggggctgtgctgtttatcgccggagaaggaggaaccggtgtatcgcggcggatccgcgcctgggaactcagcgttaatgacgagatggcgctcgataacctgtttcgcgtcgactgcccggtctttccagccgcaccaggaagcatcgaacaggtaatcctggcggcgaaggacattcagaacatgaccggaatgccggtacggctgatcatcctcgatacgctggcccgctgttttggtaactcagatgaaaacaccgcgcgggatatgggcgcatttatccagggttgcgacgccattcggtatcatacgcgcgcagcgatgatgatcgttcatcactcgggtaaggatcaggaacggggcgcacgcggttcaagtgcttttcaggccgcgctggatgccgagtttaacgtcaggcgcgagggacgtcgcaacgctatcaccctgagttgtacaaagatgaaagatgctgagatgccggaggtcaccgcctacgatcttgaggaagttgttatctataccgatagcgatggcgaaccagtgacctcactggtgctgaatgacgagcccaggcaacctgacgatgacttactgagtagtggcataccacccggcgttcctcatatcacccgcaaccatacggcactatggcgctgtattaaccaacgcatcagccagaataagccctgtacccgcgcgctcttgcgcgacgatctacgggctaagggaattaacgtcgagaagaaattttcgcgctggctggagaagctgattcgcgaaggattgatatttgtaaatggtgaggaaattaaactcaatcactag

SEQ ID NO: 186817 - DNA, 984 bp, Klebsiella oxytoca
atgagctattacgtttctgccgtctccgatcgggcacgcaataactggccgaaaatatttgaacaacttggcattttcattccaccaaatcatcggcatggcccgtgtccctgttgtgggggtaaggatcgcttcaggatggatgatctggaggggcgcggcacatggttctgcaatcagtgcggcgcaggtgacggactggatctggtttcccgcttcttcggttgcgcactggttgcggccgccggaatggtgcaggacatggatcctgtaccgctggttccgccagccagggaaaaatcacaggctttgaatatggaatcgcgtattaagacactgcttcgccattgtgaatccggagaagcgccgtatctgacaacgcgaggctggcgacgagcccagtggcttctgactgagcgtagtagccggacaatctgcggcgtgcatttcggggcgggtacgctggtattgccaattagaaatacaggcgcgcagctgacaggtgcgcagttcattcatcctggagggaaaaagtacctgctgcccggtagccatctgaaggattgtttttgcccggtacatcaggcgagccgcaacggtagaccggaaccctgggcaccggacaacaaaccaccggaaggcatcatcattaccgaaggatatgcaaccgcgcttgcggtctcatgccttcatcattttccggtcgttgctgccctgtcggcacacaacctgaaaaatgtggccatcgctttccgggcgcagtggcctgaatgccaccttatcctggctggcgataatgactgcagtcaggagaaaaataccgggttgctgaatgcaaccgccgctgccgaggtagtgaagggctgtgtggttctccctgcagacaccacattgagcgactgggatgaattttaccgtcactatggtgaatccatttcccggattgtgttcaaccagcagcttcctgcaaatctcaggtcgtag

SEQ ID NO: 186818 - DNA, 879 bp, Klebsiella oxytoca
atgtcgaaacttacaaaacgcatggaaaaactcgccctgctggctggcggcagttttaaaacagtccatgatcgcctccgtatcgccgggcgtttaagccagcatctgcacaagaagctgaatatccagattcaggatctccagcatctgaaatcgtcacatatcgaaagctacgtgatggcgcgacgggaagcaggaattacgccacgcacgctacaaaacgagatggccgccctgcgcaccatccttgctcagtctggacgtcaaaaatttgcccaatcggaatgcatcagcaataaagcgctcgggctgggtaacgccagccgggcaggaacgcatctgccattaacctcagaacgctggttgtcggcgttgtctgcttttcatgaaaaagatgaaggactggctctgacgctggagcttgccagagcaatgggtttgcgttcacaggaagcggtgcagtgttgtcagtctctgaagacctgggccgctgcgttagagcgaggagaaaaccgattacaggtggtttttggcaccaaaggatcacgttcccgtcagacggtggtgctcgaacctgaaaggctacgcagcatcctgaacaaggctataccccttatgacacaacgcgggggacgtttgctcaataaacccgatctgcgcgccgcaatgaattactggcgtggcagcgcagttcgcgcagggctgactggtccctatgcaccacacagtctgcgctattcatgggcgcaggaggcgatggcgcactaccagcgacaggggctgagtataaaggaagccagggcgatggttgcgatggatcttggtcatggcgatggtcgagggcgctacatccagcaggtgtatgggaggcaatcatga

SEQ ID NO: 186819 - DNA, 609 bp, Klebsiella oxytoca
atgactatacaagcttcagtgaaaatagaagatttatctatctcagatataaaaaagtccattgatacaataagaaatataattattaatggtattaacgatacaaaaaaagttatctttatttgtggtaaagataaatcagataaagagagttatcgtttcaaaatctcgcaacttttagagcataatacaaattatcagcttgcctatccggaagatttatttgaggatttattggagggacaagcgaacaatagtcttctttcgcttgagcaacaattagctgaagcggttgatttgattattcttattcctgaaagccctggttcttttgctgaacttggagcattttcaacaagaaaagaactagctgagaagatgttggttctacggcaaaacaaatataaggctgataaaagttttattaaccatgggcctataagactagtaagatctgccaagggtaaaatcctcgatatacctcatgattttgattataaaaacaaagagcatttttctgaaataattaaaacagttaaaaaaatgattccttcaggaagacggtcaaagtctattaataatatattattatatcagaatggtacttga

SEQ ID NO: 186820 - DNA, 591 bp, Klebsiella oxytoca
ttggcaaaatattcgcaaagtctatatacacaaagactactttcgcttccaatattacaatctatagaagatctttcggttaaaacccggcttccatctcctttgctgtctcaatatttaaatgataattctcggtattattgtcatatttcagtacccaagaaaaatggcggatataggccaatcgatagccctaaccgacaattgaaagccattcagagatggattcttagacatattttagagaagcttcagccatccgtgtatgcaacaggattcgttcctggaatagcattaaagagaaatgctattcctcatacaggtaaccaatatatactcaagttagacttaaaggattttttcccaagtatcaaagcaagttatgtatattctgtttttcgtgctgctggctactctaaacaaattgcgtacagtttaacttcaatttgtacgttaaatggatatctacctcaaggagccccaacatcaccatgtttatctaatctggtatgtttaagattggatcaaagaattgggaagtattgtgatcgtcatgctttaactttcaccagatatgcagatgatatttaa

SEQ ID NO: 186821 - DNA, 1023 bp, Klebsiella oxytoca
atgtggtgtgagaaatgccgctcaatggttgcccatggcattaacccggcacaaaagaagcaggaagaaaaacttaaacaaaatgacccgacaacagtaaaggcgttcgccaaacgctggctgaccgatatcgttgaaaaaagtaaccgcgatccgcgcaacatcactcgcgtgatcgagaaggacatcattcccataatcgggaagctggaactcgaagaactcacaactgcccacattcaggtcgtgctcgaccgcatcaagcaacgaggttcggatcacgtcgcactattgacgcgaaacgtgcttaaacgcatgctggcctatgcgatttccaggggaatcatcttcaacaacccggcagccgctatcgaggcccgttatatcgcacaagcaacaagccgcgacgtggcgctaaccgcagaagagatcggcatcctgctacgggggatctacacctctaacatgaaccgacgccacaaactggctctgcacctgctgatcatctgcatggtgcgtaaatcagaactgattgaagcgacatggaatgaagttaacttcaacgcgctggaatggcgaatacccggcgaaagaatgaagatggataacccgcatattgttccgctgtcaaagcaggcgctggcgatgttcgaagagttaaaatttctggccggagattctccatacgtcttccccagccgaaacgactaccgacgcccgatctccaaaacaacgctgaactgtgcggtgcgtacgctggatctgaacgtcagggattttgttattcatgacttccggcgtactgccagcacattgctccatgagcaaggctacaactcagactgggtggagaaatgcctggcgcataagattggcggcgttcgcggtgtctacaaccgcgcggagtacctgaatcagcgtcgggagatgcttcagtcctgggcggactttgttgatgcgcagattgaggaggggcggaaggtggttatcgggaagtttgggaaggcttatgaagccaaatga

SEQ ID NO: 186822 - DNA, 132 bp, Klebsiella oxytoca
atgcgttcctggtatgtcggcggtaaatgcttccttgttaactgtgcgtttgttgagaacttttgcgctcttatcatccctggagagcatatgttttttgattttgtcttacccagcgtcctgattttgtaa

SEQ ID NO: 186823 - DNA, 492 bp, Klebsiella oxytoca
atgaacggcgaagttctgcagcgcatcgtggagacgatcgtctcccggctgcagcgtcgcgcccatagcacggcgacgctgagcgtggcgcaattgcgcgatgccgactgccggagtctgttctgccagcacgcgtcgctgcgcgttctgctcgtcgacctgccgctgctgaaccagctggcggaggcggacaccgacgatgccgccgttggcaacattcacgacgcgctggctttcggcatccgcgtgcagctcaccctgcacggccagctgctgccggttatcccggttaaaaaactggctcgcctgccgctgacctttgccgatgaacgcgggctgccgctggttctgcacgcaggttcggtgctcagctatcgcgacgtcgcgccgctgggcccggggcgcctggttatccaccgcaaatgcctcgtgaccgcgctggcgcgcgacgcggcgcaggcgcggaatattgaactcattaagcaggagtaa

SEQ ID NO: 186824 - DNA, 336 bp, Klebsiella oxytoca
atgactaccccgcattctattgcagaattcaccgatccagaagtctccccggaaaataaccgtaaaggcaccgtcagttacgcgagccgctttgaagatcatcagcgtaacccggcgattatcatgaaaggccagtggctggaagctgccggttttaccaccggcaccaaaatcgatatcaaagtaatggaaggctgtatcgtgattaccgcgaagcagccggagccggaactggtagagtctctgcgccagctgcataagctgtcggcgcgcaagcagaagcaggtgcaggcgttaatcggcgcgatcgccgggcagaaacgtaagctggcctaa

SEQ ID NO: 186825 - DNA, 1761 bp, Klebsiella oxytoca
atggcggtggaaaaactgattgtcgaccatatcgacacctggaccacggcgctgcaaacccgctccacggcggggcgcggcagctcgggtaagatcgacctgtacggcattaagaagctgcgcgagctgattctggagctggcggtgcgcggcaagctggtaccgcaggatccgaacgacgaaccggcgtcggaactgctgaaacgtattgcggcggaaaaggccgagctggtgaagctggggaaaattaaaaagcccaagccgctgccggagattagcgaggaagagaaaccgtttgagctgccggtggggtgggagtggatacagattagtgaaattggtcatgattggggacaaaaaacgcctgatgaagatttcacttacattgatgtcggctcgataaataaagagtttggcattattgaagagccatctattctttcagcaaaagatgcgccatcccgagcaagaaaaattgttcaaaaaggaaccgtcatatattcaactgtccgcccatatttattgaatatagcgatcattgagagcgccttctccccagagccgatcgctagcacagcctttgctattattcatccttacaccgcgatgaatgctaatttcatatattattatctacgctctcctgtatttattaattatgttgaaagttgtcagacaggagttgcctatccggcaatcaatgacaagcagttcttttctgggataatcgcagttccgccgtcatccgaacaggctcgcataactaaaaaaattaaagaacttatgtccctctgcgaccaactggaacagcactcactgaccagtctggacgcccatcaacagttggttgaaaccctgctaaccacgctaaccgacagccagaacgccgttgaactggccgaaaactgggcgcgcatcagcgaacatttcgacacgctgtttaccaccgaagccagcattgacgcgttacaacagaccattctgcaactggcggtgatgggcaaactggtgccgcaggatccgaatgattcttcagcagagattttattagaacaattaagcacatcacgaaataaaaagctaagacaacaacaagctgataataaagaagctgaaacaatgcttcgtaaaataaataaattaaaaaaggcaaagccaccattcaggttaccgaataattggacgacagttcatcttattgaactttgcgaatacttagttgattgtcacaataaaacggccccatatacagatacgggcataccaataattcggacgactaatatccgtgagagaaggtttctggagcaagacttaaaattcattagccaggagacatatgatttttggtccaaacgttgtccgccatcaccgggagatattatatttacccgtgaggctcctatgggcgaagcattgatcataccaccaaatgttaaatggtgtttgggacaacgaacaatgcttattcgagttatgcatgaatttgtttctaatgaatttctcttgcttgcacttacagagcctcatttacttgaaagggcatcggtgaatgctgttggtttgacggttaaacatctacgtgtaggagatgttgaaaatctaaacatccctcttccaccgctaaatgaacagtatagaataattgataaagttaatattttatttgaatattgcaacaagcttaaatccaacataaaagcatcccaacaaacccagctccacctggccgacgacctcactgacgccgccataaattaa

SEQ ID NO: 186826 - DNA, 501 bp, Klebsiella oxytoca
atgaaaaaacggatgacctcgatgccgcacgatgcggtctttaagcgatttcttcgccacccggagacggcgaggacgctgtacgcctgcccgtttccgctgattgacgtaacggtgatgccggacgatgaaatcgttcagcaccggcgggtcgctctcctggagctgatgcaaaagcatattcgtcagcacgatctcagcgggattacggggtcgttggcgacccttgtgatgctgggatacactaaccgcaggcagttaagagtgctgtttcattatatgctgcagtacggcaatagcgccgatccgagcgtgtttctccgccgtctgccacactatgaggagaggttgatgtctatcgctcaaaagctcaagcaggaagggagccggagggaagccctgcgcattgccggcagtatgctgcagaacggtttagataccgagacgttacagcggattaccgaactgtctgcggatgagctaaagccgctgcatggctaa

SEQ ID NO: 186827 - DNA, 144 bp, Klebsiella oxytoca
atgtctccttacctgaaggtgggacggagcagggggacgcataacgtgctgcgccgttcaggtcaaaaaaagtcgccggatacaggaaagggcgacacctacaacaggatgaaaccatgtctaatcgtattgataaggacgtga

SEQ ID NO: 186828 - DNA, 639 bp, Klebsiella oxytoca
atggaaagcaaatatatcgccttaaatagcgcccttctcttttggctgcttggcctgatggcctggtgcttcgaatccacgtatctggcctggctatcgggctctttcgccttatcctccttcgtttttcattttcaatatcagcggattaatcatatgtttaaaaagaacaaaatcattgaagctacgccgccggcggtgaatacggcggtactcaacggtgaatctccatccgccgtggcccgaaaacaggccaccacggttatcgccggcggtatccgctttgacggaaacattatcgctgagggagatgtcgatatttacggtaccgtaagcggcaatatcgacgccgaagagagccagattaagatcatgaccggcggtctggtagaggggaatatcacctgccgcgagctgattattgacggctgcgtcatcggccagtgccgcagcgagacgattgaaattgataagaacggcaacgtgaccggcacgttggcctaccgcacgctggccatcaaaaagggcggcgttttttccggccaggcagagctgctgccggcggcagaaaagagcaacgtcgtggggtttatcgccgataccgctattgaaaccaaagataaggttgaggcgcagtag

SEQ ID NO: 186829 - DNA, 180 bp, Klebsiella oxytoca
atggttttttccttggggaagggtattttacgtatgcagaaaatgagaatttttatgcggatatatcagtgggattcgataggtaaaaaaacgcaatgtgaaattaatatgttgatttataatgatattttaattttttttatttcctctatttttggtgctagtattttaattaagtaa

SEQ ID NO: 186830 - DNA, 834 bp, Klebsiella oxytoca
atgtattaccaagtactaatcgaaacgtcggagagagttggaaaagcaggtggaaataagcagtactttgagctagacaaaactgatttgactgaaattgaggagcgaattgtatatccatttcttaggaaagaagatttccagtttgatggttactttctcaaggtgactgaaattaaacgcattacaattaaagaaacaaaaaaaacaacacaagagctgtcacaatacgaaaatgataatatgcccgctggcataattatgtttgtatcacctaaagacattgttagttatgataaacacaccaaggatattactacggttgtttttgataaagccaaatgttctttgccaaccaagagtgcgacaaaaaataattcacccacccctgatttaacaaaagtttttattgttcacggccgggatgaccttgcaaaaacggagactgcacgatttatcgagaaacttggttttactgcggttattcttcatgaacaggtaaattctggaaaaacagttattgaaaaaatagaagcgcatacaaatgtaggatttgccattgttttgtacactccctgtgacactggtagccttgctggtgagcacacacagaaatcacgagcaagacaaaatgttgtgtttgagcatggttacttaattggcaaactaggacgacataatgtttgtgcactagttaagggagatatagaaattccaaatgatattagtggcgtagtttatatccctttcgatgaccatagtgcatggcatctttcagttgcaaaagagctacgtaatgctgggtactccgtcgatatgaataaaataatttaa

SEQ ID NO: 186831 - DNA, 1443 bp, Klebsiella oxytoca
gtgaaatattctgagggttatattattaaacgtggtattctggttacacttgatacttataataagttcattgaggatgtacataacatacctttcattgggaaagatggtcgccagtctccgtcatactatctggatattcaacggtttttgcagcatctgatttgtaataacttcctatatgctaaagacaccccggaggataatccatggacgcaatactcgccaatctataatgagctggggaaaaaggaattaccgtttgtctttaaacagaataaatacctgtgttgtgaccgggcgttagagttgctgaaagatgtaggaattatagatattaaaaaatactcttatgggaatgggaaaagccgtacttttgctttgtccaaggcatacctcaaacgctggtttgaagtctcgcctgatgactacaggcagcgcgatgatcgttacatttatctgtctgtgggtaagcgtgttcgtgacgtaaagatcatgacggaggaacaactgatccacaaagcgttatcgcactttaataagccccgccatgctacgcgtcacgtatcccgtgaaacccagcaatatatgcgtcaggtgtatctcaacatgggggcgttgcgtatcaaccttgataagctacaggcctacgttcctgaagacgaaagggaggctgctctgaagtctcacttcctccagcatctggctgagcgtggttgcaggatggtttcaagtgttcctttggtggttgaatattttcctgaatacaaactggcagagcggggaacgcgttcatttgagaagaatggtggctttcaggcgttaaaggccgctatcaaatgggaagttgttgtgggtattaactacgatatcaaaagcagtcaactgaatatcctgaaacatgaactggagcgatacggtattaaatgtaagcggctggcaaagatcaccaagaaaaaggtcatgcgtcggtttaatattgatcaaaaggctgctaagttgcttatctatactctgatttactcacttggagagtttcgtaagcataaggacagcgctgcgtttcgtaagctttgtgatttgtatggctacaatgaagcggtgtgtgtggctgatgagtggattgagtttgtccagccagtgagaagggcacttaaaaagttggtggcgcgttatcttggtgagcatgttaattgcccaggtcgtggttgggccatacgcaatgctgtccgtcagtctttgatggttaaaccgggcaagatcaccgcgagtgttcgtcggtgtgttctttcgcatatgatccaaggtattgagagtaaagcagtttacgaggctattctggccaaccctggcgtgtgcagttcgattgaacatgatgggctggtgactaatcgtgagataacgtggaatcacccttatttagtgctacaaaagaaacactaa

SEQ ID NO: 186832 - DNA, 774 bp, Klebsiella oxytoca
atggaacttagtccccagcactattctgcgaaacagataacggatttgtttgtgtggctggggcggaagggacgcatcggcaagtatctgtatcggggattacgtaatgcctggataacaactattcattacgcgctggatgtggtgggaatgaagatccacgactatttaatcaggctggttggtgcaaggagcggcgactttaatgatttgcatggaaagcaggaagggttacggctagggtctacgactatcgtcgcgtcaatatatgaaaaggccgatgctccgggtgtggcaactgagagaaggtatgaacaagctgtccttctgcttgatgagcaacagttccgacggtttctgcgactggaattgcgtttatcacccggcaagcaaaagctcatgtttaacaacctgctcagcatggagaatctggtatctaaactcgcattttatgaccgtaacgcgctggtagattctgagcttgaacctgatttttctcgcctgctacgtgagtatgtaccttacccggttgccagagcggattaccagccgtcagccagtctgaatggtaagcaggtcagcccggcaaaaaaagctgctgataagcgcgttgataaactcatggagcgctaccgtgtggaattattcgattcagaggctgtatgggctatgttaccgcttgttgtggcaaaacttgggattctcgcgcaaccgcaatactggcaatttaagcatcgccagaagtggcttcagttgcgactgaaagacgggtaa

SEQ ID NO: 186833 - DNA, 201 bp, Klebsiella oxytoca
atgaacaccaaccgtattctccgcaaaaaagaagttcttaacctgaccgggatctcgtccgcgacgttgtaccgactcatagctaaaggagactttccaaaatctaagaaactgactggtgatagcggtcgggctgtgggctggggagcaaatgaaattcaaaactggattcagtctcgtgggattagcaatacacagtga

SEQ ID NO: 186834 - DNA, 450 bp, Klebsiella oxytoca
atgaaaacgattaaacgtgaaacttctgcatccacaataaagttaacgccgtggtttgaaactatggggcaacagattggtttatcgcaacgcaccatcgatgccattatggcggataatcagtcgcggataagaaagctcaataaggaaggagcccgacacgttcgtatcagtatggaggatcatgaaaactacaaacaagttgcgtgggggattggaggggccggtcagttagcaatgatactacagaggtgcacatacattccttgtggaagtcaggcctgttcacagtgtgttacagcaaaacaactacaccagcaagctattgatttatttggtggttttaatattcatcgcaaccatgttatcgtcaggtacagcagcacagatttgtcggcgggtgatttgctcgatatgcataacctttcatggtctcataatggtaggtag

SEQ ID NO: 186835 - DNA, 576 bp, Klebsiella oxytoca
atgattggtaatcaaagcaacaaagctgacgctaaatgccaccgggaacggaaaagcagtaacgaggtctttgaatttctggagaagaagctttatctgggacgggatacccggcaaaaactggcactgattgcccggacactgacgggagcgggttttagcccggataaattcgacgcagagaaagcggcggatgtgctgagtgcctgcgtgaatcacatgtttaatgacctgctcaatgagggagagctaaacgggatctatgggctggaggagcaccccatgatagttacagccaggtccccaaaagcttttgatttctacactgcttaccagctcgttaaaggccgctttgataagcttcacacgggggagtcagatcgtgagaaatgcgcatcggtagcagaaaaacttaatgagtatggaatatataaaccccggttaaaacgactctctgacggtaaagaatgggtgcgagaggatgttgcgtggatgcttcagcctgaaaatatcaatgaacaaataacgttccagaatcaaaaatacacgcagttgagtgctgaagataaaacttaa

SEQ ID NO: 186836 - DNA, 309 bp, Klebsiella oxytoca
atggcatttgacatcgacgaagaaacacttcgggcctcagtattcaaacaacattatgttcccgctgttgagtcaatcgcaaaaattgggcgttactggtttggcggaacacggcaggccgcctcaatggtggcatccttattaagagaaagtgggatgtcgatcatcttacataatgcaccacctcgctgggaattcgtggtttatctaacagaaagtgacgtcaacagtgacgacttagataaaattgcgcttcgtcgacatgagctgattgaacaaggtgttgcagaacgggatttacctctttaa

SEQ ID NO: 186837 - DNA, 915 bp, Klebsiella oxytoca
ttgcgtcaggtcatgccggtggtgcaaaccaccgtgttcgatgcgtatattggcggtctggccctctcgggacggcggggcatcaccagtctgttaaaccgcagcgccagcatacttaaacgcggtgtggatgcagcggactatccgtgggaacaactcaactacgccgccgttgctaaagtacgtgcggcactgctggatgacggttacgccgtgtcatcggtcaacatggcgctgtcagcgctcaggggagtggcgcagacagcctttaatcttaattgtatgaatgccgaaacgctggctcgtatccggtctgttaagcgtgtgagcggcgatatccagcgcaagggaagggcgttaggcaagcaggaaatccgcgcgctgattcatgccacaaaacagcatccgcaaccggtacggtgctaccgtgataccgccatagtgctgacgctttgtggaacgggcctgcgggccggggaactggttaaacttgaacgccgggataatgacaacggtatcctgacggtgaggcaagggaaggggcgtaaataccgtgaaattcacgtggcggatgcagttgataaagctatccgcgcttggctgaaggtcagcgtaaacgaagctgaaaacgcactgttcagccgtatccagcgcaacgggaagaccgccagccagcctctgacaacaaccgggttaacgggtatcctggagcagttacagcaaacatcaggcatagcccgttttaccccgcatgacatgcggcgtaccttcatcacccgtttgctggagcagggcgttgatatcaacaccgtccgccagctggcgggtcacagcgacataagcaccacaacccggtacgactatcgtgatgattgcatgaaagccaaagcatcacagaggttgaggtgctggtga

SEQ ID NO: 186838 - DNA, 1401 bp, Klebsiella oxytoca
atgaaaaatacaggggaagttagttggtttttgattaataaagaagacttagtcggtttgttgttaggtgaatccaatattattgactattcaaggaagaggccttttccggtaagagatcttaaaaatggtaagattgcagtaggtttaccagcattatctcgaaatggaaagtgtgacataagttatatcgttatttcagatgattacataaatgattttctctcatgggtaagagtttactcagaggtcatatttcctataagtcaattcacacgggttttaactttaagtgaatattcattgttatctaatgacgatttaggaatgtttgatgcaatagaaaagttatctcgttgggcatgcgtttctgtaggggaaacattagctcaatctgaaagctcaatagagcttaaaaacattgcgttatcaagggttttaagcacttatactctgcctatcgcacgatccaacattaatcatttagggttggatctatttaaactgtgccacgatagattgcataaaataagtcatgacaacaggttctctcgccgcacgctccaattagagcatttatcccctgtctgggatattgttttaaatggtagttcccatgagaattctgcatctgatgctgtttatctaatgttagattatgcatcaaaatatacatcaggatacagaaaaccagatgagaaactttcagaggtattggctaaaaatgtacttctaagaagtgactcgattgaagaaagagtcatgggtttcaataagttatctacggaaattataaatttaaaatctgaatcagaactaaacttttattctcctgtaattgccgcagctgtttttttagtaggtagaggtacttcacacctgtttttacttaataaaataggtggtcttataccaatggcatttgtatggtttggattaattgcttcttttacaggacctaagttgtgggatgtaacttggttgcgtgcggttaaaggagcagagaaattattaaaaaacaaatttgagttagatagtatttcccaggctgacatttgctggcttgagttctcgtggcttttagaggttttcaaatccgtagaggaattgaatgaacttcctaagatgcttccaaaaacattatcagttgaaattattccaggttcaacgcttcatttaagactgcctggtcagtctcaagagcaagaggccaaaataaaaaatgatgttagtatgcgtgaaagagctttagaggatgctttaagccaattattctcgctgtcgaacaaactacaagatcaagttaattattatagttctcaaaaagaaagaggtaatacatttagtaaaaagaacacgagggaaagtgccacgagaaacaaaggcgcaaggaaggtataa

SEQ ID NO: 186839 - DNA, 1161 bp, Klebsiella oxytoca
atgaaaggtagttggtggcgttctagggaagaaatggatgaagatcaaactaattttattacccttccagctaaggggcgctatgcccttataggacctccgggatccggtaagactaatctactattgttgcgcgcgctctataccgcaggaacaggtgagaagaatgttttaatattaacttatacaaaatctttagctgactttatcaggactggaattggaaaatctggtttaatcactatagaccaagttaaaacttttcatgcttgggtttactctcatattttggaacatttaggagagcgtccactacctcctggaagtgattttgatgataatgccaggcagttactgttagaaatgctactcgaagcaaatgatagacttcctggaaagaaaatttacagtgccatttttgttgatgaggctcaagatttaacttttgacgaattgaacgcacttctctgtctaagtgaaaacgtatgtataagcggtgatgaaaatcaaggtatttatagaagggacggattatcagctatagataaattaggtttaacgcctcattatctacgtcaacattttagaataggtcaaaagattgcacgtgtagctgatcggttgtgcccaaatgataataaaaacaatgggcttgaggcaacttcaaactacaatccaaaatcacaaggtgaatctagtgcgaaactaatagcatgcatcaatgttgaagaccaatttaaacgcatgtgcgaaataatagaaattcaattggatgcatttaaagatgataatattggtatattttgtggtaaaaaagaatcattgattgaattgcgtgaaatgtttttaaatactaaattttctgatttggttgctgttcatgggattgaagatggtgcgggtttttattctgaaaaacgaatacatattatgaccattcattcatccaaaggtacggagtttagagctgttcatatatttaaagctgaggatttaaatcattatcctttgaatagaactcgagtatcttatactgctgtaactagagctagaactgcgcttaatgtttatagaagtgcagaaaccaatagaaatttagagagtgctatgtctgaaccaaaagtgttcaatattgatgacttattctcaggtgacttatga

SEQ ID NO: 186840 - DNA, 1428 bp, Klebsiella oxytoca
atgccagcattagaagaagtggttattaatgatattaagactagattaataaaatatctcgatagctcaggtggctatgatgaagttgagttcttggatgcaggaggatctgctgcggtatttaaagtgacaagaggaaataatatccgagcgattaagatcttcgacccgaagtttttttctggtgaaggtgctttagctgaaaggagacgcctccaagtgcagaggcgattaataaatcataattgccctagtttagtacaaacatatcatgctgatgaagcggaaggaactgcaattatagatatggaatacttagcgtggcctcaacttgctaaggtcttggataaaatacctgatgacgatgtaattccgctgatcgggcaattggtcttagcagtaaggtatttagaatcattaaatattgttcatcgtgatataaaaccagaaaatatacatgtgtccgatgattttaaacgtttaaaattgcttgatcttggagttgttagatcatttgataatataggtgagcaagggatcactgaccacggtaatattaggccgtttcttgctactgcacagtatagctcaccagaatatctttttcgccttgatgaaccgacagagaaactttggagaggtcttaacttttatcaagttggcgctgtattacatgatttaataaaaaaggaaccaatattccatcatgaaatttcattaggtaataggtggcttgttgcaagggcagttttgtcacaaaaaccaattttctctgatgttaatatcaataggttatcaagagctaaagctctttctttgagatgccttactaaagatattgatacaaggttatctttagtaacgtgggaagattttaaattagaggaaacctctgatcctcttgcctcgcttaagggaaggttatcaagaaacctttcatctcgatccaatgattttaacactaatgaaattgtaaggttaaagtttgatcgagatgagtatattagaagaactaacgaaaagataaggtcagaattaattgatgctggcgggaatcaattacctcttgtcatgataatatctgatgaagttttagatgtgcgttttgtttttacctacttaaaaaattggtctttaatttttaaactgaactataagtgggcagatggcatctataaaaacgttgctgtagtatctctgggggcaattctggtaagagaaaaacaacagaaagaagcatatgatataaatttaaaaccctgccttgaggtaaaaataaacgaaggtgaggaagatgatgttaaaactctatcaaatgaaattgcacttatgattagaagtgctttagacttagttgaaactttacctgatgatggttctgatattattgtagatctaggattgaaggaggtcgtaaatgaaaggtag

SEQ ID NO: 186841 - DNA, 432 bp, Klebsiella oxytoca
atgaaagagattgatgtaggattcacacatgttgcgtttatggtcagagatttggataaaagtattgccttctaccgccgctatgctggcatggaggttatacatttgcgcgaaccaggtctcccggatgcgcgcaaggttgcatggttaagcgatcgtacacgcccctttgcgctggttctggtccaggcggataacgttactgatacacctctaggtaattttgggcacctaggtattgcctgcgcgacgcgcgaggaaattgatcgtaaaaccgcgatggcaatcgctgagggtgtattaaggaaagaaccggaatatctgggcgatcccgttggctattatgttttctttgcagaccctgacggaaataccctggaactgtcattcggacagcgtgtcgggcttgacgccatagggacgtcttgttag

SEQ ID NO: 186842 - DNA, 759 bp, Klebsiella oxytoca
atgccgggactggaagccatgtcgttagtcacggaacagagttttccgcgccattcccacgaccagttcggcatcgggattttcactcagggcgcgcagcgttcgtggagccatctgggcaaaattgaggccgccgccggaaatatcattatggttaatccgggggagatgcacgacggtatcccgctgaatggcccgcgcagctggcagatgatctatctcgatcccgagcgggttgccgctgaatttcagggggcgataaaggccgaagatattctcctgcgcccggtggtcgaagacccgcagctgcgcggactgatgcagcggctgtttagcgagattgtcgccagcgcccccgaggataccgccgtggaagaggcgctactgctctgcctgatgcgggtgagccgataccatctctgcgcacggcgacctgataaaagtggtactccctccatcgcgctggccaggcaatatctcgatgatgcccccgaagagaaaatctctctcgagatgcttgctaccctctgcggcctcagccgctttcagctgatccgcggcttcgctcgtgaaaccggcatcacgccgcacgcttatctggtacaggcccgcctgcgcctggcgcgccgcctgctcgccgaaggtcactcccccgcagataccgccttcatggccggctttgccgatcaaagccatctgacccgcgcgtttcaaaggcagttcgccatgaccccaggcagctatcaggcgagccgctag

SEQ ID NO: 186843 - DNA, 303 bp, Klebsiella oxytoca
atgaaaatcaaaatgaccgcgcagccagtccgcgagggaatgattaagatgttgttggagaatagtatgcaagaaattaaattaaggcccgttctggtgaatagggaatgcgtacaggccatgctgggtgggatttcccggactaccttctggcgaaaacgtcgcgactgggagcaaaacggaacccccttcccagccccggccccaggcacgaacccagggaaaggtggtgaacagtatcgctattgcgacgttatgcgcttctttgcctctcaggggctcgttgagtccacgcatgactga

SEQ ID NO: 186844 - DNA, 729 bp, Klebsiella oxytoca
atgaagaaaattactgaacgcggaatgatttttaacggggaaatggtgcgcgccattctggacggtcgtaagacgcagactcggcgcattgtgaagccgcagccggaaatttcttctaaagataatctttccggaatttggttggacaaaccacttaatgggctattgctaccaaaaatccaagatatcgcgattcattgccctttcggtatgtcaggcgatcggatttgggttcgcgagacgtgggcgactctgggcaacgaagacggctgttatgtcgactgggaagagaatctttgcaaaggagatgagcgctcagctgcgaggatttaccgcgccagctgcgaacaaagaccaggcgattatgggctgtggtctatccccgatgacgactactggaaaccacataccaaagatcacaagttcgaaggtgcatggcgaccatcaattctcatgccacgctgggccagccgcattctgctggaaatcactaatgtgcgtgtggagcaattgaacgttatcagcgagcgcgatgctcaggccgaaggagtggcaaagctacaagggggattctggcagcactatcagccaggctggacgcagcatcaattgagcgctcgcggctcattcgtaaccctctggaaatctatctacggcgaagaatcatggaattccaacccgtgggtttgggtcatcgagttcaaacgtcttgaggagcgcgcagcatga

SEQ ID NO: 186845 - DNA, 192 bp, Klebsiella oxytoca
atgagcacaatgttcgccctggtgataaccgttggcatgctcattggcggcaatcaggatgttttgctgggtgtttatgacagcgagaaagcatgtgaggaagctgctattgagcaaggtgtaaaaggcgaatgcctgccattgaaaggcgttctggctgaacatcccgccggattcatcgcgcagatgtag

SEQ ID NO: 186846 - DNA, 537 bp, Klebsiella oxytoca
atgcaaacacttccctttcaacaaaataccggattcaaccccggcgctctgataaagcgaaatcagctgagagtggcagatcatgacggcattcgttctgccgttcgcgcctgggcatcagttgcaggtcaggatgttgtttccgcatacatcatcgaagagtggcgccagcagggcggtgacgggatcgaatttcccgaagacctcagccgtgcccggcagaaattattccgctatctggataaccaggtcgagtcggagaaataccgcgaatacgtgtgtctgctttcgccggcaatcatggccgttctcccgctggaataccgcaaccggctgatgcctcatgacgatgttttgtcgcgcctgtcttcagcaattaaggagtgcgccgaagcaaagcaggctgtgatgctgaacgcgccagagcaccagaaattgaaggaggtaagcgaggggatagcttcgctgttcaggctgatgcctgagcagacaggagcgctgatgacaatcgtgagctcaatgcttggcgtgatgtaa

SEQ ID NO: 186847 - DNA, 204 bp, Klebsiella oxytoca
atgacaatcttaaaaacccttactggcaccgtgatcaccaaagacggtccgaaggtaaaaaaactgcaccagacagagcggatgtgggtcgtcggcaataacgagttttaccacaaagaatccgggcgccgtcactttgcagaaaatacgcgccgccggctgctgctagacaccatcaagcctatcggggtgaagcatgtttaa

SEQ ID NO: 186848 - DNA, 183 bp, Klebsiella oxytoca
atgactgatatcaccgaactggcgcagagagccagaatcaacgctgaatgtggtgagcatctgtctccagcagagaccatcgagctagtagaggcgctggagcgtaaggaagagcagcgcgctaactggttccagatggctcagaaattaggcgtagacctggaggcgactgaaaagcgctga

SEQ ID NO: 186849 - DNA, 2139 bp, Klebsiella oxytoca
atgacttcaatacagggaagtgacttaaaattagaatatagtcataatatcattgagcatttgggacttaaactctatcaaaataagcctacaaatgtgattgctgaattgatatcaaattcttgggatgctgatgccgagaattcttggttagatataaatgatgataaagaactccctttgtctgaacgatatgtatcggttatggatgatggctatggtatggacccatacgccataaaagaaaaatatttagttatagggttaaaaaaaagaaaacccggtgagcctgatgagcgttctttatttaaagaaagattacttatggggcgtaaaggcattggaaaattagcgccttttggtatagctggtaaactatcggtaatcacagtttataaagatgatggtgaaagtaaaatatctgttttttctttggatatatctggtttgctcgacccttcagacatttcacatataataaaaaactataagccggatgtcagttattttaatgagccattgtctgtagttgatgaagcatatgctaatgataaaatttatcagttgttcagaaatcgcatacaggacaaaggaactggtacagcaataattcttaccgatattaaaatatctaatgcaatatctgttgcaaaaatggtgcattctattgggcgtagattcactgtagcattctcacaaccagattttaatattttcattaatgataaaaaaatcgaggcggtagaggcgttgcctaaatttgacattagatatcctcaggttggctttgataaagaaatattgaatattgctggtgtcgatagagaagttagattttgggtgggttttgtttattctgcagattggcctcaagatgaggctggtgtcggggtatatgcacatggaaaaatagcacaagatagaccattttttttcagtgtaaaaggcaaagaaatttatacccgttacatgtacggagtcgttgaagcagactggttggatgaacttagtgaagatgtcatttcaactgacagaacttctattaactgggaggcgcatgaaactatccctttgcatgaattttgccatggattactcaaaaagtggattgaaaggtatcgtaaggatattaacccagggactaaagagcgaattattgaaataatggatagcactccaggaatgccaaaggtaactaactcagaaagagaggctatcgttggtttagtgcatcaattgggaccaaaagtacataaagataaaaatgtacaagttgaagtggttaaggcaatgactgcttcttggacacacaagcctatgcaggtattaataaagaaactatgggatgcgtttgatatcagcatggacgatacagactcttttactaatagtttaaaatgtcttaacgaacatctagttccagaatctttatcaatgtctgttatacaagctcaaagaatatatgctttgagtaaactttacaatttaaaaaataatggtaatgaaaaccaattgcaggctcttcttgaatcattcccatggatattaggtacggaaatggagaatcttagacctaatcagactctcaaagaaaacgcagctgaagcagcaaagaaaggtttgatcccatctcacggttcattgaaagatgatatggggaaagatcctaatgctagacttagacctgactttgtgtttttttcaaatgaaagtgaaacgaaaattgtagtagttgagttaaagagtccacaagtacctttagaagtcaaacatcgtagccaactcagtgcttatcttgattggtttgaaacccagtatccaaaagctgattctagggggatcttgattggacaaaatgctcaggatatgaaagccatgaggataaatattgagatttttagctgggatgatgtttaccttgaatcaagacgtgagcatttagaattgctcgccgcaatgttacatggtgtatctgaacattatgatgatacccgtgtcgaagatgtccttgctatgggcggggagcagactaaaattctgttgaatagaatggcgagtgcccattcgccattaaaagatcttttcgaagatacagacaaagtaatcaaaaataaagagtcaaagaatcagtatgaataa

SEQ ID NO: 186850 - DNA, 1089 bp, Klebsiella oxytoca
atgaataagttatcggctatagaccttttttcgggtggcggtggattaacgcaaggattggttcaggctggttatgacgtagttgctgcagtagaactcgattctaatgcaatctcaacttatgaactgaaccatccttccacacaattgataactcatgatattcgattagtgtcggcaaactcgttgaaaaatcttcttatgggtcaggagcttgacctcttggctgcatgccctccttgtcaaggtttttcttcattgacaaacgcaaaaaattacgaagatccccgtaatagcttgataatggaagtgggccgtatcgttagagaactaaaaccgagaacattaatgattgaaaatgttcctggattaataactcgcggcagaggttatcttaacgccttcttggaaattcttgatcaagaaggttacatctattcttataaagttctacaggttgcggattatggtgtacctcaatttcgcaaaaggtttgtattattagctggtttaggatttgaaattccaattccacagcaaactcattcagataaaccgaccgatgataaatttccttggttaactgttaaagatgcgatttcaaatatgcctgagactgtagaattacctcaaagttatttgatgggtgggcctgagtctttaaattggcatattacaagaagtattagtgatatgacaaaaaagcggctaaagtttatcaaaccaggaggttcaagatttgatctgcctgatgagttaaggccagattgtcataaaggcaataatactggttacagtaatgtttatggaaggatgtcttgggataagccagcaccaacgattactagtggatgtacaaccttaagtaaaggaagattcgggcatccagagcaattaaggacgatctcaatacgggaagctgcgctattacaaacttttcctattaactataagtttagtgcaacgtctgttgactctgtctgtagaattattggtaatgcgctaccatgcaaatttgccgaagtgatggcgagtacatgtaaattccattcatccaatgctcccggccagaaggtatccgctgaataa

SEQ ID NO: 186851 - DNA, 444 bp, Klebsiella oxytoca
atgaaaatttaccaggctcaaccatatgatgtggatgctatccttcccctgtatctcgggtaccgtcgtttctacgaggtcgaagaaaatgcctcgcaggccagagattttattctcaagcgccttcagcttaatgagtccgtgattttttacgccgaggttgatgggaaagctgtaggctttacgcagctctatcctttattttgctctcttgagatgaaacgtatttggttgctttatgaccttttcgttgatgagtcagctcggaagcatggtgttgcacacaaactaatctcacgtgctgagcaactggcgaaggagagcgattcggcatttattatgcttagtaccgctacagataacatccgtgcacaggcgttgtatgagcgtaatggatttgtgcgagatactgagttcttcgtgtataacaagtttctgaaataa

SEQ ID NO: 186852 - DNA, 222 bp, Klebsiella oxytoca
ttgcgtctgtatgtcgctcagggggatgaagtggatctcgatatcgccgaagtggtagacataatcaggcaaggcgggaagtttttaatctcgagtgaggaaggaaaaataaccgggatcgaaaaggtaagaaaaaaccagtttttgctgactattgaagaatttaaagaactgtctaaagatgctggttgcattgacgaaaccgagaataagctgcaataa

SEQ ID NO: 186853 - DNA, 684 bp, Klebsiella oxytoca
atgaaaaacttatcttacattcgccagcaactgatagtggcaactgccgatctgagcggagcgacaaaaggtcagctcatggcctggctggagaatgctcagttcgacacgaacacattcccacgcaaaaaacagcgcgtatgggatgaggaaacggaaaagtggatgacgctgaacaaccctccgatccctggaaagcaatcacacgccaaaggctcacatatccctttggtgcagccggtggagtacgcaaccgcatcgtggcgccgtgcgctactgtcactggatgagcatcaaaaagcctggcttctttggaattacagtgaaaacaccaggtgggaatatcaggagacaatcatccggtgggcatgggagcaatttagtcagcaactggccggagtgcgcattgctaagaaaacggtagaacgactgcgtcagcttatctggctggcggcgcaggatgttaaagctgagctggcagggtgtgacatatataaataccaaaaactcgcagaattagggggcgttgcaaagtccacatggtcagaaacctatcttcctcattggctggcgatgcgttgcagctttgtgaagctcgactgtgaagcgctcatatcagtaacgcgaacacgttcacaacaaaagacgacaaatttagctataagtcttgcaaaaccgaactga

SEQ ID NO: 186854 - DNA, 204 bp, Klebsiella oxytoca
atggtatcggaagatgaacaccaggctttatatgttgatgtctgtagagtgataggacgagccgtagtgatgcttaagcaatctgagcaacctataactcagcagactataggtcacatgctacaagttcatgatgagcgcacaaaggacttataccttacaaaggtctataccaccgccaaaagggtgattaatcaaaaatga

SEQ ID NO: 186855 - DNA, 141 bp, Klebsiella oxytoca; identical to SEQ ID NO: 36145

SEQ ID NO: 186856 - DNA, 837 bp, Klebsiella oxytoca
atgttattagtaacagtgtcactactttccggtttaatgatttatattatcattatgaacagagcagaactcaatagttcactatctgcaaggtttgtaaaggctttgaaaaatgaagccctgtcgctggtctatcaacctatttacagaattgaagacggacagatctgcggatttgaggccttgctcagatggaaagatgaaagactcgggaatattagccctgaagtatttataccgctttctgaaagggaagggttgcaggaggatgtgactttattcgtcattaaccatgctatccgagaatttatccatactgctattcagaatgaaatatttttgagcgtaaacattaatccaagcgatcttgattcagaaaaattcagggataaactactaggattaatttctgaatataacatcccatataaaacaatccttcttgaaattacggagcgtcaaggaggggattttgaaggtatgaaaattcacattgataaatataaaaatcatggtgtcaggtttgccatcgatgactttgggacaggatattctaatcttaatctggtaactgcgcttgatgtagatgaaataaaaatagacaaatcgctaactagtgctattggtactgaatctttacgatatgatcttcttcccggactgcatgagatgttccgctccattgcagataagattgtatttgagggtgtagagactcaggagcaggtgaactatctgaagacgttctggccacagagttatgctcagggctggtattactccagagcgcttccgctggaagaagcgagaaaacttaccatccgggaattgaactga

SEQ ID NO: 186857 - DNA, 192 bp, Klebsiella oxytoca
atggcaaaaaaaattccgagaatgggcgtcagttttgtggcatatgcgggcgtgttaattgcgagatgtattaacctatggagagcagttccatctatactcctgtcagcccatgctggaaatattgttatcactagtcctatcacggaaaagttaattgtatattctaaccctacgcagtattccgcttaa

SEQ ID NO: 186858 - DNA, 1998 bp, Klebsiella oxytoca; identical to SEQ ID NO: 137382

SEQ ID NO: 186859 - DNA, 882 bp, Klebsiella oxytoca; identical to SEQ ID NO: 180798

SEQ ID NO: 186860 - DNA, 294 bp, Klebsiella oxytoca; identical to SEQ ID NO: 186098

SEQ ID NO: 186861 - DNA, 651 bp, Klebsiella oxytoca; identical to SEQ ID NO: 102213

SEQ ID NO: 186862 - DNA, 678 bp, Klebsiella oxytoca
atgccggcctttgaatgggttcatgtgcagctccatcagcaaaaggggatgataagtttatcaccaccgactatttgcaacagtgccatatcgatttatgagaccaaaatggcattattaggatatgcaagagtatcaaccagccatcagaaactgacgagccagattactgaactcaaaacagcgggagtgagggatgatcgtgtatttactgacatgatgtcaggagcaactgatgagcgtgcagggctacagagactccttgccagagcggagaaagatgacatcatcctctgtactaaaatggatcgtctaggacgtaataccgctgatatgattcgtattgtggatacttgctataaaaaaggcatcgctatccgatttctagagaatggtcttagtactgaaggcacaatgggaaaaatggttatccagatactagcagctgttgccgaggcggaacgagaaaggatcttggagcgaactaacgatgggcggaagaccgctatgattaagggggtcaaattcggaagaaagcctcacaagaaggctgaattagctaatgaattgattaataaggacgtacaagttaaggaagtaatggaaaaaacgggtatatcaagggcgacctattttaggctgaaaagaaaaacagctattaactctaacgaaggatga

SEQ ID NO: 186863 - DNA, 1392 bp, Klebsiella oxytoca
gtgagtcaatacttaaagcttggagatgaccagtctccggttcagttggatccacacagcgaagttggtgcatttaaagttgttggacactgctcatgggcaaaaccaggagataaaatcactcctgattttttgcgtttaagaatagaaccttggttaactgctctttttcagtctgaacacctaaatatacttattggcgcgggacttagttcagcaatccaagagtcagcgacaggcacgaaacctcaaggcatgggatggattaatgatctcaaagtttgcaaggctgaaatagatagttatgtagctaaaacagctgaagcctcaggaagaggaagaggtaatattgaagaccaaatccgttcaattaatgagttaattaaaggattagagattttaactgcgcaaaatctcccacttccagaaccgcctcctggtgctctcccatatcgaaatttaaaaagtgagttagttgagttaaataatgagctaacaagatgtttgaaattattctcagattcagttagtaatggggaaaagttaattcgcgatgcaaaaaacgatttaaaaacacaaacgtttaattatttagtaagttttttgatgagtttttcaagtcgaacagcgacaagggatcgattacatattttcacgacgaattacgacaggataattgaagcaggagctgaaatagcaggtattcgactaattgacagatttgttggtactatagcgcctattttcagatcttcgcgactagaagtcgactatcattataatccaccgggtattcgtggtgaaccaagatatttggaaggtgtggcgcgctttactaaattacatggctcattggactggtatactaccgaaggagccataaggcgatttggattaccttttggtgcgagttcggtggaaccctttttacaagtggaggctgctggagcagcgaactatcatcaattaatgatttatccaaactcggttaaagaccgagaaacatcagaatacccttatgttgaactattcagagacttagcatctgcaacatgtcgtcctaatagtactttggtaacatatggttatagttttggagatgaacatataaaccgtgttattattgacatgctgacaataccctcaacgcatatagtaataattgcctacggcgatccactcggtagaattatgcgctttgtaaacgaaagtggaagaaaagctcaaatatctttattacttggtgaccactttggagatatcaagaatttagtggatttttatcttcctaaagcagcgatagacagatcatcaattcgtatggcagaactattgaaatcaaggggtttatatcgtacaacaatttcaaataatagcgaggatgctgaatga

SEQ ID NO: 186864 - DNA, 2067 bp, Klebsiella oxytoca; identical to SEQ ID NO: 128927

SEQ ID NO: 186865 - DNA, 603 bp, Klebsiella oxytoca
atgaaaatgattgctttgctacttattcagggtatatcgtgcctattagcaggatggcgagtatcagagactatttttatagttgtagcatccgcgatgtggttgttggtgttcaaatatgttttcattaaagttggtgcgaaaacaaaacgcccagtgcctgatgttaataatctttatcttgttctgaccggagtctgttgtattgttaatcccattgcctgtttgataagtattgttttatacccactttggattatgaataaagcactaaagtttgcatctgtgaaatttagtaatgataatgaaagtgcattcgaaaatgggatcggcaggaattatgtcgggagaacacaatcattgacaaccttaccatacaaggaaatgctctccgagcgggagtttatgagttatcagcttgagcattgttctgacggttcagtcaacctcgaccaacctaatagtacatgtagcagtgctatggggccatatggaaatgagatatctataaatacccatgatattaatcctgcgagtgggcttcctatgattgaaaatgtagacgttgcaggaaacgtgtatggtatagatcggaatcattaa

SEQ ID NO: 186866 - DNA, 696 bp, Klebsiella oxytoca
atgtgttcgatggatcgtattgaaaacaccaactgtagtcaattggatttctttcgtgaaatgcaattaactgtcaacctttctagccatcctgcttgtataaggctccgtgatggatccttttcccatttcaatcattctttcgctacaacttttctgcacaatattaacgttaacatatggtttaaccgtttggaaatctcctcttctttacgtctgtcagctcttgacgcagaagtttactcaggcgatcgaaaaatgctcgttgaggaaaatttgcccattaatgggaaccgatgggattttataatagaacggatgtcatttgatggaacagagttcactctgtggaagttctgtcatcttcaacgaggcggttttttactgtctcctgttcgctcaggttttataaaaaaactcaacgaatttaaaaatgcagtcggttttttaactgatgttcagattgagactctggctctatattcttttggtgcctcccacaatcagatttcagaggttttaaatatagcaattggaacatcgaaaaacagggtgaatcgtattcttgctgctttaccaatccgcacgagagaagaggtattttattttttattcgccagtggaatggccttttcattctgtaaggttgttacagaattaattggaagtcgcgttaataaattgttaaataaatag

SEQ ID NO: 186867 - DNA, 393 bp, Klebsiella oxytoca
atggcaaagatacaggcatatgttagcgatgaagttgctgaaaaaattaatgccattgtggagaaacggaaagctgagggcgccagggagaaagatgttagtttttccagtgtgtctacgatgcttgtcgagttaggcttgagggtttatgaagcgcaaatggaaaggaaagaaagcggctttaatcagatggctttcaataagattttgcttgaaacagttttgaagacacaatttgcaaccaacaaaattttgggaatttcttgtttgagtccacatatctcaggtaaccaaaaatttgagtggcgatttatgattgataacattctggaagacactaaagaagtggtcgatacattctttccagaatcagaagatggtgacgaagagtaa

SEQ ID NO: 186868 - DNA, 165 bp, Klebsiella oxytoca
atgaaaactaacgaacaattactcagtgcactggttgctgcgctggagtggattgatgctgtgccttctgatacggttctgcccgcaatgccaggatttgaccgcgacgaagtgaacgagttgatcgcgaacgctcgcaaagagctgcaatcaaaggcgagctaa

SEQ ID NO: 186869 - DNA, 429 bp, Klebsiella oxytoca
atgtctgagagcaaagccttcaggcccgatggcggtggaatgagcttagggcgcattaaggaaattgctgataacccgtattgtgatgaagaaaaacggtggctggctcaaacgtttttggcaagagccagtcaaaaaccagttgcatatgtggatgcggttaatctgcgccaactccagcggggggaagtggaatcagcggtaattttcaccaatatggaatgtacagcactttatctcaatcctcctgccattcttaacggcgtcgatactccgcaggtgacgagatgtgcagacctgctcgatttagagctacgcattgcagaagccaaacgaatgggtctcgacacgacctcggttgaacagaagtacaatgagttaattgaagagattcgagcgaaaaggcatcattcggggaatggacgctga

SEQ ID NO: 186870 - DNA, 246 bp, Klebsiella oxytoca
atgaccgaaatagcccaatgcccggcagttaagcaaattaacttttatatactggaggcctcaccggagttgctggtggatcgccgggtatatcttgaagttgtgttgctgaaaatctggcgaagccgacttgagaccattcggtcctggaattgtgtttctgatgaagatcgcattctggctgaagcatatcaacgtggcatagattttctgacgaaaacattcaggctcgtcaccctggattga

SEQ ID NO: 186871 - DNA, 633 bp, Klebsiella oxytoca
atgaacgctattttttctgatctcccagtcaaagacggtaaatccggctcgtggacattggatactttcactatcaccgaaaatgacgcagaacgtcttgctattcgtgccgacttttcaggcaatcaggatgaatttattccagcgggagagtatcgtcgtctctcatacaacagtgatgtcgtgatgtccaacacaccgatggaaatacggacctgcatggatttcatcgagcgggcgacaggccacgtgcttatcaatggactgggccttggaatggtgcttaatgcagtattaatgaaagcagacgtcacgcacgttactgttattgagaaagagcaggacgtgatcaaccttgtcgccgcgagctttgcggacgataaacgcgtagaaattatctgtgcagatgcgatgactttcgttccaccagcagaggtcacctatgatgtatgctggcacgacatatggcctcagttctcaatggggaatcttgatgaaatggaaatgttggaaagaaagtacctttatcgttgccagtggcagggttcctggggtaaggaacaatgccagaaagagttaattaattttatccagattgagggtgaaattgaaaaatggctgcaaagggtttaa

SEQ ID NO: 186872 - DNA, 321 bp, Klebsiella oxytoca
atgcgtaaatccgtttcatttgcagtggttactttttttactggtatcaacctcgttataaacccgttcctggaggaacctgcattatggggggcgctccttgcaggcattttcattctgataaacattgtggcggaaaaaatgcatctttggagtggcgttgcgtggattatagccgctggcataattctcgccatgatgattaatggttacgttctaggcgataaattcaaatatcttatctgcgttttctctttcttgtcttctgcctggtattccgttgtagagtttaggaagaaaaaagcagcgcaggcttcataa

SEQ ID NO: 186873 - DNA, 288 bp, Klebsiella oxytoca
gtggatcagaatcaggttttagacgcaatcaataatgacgatgttacagcacatgaattgttgagcgaagcaatgccaaacgccgcctcccgtttttaccggacggcaaaaaatctctccagactcctggatgaaattcacgagcatttcccggatgcatcgtattatgccgcatccggcacgttatgcttactgctgggggagagccatagcaagtctgacgtggcgcagcaggagcttttagcccatgcagctcctggcttgagggttgaagggggggactggtag

SEQ ID NO: 186874 - DNA, 522 bp, Klebsiella oxytoca
atgaccagtaccaacagagttcgggacgctgaaatctttcgggccagaacgggggagtatccggttgacatgtacatcaagtggctgaaggatggcgcactggatttcgatgccgactatcaacgtgactatgtctgggggcatgaggaacaacaggcttttttacaggggctgatatccggctttcctctggggtatgtggcgctggcgagagcccccgactgggcgtcccgggatggtgcatatattgaggttgttgacggcaagcagcgactgacaacgttaaggctgtttatcaacaacaaaatttcactggcgctcgcaggggggccggttttctggcaggacctaactcgtggtgagcaactcgcctttggtgcccccacgttaaccgccgtggtgcttgatgacgccacgccacaagaccgtcttgactattttattgcagttaacttcaccggcatgccacaaagcgaggagcataaacacagggttctcgcactcaaaggaaatattcagtaa

SEQ ID NO: 186875 - DNA, 633 bp, Klebsiella oxytoca
atgaaagcattaaacgaactacagttacgccagatatccgcatgccctgggaacattgagttacaggattggttgaaaatacttgttgctgataatgcagtgctcgttcgttctttaacggtcatcgctaattcagatgagcatcatggtaagacgatggtctgtgattttgattcgttgatttctgtagctactgctggtctgaaagagcatgagcaactccttaaagggaacacttcacctgattgcgaacaacaagaaacaaacatccctatgttctacgtggatggagaggcggcaatacgtcttctcaaggggcatactcgttatgcagccatgacgactgagccaaagtctggtaagacgttgccgctttacataaacgctcaatctgcgtcagtcgcaccggcagaaacagagcgaaaaggtaaaaggctccgcgttgcagaagggaggtatgctgcttttttccctcaagagcggccactcgatggagcgcagatcatcgcatgggatgagaacggtaatttgttaggcattggttttgtacgagacacacgcgatacgggagttgctatcatcgtcaacggaaaaaaatacgactcaaaccatgtgattcactggtgtagttag

SEQ ID NO: 186876 - DNA, 333 bp, Klebsiella oxytoca
atgagcaaggtacctgaacaaaaaaagcatgtaattaattttgaatgcgaccattgcggacgcagctatgacgatactgatgtttgtacttctgacgattgccctgataatgaaatcgctatgccagacctacttaattactggacagttgatgaagtggctgaatgtctcgacggcgtgggtgatgatctttacagaaagctatggtcgtacattacagcagagactgatggtaacccgccactggctaaagttgcctgggaagcgttgactcatgaagagaaggctgaaatggtccaggcagtggaacaagagttccctgacggtgattaa

SEQ ID NO: 186877 - DNA, 285 bp, Klebsiella oxytoca
atgacacagaaaatcagattaacagacgcgcaagtctatacgctgcgccgaatgaaaagcggcaccagatactttctacagggcgatggaaggcgtggagatgaggacaacggtacgcgcagagtcaactgcccgtcgcttcccgtcctctttagaaatggtctcgttgatttttgcagtgattgcgtaaagcagaattacacctggtatagcgtgaagttgacgcctgaaggagcaaaagccgcaaatggttctcagacaaggaaagagcgcggtttgccctga

SEQ ID NO: 186878 - DNA, 435 bp, Klebsiella oxytoca
gtgaccaataaccagttaacagatcgccggatttcagaattgttggaaagtgccacagaatacgatttaacagcgtttgcaaagaatgacgacctcgcactggcgctgcgagagctacaggaacgtcgcatggccgcaatggacggcgagccgatagtgttcaccgatgaacgaaaccttcatcacattgctatgggccgagaaacctctctgatttggggcaaacagaaccatgaggcgggagatatcccgctctttcgccacgctaagccagcgccggtagtgccggtagtgccggatgcattgattaaagctgtagatttttatgaacaggttaaacgtgaaaatccgtcagtagaaacgggagcctggaaagatgccgtggagtgggtactgaaggaagcctgcctggctgctaaaaaggatgagtcatga

SEQ ID NO: 186879 - DNA, 213 bp, Klebsiella oxytoca
atgggcataactgagggattttgcgcagatttgtattgcgactgtgaaggttgtcagtctggggaaatttatccgcaagggcaggctgattttattggccggaatatgaccgacatttctcagcaggcgcgcgaagctggctggcggatcagcaaagaccggcaacgctgttatgctccgggccataaaatttcacgaggaaccaatcagtga

SEQ ID NO: 186880 - DNA, 1074 bp, Klebsiella oxytoca
atgaccactaaattacctttaacagacgaacgcctctccaccatcagtgattactttgttgcgatggaagaacattacagtgacccggcagacagagagaattttgaaatcttcagtgatgctaaagcctttctggcagagctacagcaacgtcgcaaggcagcaacaggtcgcgaaccggtgggcattaagcttccccctaagatgtcgaatgatcgcataaatgcgcatgaattaagcacaggcgttgacgtctggcaccgatgtattgatgaagtggcaaaactgaacggaaaatgtatcccgtcagttccatccgggcttcacccggatacgcaaaagctggtgaccaacttctgcacagcactggctgaaaaactgtataaggcgcaactcaagtacggccactcagataactggtcatacgcaaattgggaaattgagtgccagacagctttccacgagcatatcgctaaaggtgacccccgcgacgttgccgcgtactgcgcatttatgtggtatcacggctggagaaccgaggtcgagcggcgagaacaggtcgtgccagatgaggtcgagcatgtagccgccgtactagagcttatcggtggttttgaggctgctgatatcgatagcgacacagtagatttacggtttgagatcgacgatgtggacactggctctgacgtatccattactgaatatgccgcacgcggttccgctattatccgtatgctggctggcaatgctccggtaaatccagacagttgcattctagaggcgctggagaacatacaaaccgagaatgaagtggcacgagaccagttagtcattctccagctaaagctattaaagcagcagagaaagattgcagagctggagtcccgcaccgtgaagctgccgaaacctaaagattctggcccgggttggaaaattgatccggaatttatcagcaaagttcagaacgcgataggctacgacgacaaatgcgaatgttgggagggcactccttccatggaggtagtagaggccgttttgctagctgctgctggcatcaaggtggaggctgagtag

SEQ ID NO: 186881 - DNA, 222 bp, Klebsiella oxytoca
atgaccaaatatgaagtgctcgatttaaaaataatgaacaaaattggtgggcaaccaacgccattttccagtgtgtacgtcagggatgtagctgaggaatgcaaaaaaatcgcggctgaagagaacaagccggaaccgttcagaatccttgaccgcagactgcaagcactacgtaaggcagggcaaatccgtagcacctctaaaggttgggtgagggcttaa

SEQ ID NO: 186882 - DNA, 270 bp, Klebsiella oxytoca
atggctaagcgcgattttatccctgctggcgcgacctgctggcagggcggttgttgtactcacagggggattacccgtcgccatcgttatgtcacaggtggggatgggaggaagttcgaatcgtgctcctatactgacgactggtacgcacttggcgacacgatagactcgttcgggaagccatacaggtatcgaataactggcgagaaagccacggccctaacgcagttctgcattgacaacttaaagtcagacggagccaaccaatga

SEQ ID NO: 186883 - DNA, 735 bp, Klebsiella oxytoca
atgcctgatatcactgaactgacacaagatgaaatcaatgctgcgttggcacagctgaagctgatcagtgaattccccacaccttctactcaatacgcacgggtcgtacgaaaatatattgcaacgctggtggaggcacagaagaaggcgcattcagtgatgagtggagtcgtaaccgcagcctgtatccggggagtcagaccatttgatggaattgagtgcgatcccccaactctggaagaaaatgcggaagcgtgtggcgatgccatgtctgctcgaatcagagaactggaatctaacccaccaaaacctaaggaattagccgaagcgctttttctgattgcaactttacgtgagcaaagcgacggttgggagcgtaaagccattaacagtttcgctgagcgtacgcagatgttccagcgcattgccgagttggaaaagagaaaccaagaactggagtcagggctgttaattccagccgaagttgtgcgactggaccgagcatctggcatgaacgctgaggcaagttgtgtcgacaggaacaagcctggaaagattgtggcggtgcacatagatgccggtgactttgttaatgttaatggtctgatattaagggtaattgaaaccgattttgacgaccacgacgtaactttatatttggctggtggtcaagagtttaaatgtgctgctggttaccagatagaagtggtccctgtaccagaggatgaggagtaa

SEQ ID NO: 186884 - DNA, 498 bp, Klebsiella oxytoca
atgaaatttgcgaagttctgtgaactggtgacaaccatatgggcaaacaaaatcaaccagcgccgcgatcctgaagtcacgatcctaatccactctccgggtagtatcggagcaacaccatcagtagaagtcgagtccattcaggctggattcgactgggatgccggtcaggtgttgatttacccggcacagcctttgaccacgctgacgccagaacaggtagcggacattaccacaagcgtgcgcaaaggccagtcctggcacgcctatgaggcttacaagaagcataaagccgcaatggaagccgccgcgattgagtatgcgaaggtagcagggcaacgtgatgaattactgacagccctggaaggactttctgctgcttgcgacaccggcgagcgcgaccaggatggaaaacagcgtggactcgccattcctgacaaacactctgtatgggcagcgcatgaggccatcgcccgcgcaaaaggtagtccagcatga

SEQ ID NO: 186885 - DNA, 222 bp, Klebsiella oxytoca
atgttaataaaatgcatcaaagacactgagggttggtggaccgagggcgaatattacgaagccagagttgtaagtggcggttttgcgctagttggcgatgatgatgaaccagacggagaaggttggagcgcaacgcctatagataacaaggacgacggctcgataatttacgccttaggcggtatcgatggcgaagttctatttgaggaaagcgcagtatga

SEQ ID NO: 186886 - DNA, 216 bp, Klebsiella oxytoca
atgagcgctcatattcgtaactttagttggaaccgcgttaaactgtctacactcacttacggcgagttagaccaactcaaaaagaaagtcgaagaagaacatgcctgtaataatgggatctacctatatgacaaatctgggttgaaaaaactggacgctttgagttgggctgtttatcacaaaatgaaagcagagaaaaaggcaaagcagggatag

SEQ ID NO: 186887 - DNA, 252 bp, Klebsiella oxytoca
atgtttaatcaaactgaaaagtctattgcccagatcgtggagtacattcccagggcctgccgtgatatgcagttaaaagaggccaaggcacggcttgctacaaaaattgcactttatattgttgacggcagtgatgcaggggtgctcaacaataccttcgctcgggcactcaacagtcacacaaaggaggcattctttgcaaacgttgctgctcaggttgtttataatgaccccttattaccatcagagtaa

SEQ ID NO: 186888 - DNA, 315 bp, Klebsiella oxytoca
atgggcaaagaacacgggtgtaattcagttcagccggatttaccagccaccgataatggcggtcgacatgaagttattgtcaccggctgtgttacaaaaatcggtagagggattcatttctgtaataatgagcttctcagtggtgctaatcataatctctggttcccgttgaactctgacgacgactggttttccggaattgaacgtgtgctggtaatgaatggggtggcagagaatgtcgttaaactcagtcctcttaatgacgggaaagactatcacgactggaaagtgatttataactgccgtgtcgtctga

SEQ ID NO: 186889 - DNA, 321 bp, Klebsiella oxytoca
atgactattgaaattaaagaaaactacaccaccgctgttatcagcaccgcgcacattgctaaagaagataccgagttattaacggatgccagttataatccacgtacagatagtggacgtagctggattcacgtaaacgaatatggttttattattcggaccagcgttgaaaatccggggtggaaacagcttttacgagatgatggtatctcatggcctacaattgaaaatatcgaaaaagtacttaaagcagggtacgaatgtgttcattttgaccgtgacgcagaaatcgtagatggtctgctggcgtgggactggtaa

SEQ ID NO: 186890 - DNA, 582 bp, Klebsiella oxytoca
atgtatctgcatcttgttccaacgctataccacattatttcaaataaatgccaacttgaatcagtgacgatcccggaattggaattcgagattaaaggtgatgcgctttcatgcggaagaccgtatccaaataaacggcttaatgttggcatgctaaaaaaccggaaagccatggttgggttgcttcttgaatatgacaagcaaatcagtcaatttacaacggaatataaatgggctattgaaaacattggcgttgttcagcacaatattaaaacgattgtgctggacagtgaatttgaccttatttcgcaatgcatagggttaaatattggcctggatgaatggaaaccaagactccatccctcttatcaaaaagtcgcacccgttaaaatacaacctatgatggaatcataccgaaccggcgaagcggttaataaattgcagcatgatgtatgggcgaataatgctctactgttcaggacagagacattgcttttgcatactttggaatcagaaagactctctaagtatagttttttcatcgacaggcttcctcaattagattctaagatttgcatctga

SEQ ID NO: 186891 - DNA, 294 bp, Klebsiella oxytoca
atgaatgacagggcggtttttttaaatatccatggagaagataagaccccatttattaccgaggtagaaatgcttattgggggagttccacggctcatgtatccagatggcaccgagcaattcgcggacgatgaaaccgagacagtcctgatttattcacctcgactgaccgaaccagaacttgaagccttttgtaaatcgaatattgagcattaccaggcttttcacgaggctaatttaaagaaactacttaggggagaccgcgtagcgataacccagttttggcttgaataa

SEQ ID NO: 186892 - DNA, 582 bp, Klebsiella oxytoca
atggtatacacaggaataaccgatcacgccagactcagacttatgcagcgttcccgacttcccctgcatgtactcactgatatgatcgacaaaagggaatatgtcgatttgggttcaaagccaggaatattaaaaaaacatatactgatttatagtcgcctggatgaaggttggtacgtactaatcagggatataacatctggatgtatcgttacggtattaccggagaattatcatgattcatcatttattaaaatcaacgagtcagataagaaatctgcatatgatttagcatttaaagtaagagctttgcgcccagaattaattagtataaacctttgttataatgatttcgatggttaccggcactcgaaaaatatttattccataccgatttcacaggtggaagtgtcgcaagagtcatttttaaagtcaaagtttataaaactgcttaaaagaaagataagggaaaataatgcacgtggacttttctttgatgaacacaccatagagccagggtatacgccgctgttcctgaacgtgaggttcagtccggataaatacaaaatattatatttctga

SEQ ID NO: 186893 - DNA, 384 bp, Klebsiella oxytoca
atgctttttcggaaattggtgctgttgggtgggggctgtatcttacttctggcctatcacggaggctatttattacgtaactggccttggttgttttattacgggatgatcgcatggttgttttcatttagctggcatcttttcattacccgtaacgcaacttttgaaccgggaacgataaagaacgaagagaaatcattacccatcttgggtcaaccccagactcatcggtataaacagaatgatagtagtgattcttcactgattatgcatagcgcttattattcatcaacaagcaacaatcatgcggaaagcatcattaacaatggtgccgattgccgtaattcggatacttcagattcaggatgcggtgggggttattaa

SEQ ID NO: 186894 - DNA, 468 bp, Klebsiella oxytoca
atgagcagcatgacagtttcattttatagtcagaaacactaccaaaactcaactgaagctatcaagtcaagggcgacggtatcaattgagatctgttgtaatcccagcctgaacaaacttatggctatctcagaggctatctgcacgtgcgcaggcattgagccatcggttggtatcattgtcgatgatgctctcacagaggacattagtgagggtgagagtatctgtgtggccttctataaccacaacaagtacaaaactgctgatgcggctagtcaagcagatgctatcaggcgcgtgaatctggatttttccttaactcttaatgatttgcacatgattattggtgctgtaagtcgatgtgccgctattgataatgtaatcggtattgcattccctacggcgacggttattgatattgggcattccgggcaatctatggaccagaaaagcatgctgcattcttaa

SEQ ID NO: 186895 - DNA, 204 bp, Klebsiella oxytoca
atgaagaacattaaacgcgaagcattactggtgcccatcatcggcctgctgattctgtcttatcatatgggctatttcctctcggattgggcgttctggcaggtatacgggatcctggctgtggcctattttatatgccacattggactgaagaaaaaagaagcaaaagatgctgaccaaacgggtgacgcaaccggacagtaa

SEQ ID NO: 186896 - DNA, 531 bp, Klebsiella oxytoca
atgatccctactattgaaccatttctgtatggaaggaatatttctgatatttcggaaaaacatttcgcgccctggttttgccctaatgatgaatacccagttctggtgctggcctcaacgatcactgtccctgattcaccctcacaggactggtttctcggggaagaacaatgtggagggtacagttgtaaccagttccaggctgcggtgttaccgctaaaaatactcccagaaaaaattgtggtactggagcaggttgcaggcgaagtattttgtccaaaatccctcgactattttaactttgatagcgatgaggttcgacaatgtatccgtcgggattaccagtcatttgttatgtctgccgggttaacgtgctcggatgacaatgcgcttcttttgacacaaccgctataccccctggatgcgtctgaatcaaacctcagggctttaacctcagatcagatcaatctcgacagacttaatgtcagtaatggattggtcctttttgttgtgggggtgaactgcgactga

SEQ ID NO: 186897 - DNA, 348 bp, Klebsiella oxytoca
atgaataacatgaaacatttaccactcaaagacacccttgttgtgggtattcccgcattgctgtttatggcgttgctttactcacttaaaagcaactttccagaggtagtcgagcttataggtactttagtcgtttttatcataacaccagccctggttgctctgttggcaataataagacggggagctttcatgttctttgccggagctctcgttacacaggtgcttaccgcttgtctggtttatcttgtttctacccgggacattagcgaatcactgggccttggagcgtgtgcaatcgtgatttacgtaattggtctgtcgaaatttgaagatatcaactcatag

SEQ ID NO: 186898 - DNA, 792 bp, Klebsiella oxytoca
atgaacgcttttaacaatctgtttaaccgtcactgtcaaaacactctgctgggtcatggttggcctgccgatctggaactggactattcattacgttactgccagggagatggagtggcattttacggtgtgctgcatgacaaagaaattttgaccttactgtctggtctgctgaaagataaccacatctctgaaaaactagcagaagaggttgccgaagtaataaaaggcagtggcactacactcatccttgagcgcaacggttatggctaccgatattcgcatgccaatacaattcggaccctgttagaaaattaccctgacaacatcgaatatgaagtccgctttaatgacgttctggagagcataagggaaagtattgagcagatttgtaacacgcttgaaaacgacggttataaaattcatgaaagcatgactccagcctatgaaggcgagcttgttatgtcacgagcaacagccaatttcgaaatcattgtcaccgaaagcgaagaggagttctgggacacgtctgatacttgggatgatgaatataaagattcgtgtatagcggatattcttaacggaaaatgtgtactgaagaacctcgaaatcatagtgagagggaaatctacaggaaaagtttacgggcaacattatgccgaactggtccacatttacgaaaatagtccggtgcggaactggtttgaccgggaatggttaagggtagcgtttgaagaagcgcgtggaaatattgaagatgcacgtagtgaactgaaaaacatcaggtcataa

SEQ ID NO: 186899 - DNA, 360 bp, Klebsiella oxytoca
atgtttagccagttctttgttttaaccagtattgttgtgtggattatgccggtgatgaccatcgccggagcaattttccgtaaggacctgttaaaccggaaagaatggacatttctcgtattctttagcgttatcgctgcatcgtacgtgtcttattccagctggcaggacagaaacatgggcctggtaccaatagggaaagaatatttatcttgcaagttaaaatcgcgtaatgagccagacctcacaagtttcagtttcaggaccgtgacacttgattgtggcggagaagaaaaaatggctaaagaggaattgtatgatgcagccgtaaaagccgccacgaaatacggttacgagtaa

SEQ ID NO: 186900 - DNA, 3384 bp, Klebsiella oxytoca
atgcctgacattatcccacacgaacagcaaccagagcgccttcagaaattccattctctccagggtggacaatactggcgtgctaagcacgctattcctgaagaacgtattgaacaggatgaagtgctactgattgagtcgctccgctgggtcgataatgctctgcacactgtgatcctccgcacccacccatcaaaattcaataaggactttgtttacaaatataccgatgcagctggtcgcagctgcagcacagcaaaatcgttcaaagagcatcgctttctgttcaacgactttctggacaagtttgaatttgcagatgacggacaggatatccgtagccacgaacttatggctgctcagaaccgtgtgagccagcttactcagcaaatgaccgaaaccatggctgatcctgatgctctgcgaactgaattactctcgcgcgtagaagctaagaaggctagttcatcagctgcaggtaatgataaaaaacagctgcccatgcttacgcgtcactcgccgtctaccgaaataacctctcttggctccgctctgtcatctggtatcgacgaaacaaagatagcgcagctgcagcaggtcgtagagttcagacatgaaatcgcacaggctcaaatcgactggattaaagaaaaaaattctgcgatttcgagggcggttcaggctatcacaccctatctggaagaatcagcagcagctcaacttgctgtcgcggaagaaagccgggaaacgcttaacaagctgatggatggtattaaatccctcgacctctacatcggaaaagatgttgtcgtgaacactatcaaagaaggcgattcggcaccggcacacgttccgttaacctttgttcaacgtaagctggtggtcgatgaagaaacggcgatttacctcgatatcggagaatggttcgattttgaaaaactaccactgtttttcaaagcactgaatgaccatcctggcttggtagagcagatattcccgtctgagcggtgtgtcgtgtgtatgacaaccccccgccgctatattgattatcaggaccggtgggctaactgggagatgaatgccagaaaccagaccgttttccttatggtccgggacggagaaagactgttccaggtatactccggtgtagaatctcacctcggcgcccatacgcttttcccgacaactgatgaacaggggaatatttttcgcggtgctgatggtgcacaggttaccttcaatgacgtgtcctatacggaccgcctgaaaacgcatgagatggttgctctgcactattatcggttcctcatcctctgctgtggtcttgaccaccggctcaagctgtttggtgagttctacgacccgcaggatcgctttagttttgtttctatggacttccaggaaaagtattgtcgctttattcatgaccatgacggtaccgggttactggacgatcctgacgcaaaagtccgtccttctattgaagaatacataagtgaagccaacagccatttgcggcctggttcaagggtgttttgcgaatggagaactgtttgtaaccctaaaaccgcgccgagtgctacgaaacctgacactggctccagttatcggggctcctattattttacggccgattttatcaatgatgagggaatggcggtggcctatacccgaaacaatgagatctgcgtggatgtaccggtcaaaaaggatatctaccggcgtaaacggcctaatgatgtgcgcgagtttaatgcgaaagtgtcactcacgaatttcaaacgtgatgtgtgggaagattccagcagtgtgggatacctctgtcttgatgcggtaaaagcagacgacctcgactattacattcacagccgaccaagccgtaaaggtttcatgtacttcataaagctattcaagcgtctctctgccgttcttcgaaaggaagaagaacatgagcagccatatcgacaaaagctcctcagagcgctggtggatggcaacatagggacgaaagcaaaccgtgcggagatcgtcgataagacaatcatcaactggcgggcagatagaaaaggccaaccacttagcgaaggcattgaaaacgagaaaagctggaaagaaatacttggcatgatggacctgatcgcatggcgtggtttgagccataaagaggccgccgtggagatggccatttctcgtgggagcctgccattacgtctggttgttaccactaattcccggctggcgttgtatgttacccctactgacgaggaacgagatgaccgcctggaaacccataaatgggttatattgctgacctttaaattgtcactaaaggggctaaaactcgattcttccagacctgtattgctaagcaaaaatagcgtatgtgaaaccacactctaccaatggccggaggccagcgagtggaaagggttgaaatcggctttcggcagtttcgaagagaaacaaagagcctttgaatttattgaaacgggtaaagaggatctgcaaaagctgtctccggctaatcccgtagaatttgaggctggagtgcgtgaatggatgatggcttactgcgaaatgaatgattaccgcaaaaccggaggccaggtgcaacagcccactttaatgatacctgttggcatctacatcgatcgcggagtctggcagtacgtatacgtaaccacaggaaatgaggctgtggggtatttttaccacaatgccagcgattccttaaaaaaggaacttttccatgagtacgtctcgcgctttgctcaaaaggaaggcaaacgggaaaggattgaaaaacagggtaaccgactggcattgggcatgtcgcagaaaactccagatgtcggcatgtttagcgctgaccgtaagcttagtatggataacgttgaatacggttctatttcgttcagtgcctacagccaactccggatgttagaaaaccgactcttttttgttatctcggaagctgaacgcggactacaccgcaatatatatattgccgataatctcaaagacgataacgacgagtttatcatcgataaactactgggctcgtctcaccaacaggagcaggaagctgttgatgtattcgaagtaaaactgcccaagtctctgtcagaaggcccactcccggtgctgaaatgtgatggggaaatatatcgaattcaccactggttcgatatctgtccacaagggtcggacggaaccatttcattgagcaatatcgaagcgccggtacatacggtcaccaggcacagttttgataataaagagttggcaatgatgtttatccttaaggaggacagttccgtaaggaaacatacgtccggtgataaattcaaaccgccagcaggaattaacgaaaggtggtattag

SEQ ID NO: 186901 - DNA, 246 bp, Klebsiella oxytoca
atgaacacaacttttctgggtcagagagagtttatcaagcatggatgttttttattcctgttatctgacgaaagctgttttgctgttaataatattgaatgggcggaaaaaatcttatccagtgataatgttaaatttcaaaatggtcggatgtctcatgaagtcgcccgcgaagttatggaagaatctcaagatgttttattaaactttttgagtctgacattaccgcaaatttccacccgataa

SEQ ID NO: 186902 - DNA, 648 bp, Klebsiella oxytoca
atgccatcagaaaacagcgtaaaaatcaccttcacttttaacggtatggctcctcaaaattggaaatctgctttaaacagtcagaagaaggattcgtggattgatccgcaatccagtggcagtaaggtacttcaagaaatcctccgcaattccggtacctcggaagaccgtacctgtggttacgatgttctgtcgttttcgtttccctctcagcgtgatattttgtcgcaactccttggtctctatgctgttgcagacgccatggtccttctcatggctgcgacgcctctttgtcgcaacgtgtataccgttgtagtcaccacccaccagctgctttcagacgggagctctattctctcagaacaaaaagccgtacgcagcctgtacttcatgacacaaaacggcatttgtattcagtccgacttttcagtggatctggatactgacaagttaccgggtgcccggtttttttccagcggagatgacctggaacaggcaggcttgcagtactggggggagaatggaggggatgcctggagagccattgttacaaccatgcatggaaataaaatgctcctcaatggggccggacagatacttgaacttggggatacaccggaagagcgaattaacgctgtcagcaattaa

SEQ ID NO: 186903 - DNA, 327 bp, Klebsiella oxytoca
atggcaatctcagacatcagcaaagccgtttcagtcaaggaccaggacgttttcctcgttgaagttgtagatggcaaaccagttgtaaaacaaattactgaggattttgtaattatcagttcaggagatattccctctaaccgggaagagttcatgcatttcaatgagaaatacttggctccaaatggggtcggtatcgatataaactcactttctgacgacaaaatcgagaagtatataaacgtattaaaagaatccttatctaaggatatggcgtctgagattacgactgactactctggccccgcattcaattcacttaattaa

SEQ ID NO: 186904 - DNA, 801 bp, Klebsiella oxytoca
atggcttatgaacacagcaagtcccctcagaataatgatgcaggtaagaatgagaagggttgtgataaaaaagaccagggcaaagagtgcagcattttggctcctacgccgggagtaaataagattttcctcgaccagcttcgtggtgggcctatggacaaagcatcggtgaactatgaatacctctcacctgatcctgctgaaactgcacaacgtcttgctttagctcattatgtttcttcaggcctggacagaaaggtctctttcaaacctctcaatctgattcatattatgatggactataatttggacgcggataaagttgcggtgatcgcgggtgtcgattctgctgatgtcgaatcatggtttcacaccggccttgcccgcgaatcggacttatataacatcgctagtgctattggtgtgtcaacggaatggatacgcggctttgtatccggagaagaggattcgttgaaggctaattgtgacggtctggctaaagaactgcagaagcttccagatgaagaaatcactactctggaaagaagcttcaggctcaagcttgaacaatgtcaggcgctggatactctcatcgagcttaatgaaccgcaagagaaccgggaacaatcgcctgatacggttaatccattcgataagactgattcagagcttctgatctcgatctaccggtctatggacgaacctgagagacaaaatctgtatcgtatcgtctgtttacgcagtaaagagctcaatgcgttactggagcatcacagtcaaaatattttacctaattattga

SEQ ID NO: 186905 - DNA, 378 bp, Klebsiella oxytoca
atgttagagaaaatttactacctcgcccttattctgattgcgttttttattacctgtgggtttgttttagcatggtgcagacgtagtccactcgctctgactttaacagtcagcgccctggttatttgtctggctttccattcccttgaaacctctgtagcggttggaattgaggaagtatcgtccggctccagggactttactcagtgtacgttcattgaccagcaaggacccgaagtaagcggccttggttatcccatcgtcgttctgatgtgtgatgacgggcaacatgttatcgacgccaggatttatagccagcagctgacgcactatcaagtgtgcagcacttcagaaaatgaggggactttctgcccttaa

SEQ ID NO: 186906 - DNA, 321 bp, Klebsiella oxytoca
atgaaacagccagaaacggaaagtactctggacgaggtacgggcgatcgaactgttcaagtctcttggtcgggaatgcgtacaaacccgtcttgatagcctttcggctatagcgatatcacgctgggaggatgcaaagccgttgccgcctgattattcgggtactccgatcgattttctcacggatgaggagcgcggagaaaggcatcttatgttgataggacagatgctctgcatagatgaaagagcagaagcccgggtacggatcaaacaacgtatagccaatcgtcagatgagacgccaccagctttgtgctgactga

SEQ ID NO: 186907 - DNA, 234 bp, Klebsiella oxytoca
atggcgaagaaaggaatagaaaaaatcgtacaggaggctctgttaaagggttataccgtaaacagaagtgaagaccggtttgaaatttctaaaccaggtaaaaaactaattagcctggtgatcttgcctgatggtacggcctatcgcggtgatgtagaactgaccattaccaaaacgatatggacacagaaacagatgaaagaagttcttgggctttctgtctcagaaaagtaa

SEQ ID NO: 186908 - DNA, 615 bp, Klebsiella oxytoca
atgtcggaccaggctaagtattatgattattaccttgttgaagggccaaaggttaaggagttaattgaatcctattatgcactcggcgaacaacgttccagggtgcttgatgacgcctgcaagttagtcggggcaattgcattcattaattcaagcggtttgggggataaaggggataaattgcgcgcctttgcctgggatgccgattttacgtttccgtgccccatcacgataaaagaacggtctatattcaataataaaccggtagtaattgtacgtggcaaaggcaacacaaaggaaggtcgtgagtacaataaaaaactggattcagtcattaaatcagcaaatgaaagcctcggttcttacccttgttgggcatcttacatcattaaccactatggcgtgatgcgtacagcacaaggaggtccatcctccttccacaagcatgccacagccatgctgacaacaaattgcggtatgctccgtgaaagaaatgatgttctggtattttgtattccgaatagagaagacagattcagaaacgaagtatctatcccccctgagtttaaaaaattaacctatggacagtattatgatatgacttcctctcagtga

SEQ ID NO: 186909 - DNA, 156 bp, Klebsiella oxytoca
atgaaacttcaacaaaatgaaaactggcaaacccgctctcgtggtgataacgacagtgaataccagatttaccttgcctgtgcagataatggtaacggtattgacgtcactaccggaaaaccactaaaaacttacgatgaatggtgtaacagctga

SEQ ID NO: 186910 - DNA, 309 bp, Klebsiella oxytoca
atgggtaagtattattgggcaatttgtcctcactgtgaaggccacggtaccatggacaacccggcgttttcggatggttttaccagctctgaactttacgatatggagccagaggaacggcacaggatcctcaacggtgcatatgatgttgcctgcagcagctgtaaaggcagtgggaaaattaaggtccccatcatcagtgccctgactttcagtgaaaaaaaagctctggtcttagaacgccgcgatcgtcgtgagttggctgacttagctcaaatggaaaaaatggaacggatgatggggtgctga

SEQ ID NO: 186911 - DNA, 693 bp, Klebsiella oxytoca
atgaaaacccccaaattttcaaacttgccccgtgccctactgccagcccttctgctgacggtattcatgagttctggtagctttgccagaggttttgatgagccacccatagatacattttgctctaatgattcacgagagttgaatcacattaccgatctgatgaatgaacgaggccctacctctgtgaagatttcagaggaaaacgcacttcatcaagaactggacgaactgtcaaataaaatgtccctgatgttgatgaacacagttaaacaaggtgacattgaagagcttaattcgaacattaagcatctgattactattattgaaagcaaagacaacgaagcggatatttcgaatgttggtgcggaactcaataagttaacattaacaaagagtgagattgttgatttgatggcttctgatatcgcaaaagaagctcaagagactcttgtcgccattgataaaaatgcgctctttcgttcgatgacattagcaggtaatcaggaaatgaatgatgtcagtaacgaactcaagcaacttgaagacttgagaaaattgagcattcggcttgagttttatttaaattgtttcaatctttttattctgtctattggtatgatttcagtgatgacattgatcgcatataagtacaccccgttcaaaaaagtactatctaagctaaaaaagtaa

SEQ ID NO: 186912 - DNA, 300 bp, Klebsiella oxytoca
atgagtatgaaaaacagcaaagaggattggtatttaattcgcaaccttaaatggttgagtccgcttgttattctttctttttgcctgttaagctcacaggtatacgagattttaggtgaaaacaatgttatccctgagtatattataaaaatcattgcggcaatcgcactattcatcagtgcatttaacgcaagaatgacgccaaccatttccgccagaatctttatcatcacgatctatatttttgggtttagtgttttagtttttttactttacaatttttttacggggaacgtttaa

SEQ ID NO: 186913 - DNA, 276 bp, Klebsiella oxytoca
atgatttctaacgtacctacaggtcggatggtaaaagtcattaggacgacaggccggagtagtgactacctagggccttgcgagatttgctcggaaaatatgtccgagtcgtatgcagcccgctatggaagggaaaggttgaaagaaaatggagtcgtatatatcgataaatcagggggtagcacatacgggcataaagaatgtttattggcaatggttgatgttaagcctgataccttggcactccatctctgctgcggaaaatcaaaaaagtaa

SEQ ID NO: 186914 - DNA, 318 bp, Klebsiella oxytoca
atggcattactgattacagcagatgatagtatacgcaagctatcccctcaggaccttgaaggtagccgtaataatgacggtgcattctcgcttgcagatatgcaacaaatggtaggcggttacattcaggctgtaatgctcaatcctgttattgtacatgatggcattcgttacagctggttggtcattaatgaagaaggaaagcttctgtccttaccaggaaacaacaatgcgacactcatagcgaaaagtgctatcaggcctgatgactatatagtaggcaatgcgttgatgcttgaagaaagcgagtttcagtaa

SEQ ID NO: 186915 - DNA, 249 bp, Klebsiella oxytoca
atgaaaatccgagaccagattactgcagaattgaattaccaggcatctgtagaaggagagacgggtaatataaaaatgtgtcgtattattctggaatctgtgaacaatgttgttgtttacaatacaatgacaaaggtggagaaagcaccaaacgctgactctaaaaccgacgaagagcagtatttccactatgttcggccctgggttatcccgttcattgaaaagatgtatatggctaaagacaaatga

SEQ ID NO: 186916 - DNA, 786 bp, Klebsiella oxytoca
atgagtcttaccgaactgaccggtaacccgcggcacgatcagctgctaatgctgattagcgagcgcggttatatgaatattgatgaactggctagcctgctggacgtttccacgcagaccgtgcggcgtgatattcgtaaactcagcgagcagggattaatcacccgccatcacggcggagcgggcagagcgtccagcgtggtcaatacggcatttgagcagcgtgaagtctccttgaccgaagagaaaaaggccatcgcggaagcagtggctgactacatcccggatggctcgacggtgtttatcaccattggcaccaccgttgagcaggttgcgcgcgcgctgttaaatcacaatcatctacggattatcactaacagtctgcgtgtggcgcatattctctataacaatccgcgatttgaagtgatggtgcctggcggtaccctgcgcccgcacaatagcggcattattggcccttccgcgacggaatttgtcgcgggattccgggccgattatctggtgaccagcgtcggagctattgaaagcgatggcgcgctgctggagtttgacgtcaacgaagccagcgtggccaaaacgatgatggcccactctcggcaaattcttctcgccgccgatcatactaaatatcacgcatcggccgccgttgagattggtaacgtggcccaggccacagccttgtttaccgatgagtgtccgtcaggacagttaaaatcatggttagatgagaatcaaacggaaatcattctggctcaggaagaggtgtag

SEQ ID NO: 186917 - DNA, 897 bp, Klebsiella oxytoca
atgattcgtattgcttgtgtgggtattaccgtgatggatcgcatctattacgtagaagatttgccgactgaaggaggtaaatatgtggcgaagcgctatacagaagtgggcggaggcccggcggcgactgccgcggtggctgcggcaaagctgggcgcgcaggtggactttattggccgcgtgggcgatgacgacactggaaaaaagctgctggcggagctggaatccctgggggtaaatacccgttatacccggcgctatgtgcgggcaaactcttcgcaatcggcgattatggttgatgcgaagggggagcggattattgtgaactatcccagcccggatttactgcccgatgccgactggctcaacgcgatcgatttttctcagtgggacgtgatactcgcggacgtacgctggcatgagggcgcaaagcaggcgttcacgctggcgcgccgggcaggagttatgaccgtactggatggtgacgtcaccccgcaggatatcagcgagctggtagcgctgagcgatcatgccgctttttccgaaccgggtctggcgcgtttaacaggacttcaagaacctgaaacaggactgagacaagcacaaacgctcacaaatggtcatgtttacgtcacgcgggggagtgagggatgctactggatatcgcatggcgcgctgcagcatcagccaggattttcagtcgacgttgttgataccacaggggctggagacgtttttcacggtgcgctggccttcagtctggcttccgggagtgcgtcggtagaagcggtcaggtttgccagcggagtggctgcgctgaaatgtacgcgcccaggagggcgcgcgggtattcccgactgtgatcaaacccgatcttttctgtcactttttgtataa

SEQ ID NO: 186918 - DNA, 891 bp, Klebsiella oxytoca
atgccagtgattgcctttatcggattaggtcagatgggatcacctatggcgagcaatttgctcaaacagggccatcaactcagcgtctttgacgttaacccagatgccgttcagcgcctggtggaagaaggggcacagcctgccagtagtcctgctcaggcagcaaaaggcgctgaatttgttatcaccatgctccctaatggcgatctggtgcacagcgtcatgttcggcccagaaggtgtctgtgagagcttgtcaccacaggggctggtgattgatatgtccacgattcacccactgcaaaccgacaagctgatgcgcgacatgagcgccaaaggcttcagcatgatggattgcccggttgggcgtacctccgatcatgccatcgcaggcacgctgctgttgctggcgggcggaacggcagaacaggttgagcgggcgacaccagtgttaatggcgatgggcaatgaactggtcaatgccggcggaccaggtatgggcatccgcgtgaagctgatcaacaactacatgagcatcgcgctgaatgcgctttccgctgaagctgccgtgttatgcgaagccctgggcctatccttcgacgtggcgttaaaagtcatgaatggcactcccgccggaaaaggccatttcaccacctcctggccgaataaagtgctgaaaggcgatctttctccggccttcatgatcgatttagcccacaaagatctgggaatcgcgctggatgttgcgaatcaactgcacgtaccaatgccgctcggcgccgcttcccgcgaagtttacaaccaggcccgagccgcaggtcgtggtcgggaagactggaccgccattcttgagcaggttcgcacgtctgccggactgaacaaaacacattga

SEQ ID NO: 186919 - DNA, 879 bp, Klebsiella oxytoca
atgaccaagtacaccctgaaagatatcacgcgcgcttccggcggttttgccatgctggccgtcgatcagcgcgaagccatgcgcttaatgtttaccacggcgggtgcgaaatccccggtaaccaacagcgtgctgaccgactttaaagtgaatgcggcgaaaattctctccccctatgcctccgccattctgctggatcagcaattttgctaccgccaggtggtggaacaaaacgctgtttccccaggctgcgccatgattgtggccgccgatgagtttattccgggcaacggtattccggttgatagcgtggtgattgataaaaaagtcaatgcacagaccgtaaaacaggacggcgccaaagcccttaagctgctggtgctgtggcgcagcgatgaagatgcccagcaacgtctgggcatggtgaaagagttcaacgagctatgccactccagtggcctgctgagcattatcgaaccagtcgttcgcccgccgcgtcgtggcgataacttcgatcgcgagcaggccattatcgatgccgcgaaagagctgggcgacagcggcgccgatctctacaaagtcgaaatgccgctgtacggcaaaggctctcagcaggagctactcaccgcctcccaacgcctgaatgaaaacatcaacatgccgtgggtcattctctcctctggtgtcgatgaaaaactgtttcctcgcgcggtcagcgttgcaatgaccgctggcgcatcaggcttcctggccgggcgtgcagtctggtcatcggtgattggtttgccggataccgaactgatgctgcgcgatgtttctgcgccgaagctgcaacgtctaagcgatatcgtcgatgaaatgatggcccgtcgccgctaa

SEQ ID NO: 186920 - DNA, 1242 bp, Klebsiella oxytoca
atgaaatggtttaacaccctgagccacaaccgctggctggagcaggaaaccgaccgcatctttaactttggtaagaacgcggcggtgccgaccggatttggctggctgggaaatagtggtcaggtcagaacggatatggggacgcatctgtggatcactgctcgaatgctgcacgtttattccgttgccgcatctatgggtcgccctggtgcgtatcagttagtcagtcacggtattaatgccctgaacggcacattgcgcgacaaacgctacggtggctggtacgcctgcgtgaatgacgaaggtgtgatggatgcctccaagcagggctatcagcatttctttgtgttgcttggcgcggcaagcgcggtcacgaccggtcatccacaggccaggaaattgctcgatgacgccatcgaagtgattgaaaaatacttctggagtgaagatgagcagatgtgcctggagtcctgggacgaagccttcagccagacggaagattatcgcggcggcaacgctaacatgcacgcagttgaagccttcctgatcgtctacgacgtcactcatgaccgtaaatggctggatcgggcgctacgcatcgcgtcggtgattattcacgacgtggcccgcagcggcgagtatcgcgttaacgagcacttcgattcgcagtggaatccaattcgcgattacaacaaagacaatccagcgcatcgctttcgcgcttacggcggtaccccgggccactggatcgagtggggcagattgatgctgcatctgcacgccgcgctggaagctcgcttcgaaacgccccccgcctggctgctggaagatgctaaaggtctgttccacgccaccatccgcgatgcctgggcaccggatggcacggacggctttgtctactcagtggactgggacggtaaacctatcgtccgcgaaagagtgcgctggccaatagtcgaggcgatgggcaccgcctacgccctgtataccctcaccggcgatagccagtacgaaacctggtatcagacgtggtgggattactgcatcacctatctgatggattacgagaccggttcatggtggcaggagctggacaccaataacaaggtgaccaccaaagtctgggacggcaagcaggatatttaccatctgctgcactgcctggtcatcccgcgtctacctctggcgcctgggctggctcctgcggttgccgcaggtctgctggacgtcaatgcaaaataa

SEQ ID NO: 186921 - DNA, 876 bp, Klebsiella oxytoca
atgcacagcggtggaaaaaccattcaacttcaggccggacactaccgggcaaaaatcgtaacggttggcgcgggactggcggaactgacgcaccatgggcgtcacgtcgttattccacacaaacctgaagagatgccgctggcgcatctggggaaaatattggttccctggccaaatcgcatagcaaacggctgctatcagcataacggcaaggcatttcagcttgccgttaacgaccttgcttcgcagagcgcaattcatggccttttagcctggcaagattggcagattaaccagcagtcggcatcggaagcgtcgctgatgatttttctgccgccctcatatggctatcccttttcgctgcttgtcgaagtcatataccgcctggacgccataggcggtctacatgtttatatcagcgcgctcaatatcggcgatcaaccagccccttacggttccggcgcgcatccctatttaacctgcgatcttgagaaaatagatagctgtacgctaatccttccggcagacgaggtattgagcattgatacccaggagttgcatcgcgttgagcacacagagctaaatttcaccacgccacgccctatcgcggcgacgcagatcgatcacacctttaaaacgacagcgccgggcgatgagtgggaagtcagaatgttcagcgcagcaaaaaatatgacgacgtttctgcgctgcgaccagccctggctgcaggtttacagcggcgaaaagttacatcgacaaggacttgccgtcgagcccatgacctgtccgcctgatgcctttaattccggaattggccttatttctcttaccccaggcgagatgcaccggatgcgctttttgatcggcgctgaatag

SEQ ID NO: 186922 - DNA, 2037 bp, Klebsiella oxytoca
atgaattcgttacaacaacggtcaagcgcattagaactcacaaccctacaggatggctttacgctaacgtatcaacagcgcctgattctgcgccatacctcgcaaacaccttgcctgtggattggcaacggcgtcgcggatattgatatgtttcgtggcaacttcagcattaaagacaaactgaatgaaaaaattgccctcacgagtgccacggtcagtgaatcatcagacggctggcgggtcgatttcagccgcggcaccaccatcaacgccacgctgcaaatctccaccgatgaacagggccgcctgaagctggatctgcaaaacgacgatctgagccacaatcgcatctggctgcggctggccgctaacccagccgatcatatctacggctgcggtgaacagttctcttactttgatttacgcggcaagccgttcccactgtggaccagcgaacagggcgtgggtcgtaataaaactagctatgtcacctggcaggcggactgcaaagagaacgcgggcggcgactattattggaccttcttcccgcaaccaacctttgtcagcacgcaaaaatactactgccatgttgataacagctgctacatgaatttcgactttagcgcaccggagtatcacgagctagcgctgtgggaagacaaaaccaccctgcgccttgaatgtgccgacagctatatctccctgttggaaaaactcaccgcgctgctgggccgccaacctgaactgccggactgggtttacgatggcgtcacgctcggtattcagggcggcaccgaggtgtgccagaacaagctggacaccatgcgtaatgcgggcgtgaaggtgaacggtatctgggcgcaggactggtccggcatccgcatgacctctttcggtaaacgcgtgatgtggaactggaggtggaacagcgacaactatccacagctggatagccgtattcagctgtggaaagaggagggcgtgcagttcctctcttatatcaacccgtacgttgccagcgataaagatctttgtgccgaagcggcaaagcacggttatctggcaaaagatgcttctggcgatgactatctggtggagtttggcgagttctacggcggcgtggttgacctgaccaaccccgaagcctacgactggttcaaagaagtgattaaaaggaacatgattgcgctgggctgcggcggctggatggcggactttggcgaatatctacccaccgatacgtacctgcacaacggcgtcagcgccgaaattatgcataatgcctggcccgcgctgtgggcgaagtgtaactacgaggcattacaggagaccggcaaactcggcgagatcctattctttatgcgcgcaggctacactggcagccagaagtactccacgatgatgtgggcgggcgatcagaacgtggactggagcctcgacgatggcctggcttccgtcgtgcctgcagcgctgtcgctagcgatgaccggacatggcctgcaccacagtgatatcggcggctacaccacactgtttgatatgaaacgtagcaaagagctgctgcttcgctggtgcgactttagcgccttcaccccgatgatgcgtacccacgaaggcaatcgcccaggcgataactggcagtttgatggcgacgaccaaacgatcgcccactttgcccgtatgaccaccgtctttaccaccctgaaaccgtatctcaagcaggcggtcgcgcaaaacagcgccaccgggctaccggtcatgcgtccgctattcctgcactacgaagatgatgcggcaacctacagcctgaaataccagtacctgctgggacaagatctgcttgttgctccggttcacgaagagggaagacacgactggacgctgtatctgccagaagatagctgggtcaacgtctggactggagaaaactaccagggcggtgaaatcaccgttgacgcgcccataggcaagcctccggtattttatcgtgcgaagagtgagtgggcatcactgtttgccgctttgcgcaatatctaa

SEQ ID NO: 186923 - DNA, 1383 bp, Klebsiella oxytoca
atgagtcaaattacagccaatccggcaacccagcacttaccttttaaagaaaaactggcctatgggatgggtgatttaggctccaatatcctgctagacattggaacgctctatttactcaagttttataccgatgtcctcggtttacccggtacctacggtggcatcattttccttatcgctaaattttttaccgcgtttaccgatatgggaaccgggataatgctcgactcccggcgaaaaatcggtcaaaaaggcaaattccgcccatttgttctctatgcggctttcccggtcactttactggctatcgctaactttgttggtacaccgtttgaggtcaccggcaaaacggtaatggcaacggtactgtttatgctgtacggactgttctttagcatgatgaactgctcttacggcgcgatggtacccgctattaccaaaaaccctgatgaacgagcttcacttgccgcctggcgacagggcggcgcaaccctcgggctgttgctgtgcaccgtgggttttgtaccggtaatgaatctgatcgaaggcaacgcgcagctgagctacatcttcgcagccaccctattctcgctgtttggcctgttctttatgtggtggtgctacgcgggagtaaaagagcgctatgtcgaggtgaatcccctcaataacgcgcaaaaaccggggctactgcaatcctttcgcgccatcgctggtaaccgtccgctgtttgttttatgcattgccaacctttgcacgctcggcgcgtttaacgtcaagctggcgatacaggtttattacacccagtacgtattaaatgaccccatcctgctctcctggatgggcttctttagcatgggctgtatcttcattggcgtgtttttaatgccgggaatggtcagacgctttggtaagaaaaaagtctatatcggcggcctactgatttgggtcgcgggcgatctactcaactacttcttcggcggtggttcggtcagctttgtggcgttctcttgcctggcattcttcggttcagcgttcgtgaatagtctgaactgggcgctggtttccgacacggtagaatatggtgaatggcgcactggcgtgcgctcggaaggtacggtgtacaccggtttcactttcttccgtaaagtgtcgcaggcgctggcgggcttcttcccgggctggatgttgacgcaaattggttatatcccaaacgtggtgcaatcgactgataccgtcgaggggcttcgccagctgatctttatttatccttgcgcgttggccgtgattaccatcgtcgcaatgggctgtttctacaacctcaacgagaagatgtatgtccgtattgttgaagagatagaagcccgtaaacaacccgtttga

SEQ ID NO: 186924 - DNA, 1392 bp, Klebsiella oxytoca
atgtctgaccatgatccgctaacgctaaaactcagcctgcgggaaaaatgcgcctacgggatgggtgattttggttcaaatttgatgctgtgtatcggcacattgtatctgctcaaattttataccgatgaactaggaatgccagcatactacggcgggattatctttctggtggcgaaattctttaccgccttcaccgatatgctaaccggcgtactgctggactcccggcgtaacattggcgcaaaaggaaaattcaggccctttatattgtatgcctcatttcctgttgcgctggtggccacggcgcagtttttagcgacagattttacgctgacggtcaaaacggccatagcgaccatactgttcatgatgtttggcctgttttacagcctgatgaactgttcctatggggcgatggtacctgccatcaccaaaaatccgcatgagcgcgctcagttggccgcctggcgtcaaggcggcgccaccctcggcctgctgctgtgtacggttgggtttatgccaattcaagcgctttttattgattcaccttcgctgggttacctgatagctgccctgctcttctctgtttgtgggttgtttagcatgtggtggtgctttagcggagtgaaagagcgttatatcgaaatcgtacccgatcaccaccagcccagcattctcaaatctttctgcgcaatcttccgtaatcctccgctgctggtgttgtgcattgcgaacctgtgcacgctagcagcatttaacatcaagctggccattcaggtttactacacccagtacgtgctcaatgatattcatctgctgtcgtggatgggattctttagcatggggtgcattctggtaggcgtactgatggttccggcagcggtgcagcgctttggtaaaaagcaggtttatcttggcgggctggcgctatgggccattggcgatgtattgaattttttctggggcggaacctcagtcctgtttgtaacgctctcctgtatggcgttctttggcaccgcttttgtgaacagcctgaactgggcgctggtttcggatacagttgattacggtgagtggaaaacaggcgttcgtgccgaaggttcggtttataccggctataccttttcgaggaaaatctctgctgcgcttgctggcttcttaccgggtattatgctatcgcaaattggctatatccctaatatcacacaaagcgaaaccaccttgcttggcttgcgtcagcttatttttatctggccctgtacgcttgccattattgcggcactgactatgggatttttttataaactcaatgagacccgctttgcttttattattgaggaaattgaagagcgaaagaaaacgataaaacccggcatcatgaataattaa

SEQ ID NO: 186925 - DNA, 693 bp, Klebsiella oxytoca
atgaaaaaaataaacgcattacttttgttaacctctgttatttcaacctctgcatttgctggtgcctatgtggaaaaccgcgaggcatataatctggcatcggaccaaatggagttcatgctccgcgttggctacaacttcgatatgggcgcaggacttatgctcactaacacctatactcttcagcgcaaggatgaattaaagcatggctataatgaaatcgaggggtggtatccgctctttaggccgacggataaattaactattcaacccggtggcttaattaccgataaaagcgtaggctccagcggcgcagtttatctcgacgttaattataaatttacccactggtttaatttgaccgttcgcaaccgatataatcaccataactacagctcaactgacttaaacggtgagcaagataataatgacacctacgaagtgggcacctattggaattttattatcaccgataaattttcttatacttttgaaccacactattttacgcgggtgaatgactttaatagtagcaatggtaaaaaccatcactgggaaattaccaatactttcaggtatcgcatcaatcaaaactggttaccctactttgaactacgctggctggaccgtaatgtggaaccttaccatcgggaacaaaaccagatccgtgtgggggtgaagtatttattctaa

SEQ ID NO: 186926 - DNA, 1206 bp, Klebsiella oxytoca
atgagtagaggtattgcagagttccagccagacaggttagtgcaggtgctcgcagccaggagactctctcaaactcaactagctacgatggttggggtatcccctgcaactatcagtaaatggcgttcggcgcagcaagctccagaagcggaagctctccagagattggctactgtggttaatgttgcccctgaatggtttacacgcccacttcctgcgaaaatgtctaagccacttttccgtagtaacgcgagtgcacatgccgccgcacgagctatgctggaggcccgaatagaatgggctaatgaagtggtggtcaggttagaagaatatgtagatttacctgatatttgtttgccagttcgctttttctccaacattgatgagataagcgatgctgatattgaggatgctgcgcttgaatgtcgcactaagtggggattaggaaaaaacgagatccccgacctagcattagctgccgagagtaatggcataattttaatcagagaggaaactggcattgctcaaatcgaagggctctcagcctggagctccgagcttgaaaggccatttgttctgctctcttctgataaagataatgctttcaggagtcgcttcgatcttgctcacgagatagggcatctgatcctacacaaaaatgtgggcaatgaactcgactctgagcgctacaaactgaaagagagtcaggctcataaattcgcaggtgccttgttactaccagcagagccactagcagaacagattcgattacctgtaacgttagatagtttgttgctactaaaacagcgttatggtgtttctgtcgcagcaattattatgcgcttacacgttttgaatttgatttctgatgaagataaatcaaatcttttcaagcggcgctctgctagatggggagcaaaatctgaaccaggtgatgattatagacaacctgaattacctcgattgcttaagcgtacaatcgacttattaatctcttcaggtctgtttaccttggacggtattactggtttctttggattgtcagccacagatctcgaaatgctattgggtttgccaagcaactacctaaagggacaagcatcagttgtacatttggcaactttaaaaaatcagatccagaaggctcgagatcaatctaggtcgaatgaaaacagggtagttcaatttatcagacgaaaaaaatag

SEQ ID NO: 186927 - DNA, 576 bp, Klebsiella oxytoca
atggggatcaatgagtcactctatgcaggcgcagagcgagcttttattcgtgccaaacatgatgcaacaggtcatcgagcatctatcctcgggaacatgcgccattggtgtatgaatgaagaattttataaatccctactggcaaacggttgtacccctagcccattgaagggtaacaatttagttactgggaaaagtgggattttcaatatcgggcgcatcaatgacaataacgtgtcatggaacaatttaacgcgcgccaaaaccagacaaagactggctgagcataatcgtttcatcgaatcacttgtacagccgagtctttttggtgaccctgatgatatccctacagctacagtgttttttctggcccgcttttcgggtagtttctccgagcaaccagaaactcctctttcggtagaactggttgttccaagtcatgacatgcgatcttggcttttccgtgaggatatagctctgtttttgactaggtatgaacaggctatctcgcaaagtgataaagcgttaccaaaactgaaaaaccacaaaattaaaaaagatggaacagaggaataa

SEQ ID NO: 186928 - DNA, 690 bp, Klebsiella oxytoca
atgagttattttgagatctcgcatgcggctcgtaaagttcttaaaggcattgatgaaagcgaattagaaaaatgtatcgataaatgcctgtatgaagctcaatcttactatcttcaggacttcaggctttatgactgcggatcatatgtcacacagaaactctcttgctttgaaaaagctgttactgcacttcgattgtcaaagtcatccaaaaaacgtgaagaagcaagatacgcagcccaagaagctggccgtaatctggctgacgcatttttgcaaatgagggcaggggtttctgaggtcgaggcagaagaagttacatttagtgtagatgagcaaaaatttttcccaacgacgttcagtgaacgcctttctgttcggataaactacagctggcggatcgatcagaatgcagattggcagcacggaagcattacattctcttatcttgcaaaagaagaaccaagctatttctctagtgtgccagcacggaaagttagcgctgcaagacaagcgcagaaaagacaagaaaatttgtatcgagattgggaatacctaaaagctatatgtaaggaatctgtccataaatatctaaaagaagggcgagatggttcactgatcccaaaaactttcacggttaaaaatctcaataatttcggggcgaacttttggagtcttacagggaattag

SEQ ID NO: 186929 - DNA, 489 bp, Klebsiella oxytoca
atgcgtaaatacgctttaatcgttctgccctgtacgctggcgctgacattagctttcatcctgtacatttttttcaacagccgtgacaccttctcctgtaaatctcagtacgaccttactgaaaatataaatgagaacattctccgctcacagggcttgctttccgctgaactttctaaccatcgtcttttaatcaaccttgagggattacttaccagtaatggcgataaatacattgtctcgcgcaccatcgccctcaatttaaaaaaaaccactactgccggtcatcttttttatatttccgatgcgcaaatcactcgccacagcggtgataatacgcctgaaaatatcgcgcagaaaaacctctttagcgatcaaactcctgatagaatcatctatataaatcgtgttaataatgatactattttattcggtaaccagacgttcccacaatatggttgccagcgtcaaaaaacaatcattgattga

SEQ ID NO: 186930 - DNA, 3438 bp, Klebsiella oxytoca
atgatctggcgtaacggtgttcttcctcctggtgcgccggatttctcggctcaactcagcttcgatcttcacagttacgcgtatggtttgcttggactaggtctgcgccttttagagtcagatggcgacccgaatcaagcacggatcgcattcgaacaggcggcgacagcgcttgagtcggtcatggccaacggcaatcgcgaagaagctgatcgcgatttccatttcctccttgctgctgccagttatcacctcgcgcacctttctgcccgggcatattccctcctcgcaattgtggccgatgaagcaaatttctcgccgatcgagcatgcgctcactctgttgatacgccgagatatcaattcgctgcgtacacgcgtatatacctttcgtctcgatggtcgtggatctgatgcgaccattacgacattcttacagcagcacctcaccgagtccatcgttgccgatgcggcggaacgagatggaaaggactttcttttcgaaggcctgaatctcgcactgacagatgttttcttcggtgccttttcgatgttcctgctcgccctagatcgcggtgaatatactcttctcgaaagagcgatcgcccagcttcgtgaaaacctcgatatctgcggggagctgaaccttataccgcaatggtgggtgcaccggattgctatccatctgcttaacgatttctggtcgaacaccttccacgaaaaagttccgctgcttcccgctggcggcgttgccccttcgtggcctgtccttcgtgaactcttcattggcttgctcgctcgacgcccaagggcagaggtcgatttgtggccgtcgcagattgaagcggcatcgcgagctgtcaaccagactgacaacctcgttgtttcgttgccgaccagcgcaggtaagacccgcatcgctgaattgtctattctgagatgtttagccggtgggcggcgtgccattgtcgtaaccccgcttcgcgctctatcagcgcaaaccgaagccacacttcagcgtaccttcgggcctctcggcaagaccatttctgccctttatggcagcatcggggtgtccggcttcgacgaagatgccatccgcgggcgtgatattgttgtcgcaaccccagagaagctcgatttcgccttgaggaacgatccgtcactgctcgacgatgtgggcttgctcgttttcgatgagggccatatgattggttcaggtgagcgcgaagttcgttacgaggttcagattcagcgcctcttacgtcgtcaggacgcagatcaacgccgcatagtctgtctatcggcaattcttccggacggagatcaaatggaagacttctcggcgtggctacggcgcgatcaaccgggaggtcccattaagaacgattggcgcccgacgcgtttgcggttcggcgaggtcacttggaattcaccgacagcgcgcctaaatcttcgcgttggtgaggaaaggccatttgtgcccagatttctcactggtgcggcaccgccgctgttcgtaccaccgaagaagcgtcgcaaccgactctttccggacaatcagcaggagttgagccttgcaactgcatggcgtctagtcagagatggtcagacagtgttgatctattgcccagagcgccgcagcgtcgaaccatttgccaaggtcatcgttgactttcactcgcgcggtgcactcgagtctttgctaacagtcgaattgaccactttgcagatcgctattgcactcggtgaggaatggcttgggacagacagctatattctgaaatgccttcggcttggtgtggctcttcaccatggtgccttgccgacagcttatcgcaaggaaatcgagcgccttctgcgagaaggtatactcaaggtcacgatctcatcgccgactctggcgcagggactcaatctctcggcgacagcggttgtcatgcactcgctctaccggcacggtgaattgatcaaggtttcggaattcaagaatgtcatcggccgcgcaggccgtgcttatattgatgtagaaggccttgttctctatcccatctttgaagatgtgaataacaggaagcacaacaaatgggtcaatctgatagaagaccacggtgctcgtgagatggaaagcgggctcatccagctcatcttctcgctgctgagccgcatgcactcccgcattggcggtaatctcgaccgtttgatcgactatgttatcaataatgctgctgcatgggtcttcccagaggttgccggtgaaaaggttgatgagcgagagcaggcgctgaaagagtgggatcgccatatggcgacactagataccgccattctcagtctcattggtgaggccgatgtacccgatgatcagatcgagaccgctctcgataatattctccaatcttcactctggcaacgccgcctgctgcgtgttaacgacgaatcacgggctgcctatcgcaccgcgctgtttactcggagccgttatatctgggcgaattcgactgccgtcacacggcgtggctattttctggctgggcttggccttgaagctggacatgcactggatgcaattgcaccggaggcgaacaatcttctcatgcaagctaatgcagccttggttgtatcagatcatgaggctgcaatcactgcgatcacagaaatcgccgaacgcgtgttcaccttttatccgtttgaaccagacacactcccggcgaattggcgtgaaatcctcagaggttggctgcttgggcatccgttggcaatgatgatcgccggagaggaggtagatgcattgcaatttattgagggcggtctgggctaccgtcttccttgggctatggaggcgttgcgggtacgtgccgccgccaacggtgataccgttggcatgcctgcactagcgttggaagactatgaactcggccttgctgttccagctgtcgaaacggggacgatgaaccgctcagcctcaatactgatccaggcgggttttaattcacgactggcggccatcaaggccgtcaccgatacggctgctaacttcacgaacggggcggaattgcacgattggttgcgttcacctggtctcgctgtctattcggcacaaccaaactggccaacggtcgaagctaggactatatggctcgaattcatccaggaatttgctccgtcagacaacctttcttgggcgcggcgagattatcttggaaacgtcaattggttcgatgttccggcgctccccggaactccagtcggtctctttcattggaacggacaaccgctagtgcttgcaccagatgggcacgcgattggtctgctacaacaccctcttaaccttaatcggcgaggtcttgtgcgagcgacggtcgctatgaataacggccagatcaatctgagctatctcggccctgatgatttgtgggtagtggcgaagccacattaa

SEQ ID NO: 186931 - DNA, 780 bp, Klebsiella oxytoca
atggtcccgttctatgattggtgcgactcggccgacatgccattaggtaatcaccacgttcgtgtcatgacgggccgactaggagatattgcgactggcattcagatgacagctagggctatccccgcccactacactacagaggcgcggattgcgaccgctcttgcgaagttgggtaagacagcggctgctcatatgctcagcgatctccttccgcaaacggcgcaaattagatcgggtgaccttggcgagatctatgctacagaatggatcgaagcgtacagcggttatcgcgcgcctatcaaacgactgcgctggaaggatcataggaatatggcaatgcgcggcgatgatgtcatcggtatgcttctcgacgctgaaacacagcgactcagcttcctgaaaacagaagctaaaagccgtattaacttgcgcgctcaaacgcttgatgaggctcggagcggcttagataaggataacggccttccctcgtcgcatgcattatcttttatctcggccagacttatggagataggcaccaatgcaccgctcgtagacgcaatcgacgaagcgctctaccggcacggtatcccgcccgagagtgttaaacatctactcttcacgttttcaggtaaccccccacaggcgctactaacgcaggcgctacaggcttatcctggtccgattggccaatggggtgtcggtttgcacatcgacaaccatgctgcttttgtcggagctgtctacgatcgagtaattgcagatgccaacaacccctga

SEQ ID NO: 186932 - DNA, 804 bp, Klebsiella oxytoca
atgatacgtattccattattcaactctcagcaccttgaggccgcctgtcgcgttcttgctgataccgaacgtggcttgagtgggtcgcagatcgagcgacttctacaagaaatcaaagttgccgacacatcgccaagcatgacaaaatggaaacggctgtataatgcgctcgtaggtgcgcagaaccaatatcaggtcggcaaccatctcatcatgttcattaaccgtgcgatgaacccggtaaattacgctcgtgatccagcagtatttacctggaggcgtgatgaactcaatgttgtcctagctttttccggcttttatgtccgtgaagatggtaaggtcacgaacgccactaaagcaacaacactcgattctgcccgagcccgcgccgggcgacttaaggctgcactcgaaagccgtgctgtgcatgcagaagttttgaactattgtcgtgcagaacttctggacgaaaactattttcatgccgtcttcgaggcgacgaaaggggttgcggaacgtattcgtcacttgtctgggttgagcggcgatggtgccgacttggtgaacaaggcatttaccggacaacaaccagttctgtccttgggaccgctctctaccgactcagaaaagagcgaacaaaaaggttttgcgaatttactcattggtctattcggcgctgtgcgcaatccactagcccattcgcctaagaagaattggcccatgtctgaactggatgcgctggacatccttacgttggtttcgcttattcatcgcaagctggatggcacacagaaaaaaaggtag

SEQ ID NO: 186933 - DNA, 477 bp, Klebsiella oxytoca
atgaccaatatccttatgcccgattgccttgtaatgttaaataatctcttacaggctattgagaatgcacccgttgagtgcgatggtcatacattaatgataagcagtgctctaaatcatgcaggcatttctcatcaacgaatgtgcggggtagttaaaaacccaaaaacaaactttgagttatatccacacttctggattcagataggcgaatttactctggattaccgactcaggatgtgggttgggtattattccggtgaaaaactagcagaggatgcccctcacgggatattccatgttcgagggcttgagtatcaatacgcttctggtaccctttgcccaccagcagagcttgactttaatttattgaactttatgagtgatgatttttacggaaaaattaaccatactgaacttaccgctcttgcacattcagtaaatttaagtgacttaacctgtgtaaaaaatccttga

SEQ ID NO: 186934 - DNA, 675 bp, Klebsiella oxytoca
atgtcgaaaatacatctcattactacatgtgcgaaaagtaaaaacggcccggttctggatactgtatttccctacaatattccggatatatggaatgcgtaccagcaatggaaatgtcttgtgcagtccagatacacttcgggtaaagatgaaattactgaaacccaaaatatataccgtggcgctcactggaatacggctaagtctattgcagcctcacattctcgtatctgcctctgggttatttctgcaggtctgggcctgcggcacagttctgaccccgcaatcccttatgaagcgacgttttctcagcctggaaaaaagagcgccagcatctggggaatgctgacctccgaccctgttctgccgggaaaagtaacttctcttgcggagctgttaagtttgtaccggcatgatagctttgtcatcgccgcctctcccgtctatctgaacgctgtagaggacgatcttcttaaaggaatggcttatctcacctgtccaagagaacagcttaaaatcgcttccagcgcttcctacaacggcagattaagggagtatgtgcgatacggtggaatcctgatgatgaaagaccttaattcgaacatgacgactctgaacataaagcatgctggcatgctgatccatgatatggggatcatgccagacacactatga

SEQ ID NO: 186935 - DNA, 2016 bp, Klebsiella oxytoca
atgcttcatctggactactcccacctatcaactgagaactctggtgttagggttacgcattggctatatggttcgcaaactgagcgtgagcactttatttacgaattcgagaacgcggcacagcacgggcagatagcgctgaccttaaaaattctcggacacggacccacggggatcgagaagtcgcgctctatcttggaccaaacttcttaccggtgcgcccaggagaccttcagtgattgcatactaaatggcgatccctcggcgttacgcgaaaccattgtagcgaaaatcgagccgcgtgctatttgggttgaatggttgctcgaaaaccgttcatgttctcggaataaatatttggccgatcatcagatcatgaaggcgttggtggtcaatacttccgaggaagattgcatctatgttcttcaacttgtcgcccctactcacggagggaataattgggctttcgatcaactgatcctgcagcattggcagtgtgtatgtgactacctggaaaaaaatattgacaggtcgtcggactattcaagcaacagaaggcctgagttcgtcttaactctatttgagaattcgtcgaaggtgcagacgtcccggtgggtctgtgaacaggtttttgaacgagccgctccggcagtctttcctgagctaatcgaacattgctgtgcgatcttgccggaggatgtacgtaatttgttcctgcgctggaacatccattcgaagaaagagaagtatgactatatcaaggggtgcgttgccaaagccttctcgaggcttgctacattgtacgtggacaccataccctcggacctcgcgcttgctgcggcctggcacaagtttggagacccagcgcgatctagccagcaaagcgtcgctgccagcctcaaagaattgccatctcggtcgtgggaccgagaatcgctgtggacacaactaggcccggccgcccgcgaggcctggcgacaggatctgttcgaacaggtgaatgaggatccagaattagcccaggggctcctcaattttgcttgcctttggctcgagcagacggcattcgccgaagttgagccagtgcttttgcgattgatggatgacgaggaacatctggcgtttgcgaatcggcttgtcagcactgatgtaaggcaactgcaactgaggtgcaagggactactgcggtccaagcagggtgcactggacctagaggggccggtaggacgaggcgagggagtcacagagttgcctagcgtaggagcccaaacttggctgagcgatccttctgtggagcaagtcatctatagggcgcttagccagattgaggaagaattttgtcgcgaatattcggagacctggggagaggacgaggaggcccatacggcgcgcctcctgactctgacgatggaggcgatcggcaatgtgagcaaccagttgcgccaactctcaattacgacgcgggggaggtatccgagcttaacagtgaaggtgcgtcaacccagcaagcgggaggaaggggcgaatacaccagccggtgctccgctgggggcagacgtgctgttcctgagccgtatcgtggaaaagggggaaacagttattcagcgtgcgacccttatgcaggtaaaaaagcgcagaggcactgattcgggacgggggttcagttcgagggtaggcatcaacctgaagcagtgcgaggacatactcaagcagtcagaacacgcctactatctgttcgcgactccggcctcgcctcgcccggttctctgggttgccccagcgcggctcgttaggaatttgactcagttgcacacgagcaaaacctcggtttcggcgttgcaggtgcgggacgccagctgctcctacgcggatttttttctgcacgagcttattggcctgtgggctggcgacgagcatgaggacatcatcgccgtcgccaatggcgatcctcggcttgggcgaacacctcgccacattgttgatatcgaggttcgccgccaatctgatcaatcatag

SEQ ID NO: 186936 - DNA, 336 bp, Klebsiella oxytoca
atggaaattttatcaactttcagcttcaaggacttaatcgcctttgctgtaccggtaattattactgccttatttttcaacagaagaaggaaacgaaaaagcataagagttaactgctcatttttatttattgttttatctgtcggatctgccctcgaaatttgggggaatatctacgaaacgttctcttacaggaacaaccatctatataacaatgataagttcaccaccgtgttcaattacgatattcctaaaatcgtatttttttccattatcattgtggcttctattacccttttcatccaggaagttcgtatcaggaaaactcttctgtaa

SEQ ID NO: 186937 - DNA, 1635 bp, Klebsiella oxytoca
atgtcgctgattaccattgttcttgtattcatgatagcgatagttgttactgtgtttatatctcatttgttgcccgtaaaaattccattacctttgatccagatagctgcgggggctggtctcgctgccggaggcttccaggttgatttcgatccgcatatcttcctgctgttgttcattccccctctgttgtttctggatggctggcgaataccaaaggatgcgtttttcagtgatctgaaacccatcctgtcactggcgattggactcgttctggtcaccattattggcattggctggtttattcactggcttatcccggcggttacggtggccgccggatttgcgctcgctgcgattctgtcaccaactgacccggtggccgtttctgccatgactgcaaactctccgctgccctcacgaatggcgcatatcctcgaaggcgaatcccttctaaacgatgcatccggccttgtggcatttaattttgcgattgctgcagtgctcaccggtaccttctccccgggagaggcggtgactaaattcttcctgatggccttcggtggcattctgagcggtcttgtggtcgtctgggtaaccggtaagtgcaataattttctggtgaaacggacacgcgaagaaccggccattcagatactgattagccttcttatcccgtttgcggcgtatattctcgctgaggcattccatgtctcggggatcctggctgccgtagccgcaggcatcgctatgcactatgagcagctgtcggggcctcgtttaccggccacacgcatgaaaagcagtgccgtgtggaatatgcttcagaccacgctaaacgggatgattttcctgatgctgggcgagcagttgccacgtatgttactgaccctgccagatgtggcacaacaggcaggcgcttcatccccgtggtacttactgctgtatgctgtggttatcacactagcccttggcgtgatgcgtttcatctgggtatggctgtccataaccctgacggtatttcgtcagaaacgacggggtaaggtcacgactgcgcgcccccggttcactgcgatggccgtgatggctctcgcgggtgtgaagggttcagtcactctggcggggatactgacgcttccggtcgtactggatgacgggtcaccattcccgggcagagagttgcttatctttctctcaatggcggtgatcctgttatcacttattgtggcagctgtaggacttcccttcatgacacgctctctcggagaggatttgcctcatgacgccggtagcggcaatatcggtgcagcattgactgaagcggccatcaaccgactgagcgatttgcttagccagcctgtcgatgatcccgatgagcaggcattacgagctgatgccggaaatatgctccttgagacataccagcggcggcttcactacaactacagcgatgaacaaaccgacgtcggactggagttgatgaaacgcaccaggcttgagaagtttatgcaacgtgaggctattatcgcgcaacgtaatgagcttttccgtatgcgaaaggcccgtaccatcagcgataccgaattccatcagacgctcagggcgatcgacctcaaagaagagagtcttcattaa

SEQ ID NO: 186938 - DNA, 603 bp, Klebsiella oxytoca
atgacaggggctttgttttcactttctgctggtggggcggtgtttgccgcctctgtgattattctcattctcagtgctatgctatacgacagtttaactagaagtcgtgttaaaaatacacaattatatgaatttacagcttcgcctgaagtagcaattgccactcatccagacggagctgttctgctctatcttgattttgacggcgtcctgcatcgaaggatgaatgagtcctttgaaagaatgcccctgcttgaagaaattttaactcaatgtccagaaatcctcatcgtggtctccagcagctggagggaaacgatgtctttagaggggctaaagcatcttttcccagtatcataccggaacagaatcattggcgttacaccttcacttcagagtgtaccggatagtgaatatatccggtacagggaatgtctttcaaattcccaacatctgggtatcagtaattttattattattgatgatgagtcgcaccgttttccacctgggtgtgaaaatctggtgtcaacaaaatatagagaggggatgactgacgaaacagtatccgaagtcatcatgaagtatcgtcagtatttctcctga

SEQ ID NO: 186939 - DNA, 519 bp, Klebsiella oxytoca
atgttcgaacaaaataatattttctacagtatgttacttttgattattttcttatcgtacatgctttataaaagcattaagtcaaaaaaaagattgcataaccggtatgaggaagtctataaggcttttcatctggctgattcagagtacaacggcggcatgaaagacgcttacagaaacttatctttaagcaatgcgcatttgaagtttttggcagattacttcaaccaggagacggttaagtttgatggcagaagcataatctgtgaaagagaagatgacgttcagtatgttttttcacttatgtcggaaagtcatttttggttgaataaagccatgaaagacatagatacagtagttaataatacagatgtaatcaaagatattaaattatcagtgcctccgttttcttcattgggtgggctgaaattaatagcggatgaatttaatcttgaaagtaaagaatttgatggattttccactcttaaaatcaagtatgaagagcaaaagggggagtga

SEQ ID NO: 186940 - DNA, 957 bp, Klebsiella oxytoca
atggaaaataaacaaagctctaaaaaacgtactttgattaatattgccctggtggttggtggctttgtagccggttcggtgatctggggacctggcagtaacctgatgaaatcgaatgatcgtactaatgagtctatcaataaacagtctattgagcagactaatatgatcaatacttcagcacttacagagcctcaggcgaatcagccagccggtttagtcctgacagaacaggacaaagagttgattggaaagacggcggctcaatatttgatcgaccatcctgaaaacctggttgaagcaggtaaacgcctggagtctaaccgcgatggggagaaaatgtctaatgtagtgaatacaaaagacgttctcctggaatcaacctacacaccaaactacggtccggataatgcggatgtagccgtaatcgagttttttgattacatgtgccacttctgccagcaatccagcccggttcttgagaaggccattagcgcgaacaaaaatgtgcgaacgttctttaaagatttcactatctttgcagaccgtactccgatttcaggtatgggcgcgaaaattggtctttatattttccggacatacggtcaggataaatattatgagtttcataataaattaatgaacgagaccggaatagcgcttcaggccagaaaggattactcaccgaaaaatctggcaacgctggttcatgggctggggtataaagatattcttgacgaacacggtaacttccttctggctgcagagctacgtgaccagctccagaatgtgcttgatgcgaacatgatgctggctgataagctcaattatagtggtactccggtattcatcgtcatgaacattaagaatccgcaaaacaaaacgaccacagtaatgcctggtgctcccgaactttacaggcttcaaaaagccatagaccttgctgccggtaattaa

SEQ ID NO: 186941 - DNA, 342 bp, Klebsiella oxytoca
atgggattaataagaactgtggtttatgtgggtatcatcggcggtatctttgcctattcacaaacaaaagacagccttgaaaatatttcattcccggatgcggagttaccttcatcaatcaccagcaataacctgatgaaatcatcagggctgagtgaccattacgcctcactgaaaaacagcggccttcctgaacgaatgtccgcattactggatgatgcgcctgatatccggggttcagtcaatgatgtcgtcatgacggccggaaatatcgatatccagaaagttattcaggatgccgtggatgaacttgaaagcagcagccgaaagaccagtaaataa

SEQ ID NO: 186942 - DNA, 330 bp, Klebsiella oxytoca
atgaagaaatttatggcaattgcagcggtcgtggttgtgtcattttcagcacagtccagtttttgtgatcagagcggctgcaaagttacttttgttgatgtcgatgtcgacggtaccgaaaaaccgatcatgctgcttgatgctgcgggaactccgacgaagagttctatgggccgggtgtttgatgatgtaaacactaccggtaagaaaatacagaccgaaatgaactcatcagtatcagcatcagcatcagcatcagggcattcagacaaatcgtcgccagtgcaaattaacagggtgttaagcccgataactatctacagcgcataa

SEQ ID NO: 186943 - DNA, 729 bp, Klebsiella oxytoca
atgataaaacctgttgttattgcactgacattattatccataccagcgtatgccgacgttgaattacccgctgaagttaaagtaaaactggaagccctcggtattgatgctgtcactgctgaaaaatcaccggtggaggggatttattcggttttctctaaagaaggtaccagttatgtcacttctgacggtgcttacatatttaccggtaatttattccgggtgaaaggtgctgatgttgaaaacacaactgacgagtttatcagtaaagggatgagagcctatattgaaaaactcgatactatcacctacaaagcgcctgatgaaaaatatgtcatagggatatttactgatatcacctgtggtttttgccagaagctacataacgacctgcagtcctatctggataaagggatcaccataaaatacatcgcataccctcgggccggtatgaactccatgattgcgcggaacatggcttcagtctggtgtacggaagataaaccggccgcgttgactaaagcaatgaaaggggatggcctgcctgataagcagccaacaaaagcctgtatggattcggttcaggaccagttcaatgcagggaacatgttcagactttcaggcacgccagcgggtttaagcctgaaaggggagcctatggtatttgcgggtttacgagacccggaccaaatgcttaatagcctgaaaacggccaatcagaaaaaataa

SEQ ID NO: 186944 - DNA, 600 bp, Klebsiella oxytoca
atgacaaaatttttattgggcgcagcgttgttcgcaacattcaccgtcaatgccagcaccacattcaatccgccccaggatcgcccgaggccccaaaacgtacctgaggcggtaaagaaccagtgtttaacggatgcagcccgtttttttggtatcgacagtgacctggttttcactctgtttgataatgaaggtgggaagattggttcatttgtactcaacaccaatgggtcatgggatattggcccgatgcagatcaattcatcaaatctggctgaggtaaaatctcacttccccgcgataacctggcgtgagcttgcttatgatccctgtgcttctttctgggtgggtacatggtggctgcaccggaaaattatcgaccggaaggggaatgtttttgaaggaattgcagactataacagcagaaccccacgcgtcagagccaactatattttcaagttcatggaacgatataaccggcgtcttcagcgtaacgggaaaatgatgcaactcaatgcatggacagggcttgatcgcgtaaaaccacaaacgccagagatatcgggtaagctcgcgaacaactcaccgccacaaccctga

SEQ ID NO: 186945 - DNA, 3354 bp, Klebsiella oxytoca
gtgaaggaaagcttacaaaaggtgcaacatgtcttccgcttctggaaagctattgaggcactgacgccacaaagtattgataaagaaaatgctcgtgacatagataatccagcgtacatggtgacattcgacgggctgcttccctggacggatacagagcatgttcgaaaacccgtcccctcaggcaaggtctggcgttactccgctcaatgcgggatctacaatatttcggtcgtagccgatcagcttgaagaaaagcttggtgcccatgatgacgtcgctgaaagtcggaacactggcaaaagccggttgttcgatgtcagtttcagcaataaaggtatcccccaggccacatcattcatgttgtcaatgcccgcatgggctgcttcacaggtgttaaatcatgaccagggtgtgaaagcgttgaaaacacccgtcagtccggacttgacggggcttcccgcgctgtcagatacactcccgatgatggacagcggattccctgaatttgatcagctgaccctgcatattatgcaatggattgatgctgaagctgtccgtttacagcgtgacgagctggcagctgatgttgcctggattaagacgcttggcgaactggtactggagaagaccggtttcccttatgaggcaatggagcagcatgctatctgccttgttaagtgcgccacagtcaggatctcacagaatagccatgaggtgaatctctccgttgagagtaccaaaacgaactcagccagcagcagaacagaggggaaaggaaaggaaaaaaccaaaagtgctgtaccggatgatctgataaacagcttttacattcatgagatggaggcgctcgaaggacactggaaaaagaaaaatgttggcagaggtttctttgactacatgacgtccgtgtcccgggagaacaggcaggtaacggatgttcgaaccggggaggggttagatgctgcatttgacagactgcgtcccacgcaaccgccggtcggcacatggccctctctatatccgttagcgttcagccagcagttagccgttaatgagctgtggcgtaaaaatgctgagacacccggtatttttgctgtcaatgggccacccggcacaggaaagacaacactccttcgtgatgtggtggccgcagtcgtcaccgcgcgtgccggtaaactgattgagcacaagaacagggttttcttaaacaaaggcacttttacatgcgataagaaaaccatccccttctttccgcttcacgattccattgcagggacatccatcatcgttgcctctgccaataacggcgcagtagaaaacatctcgctcgaactcccgggtattgacgctgtacctgaatgggtaccaaaacagtcagattatttcagcgaactggcttcgcacctgatgggtaaaccagcatgggggcttctggccgcaaaactgggtaataaagaaaaccgggaaaatttcctgaatactttctggtggaaaaagcccgatgagcggaatcaaaaaccgacagtgcctccggagacattctcacccgcccggggtgaagggttgcattaccatcttaatttactgaagccgacgcagggagcccgtaaacccgcaatgtcctggtcagaggctgttattcgttatcagaaagccacagtcatcgaagatgaagcacgtcaggagctcgtcaggtattcagaacttgaagaacagataaacaatcaggagcaggcactcatccagtgcggggagagccgggcctcgattaatgccgctctgtcagaacagaacggaatatacctggcgctttcctctgatgttgccggacaggaagaagctggtacccggttacaccgggaactggcggaagccgataaacgcgtccaccagcatgaggcgaataaaccaggcatactgatggcgattttctcactgggtaaaataccgcgagagtggtgggggcgttatcagcgactgaccgatgaaatggattcactgcgtacaacactcgccgaacatattaaggcgttgacgagctcgcaagccctccgtgatgaagcgcacagtcagactgaggcgcttaaatcggagctggcgctttctgtcagcagagagacagcaatcagggaaaaggttgcccgggatatctcggaactggcagaggccaggaccatgatgggggatgcctggccggaccgtaacgcaacggatgaacaaagggaactgtcagcaccatggctcagtaagagatggcgggatacgcgggagaggatgtttcttgcggcactggatgttcaccgcgcatttattgaatctcaccccgttgaaatgtcagcaaacctgaatctggtgagtgactggcttaatggtaaggagataccagataaacaggcagcgcttgcccttgattcactgagtctggttgtccccgttatctccacaacgtttgcgtctgttccgcgcatgtttaaaaaaatcggcaaagaagccattgggtggttactgattgatgaagcagggcaggcccttccgcagcaggcagcaggagcagtatggcgggcaaaacgaacggttgtcgtgggcgatccaaagcaactggagccggtgagcggtattccttcctctgtcgaaggggcacttgcacaatcctatgatattccagccagctggtggccgggtaaaatatcggcacaggtgcttgctgatcaaacgatggagctgggaacctggctaccggatgttgaaaaagggcaggtatgggtaggctgtcctttacgagtacaccggcgttgtgacgatcccatgttcagtatcagtaataatatcgcctacggcgggctcatggtgcatgggaaaaagcaaagcacgtcgtgtttgcctgacagtggctggctggatgttaaaggtaaatcatgtgaagggaactggatcgctgaggaaggtactgcagtagaaaagttacttttgacactgaaagagcaatacggcatagcacctgacgacgtattcctgatttcgccatttaaggactgcgccatgaagctcagaaaactcgcttcccggaccggtttccgttccaaccgaacggggaccgtgcacacgacacagggtaaggaagcggccgtggtcgtgcttgtgctggggggaaacattcagaaaaatggggcaaagtcctgggcggccagcaaacctaacctcctgaatgtggccgtgagcagggccagacagcggctgtatgttatcggggagcgttcactgtgggagaaacatgcctacttctcatccctttcacgagagttagggccactgcaggaaaagatgcataagaatgctgtgacagagccctga

SEQ ID NO: 186946 - DNA, 273 bp, Klebsiella oxytoca
atgatgtacgaactgtttggatttgaactttccgacttcaaagggctcttctatgtcttttgcctagcagtgcttgtatatcgttacatcactgtaggacgcaaatacccgctcttcggtacccgtgagaaagataccgatagggttgtctcggaatcgtcaaacaatacttatcgtaatccggttgaatatgatcaacatgatattacagatttacgttcgactgaatattggtgttatgaacaagaacaaaatcagagacatgatgactag

SEQ ID NO: 186947 - DNA, 3114 bp, Klebsiella oxytoca
atgagaaatcttgggcagatgaatcagtttgttgcgccgcaacaagaggataatggtcaacaaactgactttatcggcggtgcggccaccacgctttttggaagcgcaggtcaggctcacaatatcacaacagctgcattcgttcttaatcaggtcgacaaaggcgttctccagtacaggaaggcgctaggtatagcggcagactatcagctcttcgaagcgagcatgaaaagaacgaatgcaatggttagtcaagggcagctctggctcaacatttcaggcgctgcaatatcgttcctggaaatgttcagctacatggtcgccccttttgccctgattgcgatcctgtttttagggggggaaggtatcgcttcagccgctaagtatctgcagctaattgtattcgttaacatgtggccgataacggcagtcatggtaaacgcatacgtgaagatggtactgaatcaacagtttgacacatggacatcgctgggggttcagaccacgatgaactgggcaaatatggggagcattcaggagacgtacggcagctacctgtctgtggcctcagctctgtattgcatggtgccgatgctgactctattcctgttgaccaccagcattcacccgatgatgggagcgttgaaaaatgtcacacctgatgccccaaacaataccggccacgtcacaccagaggtttggtcggcggggaatgcgggtaaacagtcctttggtgaccagacacacaccgcagccactacaacaggtggtggcatgtcgtcaggagggcttctggattctcagaccaggatgatgccaactcttgggttgggtgcatcgctgagtgatacagtcagagcatcaggccagaactcgatagggaccgacaggacctccactctcagctcaaaacaggcgttaaatgaagcctgggccagtgcaacacaaggtaatcgaacacaaacagcaggttcaacaaaccagggcggaatgaaacttgtcgatgatgtagcggccgggatgaccagaaatctcggaaaagatactggagtatcatcagatgcccttaaatctatggcggcctctgccatccttagcggaatggcagacttaggtttaaatttgggtggtaaaggtggtgcagggaaaggcggtggcgaagaggggggagcaggtttatcaggaaaacttttagggcagatagcagcacgaattcaaggaaacagtcaattatctgacggtgcgaaaaaagccctcactgacaatctgatgagtagcatgaaaaatggtgatggtttttctaaggacatagctaagctggagtccaatgtgatccagaatggtttctctgactctgacagttaccaaaaaacggcacagaagatgcaggaacacgcccaggctgtcactaataaagagagcaatgcattcagtaaaacagatgaacaggcttcacaactttcaatgaatagcagtctgaacattgacggggccaaagtgtctgacaccctgagtaaaccagcgacagcgcaaactgtaggtgattgggcgcaggcttcaggtttaaatcgtgaagcagcagtgggtaaatggaacgaaatgaaagggacattaaatggcagtaacacgctgggagacacgagaaacggcaacgatgcatttgttaaaatgatgtttaacgaagctgaaaaactatctcgtatggattctggtgagactgttgctcataatctgggcgatattaaacaagcctctcaaatgcttaaaaatgctgtcagtatcatgggtgccaatgccgggattatctcgcctgcgacagagaaactggatcagtttgtagggctgggtactggtggcaactatgccagcgggcaggaacaggcacaaacagctccggacacgtccgcagtgccttctgcaggacaagtttctggtaatgtttctaatcagcagggtgctgtaaccggtgggctcgctcagcgagaacaggctgcgaaagcacaaccaacaacggaagttggtggaatgacagctggcacacttaatgagggcgatggcagagctcacgtagctaataccaacggggaaaataacggacaagtccatactcaggcagattcgcaaaaacttcaaagggtcgaagatacgttacctttggggaacgtcaatgagaccatagacaaggctaaacaggcagcggataccgatagtccattacaatccgtagttgcaggcacacaaagtacagttctgggtgatgcagaaacaagtgatatcaatgcctcgactcagcaaacgatgagagacatgcaaacgcatgatatgccgagaagtgcggagactttcagcccgtccgggaacaaagagaaagactccaaaaacgccttaagccaggcggcgttacactccgaagttgcccgcaatcagactggtgaggccagagaaaacagccttaaagaagctgaagcatggcgttctacattcaaccagctatcaggtcaaaattattcatcatccgatgttgaccgtgtttcccggttagctttgaacgggaaaaataatggttatgaaaatgggctttcggatgttgtgaataatgccgtcaacaataccggcaccacggccaccagagtaccgactgggtcctctgattacgagctgggcggagatatgcgcgacagtaacagtagaagcccgaacctgagggataaagggcaggcagccagagaacaggtgtttgatagcaaccgaacagtagcaaaaacgtttactggagccggttcagaccgttatgtcggtgattcaatgaagctagaaaacggttcatccggtcaaacgctcatcggcaacatgagcaacaatatgcagttaagacaggccagcaatttagctgaaaacaaacctggtatgacggacgataaattaacccagcttcgggacgcgcaggacacagcaatgaggactgtccagaataaactggctgaaaacccaagatatgggccagaagcagcagccgcttaccctgcatttatcgcaagcttaccggaaagcatcggaaccacacaaggccaggattttgcgaaagagttcttggataagcatcgaaaaaactaa

SEQ ID NO: 186948 - DNA, 636 bp, Klebsiella oxytoca
atgaatcaccgctatgcactcgaacgtgaggcaattgctgcaaaggaacgtcaactccacgagtttagcatcgcaaatgacaaaaaggaggaagagctgaggtttcttgcctccgagctggtttttatcttggaagaatttgcagataagtgcgcgctggtagctgctgataatggagaactggatcaggaaggcattaccgtggctacagaatatccacctgatttagtactgacacaggttaccggtgactggcgtgtattgccggagacacttatgtatcgaattcgtgaactgccggttctgaaaaatgaagcggtcaggtatgtttcgagtgcttatgaaaatgactggcccccggattattcgcgcacgttttgggaaaggcagtatcagtattcccgtctgggtctgaaagcggtattcgctgcaatacgtctgcggaaaattgctacatttccgccgacacgtcttgattccaccgagtggtccgcattgcccgttctctggcgattatggaagcaggagcgtcaacgtcgcactcagctgtatattctgcatcaacagaatcaggctatgcggattgccttccagcagcgtaccagggacggtaaaaattgcggagagtgccagtga

SEQ ID NO: 186949 - DNA, 936 bp, Klebsiella oxytoca
atgctggcatggatgacctcgtttgggacattaaagcgaattggtgttgagtgcacaggtacctatggttccggtttgcttcgttattttcagaacgccgggttagaagttcttgaggtgactgctccagaccggatggagcgacgcaaacggggtaaaagtgacacaattgatgctgaatgtgccgctcatgcagcattctcaggcatcaggacagttactcccaaaacgcgtgatggcatgattgagtccctgcgggtattaaaaacttgccgaaaaacagcaatatcagcccgcagagtcgctctccagattatccattcaaatattatctctgccccggatgaattacgtgaacagctcagaaatatgacgcgcatgcagctcatcaggaccctgggttcctggagacctgatgccagtgaataccgcaatgtaaccaacgtttatcgcatttcattaaagtcccttgcccgacgctatctcgagttacatgacgaaatcgctgatctggatgtcatgattgcggcaattgtcgacgagttggcacctgagctgattaaacgtaatgctatcggatacgaaagcgcttcacagttgctgatcactgccggagacaatcctcaacggttaagatcagaatcaggatttgcggcactgtgtggtgtcagcccggtccccgcttcttctggaaaaacgaaccgttaccgacttaatcgtggtggagatcgtgctgcaaatagtgcacttcacatcatcgccatcggacgcttacgaactgacgcaaaaacaaaggaatatgtcgccaggcgtgtagccgaaggacatacaaaaatggaagcgatacgctgtctaaagcgatatatctcccgcgaagtttacacgttactgctcaatcaaaacaggcggatcaacagtatcccgataacagcttga

SEQ ID NO: 186950 - DNA, 1263 bp, Klebsiella oxytoca
atgcttgacctgctgaatctgccaggcatcaagccggtcgatatgcgccatgaaggcaagtaccttgtgatagttgctgagccggtaacggtcgaggtgccgttatgtggggactgcaacatccctatgcacagacacggtacgcgcaaaaacaagttcatggacacgccgttgtacatggcgcccgtccgccttgaagttcagcgcccgcgctttcgctgtgagtcgtgcggaaaaatgtccatgccggagttgagttttctggatgacaaacgccgagccaccaaacggctggtcgatgttattcggcaacagtgcctgggaaccaccttccatgctttagccgagcaaaccggtgtggcggtgaacaccgtcaagaacatcgctcacgatctcattgaggaactctcccaaaccgttcgttacgaaaccccggtcatcatgggtattgacgaagtgaacctggccggagggtatcgctgtgtaatcaccaatctggcaaccaacaacgtctttgatatgttggagcatcgtactcaagagcatttgaagcccttcttcaaggatttgccggctgctgacaaggtggaatgggtctgtacggatatttggcgacccttcaagcgttcctttgctcagtatctgcccaacgccaaactggtgatcgacaagttccatgtcgtcaagatggcctctgaagccttggaagcggagcgcaagaactatcaggcacagttaagcaaagaagatcgcatttacgtcaaaaagtccattcgctggctcaccctgaagcgacctggcaacctgacgcccgcagagcaaaaggcgctggaggttgtaaagcaagcgatcccagcacttgccatggcctatgacttcaaggaagccttcttctgcatctacgacgaacccgacaagcagagcgctcagaacgcctttgaggcttgggagaacagcctgccgccttatggcatggaggctttcaaaaaactggtgaaaacggtacacaaccattacgacgacatctttgcctactgggatgcgccgttctcaatcaccaatggctataccgaagggctcaacggcttgatcaagatgtccaaccggttaggtcggggttacagctatgacatcatccgtgcaaagacgttgtactccaaagaagcccgcaaggtcggcagtggtattcgagcaggacgaggcaaggtcgagtatggaccgcacattccgacattgttgaagcaggctgaaggtggagagtga

SEQ ID NO: 186951 - DNA, 210 bp, Klebsiella oxytoca
atggctcaggtggaaagcaacacccgtgagcaggctatgaaaggcaacctccccggtgctgtgcagcaagcggttgttcgtgctttgtccagtaatcagaagctggcaacccaggtgctcaagtctgaccgtcagggcatgagcgcattggttgatatggtgtatgacctgctgcgcgaaggcaaagacatcgatctgggtatggattaa

SEQ ID NO: 186952 - DNA, 1137 bp, Klebsiella oxytoca
atgcgtgcatcaaaactcacaaagataggtatggcgaccctgatgttttcttgctctgtctgtgctcaggagagcatcaagctgggcgtgattgaaccgcttactggctcagtggcttataacggaaccgcgtatgttaatggcgccaggctggcgttggcggagtacaacaagcgtacggcagcgaagccggtgcagctggtgattgaagatggacagtgcagcccggctaactccgttaacgcggcagaaaagctgattcagaaagataaggttgtcgccctgcttggcgccttttgcagttctgccaccgcagcggtcatgccgctggcgcaacagtataaagtgcctttcctgaccggcgtctcttcccaggccgatctgaccgaaagaaataatccttactttttccgttccgctgaaaccgatgcgctgttggcgaaagcgttcgctaaaatcctggcggaaaaactgcaactaaaacgtgtcgcctatattggcgtaaatgatgactggggtcagggcagtattcagggcttctcccaggacctcgctacgcacggcgtaaaaaatgtcatgacggaatattttgatcatggcgccaccgatttctacacgctgctggccaaactgcgcaacgctaaggctgacggcgtgtttattgccgcagagactcaggatggctcgattctggtcaagcagctcaaagagtttggtattgatatcaatgtctttggtgtcggctcttgggcaacctcagactttattaacctggtgggcgaggcttcagaaggcatttacgcagcggtgccttatgtctataccttgccgggcgacagcaaccagcaatttgttaaagcttaccaggcgcaatacaagcagtttccggataagtacgccgctgccggctataactccacgcacatcatgctggatgcaataggtcatgcggattctacggatgccgcaaaaattattgccagtctgaaagccaccgattatcacgcccccaatggcaattaccgcttcactgatcaaggccaggcttacgggtttgatgccgcgttggtgcagattcgccagaaagtccctgaggtggtaaccagcactgccgttgaggcgccggagaaaaaataa

SEQ ID NO: 186953 - DNA, 873 bp, Klebsiella oxytoca
atggatctgttcctgcaattttttgctaacggcctggtgagcggcaccttttacgctctgtccgcgctgggcctgacgctgatatttggtttgatgcgcgtggtcaacttcgctcatggtgagttttatatgatgggcggaatgttgggatggtttgtcactcacgcgcttgggctgaactttttcaccggtttgctggcggtcgctatcatcatggcggcgtttggctggctggtggatcggttattgatccaacgcgttcgcggccagtctgaagagccaggcatcctgttaacgatagggctgtcgatttttatcgcgaataccgcgttactcctcgcaggcacctcaccgcaaaaaattgacgggccattgcctaatgccccgatctttatcggaccggttgtattgaccgagatgcgcctgttcgcggtggcggtttgcgccgtgctgatcctcggcgcgcatctgatcatcaaaaaaacccgactgggacgcgcaatgcgcgccacgtttcaggatcccatggctgcgcagctggtagggataaaaatttcccatgtttacgccagtacttttgccatgggaacggtgctggcagccagtgcaggcatgctgttgggcgcgatctacaccacccaggtcaccgtcggtgggttggtgagcctcaaggcttttgtggtagttatcctcggtgggatgggcagctttgccggtgcgattatcggtggcctgttgttgggcatcgccgaggcgatgtggggcggttatatctctaccggcatggtcgacattatcggcttcctgatcgttattgtgatgctggttttccgaccctatggcctgttttcaacacgcgcggagagggcatga

SEQ ID NO: 186954 - DNA, 987 bp, Klebsiella oxytoca
atgaaatttgaacgcaataccctgctgctgctggcggcgctggcggcggcattcccgctgctggtacaggatcaatacctgctgcatattggcgtcatggtacttatctatgcggtactcgccagcagcctgaacctgaccgtgggttatatcggtgaattctcgcttggtcataccgcttttcttggtctgggagcctatgcggccgcgctgctgtccagtgatttcggctggccgctctgggcgaccatcccgatggccggtttgatcgcagcgatagcgggtgccttaatcggcgctatcacgctgcgcctgcagggaccgtattttgtgattatcaccctggctttcgctgaagtgttgcgcatcatagccaataactgggtggcagtaaccaatggtccgatgggcgtggcgggtattgctcagccgcactttatggcgggactggccgcgctggatattaagcgcagctactactatctggccttgctgattgccatgctggcgctctacctgatctatcgctttgtttactccagccaggggcgcgccgcggttacggtgcgcgaaaatcgttatgtggctcagtcggtgggcatctggcccttcgcttatgccatgaaagccttcgtcctcggtgcgtttctcgctggcctggcgggaggtttttatgcgcattacatcacctttgtcggaaccgacgtattccagttcagctttatggtgtcgatgatcatcatggtgctactgggcggaaaaggcacgctggttggaccggtcatcggcgcgctggttgtcacgctgttaaatgaatatctgcgtgaagcccaggagctacgtatgtccatcttcggcctaattgttatggccgtggtactgtttcttcccagggggctgatgggttttctgactcagcgccgggagcaacgcagccgggccgcgacggcaaaaacgacccaggcacagcaggagaaaaccgtatga

SEQ ID NO: 186955 - DNA, 783 bp, Klebsiella oxytoca
atgagcacctcttcgcaacccacgctggcagtacaaggattatgtaaaacctttggcggcctgaaagcggtgcaggatatcagtttcgatattatgccgggtgagctggtcgggctaattggaccgaacggcgcaggcaaaaccacctgttttaatttaattaccggcttttataagcctgatggcggccgggtgctgttttgtggagaagagatcaccggtaaggctcctcacacgcttgcccgccgtgggctggtacgcagctttcagaaaaccaacgtgctcaaggcgttaaccgcgtttgaaaacgtgctggcaggacattatctggcggccaggcaatcgttaatggatatctttttgcctcgcgcacatgtccgtcataccgaacagaaagtacgcgaaagcgccgccagcatcatcgacataatgggcctgtcacatcgcatcaacacgccagccagcgtgctctcttgtggggagctacgtttgctggaggtggcggtggcgctggcggcaaaaccccggttgctgatgctggatgagcccgccgccgggttaaacagccaggaggcgcgcgtatttggtcagattttacagcgtctgctgggaacccacgtggagtcgatggtgatcgtggaacataacatgcatctgatgatggaaatttgtcaccggctggtggtgatgaactttggtcagaagttgactgagggtacgcccgaagcggtgcaacgccatccgcaggtgatcgaagcttatcttgggaaggcgagcgcatga

SEQ ID NO: 186956 - DNA, 726 bp, Klebsiella oxytoca
atgaaaagttctgaaccctgcatgttaaaaatcgaaagcttacaggtggcttatggcaacgctaccgctctgcatggcatcgatatggaaatccagcgtggcgaaattatcgccttgatcggcgctaacggcgcggggaaaagtactacgctgcgcaccatctccggtctgttaaagcctaaaaacggcacgatttactggcagggcaacgcgataaatggctggtcaacggaacgtattgtcgccgcgggtattgcgcactgtccggaagaacgccacgtctggccgaccatgagcgtgtatgaaaacttaatgatgggcgcttatctctgccgttcaggaaaagaagtcgaagagcggatcgggatggcctttcaccgtttcccacgcttacgtgagcggcataagcagctggcgggtacgctgagtggcggtgagcagcaaatgttggccatcgcacgtgcgctgatgtcggaacctgagctgctgttgctggacgagccgagcctcggattatcgccacgtatggcagatgaggtctttgatgtgatccgtgacattaatcagcacggggtaacggcgttgatcgtcgagcaaaacgtctataacgcgctttctgtcgcttcccgcgcttatgtggtggagaccggacgtatcgccactcatgccatggcggcgagcctgcttgaggacaaagagttactcaatgcttatctgggcgggtaa

SEQ ID NO: 186957 - DNA, 1230 bp, Klebsiella oxytoca
atgaaccataaattacgagttggaatcattggcggtggaattggcggtgcggcgctggcgcgcgctttgcagcagcaaggtatcgatttccacctgtttgaacgtgctcccgcgtttggtgaagtgggggcaggcgtacagatgacgcctaacgcggtaaaagtgctgaaagcgctgggactcacagagcctcttaaacaggtaggttttttaccggaagcgatggtaggacttaactgggaaagcggcaatgaactcttccgcacgccgctaaaatcaacttgccccgaggtttacggcgcggaattttatcatgtccaccgtgccgatttgcatagcctcctgacgtcggatattcccgccgaaaaggtcacctttaatgcgcaatgcaccgccgttcagcatagccccctgtcagcgacagcattttttgctgacggtacctcttttgaagcagacctgattgtaggcgctgacggcatccattctgcagtacgcagcgcgctctggggtgatgaaaaaccgcagttcaccgggcatatgtgctggcgagcactggtatcggttgctgagcacccattgccgtttgtcggaccttacgccgccttttggatgggaccttcagcccatgtcgttacttactatgtcaaaggcggcaaggcggtgaacattgttgcggtcactgaaaccgcagaatgggtaaaagagtcgtggaccgaagccagctcaaccgatgaattattaaacgcttaccagggctggcatccggatgtgattcagctgtttgaacgcaccgatccgactcagacctttaaatggggcttgtttgatcacgatccgatggcgcagtggtctgttcctcatgtcacgctgttaggcgacgcagcgcacccaatgctgccatttttatcgcagggcgcggcgatggccattgaggatggctatgtactggcgcaggcgctggcgcatttcggcggcgatgttcctgcggcgctggcagcctatgaagctgaacgccgtccgcgcacgtctcaggttcagctccaggcccgtgaacgtggtcgcacctatcatctctcctcgccggaagaattacgacaacgagacctcgcgtttcaacaggagcaggcgaaaaaccctaatgcggtgggtatccgcgctgaatggatttacgaatatgacgccactcgctgtcgcgagcgatttgatgagacccgagcgcacgcgtaa

SEQ ID NO: 186958 - DNA, 753 bp, Klebsiella oxytoca
atgaaaaaaacctttcgtatcggacaaatcgttcccagctccaacgtcacaatggagacagaaatccctgccttgttgcgggctcgcgaaagcgtgggcgaagagcgcttcacctttcattcttctcgtatgcgcatgaagcatgtcaccagggaagaactggctgcaatggatgccgacagcgaccgctgtgcgctggagctttcggatgcgcgtgtcgacgttatgggctacgcctgcctcgttgccattatgtcaatggggcacggttaccattgtgtctcgggatcgcgcttgcagcaggtgacagcgaacaatggcgctcccacgacagtgattacctcagcgggtgcgttgatcgaagggctgaaggccataggagccagaagggttgctgttgtggctccctatatgaagccgctcaccgaaatggtcgtcggctatattcgtcacgaaggtatcgaggtctccgattaccgggcgctggagattcaggacaacctggcggtagccgcgcacgatccgatgaatttgccggatatcgttgctgacatgaataccgacgatgttgatgcggtggtgttgtcggcctgtgtccagatgccttctctgtccgctgtaacgatagttgaagcccgtaccggaaaacccgtagtgaccgcagcgatagccactacctggcagatgctcaaggcactccatatcgaaacgcgggttccgggcggcggaacgttgctttccggcgcttactga

SEQ ID NO: 186959 - DNA, 816 bp, Klebsiella oxytoca
atgacgatcaacaccagaacaaacgaaacccaaggtggtggatacaacgttcacgccaatggcatccgccagcacctgctccattatcctggacccggcccgcagttattgttaattccggggatcacttcaccggcgataacctggggattcgttgctgaacggctagctgaacgctttgatgtacacgtacttgatgtgcgtggccggggattgagtgaggcaggggagctggattattcactcgatgcgatggctgccgatgctctggccgtgatcgcagccgccggccttatgtcaccggtaatactgggccattcgatgggcgcacgcacagccattcgcgcggcacggattaaccccactgcgattggtcagctggtactggtcgacccgcccgtttcagggccggggcggcgcgtctatccctttccctggaactggtacgaagattcaatccggctggctgcaaagggctgttcgggagaagagatgcgccagttttgtccttcctggagcgatgagcaaaacgctttgcgcgctgagtggttgcatacctgccagctctctgcgatccgcaccgcctatgacggtttccacagcgatgatatccatgccgatctggccaatatcacgctacccgttcgcctggtggtcgccggtggcgccccggtaatcgagccaaatgatgtcgcagtaatccaggcgctggcgccgcagaccgaggtcagggtcgttgagcgagcgggtcatatgattccgtgggacgatctcgaaggctttctcggtgcggtcatggacctggaaatccgttga

SEQ ID NO: 186960 - DNA, 1032 bp, Klebsiella oxytoca
atggatcaagcaagctttaccgagatctgcctgcatcagttaaaaatgtccggcgtgcacgagggtgaaaagcttgtcgtgctgacgcaaggcaacgaacgcctcgagtacgctgacgccttcatggcggcaggacagcgtctgggggcgaatatgtatcatatgcgcctgcctgccccgagaccaacgggaggctggaatgtaggtgtcacggggttggcggcgttaccctgggcagttgaggcgctcaaacaatgcgacatgctgatcgactgcgtctttcttctcttctcgccggaacaattcgcgattcaggctgccggtacgcggatcctgacggctgttgaaccgcctgaattgttagcgcgcatgctgccctatcctgagctgcgtgaaaaggtcgaaatcgccgcgggtatgctggaaaaagctaatgttatgcgcatcacctctccctatggcacagatgtgacctatcagcttaacagctatcccaccgtagccgaatatggctgtaccgatacgccgggacgctgggatcattggccttcaggcttcgtttttaccggtggcgacgatgacggcgtcaatggtcagattgtcgtagcccccggcgatatcctgctgccgcaaaacatctatgtgcgtgagccaatcacttacaccattgaaaaaggctggataacggatattcgtggcgggcttgatgccgaactcgttaaatcttacatggcggctttcgacgatccgcgcggcatgggcatgagccatgtcggctggggcatgaatccgcaggccagctggcacaacatgacgccgggcgcatttcccggcggtatggggatggaaccgcgcagctactatggcaacgtgatgttctctaccggacccaacaatgaacttggcggtccgaatgataccgcctgccatctggatattccgatgcgtggctgctcgctgtttctcgatgatgaagcgatcgtgattgatggcgatatcgcggtaaaagagattcagatgcagcgttactaa

SEQ ID NO: 186961 - DNA, 693 bp, Klebsiella oxytoca
atgtcccaggagacgatctatgatcaggcgggatttggccgcgcagtaccgcgcggcgagcgtccggccatcgtggtagttgacttcagctatggctttaccgatacccgataccccacagctgccgacatgcgcgcgccgatcgcggctacccggcggctgaccgatcgtgccagagccgctggcttcccggtgatctataccacaatcgcttatcatcccggcgagctggaacaactgccctggctgaagaaggccaccggtatggcggcattgctggcaggctcgcgactggccgacatcgatgcagcaactggcattcagcctggcgatacgattgtgacaaagaagggcgcgtcggccttctttggcacctcgctggcagccctgctggccggtaccaggaccgataccttaatcgtgacgggtgcaaccacatcaggatgtgttcgcgccagcgtggtcgatgccgtgcagtccggcttcaacgtgctggtcccgcgtgactgttgcggcgaccgggcagcgccaccgcatgaggccagcctctacgatatggatcaaaaatatgctgatgtcaccgatgccgctgagattctgagctggctggattcgctggccgggcgtacagccgccgcaagcacgggcgcagtaccagacaagtctgtttcatatagcgcagaaaaatgctga

SEQ ID NO: 186962 - DNA, 717 bp, Klebsiella oxytoca
atggataacagagaaattgggggacgcaagggcgtagctatacgtcgcggccgtccgcctaataaaaacaaacccggcaggccagagggaaaaaataataatgtaaaagatgaaatccttgatgccggagaaattttatttgccgatctcggttatgccggcacgacgctgcgagaggtttcggaagcggctgaggtgacccaggcgttagttatctattacttcggctcaaaatatggtttgttcgaagcggtttttttacgacgcagcatgcgggtttccgaagagcgtatggcgcgcttacaggcgctggagcaacaggatacgatgacggtagaagcgatcatgcacgcttttctgaaaccgacgctgaccttacgcgaaaccaaacagggacgcgcgtttatccgcctgcaggcgcgtttgcatactgaaccaccagaaatctcttatggtctgcgcaaccatgcttatgacaattccaccaaggcgtttgtcagcgcgtttatgcgtcagcttcctcatttatccgagagcgaagcgtattggcgcatgacgatggtcattggcgcttacatgtacaccttctctgatacgcatcgtctggaagaactggcgccccagatctgtaacacgcaggataacaacgagctgctggaaaacattatgcgttttgcctgtgccggtatgaaagccaccggtcagctcgctccctga

SEQ ID NO: 186963 - DNA, 438 bp, Klebsiella oxytoca
atgctgacggggaaaattggtgaagatccgggatacgatccgttgcagttcatgctggatgaggcgcataagcgtggcatgaaagttcatgcctggttcaatccctatcgcgtatccgttaacaccagggcttcaaccgttgcggaactcaatcgcacgttgtcgctgcatccggccagcgcatttgtgctgcatcacgactggatccgcaccgcaggcgatcgctttgtgctcgaccctggcatcccggtgatgggctataccacctgggggtgcattgacctggtggcggcctccacgggtgaaatgagcaagcgttacggcttcgtctacgttgacagagacgaccggggtgccggcaccttagcgcgcaaacgtaagaaatctttctggtggtataaaaaagtaattgccagcaacggccggggcttagactga

SEQ ID NO: 186964 - DNA, 141 bp, Klebsiella oxytoca
atgtatcggataaaacagctgttgggtggttcactgacgctgcgtgattatgatggtcaggtggcggaggctatggccatggtgcgggcactgaacaaaatgacgaaggcaggcataccagaaagcgtgcgcattgcctga

SEQ ID NO: 186965 - DNA, 795 bp, Klebsiella oxytoca
atggaacaattacttgctgattataaaaaaggaaatgttatcctttttgttggtgctggtgtgtcaatgaacttaggtttgccatcatggagtcaattggttgatcacattgcaactgagttaggttatgacccagatatatatcgtacattcggtagtgcactagagttagctgagtattacaagttgaaaaaaggcaagatagggcctcttagaagctggatggatagaatgtggcactctagcgatatagatatcaataagtctaaagttcacgagtacatagctaaagctaatttccctattatatatactacaaattacgaccgatggattgaaactgccttatcaaactatggtaaagagtatacaaaaatatcatcagtttctgatattgcgaaaatagataataataagacacaaataatcaagtttcatggagactttgatgacgatagttcaattgtattagatgaaacaagttactttcaacggttagagtttgagactccattggatataaagtttagatctgatgttctcgggaaatcagttctttttattgggtatagtctgtcagatattaatatcagactactattttataaattgtccaagctttggaaagagcaaaagttagaagaagcacagccaaagtcttatattttcttaccacgaccaaacccaattcaagaggaaatattggaacagtggagaataggcatgatttcatcagaaaacgataatccaggcgagtctttggaagagtttttgaagaatttcgtattagtatag

SEQ ID NO: 186966 - DNA, 555 bp, Klebsiella oxytoca
atgaacattcgattcataaccagaaatagacataaaattaaagaaataaatgaaattctatcaggtacaggagtagctgtattagcatctgaacactctatagatgaaattcaaactgaaaatgtccatacgttaattaaagataaattattaaaagcatttaacttagttgggagaccggtctttgtcgaacatactggactatatatagaaagcctcaatggtttcccgggtggcttaacgcaaatattttgggataagcttcaagctgataaattttcacaattattaggaacaagtgaaaaccctcgtttagttgctaaaacaataatcggctattgtgattcgatgaaaatctatattttcgaaggtgaaactcaaggtacgatatctcctgtgccaaaaggccctcgagattttcaatgggattgtatatttattcctgatggcgaaagtgagacttttgctgagatgggggacaggaaaaatgaaatatctatgaggaaaaaagctttcgataaatttaaagaatatctattagagggaggaaaataa

SEQ ID NO: 186967 - DNA, 234 bp, Klebsiella oxytoca
atggttaatcatttcgccaactggatgaggatcgatatcagagactgcacctgtcaaacgattactaataggacaaacctcaatgcaaatgtccagttctctaatcaaatccattatctccggagatcttataacagcagtaccatgtccgatacgatcagctccataactaattatggcattccttatgttatcagcatttccagtctcacccgcatgaattgttatgcctag

SEQ ID NO: 186968 - DNA, 1032 bp, Klebsiella oxytoca
atgccgatcatagcaccaattccccgtgacgaacgacgcctgatgcagaaagctatccataaaacgcgtgataaaaattatgcccgcagactgaccgccatgctgatgttgcaccggggcgagcgcgtcagtcatgtggccagaacactctgctgtgcacgctcatcgattggtcgctggattaactggttcactctgtctggtgctgaaggcctgaagtcattaccgtcaggacgtggcaggcgctggccgttcgaacatatttgcgcattgctgcgtgagcttgtgaagcattctcccggcgatttcggttatcagcgttcccgctggagtaccgaactgctggcgataaaaatccgtgatgtcaccggttgtccgctacatgcctcaaccatccggagatggttacctgcagccgggctggtatggcgcagagcagcgccgacactgcgtatccgtgacccacacaaagaagaaaaaatggtcgctatccatgaagcactggcgaaatgcagtgcggaaaatcccgtgttttacgaagatgaagtggatattcatctcaacccgaaaatcggtgctgactggcagttacgcgggcagcaaaaacgtgttgtcacaccgggccagaatgaaaagtactatcttgccggtgcgctgcacagcggtacgggaaaagtcagctacgtaggtggaaacagtaaaggttcatgtttatttatcagactgttaaaacatcttaaggcgacataccggcgggcaaaaacgattacgctcattgtcgataactacattatccacaaaagtcgtgaaacgttgcgctggctgaaagcaagccagaagttcagggtcatttatcagccggtttactcgccatgggtcaatcatgtcgaacggttgtggcaggcgcttcatgagacaataacccgaaatcaccagtgccgttcaatgtggcatctgttgaaaaaggttcatcactttatggataccgtcagcccattccccggtggaaaacacgggctggctaaagtgtag

SEQ ID NO: 186969 - DNA, 486 bp, Klebsiella oxytoca
gtgtcgcccaacaggctccagcgacagttcaatccggatgctccggatgagcgttgggtaacggacataacctacatcaggacccacgaaggctggctgtatcttgccgtggttgttgatctgttctcacgcaaaattatcggctggtccatgcaatcccggatgacaaaggacattgtcctgaacgcactgctgatggctgtatggcggcgtaatccccaaaaacaggtgctggttcattcggatcagggcagtcagtacacaagccatgagtggcagtcgttcctgaaatcacacggcctggagggcagcatgagccgtcgcggtaactgccatgataatgcggttgcagaaagctttttccagttgttgaaacgcgaacggataaagaaaaagatctacggaacgcgggaagaagcccgcagcgatatttttgattacatcgaaatgttttataacagtaagcgtcggcatggttctaaataa

SEQ ID NO: 186970 - DNA, 1425 bp, Klebsiella oxytoca
atgaagggggctacagtggctacttacattaaaaaagtaactttcctcaaaaagttacttttatcggccatgttctttggcgtgttctccatgcaagaggtccactctgccaacgtcatggagggcatattcaaaggtatggttgcctccacagatccggcaactgtccgaaccgcatcgagagtaggggctgttggggggagtttttcttacaggcagcctcaagtcaacactaacctcgtaaatgtgagtttccctaaagctagtgtcggctgtaacggcatcgatatctttctgggcagcttcagtatgatcaacggtgaccaactcgtgcagattgggcgtggcatagcgcagggctcagccgtctacgcctttaacactgcggtctccgcaatttgcgccgactgcgcagctattattgccaacattcaggacaaactcgccgcgctgaacaaattcgccaaagacagttgcaacgcaacgtacgaatttctacagaacgggctgggtactccgcaggagtttactcagaatattgggctcggcggcggcgctgttgactctatggtgtccggtcttttcccggatttcggtagcaccatgagtcagtctgccagtgacgtaaacaaaaagaactatgcaaaagatccagaggcctttaaagaaaaatatgcgggaaacattgtctaccagggcttcatgagtattgataacggcaatatgaatgtaggtggtgtgactgaattaacgggttataaattagctgaacaaatcatgtcactgacgggtacgcttattgtcagttgggacagtaacggtgaaaactctgcgataacaccgatcccaccaacgatgaaagcttcagacttcataaaaggcactggttcaagcaatgttaaaataaatgtctgcaacccggcacctgatttaagcagcaacaagaaagcccagtgtcttgaaatgcgtcaggattctacacaattcaaaggtctttctgaaaccattatagagacattacttgaagttcagcgggctgtgagaaatgacactgaattgtcacaagatcaacgtcgattaatcggtatgttgggaataaataatatcataccaaccctacagacgttgtctgctgctgagggcgttcagtacatcaatgatatcagtacgatagcggcgaaaaatttcacgatcgagctgcttagtaatgtccaaaataaaatgacaaatatgacgcttccttctgaggcgatgacatcatttaaagaccaacttgaaaaaataaaccagacattcagaaaccaaatccgcagtgcctctgaagtgcagtccattcagaacacagaggaaaaaacagttctggcctactgggatatggcattcgttaaaaaacgcacttatggtgatagcgggaacgggggctga

SEQ ID NO: 186971 - DNA, 1044 bp, Klebsiella oxytoca
atgcagatcacaaaaaaatttatcctgaaaaccatcattagctcattgctggtgctttctacaacgtcggtggccgaaactcagtatgccggaacaacaccatttgtttcaggccagtcactgaaaaaaggctttttctggtataacgacaaagaacctgttgaggaagaagaacaacaggaccaacaaccattatcaggttctccctcccataaccaaaatgaagaactaaaacttgattcacgctggctcaaagaaaacctgctgaatcttcgttttgcggcgatggacaatccaaccgatgagaatctgtcccgctattatactgctaaccgactcatgatggatattgccacccgcttctctgaccgaaccagagactatttcattaataatcccatgatgtcagaaaaaaggcgtcaaccaaccgagaccgttgcattaaatgcgcatcgcgctggacttgaggaaaatcagcaaaaagcgctttcttccatattccagaaaagtggtcttttcttcttcttccaaagcacctgtcagtactgtcatgaacaaagtcagattctcaatttcatgcagaactattatcacatcgatattatgccagttagtattgatggacgtcctttacataacggcatatttcctcgttatggtcgtgccactatggaaatgatcaaacagtatgccattacggaagttcctaccgtttatctgatgtcaaatgacggatcccaggcaacaagagtaagtaccggtctggtctcagcagaagagttaaagaacacgattatcctggccgcaagaggaatgaacctgttggacgaagcatcattccagaataccctcgatattaaaaaacagtatgtcctcggtgacagggatgtactgacggttaataagatgagttatgagcaggatccttatcttcttcagaacataatggataaaaaactcagcgaatatgacatgccgacgaccgataaggttgatgcaggtatcactgcaaatgaagggggctacagtggctacttacattaa

SEQ ID NO: 186972 - DNA, 531 bp, Klebsiella oxytoca
atggctataaagaaaaatgaagtcagctacctgaaccagatcgcaagcgcgtataaattagtagaattcgatgccaataagtacacaatagcgcatctctatggtcgtaaaattgcggacaggctggagtattccagaacggccagttcaagacggggggttggatcatggcttggagataagtatgccatgctactttctaatgtcgtcgtcaatcacgctattcatattttcggttatgatccacaaagacccgatgaatcaacgaaagaaatggatttcaacgcattaattgatttgttaattgatacgggttattcacctgatatctacccactaaaaatcaacaaaatcgtcgatgttcttaatgggatgtctgaagcagactataaagatttctgtcttgtctgcaacaagccctacatccattcaccatccggttttgactcctgtccgacatgtagtgctaaaaaatgcaaagtcgctatcatgcgttattcacagtctgttgttccctttgatgaaaagtga

SEQ ID NO: 186973 - DNA, 756 bp, Klebsiella oxytoca
atggtcatacaacccaacgtacagactgacacggtcgtaaaagcttttctccgttcggagttacagttaatacggagtcagcaaaaactgatgtccgtgttaccacgtgaactggcatcagactatcgctatattccagagatccttctcgggcgtttttttcatccgactacggattcccgacttaatcggattgcgcaatcagaggagcggcctggcagcctgttaataccacgagtaaacggacagcaagtttcctggaataacctgataaaacaaattcgcgacgactctcagtacctgaagtttgaaacatacggcaggccttttgacagttcagagcttaaaccaaatgcgtcatgcgaattatttagcggaaagcagtatgtctataaacctgcggatctggagttgtttagaaaaaacatcgtctcaatacagatgaatttccttgtcaatctgtggaacctcgttaggttcaatccggcatttgttcgcgcctatctatcgttatcgaatgacgcttttcagatgctggccgatacagagatgaacgcctttgttgaggtgacaaacgttgttttgtttccacgtttcattcaatacgattctggccgtcgtgatgttaaagtctttgcttgggcctacgagataatgtctgatgttctagatggttttatacctcgtgaaaatattgagaatctgcgcattgaatttagcttaaaagaatcaattgagaagctaaaaacattttaa

SEQ ID NO: 186974 - DNA, 465 bp, Klebsiella oxytoca
atgaattcagaaattattgctcaccaggaaaccgtcattggtaacgctgtgctctatatcgaattgctgaaacaggaagccacccttgtcctagatcagtactggaatgtatggaaagccaggaacaagttgatatcagatacaacctacgcgaatggaggaaaattcaatccaggcagatttgcaccagtgataagaaaagtgggctcatcccaaaaagttactatttcctggaaagatttctcccccaggtttaaaaatcgaattgaacactacggggttctcgttaaacctaaactcggcggttacagtgttagctgttttcctaaagctctggactgggagctggagatgattcaggaaacagaaaagaaaattatacccatccgcgaattactgcatgagtaccatgagcgcagacttgcggacatcaagcgtcttgaaaaactgaagaggttattataa

SEQ ID NO: 186975 - DNA, 843 bp, Klebsiella oxytoca
atggctgaaaatacatcacagagaaacactccacgaactcagcgaaacgtgggcaataatcgcgctttgggcatggtcatcacaaaactcaaaccgctatccagcgtgttttatttgcatttccatgaaaagaaccgcgcccgccttcgccagttcaacgcgatctctaatgcaatttataatatctttcgcctggtcgagtcagacccgacgactggcacaaaagttaataagtggttgacaggcatctatactgaattgtcaggtaatgtaaacacctacaaagtgcagattgataaaagcctttcgaaaattccggtgcaggattcgtcgtttgacgggtacaactacgaggaatttgaaattcgctggaatcatccactgacctacaagttactggatattatctcaaccattaatgtcatgacgcgccaggcacaccagttgtggttattcggtgaaatcacccagcaggtgcatgaccgtattatcctgcagcttttaagctccctgcaggccgccatggattcaattaccaaaatacttgacgcggagaaccgtgcttccggtaaatacgatgcacttccattcatcaaaaacatcaaacgttttaaatctgttgagctgtatatcgccagcctcgaaaccaaagttccggataatccatcatccgaagccatcacgaagggtcctgaaccagaactgcctgatgaccagatgaattctggtgttgatgcaagcaaagctgcggtaaaaacggaacagactgaaaccgcgtcagtcaacccggaaaaggcggctggtaaaacaggaccttccgttgctcctgtcccggcacaataa

SEQ ID NO: 186976 - DNA, 2127 bp, Klebsiella oxytoca
atgaaacgccggagtcgcaataatttacacactcaggagatgctttaccgccctgcgctggagtttcgttccgccgtgatattggtccttttttccatctatgtgcttattgattcatggagtcagacacatggattcagcgagatccccttctattgctccctcgggttaattgcctttgccagctggcggatatggcatggtgttcctgttttcagggcacactggcgtttatttcatcgttctatggatttcctgtctcttgaagattttcgaatgattaacaacgcacattactttgccgatgaccggaaataccagaagctggctacccttcaggagaccggtggcgctcccgcgaagaatccggttaatcgacttttacgcaggaaagaaaaggtggaactcccccagcgtacaacctttttatgcaacggtttcaaatggggaccggaacactcagaacggacctaccaggttcataacctctccagtgatttacatgaagttcagttaccttttgtgctgaatcccatcacccgtcattatcgtaaactcgcgactgacctcggcgggaactattctattttcggcgtggataaaaaggttcctattttcgtcaatgaagataatttctttggtcatacccttatcacaggtaacgtcggtaccggaaaaaccgttcttcagcgacttttgtccagctcgatgcttcatcttgggcacattgtcctggtcgtcgatccaaagaatgattatcagtggaaggcaggacttcaggatgagtgtgatagcctcgggaaacctttcctgcatttccatgttggaacgccatcaaagtctgtttcttatgatgtaagctctaactacgttaaggatactgatctttcagcgcgtatcatgagtatcatttcaggtaccgatggtaaaaatgacccatttattaatattgcagaaggtcttttaaccacagccattggagctttgaaacttggtggtaaaaaacctaccttacaaaatatttactatgcaatacgctcctggcaaggacttttcgttacaacccgaaatgctctgcgaggattctatgcacaccatcttggtacagattggcacttaactgttcagacctctcctaatctgcctatggcggacgaaatgaagcaacttcagggttatttttacaataactactttgaagataactctcccaaattaatgtatggcatggatactgttctggagtgtttcaaatatatcgcgggtgatgaaacgcactactacaaagtcactgccagcctcatgccaatgctcaagcggctgtcgcaaagcccgatggatattttactttcggcaaatgacgtagacaatccggagcggatcatcgtaaacagccacgggctcttcaacagtggcggtgtgctctatatctcgctggatggtctgtctgaccctaagacagcacgtgacctttcgcaactgattacctcggacatcgccgcagaggcgggtagccgctataacacggcttctgatttatcagcagcaccgcgtgtctcaatgtttattgacgaggctcatcaggccatcaatatgcagatgataaatctgcttgcacagggtcgtgcagccaagatagctttgtttatctcgacccaaaccatatcagattttgtatcggaaaccagcgccgatacagctgaccgtatcaccgggctttgcaacaactacatttgcactcgtgttaccgatgctaaaacacaggaacttgtcctgaccaaagtgggccaggccaacgtctcaatgaaccaggtcacctacaccaccagcgcgggcaccaaacagtcacataccgattttaatggttcaatttccgaacgcaaatccaccacgatggtgagtgcaattccacaggagttgctttcaatgatacctactcttcattttatagcctgccttcaggacgggcgaaaaatcgtggggcagatgccgataaccataccgggcaagtcaatgcgcagatcgaccagtttagtcgatatggttatgaaatcacctcacaaactgaaaacgagacgtaatctcaatgttgatgaaatcctgagtaaatcacaaaaggtggtctga

SEQ ID NO: 186977 - DNA, 1089 bp, Klebsiella oxytoca
atggagcgtaaacaggtttcccgggcatctttgctcagtatgaattcaactcaacctaaatatatttcacgcgccaataaggcgctgaaacagtacggcattgatgttgacgatgagtcccttccggaaatactgtcgcgatatgcacagaagcttaccggtgatctttataaggtgtatgcccatgacaccattgagagtctggatgtgctggcccggacgctgtccgaattttttatcatacggtatgccgtcaccatcgtgacgcacgacgataaggaagtgtcttacaactggtcagtctcgcagggccctttcaccggctggctcagtcagctgctggccgccagcatggctaagagccacagggttgacgtccagatcgataccaatcaggaacgcatggcatttatccaggttaactcagagcggctgggatggtacctgttacccgcgtttgtcgatatctcaggattactttcccttttcctagacatgcctgaaaaggttgaatatcaggtgatgcgccgtaaacgaaacggcaaggtgcccgacatccaccagcatgaccttggcattttcgaagaggatgcccttatctccggcctgaaagaaaagttacttttatggagcgggaacctgtgcgatccatctgatgaatacacctctcttttcaaccgggtcattgacctttcaatcctgggcaaccgccaccagccatcgatgtaccgcaagagctgtattattcagtcggttctcgatgagttctccgcgtcggtattgtccctccccgtccggtttaatggaaatgcattatgcgcagtgtggaccccctggtctgagccgtttagccagttctctcgtttacgtccagtagatgaagatacggtttatatgccctccccgggccaggtgcgctggaaaaatgcagacgtgcaccgaaaagtaactttttctctgatatccaggttgatcgcatcagatgaccttgcctgttcgggcattcttcatggctggaagaatcactacctcgacagagcaacgaacatccgtctggctaccatctggaccggactgttttccgattaa

SEQ ID NO: 186978 - DNA, 1137 bp, Klebsiella oxytoca
atgttcaaaaaaaggccacctcaacctgaaacaggttctgttcaggatgtggtatcacgtgaaagtaagaaatttttccgtttgtataaatcgcatgtgttatcaaaaatggtcctgacaataattggtattggttttgctggttatagtggctggtccatgtatcaggataaacagaagaacgggaaaggcgcggaccatattgcggtcatccgtattcatggtgaaatgggaacaggcacccctacaggtgatggggttattattgcccgtgctttacgcgaagcgtggaataatccccacgccaaagcgattctcatcgatgccgaatctggtggtggcggcccgtctgacgccatcaatatttacagggaaataaatgcgctgagggcatcccttcatggggctccgggcatcactatagataattcaggccagattgagtcatcgaataaaaatgacacacaaccagcgccagccgacgaagttaaacaggcactccttaaagcactggggaccggaaacggaaaattaccagcagcagcccgtgacgtcagaccgataatcgtcagcattaaaaatatgtgcgcctctgcctgttattacgccgcctcatcggcagatgccatttatgcagatcctaacgctattatcggcagtatcggcgtacgtatggaccactgggatgtgtccaggattatggatcgccttggcgtggctaacgaaccgttaacggccggtgcctataaagcatcccttgacccatggcgtcccattgatgacgaaaccaaagcatttctgcatagtgagttgctcgacaaaatgcatgaacagtttattcatgatgtcgaatctggccgcaaaggaaagttactttcccgtgaacaggcggataaagaactgctctacacagggcgtttctggctgggtgaccgggcgaagcagtttggccttatcgatgatacagccaccagcactgaggtgcgtgaacggctgagcatcgtctatggcaccacacgttttcgagactataacgcgccaaaagccacgttaagcagcatgctggggctgtccctggacgttaatctgaaagagacgctgtccggtgcgttgaatcccaccagcccggtgaggtga

SEQ ID NO: 186979 - DNA, 279 bp, Klebsiella oxytoca
atgcctcaggcgtattcacttctgcaggatctgaatctccgtcactacctgccagtggtcaatgccgagtttgatatatgtgtcattcactgcggcaatcagtggtggcgcttcaggctggtggatgtgaaatctgatgaacatcagaaaaggatggtggcccggacggcataccggctaaaccagtcaatggggatcgcggagcaaatggtcaacatgatccacgcctggcagtcggtgcctcaccttaacccaccggcatctgactatataaactaa

SEQ ID NO: 186980 - DNA, 405 bp, Klebsiella oxytoca
atgaaaaatgaacagcaatcagaaaataatggatgtttggttttgcccttaacccacagcaatcggggcctggattcactatcactcgaacagatagctgcattaccagatgccccagcgtctggagcaggacggaaaagcaatctgtcattcttaccgtttatcgcctctctgaacggcgtacgcttcgctgaccttgacgtggagcaggcacaccgttttaccgctctcagggacattgctggcacgatagggttggtactggtagccgaggtccattcaggcccggacaatgctgttgtgcaaacccctgaggggatgaacgacaaacagctggtggactggtatgtagagaataacgcgatgatatcagtcagccggtttgtgaaggactcgccgtggtga

SEQ ID NO: 186981 - DNA, 375 bp, Klebsiella oxytoca
atgagaaaacacacaatactcctggctattagttgtattgcgcttttatcacaggcggaggccgcaagcccggacacatcgtgggtgcattctgctgataaaaacggcacattgcaggccagtgccctagtcgaaggttccgacgtctccgaacccgatgatgacaactatgttcgtctgacaaaaaacgagtatgacgagctggtctggaaggctaaaacctacccagtgctaaactctatagaaacaggcagtccccgggataaaacttttttttcctgggatttcttttgggcttggctgggtggctcttttacgacagccctcatttattttttcgcttttcgggggaaaaaaaatggatctaagaagtaa

SEQ ID NO: 186982 - DNA, 288 bp, Klebsiella oxytoca
atgaatatcaaaattcaggaaccaccttctcgtactcaaacctttgtcatgagtacgctctacgtaattcgtgggcttgcggcaatgacagtatattttttcagaacgtttcctttagcattcttctatgtattgctggtggtcactttgttttgtgatatgaacaatataccgttgaaaggtcttatgcaggaggggatgctcattaagctatccgcctatgcattacaagcaaacgtgctctggcttggtgttaaggtgtcgatgaatttagacgaatttttctag

SEQ ID NO: 186983 - DNA, 216 bp, Klebsiella oxytoca
atgggcattaaatttcatgatttcagagatgacagacaaacctttgacaggggggagtggcaggccaccatcgacatgaataaatggctggaagataaaaacatagacgttatatcagttgaaactatttttaaagtctcaggatccatggcgagcacttccagcaggttcgaggcaatccgactctggtacaaagaagtcagcccgactatctga

SEQ ID NO: 186984 - DNA, 972 bp, Klebsiella oxytoca
atgactacaacacaattaatcactgctgcagagaatgaagatgtgtttgccaatattatgaccacgctggtggagttggcaaaacacgagggcgatttcatgttgcatgacgccatctgtcgggcggaaatcgatatcgacgaagataaattttacagcatgattgggggccacaggcaatccgctgcacaatgtgtccgcttactcaggcgctgcggggctatcacaagtaaagcagtgtacgaccttgcgtcgaacgtcgagcgtctggctctacggcttgcccgcgatgaatggctaagggatatgccatttccgttaaaatccctggcattttatcaggacgaggcgacagcaaaacgcgaaagctatctggtcaatcagaaagagaaacagtatcggttcagtgtctatgtaacagggcgtgtggaataccctgaagatgacccgatgcaaggcacctacatcactgacgggacattcctgctgggtaaagcccagaccgtggcagatgcgctggaacgggcaaaggaagccgctatgcggggtgaatggaacgaacgtggggaggaagaggatagttatgatccgtggatgtgcagagactgcggaccggtcagcttttatgaaagaacgatcgaaatccgggatgaaaatgaacggctagtggttgccggtaatgcctgcaacctggaatggtacgggcacgttgctagtctggaggaaatccgccgaattgaagagcaacagaaggcactctacgagaaagccagctacgaaagcggctgggacaactatgagaccgctcgtcagttgcgacaggaagcagaacagttatccgtcggtattgtggatgaatactggcgcaaccacccggacgttattaaagcagtggaggagtttaattatccggcgttcatggatgaagaggcgatcgcctttaacgctgacgaggacatggggatagaatga

SEQ ID NO: 186985 - DNA, 261 bp, Klebsiella oxytoca
atgacacttacggcatattaccagttaaaaaacacaaaaaatgcagggctcggtatcgaattgctggatagtgaagctgctgcctttattgttctggaagaatgcagttatgaaaaaccgaatgaaattgcccgctacggacacaacggtacagctggcgatcgctcgaacgccttcagttgcgcgatgaataaagcgctgagctctcagaattacagcggcgcaatgtgtgattacaacgtttacgaagaaaccgcctga

SEQ ID NO: 186986 - DNA, 162 bp, Klebsiella oxytoca
atgaaactaccgcgaaacgcccttatctggtgcgtattaatcgtgtgtatcacgctcttgatattcacatgcctgacccggaaccgcttatgcgaactccggctaaaggacggggacagggaggtcgcggcaagcctggcttacgaatccaacggtaagtag

SEQ ID NO: 186987 - DNA, 585 bp, Klebsiella oxytoca
atgcatacacgatttcaacctctgtggtttgctatcttgcttgacttgaacgtaaggaaaaatgttgagttagatgtgtttgactttaattttgtagttgtggacctgattgaaaagtcagaacgtgtttgccaggccattggattacgagcaatcaaatattcgatttctgatgtctcatattttctattgctcttgattgagttcaggttagaaattgttctcaacaattgtgttcggaccataggtatgtttacagaggtaagacatgagtttgaaacaagcacaatcagcaatggatatatagcaatcaaccctcgtgctgcctcgcaactacatgtactaagcaacagaacagccattgtcttatcaaccttgtttttctcaaaacggactagtctttacaccctgttgcaaaagttacttttgaaaaaagaaggtttgattctctctgatattgctccggcaacaatatcagatttgaaactactgaatcaccatggcgtcatatcttacacaagaaccagaaaaagcattgaaattcatggtgttagtgttttcattgaagggttaaaccttatgtga

SEQ ID NO: 186988 - DNA, 1191 bp, Klebsiella oxytoca
atgaataacaaccaacaatctgcatccttttttatcacaacagaacgccacggccgtcaggtcagaaatttacgggaatttagtgatgccaacccggatatctgccataaggctgtgaatggacagccttacatgattgatccgagggcattggagctcgtacctaactggaactgcagggagatgggattgggggaagaatattacaagcttccaaaacctgcggcccacattcagaaccttaaaaacgcattcatcaacggcgcagatatcgaccctatcactgtcgtcattgttgacggtcggcctcgagttcgtcagggaaactgccgtacccgtgcagctttacttgctcttaaggaaacaggtcttcctatactgattcggttacgtgaattcctgggtgatgatattgagcaggaatggcactctttggatggagcaaaagcccttcttttatgccccgtaggtcgcggaattgcctatagccgtttggttaatgaagcaggaatgtctgtggagcaagtttccaaacgtgaaaacatttctgatatggccgtgcgtcaactcatttcattggcaacaatcaatgatgagctcaaagtactgattagccaggatgtgatttcgtatactttgtgtctggaattgatccgtgatcttggcgaaaacgaagcccttgaaaaaatacgttcagaccttaatgacaaaattaaggttctctcacctgatttatcaggagttggttcacttccacttaatgtaactgacatcattaaagcaaccaccggtacacgtaaagcagtccggattacaaaatcttcgattggcattcagccgatcccacgaaaattatctcaaaacctggcggccagtatcaaagaggtttcaaacagattacgagcctcccttcctacggagattgatcttgaacaaattggtcaaaatgaaaaaataaatattgaggtcgacaggcattttgttgagcttattttgcaggcttatgcctctattcgtgatcatgaaaccaagcttgagcgtaaaaccactaagggtaaactttcacagtctactcaatctacagctgatgacaccaatataacaccggccgccaatgctcctttgaatgaaccaccttcgaacaatcagaataacgaattttcgttactgaatttgcattcagctgtttga

SEQ ID NO: 186989 - DNA, 129 bp, Klebsiella oxytoca
atgtcagatttaaaagataacgagatggaggggatacctccgtttcctgaaaatggtgaacctttagcagtcacggttcttccggtaatcatgaataattttcctattgctaatccagaagagaattaa

SEQ ID NO: 186990 - DNA, 459 bp, Klebsiella oxytoca
atgaaacattcaaatgaacaatggttttcagttgatggtcagttaattgataataaacttgtttttaatattcatgaattcaatggctccgctcggtacgaaaaaaactatttatgttcatattgtcatggttccggccgtcatcgtatcagttatgcaaactcttcaggtacatgtacttcctgtaaaggtactggtaaacaaggcaccttaattaaagaatgttataccctgaaggagcttttcaaaaagaattattcagctgcacaaaaggttgttaattcaacttcctggcgcaagaaccaaattgataatctatctgcacttgagaaaaaaatcatgttatcaagcagcaaaaatcaattcctgaaaagtcttacacttaccattaaaagtggccgtcatctttccagtaagcaaattgcggtagcagagcgtatcctctccgaaatcaactga

SEQ ID NO: 186991 - DNA, 2439 bp, Klebsiella oxytoca
atgagttttccacaattcttacatcattctgctttagctatgaccgtctctattgccgcaagcatgctatccattgcgaatgcccgggtatacgagtatacgttcacagatatccatggggctcaaaaaagtgtctctgaaagtgcgccgtatcttaatccgcatggaagttttaatgtcctcctcattggtggcttagaccaacaaattcgcatatcagtttttcgagatacggataccaatgctgtctttagcacaacaaccggcatcattactgttgacgatcgaattgcctcctcaagcggcaattatttttacgggaagacagtcactattcctcctatcagtgatggacgttacaccataaaatctgacattttggattcaaaatcgtccgttgtttcaacaacaagtcatcttgttgtaatcgacactgtaggacctacgtcagataacttttcagtaccctggataccaggatacaacatggtggtaactaggcagcgttgggagctaggacaaggacaggaagctgccatcaatcttgcaattaagaatatcaatgatctatctggttttgataaagctatagttcaaattataaaacctgatggttctacacaatcaagttatgaaatgacgtatgatgaaggttctaaagcagctacagcccctataaccaaaggtggaggggcaatagccaaagctacttggatgcctgtttctgatgctgatgtagagtatcgctttagagcatttctctatgataaagcgggaaatttcactcaggtacccgatcagacatttctttttgattcttcggccggagaatatgaactatttgcagttgctgatcctaattcaacaacaagtgtagttccaggtattgctactggttatattaaatatactgctggcatgactgttaataccaatcctgtcactcttgtctataaaatacccaaacataattatagagcgtataataaagctggtttatctttcggttcgctgcttactgaagttaatggttacgtttatattaaacaatccacgccggttggaacgtcatttactatacataacggttaccagtatggaggtggtaactcttcttataacattaagttgagttcaacggctccaaaatctccttctattaaatcctacgcaactactttttctacaattggaagtttttccgctggtacaatgaaattcaccaataaggatttacctggtgaatatcaaagtgctactgtcatcgttgatccaagagattatgtgcagtcgttttataatattactcaaggttatgaagtttgcaccattccccaaggtgaaatttcttgtacgggaccattttcatattctataaataaaggtaatgggtacttagctcactattttattgttcgaaatcccgataagacactttcatcaaatcaatttgaaattcgtagtatttggaatacagatttaattccaaaaatcacgggctacgattataaagaagaaaataagtctgtgcttgtttatgtttctcagcctggaaatggtagctggcgtgatgttttaatgctctcaaaggtagagatactcgatacaatttctaatgcagtacttcttactggtacaaaagttgccatgtcgggcgaagagtatacctatgcatttgatttatcaggcatacccgaaggtagctataaccttgcgtttagtgctactgatactttcaataatacatctcaacttccgttccaatctcttgttgttgacaatactcccccttcaatttctttttcttatgaaggaaagccacttcttactgaaagcactgtatatggacttgagaacatatctatctctgtaatagatgcgcttagtagctcggaaatatatcagatggttcttcagggtgggcctacctctgatgatgtagaattgggtttcgtgaaaaattctgatggtactttcacgccattatatcctcgcttattcccatctctagatgcgaacactgataaatatacacttctagtgaaagctaaagacagtgcaggaaatgtgagtactaactctatccgctttgcatattaccctaaaaacctgattgttttggatcagttaaacacccttgcagtcaataaagccctttctttatctacgggagaaccattggcggtgttaaaggccagtcaattgagaagaaatgatggatctttagcaaaaggtattcagacggctcttgttacagtacgctctgatgcttctttccctctaagtattataggtaacatcgttaaccctggagaaactaaagaaatacaaattgatttgggcacagttggaaatgatgtcgtaattccaatatttcctggtacaaatggtattgttggctctgctggttttattgttgagttcccacaattgaaataa

SEQ ID NO: 186992 - DNA, 1011 bp, Klebsiella oxytoca
atgagcgaagttgaacgcggtacaagcaaagacaaatacttaaccggaaacggtaaacgtacagttgtcgatcaaaaaagcgggcttccgcctctaagaactccccctacgcaaaagcgactctttactctggcgaatgggcgcaaagttgaagctcgctacgtagtagtcccaggatcagaagtctctgataaaacgctcgttcatgaactaaaccctcgaaatcaagaggcagttgatgatctttctacaagagatatacttcccctaattaaagaaagtggggtaacaactgaagctattgctgtatgtcgggatggtaaatattacctggttgaaggtagtcgccgtcgatactgctgcatcaaatgttctgcagacctgcctttatggtcattcgatgaagaaattagccgtgaagatgccgcttgtattgtaaatgcagcacaaacagcaaagcgattctcatatcgtgaaatgggtatgaaataccttgaaatcatggagaataaaaagttcaaaaccaatgatgaacttgcttcctatcttaacattggcattgaatcgataagaaaaagaattcaggccgctaaagtagacaaagaacttattagaattttccccgattgtgaagggatacctaatacttactatagtaaattggctaaaattgaaaaaaccgccaaaaataatagtatccctcttacggaactcacatccgaagttggggcagaagacaataaaataaacaacattaatgatattgaggaagttcagaagtctatattaacaggtttgctttcagtgcttagtatactttgtaatgatgcacaaaaaccttctaaatggacagtgtcagatattgcagaatttgatgataaggatacttacgctaggattaagaaaagtactgacggtcaaaaggtgagttttgagtttaagcgtataaatcaatcaacaataaatgagatagaacgtttaattaaagtcagtattaacaaagcaaaatag

SEQ ID NO: 186993 - DNA, 1011 bp, Klebsiella oxytoca
atggaagacttatatttgctgtttgctaaagacagaaatggcatgttatacgatacccaccatgcacggttaacctctgacattaccttttattgcacacaatgcggaagtcgcatttactaccaaaatgaaattgaaactgataacttcaaacagagacatttttttaagcacgttatggcggatgaaaaagatataagcatatgcgaagttaactatctcaatgaagcgattaaagatatagcccatagcattctatgtagtgaatctagcatttttgttagtccaatttttactaagggcgtaattcaagctccagataagatattcgcccctcataatgtcattatctcacatgatgatctcatcggttcccaaagcgtggatttcaaatggacaagttctaaggggaaatgtatggggttagttttcgttgaccacaatgaggtaattgaaaacaaaatgtatgacgtcaacgattccaaggcattcattgcagaaataaacttggcaatacttaaaagtcacctacgttccatgatcaaatcaaatcatggggtagatgctggtttaatcaaagcaataaaaaaattattattgaataaaaatacacatagccggtggattagttggaacgggaaaaaatcaaatttaagaatatctccagcatactttactaccttcaacaactacggatatgacagttataaaagcgtagtttctttggaatacttgtttcataatgaaaatgaatatattaacaataatacaaagtcaactttgaggctaacaggaagaaagtttgattttcaggttaaagaaataatttatcagttcagcctagaacgaggaagttgctcagatacgttttatgtcgtcatctatgagaaagaatgcgttttacttgattatatacttaattcagttccagttaatgacgatacatacaaccagattaaaaagttgtgcataaaacttattcgtatatatgaatctgccatgcgtggttaa

SEQ ID NO: 186994 - DNA, 189 bp, Klebsiella oxytoca
atgacacctgcattcaggtttggtaatgagaaaaaagtatacacagcaagaagaaagcggcttcgcagaagaggaaggctgattcacagccctaatgacagtttcattactaacagaattcttgatcagctaattgatgaggttatgtatcaagaggcattcagagaaaaatccatctttgaacgttaa

SEQ ID NO: 186995 - DNA, 354 bp, Klebsiella oxytoca
atgtctactactaccataacgcgaagattcaatattctggtagctgggtacttcacaattatttcctgttgccaaattatggtattcccgcactctcaacccatttttctggtactggtgaccatgggaattgcactacgtctttttacccttcaacagcatcaaaagaacatcaggtttctggttttttcccttttctcgcatcatctggtgcttggcattctttctgttgttcagttttatgtcagtatcaggtttcgcagagatatttatcttgagtaccagctggtttacgcaccttttcttattggaatagggtatgtctatttcaatgtatggagacggcgagcataa

SEQ ID NO: 186996 - DNA, 699 bp, Klebsiella oxytoca
atgttattttcaaaaccaaaaatccgtccactgacattttcacccgaagagattgtgtgtcttcagagcggcaacaaaacgcaattcagacgaccagtcaaaggggggcgttatttctcagaaagtatggacgcaggaaagaaccccggggcaatacatccggtattaaaatgtccatatgggcaaaccggcgacaggatctgggtaagggaaacggccagatcggaatggcaaagaacgcttgaatctcccttcctggttcagacgggggtacagtaccgcgctgataaggaataccgtgagatcaccgcagaaacgaagcacaaaatgttcccagctaaagcacggacaactcagggtgatttggcctgggcaacgccagttggtatgcctcgatgggcaagccggtacctgcttgaaatatccggttcccggttagagaagcttgctgatatcagttatgaggatgcgtatgaagaaggaatattgactgaagtatgggatcaaaccgttgtcgcccgaaattatgatacccctgactcattctttcagttctggtctgaagagatggaccactatgttgaaatgaatgagctgtatcgccgatcttatcaaagtttatggaaccagatttatgggggggacagttgggcatcaaacccactcgtttgggttgtaacatttaaattaattgattga

SEQ ID NO: 186997 - DNA, 291 bp, Klebsiella oxytoca
atgagcaatatttttaaattaggcgttgtgcctttagttgttttaggtggatatagcttgctgttttatccaggccatgacgatataccggaaaaacaagcccgccattgggtaaacgactgccggttggtagaaaaaaatattgataatggttttttttcttccgagcaaaatcggcttcagtgcggtgatgtcgttgaaaatgtaaacgcagctgattatgaccatgttatgaatggcaataagagtataaccatatcggagttaatcaaggaaatattcagtgaatag

SEQ ID NO: 186998 - DNA, 405 bp, Klebsiella oxytoca
atgacagcttactatcttgaagggaataatatcgcctggcttaatggtgtatgcttattccttattgttatcggttttttgtgcacgctgactaaattcattatccctaaaaaaatttctctgcgaatgaatatagattatatcttggcttttggcgttatgatagctttggctgcgatcgtcacggctgtcatttttaccagtagatcatttacgatggatgagcttgaagcagggagacactggaaaaaagactgtaaacttctggaggtgaacatacctacaggaaccttttccgaaccagttaataaacaagactgcggtggcgttatcattaatgtccctaagcttcagtatgacgaatatatccggcagtgggaattatacgaaggaaaagaaagatga

SEQ ID NO: 186999 - DNA, 546 bp, Klebsiella oxytoca
atgattgcaaaaattagaaggggcagtatgaatgctgaaggtgatttaaagaaactgactaagcttaaaatgaaaaagctttggtggattatatttacatgtttacgtatagaggataatactccccctcctttatgggctgctacagttgtcgctccgatgctattatctttatttttattttgtctaacacggtcaggtttaattgcactaatttcatggggggtgggggttattgttgttatttgtttttatcgctatctaatgctccctaaaacctgggctggcatacttgacaggcaattgctggaatatatcgaaaaatataatggccgcgataatgaagatttttttactggaactaatgatgtcccgcttgaaaatctcattaacgacggcgaagctagtgttaataacataaaacactggtgtcatgatgagagatgggatctgagaatgagaatgctaaatgaatttggcattaagccagaacaaaaagcggatgttgtcgttaatcttaaaagctttagcggaacgaaagactga

SEQ ID NO: 187000 - DNA, 579 bp, Klebsiella oxytoca
atggctgaaagagtaatcaaaaggggcggggagttggttgagccgccctcccacaagaacatcgtagataaagatgatttgccaggtaaagccaccaaacctaaaactaagatcacaaaatcacagcgagctgaacttaggcttaaatttgcaagccgttgtgcgtattgcgcatgtgagctgaaagagactggttggcatgctgatcatgttgagcccgtacgtcgtgattttgacatagtccgggcccctcaggggagtcgggtttctcattttgtccgttctaacggacgtgtatttcacccggagcggcatgagctcgacaacctgtatccctcatgctctcactgtaacctgtttaaatcgacgtatacgattgaaggattcagaaaacagattgcccaccagcccgaacgcgctcaagcctattctgtcaatttccgcaccgcccaacgattcgggctagtgacggtcatagagagaccggttgtgttctggtttgaggtctatgatgccacagcagctctggaaccccagctttcatactttctggagcacagggaggcttaccagcgttaa

SEQ ID NO: 187001 - DNA, 534 bp, Klebsiella oxytoca
atgattgataacctgtccaaaagtgagctgtttacccgagcctcgctgcttattaaatacggatttcgaacaaccataatcgcgctcgatactggtttgccaatccacattatcagaaggcttcacaaagaagtgactggcaagtcaccttgtcctggtcaattgccagaatctgatgccattgttaaaagcagaagagccttagttgaaggctccctgctgatggcgctttatgtcaatattggtggtgacaaagtctacaagcaattaaatattgatgctttgatgaaggctttcgatgcgtacttggttgcaagagaagaagcagatcttccagctgagatcccctggaaaaagctgaccatcaatgaaggttgggttctagctcgtgatttaagatcacagcttgcatccttacaccggtgtcgatgcggtagtctgtatttgacggtatctcaacagcgcattcagcttaaatgtcctgtgtgcgaaattatggccgagcaaaccactagagcactttttgagaactaa

SEQ ID NO: 187002 - DNA, 3570 bp, Klebsiella oxytoca
atgtgggaaatctattccatcggggattcggcttttttagagcaggtcctgaatgctgtcgcgatgatcactggtacaggcgactttacttcaatggttcggattggcttgctcattggggtattgatggtctctgttcaggccttaatgcaaggtggtcgtgggattaactttcaacacgttttagtctcatggctagtctttgcaaccatgtttgggcccagtacccgagtgagcattgaggatgcgtacacgggacaagttcgagtggttgataatgtgcccatcggtgttgctgccgcaggcagtacgatttcgactgttggctttcaaatcacgcgattgtttgaaacggcgttctcaactcccgccatgacggaatacggctttgcatccagtttacagtcactgattaaagtgagaaaacaggtgatggatcgctctggtttgggtgatgcaaatcgtgtcgccggttcggacatcgagcaatcgtggtttaactacatcaaagagtgcaccttgattggtatcgacattggccaaaagaacctcgatcaggtgctgagtgatcctaacccgatgactgcgattaggtttgattcgcgcatttatggcacgcgcatcatgctcaatggtagcagtagcgatctggactgcactgatgcctatagccaactaaaactcctgacagaatcaaccttcattccaaggcttaaacaggttctgtcagcctcattggggacttcgtcagcaacggacactgatgacgtgatccgaaatgcactgaataatcttggtttggcctcggttaacacccaagagtacatgaccgcgtcggtgcttttgcctatctatgagcaaagcgtgacgggcaagtatatggatgatcaagctttcaccgcagccgtcatggttaaccaagcgattgagcagcgcaatacgcaatgggcggcgtatcagaccctgttccaaagcatcgttcgtccgatgatgacgttttttgagggtttcatttacgccatcaccccattgatggcctttgtgattgcccttggccagatcgggatgcgaatggccgggaagtacttgttaatcctgctttggattcaactttggatgcctgtcatggccatcattaacctatatatccatttaactgttgctgggaaaatgtcggctcttggtgcctttgcaggtacagaagtgccatctttttctgggatgatgcagatggattcagtgctgcaaacctggatagctactggcggcatgttggcgtcgagtgttccggcgatttcgctcatgctcgtgtatggctcagcaataaccgctacccacttggctggacgtcttcaaaacggtgatgccattgatgaaaagatggcaagtccagatgtcgcgaaaaatgccccggtgatgcaatcacagtcaatgttccaaaattcagccctcacaggttctgctatgactggcgcgtcaaacctactaagcagtttctctgtcggaaacgcagtgggttcaatggtcggctctgcaaaagaatccatgactcaggcaacccaagcctttagtcgtcaggttgggaataccatgagtcgaacttttggtgaaaagctaagttacgacaacctgtcttcggttggacgtcagatcggctcatctaactccgcatctagcgccgttgttaatcaggttactgatgaccttcaaacacggtatggtttcggagacgataaaaaagacgctgtacgtggcttggtatcgggcgtgctatcgggaggcctaagggtcggtggcgatggaactattactaatcccggtgagaaagaagttgctgacaagggttttcttggaaggcttcttggtactggcggcaatgattctccacaaggtaatttgcctggagttgataagccagattcatctcgtgtaccaaaactatcaagggtacgagcaggcttggatttaggtggtaactttagtggccaagttgagtcatcagagggcagttctcggtcaacgaccgcaaatacgctcactggggagatgcaaagcttggcatcgagtgattcacgacgtgctgagtatcgcgatgcaatggttaaggacctttcagattcaagacgttctggcgttgagatgtccttgtctaaccaagactatcagtctcttcagagttcagcacaagacgttgtcacggcatcaaaccgctttagtgagcttgatcaggccagctacagtctatcaggacaaagaaatactgatggtgcgacgttaacccgattagcggcggataatcctgaagtcatggattatttaggtcgctatatgaaccagcatgttgaagccggtaaccgattacgtgaaaaccttccgatgtatcagcgcttgctacctgatgataatcaggcgtatgtggccgcagctatggaatctttgacctatagcaactcttcaacgcccgctgaacgcgacaatgattatcaagcagcaatgactgttatggccatggctaccggagccgatttacgatcaattcagccacgctctaatgaaggcttgtcatcaactgcacctacttttggtggcactcaaagccaagtggaatcgggtgtattgggcggctacgaggatgctgcaactgttcaaactcagttcaacgcagctcaatcagcttaccaaaccaatctgtctggtatagacggacggttgaatgcgcatcagcagcaagcccagcaggccgtagtttctgacacaagtacctatcaatctggactaaacagtgaagctgggtctcagtggcgagcacgcattatggctgatgatagcggagtttctggtgctgaaatgttcttcaacagcgccagtgctattggtgatttcagtggcaagcatactgatgcagcactgcataccttgaatcactttggcgaagactatgagagttacaaagaacaagcgcttgaagatcctggctcacgaggtttcttgcacaatgcaacggtggccagcaaatcaacctgggatggcttaaaagccgccgttgatgccggaacctctttggaaaacccattgacggcgtttaatgatgcatacagtggatcgagttcgcagtatgcctccgaagtaaactggggcactaagtctgaagccatgttggcgggggcattcggtgcggcagttaacaatcgatatggtgagttcttagagcagtatgctgatgattttaaacaggaagcatacagcgaagggcagagaatgggattgaccccgattcaaagtcaagtgttcgctcaagctttcaatgaaggtttggcggggcgcgtattcaactctgaagactcatcgagttggtcgcctgaaatgctaggtctaagggagcaaatgctaaatgagtatcgccaaaaggatgagagtggcgcttacatccctgacagtgtgtccgaagaagataaagcatttgtggataagcagatagcggtgatctcaaatgcatcgcttgcgggagattatgctcagaacaacttgatcgatattagggcctataaccaggcatcaggaaggaactga

SEQ ID NO: 187003 - DNA, 1389 bp, Klebsiella oxytoca
atgaaaaaagtattccgagtatcgctaatcgcctgtgcgattggtttttcatctatgagccaagcaagcttgcaacaggagatgaaccagttgtttggttcaatgaccaacaccactgcgccaggtgtattcgagagtcagcggcgtggtgtgatatctggtggaagcgttgttgtccgtaacagaatcatgaacgagaacctcgtctctatggtgcctccgtcattccaagccggttgtggtggcattgatatgttcgcgggaagtttgtcatttgttaacgcggatcagtttgttcaattacttcgctctgttgctgcaaacgccaaggggtacgcattccaattggcgctcagtgctatgtgtgagaaatgctcccagcacatggagacactgcaaaagaaaatccagcagttgaacgagtattttggcaattcctgtcaaatggctcagggagtcgtgaacgataccctggctgcttttggtaaaaaggggcaaacagaagcaagcatgttgagctcacttaaaggggctggagacgtttttaccagttggagtgagtccaatggtaagaacccatatgagaacgcttcgagtgtcgcggcatctgatgtaaacagaacgattaaaggtaatttggtttggcgagcactgaaacgtcattcggcatcaagctggtttgcatcgggggatgaccgttttcttgaagcggttatgtcggtgactggttcgattatcgttggtgatttagcgaatgccgctgatggccaaggtaaagccccaaaactgaccaggctgaatggcaataaagtgactattgagcatctaattcatggcggtaacgtcgctatgtaccgatgtgacacagtgacgcaagacggttgtttgaacccgacaatcactaacgtgacccttaccgggttatcaactcaggtagaaaatttacttcttggtacaggttctagtaacggcattatttttaaatttgctcgaaatacaggggctgctagcaccaccgaaaaggcttttatgacctcggctcccgcgagcattggcggcatgattcgaacactttctgcattaaatgaaggtgccgctaggtcgtttgcttcacgagcagcaccatttattgctgttgagatggcccgagcattggttgaagacatgctcaacgcagctagaagcacctctggtgtcgaagatcatgcctatgcgaagttgttaaccgaagaccttgaacgtgcacgtcgccaaatcaatgaggagtacgccgcgttacagcgaagatacggctcagagcaagaattactggcgcattttaatcaggtgattcagaccattcgcaaacagcgttattacaccgttaaatctacggcgctgggggaatag

SEQ ID NO: 187004 - DNA, 945 bp, Klebsiella oxytoca
atgagaacccctttgttaccttggttcatcctatgggtgaccatcccaatcattattctctttctattcatcttgcccgcccatgccagtgatgggccattctatcagcgtggtcaggaaggttggttttggtatcaggtcattcctgaacctgagcagcctgatgagctgatagagccggaagctggtgtcgtggagtccagtcagagcgaactaaagcccttcagtgccgcatggttccgagagcatatgcaatcgtttatggacaaggcaattgatgagccaacgagtgagaatgtcagagcctatctgtatcttcagcgcgtcatgatggataagggctcactatttgctgatgttagtcagcaggtggtcatgggcgatcctgttttggatgaaatcagtcgcagacccttggcgacctatgctgccaatcggatggatcgagaagctggcgctcaacgcgatgtagctttaggtgaagtagcaaaacgggctggtttgttcttcttctatcgttcggattgcccttactgccatgctcaagcgcctatcatcgaatccatggctttgaactacggtttcgaggtatttgctattgctgtcgatggcatgcctttacccggtggagagtttcccaattacaaagttgattcaggacaagcacaatccttgtccgttacgactgtccctgccgtgttcttagttgatccgcctaatgtcatcactccgattggccaaggcgcaatgagccttgatgagctcaataatcgaatcattctcgcagcccatcaagccggttggattgacgatcaaacttactatgccaccagacctgttcaacccggcgtgtcactcgcgatgtcagcccaagagcttaacgaaaagatattacaggaccctgagttccttgttcgctatctgcgtgcacaaggagggttataa

SEQ ID NO: 187005 - DNA, 792 bp, Klebsiella oxytoca
atgattatcattgagcagctaaaaaaagtgaaagatacccgttcgcatatcaaccaagtgtatcctgttatggaagtggctttcttggtcataaccgccatgatttgtggtcaaaataagtggactgatattaaggatttcggcgaaggaaatatcgagtggttgcgtgagtatctcccctacgacaatggtctccccactcggcataatattgccgcgataataagaactgttgtaccagagacgctcttggaagcgatggtaggctgggtcaatttgcacagagaaaagcatgctcagcccataatcagcgttgatgggaaggttctaaaaggagcgaaagcaagcaaacaagaacaccctctctatatggtttcggcatttgacgtagatgaaggtttgactctcacacatcaaccttgtgacggtaaaggtatggagctaatagcgataaaaaacatgctcgacgctttggatgtcagagggtgcttattaactgctgatgcgcttcattgtcaggttgaaacactgaataaagtggttgataaaggtggtgatttcttagtgcaagtcaaactgaatcagccaagtttgttagcagagattgatgcgcagttccaagactattgggctttgccagaagaacaacaggaatcgtatatcactgaagataaagggcatggaagagaagagattcgtgaggtttacgtgcttcctgcctccttcagcgaagaactcaaagataagtggagtgttgtaaaaagcattgttggtgagcttacgggaaagtag

SEQ ID NO: 187006 - DNA, 1134 bp, Klebsiella oxytoca
atggaacgattgcgctgcaatgcttgcggagaatattttaccgctcagttgcccgatgaggtaacaaaagatggtgagccaggtcagaaatacggttacagtgcccgcagtctgatggctctgcacaagttttttgctggtgcgccttactatcgtcaggaaagcacccaggcactgatggggattcaactcaccgcctcgaccatttttgaccaaactgagctgggcgccaatagcttacagcccatttataacctgttaagagtgtttgcggccaacgctgagcattactatttagatgacacgagcaaccggattttagataaagtcccgattgaaaaaccgcaacgtaatggaacgaaaactcgggagcgcagtggcgtttacagctcgggattagtcgccggcttaaacggcggccgtactatcgtgttgtatcaaaccaacatcggtcatactggtgaatttattgatgagattttaagtggtcgaggcaagacgctcgccccgcccacattgatgagcgatgcattatccagcaatcgtccatcgctgggttaccaggtcgaacactgtctgtgtaatagtcatggccgccggcagtttgccgaagttctccatcagttcccggacgaggtggcgttggtattaacctggtacggggaaatctggcgttatgaggatgaagcgaaaacgttaggcctcaatgcagagcaacgtctggcctggcataaaaagctatcgctgcccataatgggtcagatccgagattggggtaaagcggagcttagcaacggaaacgtagaagaaaacagcggccttggtcgcgcgattcattacttcaataaacactatgaaggtctgacggggttttgccgtataaagggcgcacaactggacaataatcgggtggagcaagcgctaaaactggtcgcccgcaacagaaagaatgccatgttccacaaaacacaggcaggcgcgagcattggtgatgtgataatgtcgatgattgccacgtcagccgaagcgggtgtgaatgtactggattattttaatacggtacagcgaatgcaaaatgaagtaaaagccgccccacaacagttcttaccgtggaattatcagtcaaatctttaa

SEQ ID NO: 187007 - DNA, 291 bp, Klebsiella oxytoca
atggcgcaagattttactgatattgacagcgaagagctggacggacttatccagcgagtgcaggaagcgaaggagcatgagctcgggctgagcccaaaagattgtcaaatcttgctgaaggcattgaagacgctggctgccttgcaagagcgtttggctgacaacgatatcaccctacataaattgcgtaagctggtcggtatggtcagatcatcggagaccatggatactctgcttggtcagaaaagccagaccaacaaaaaaccgggggcaaaaacgacccaagcctaa

SEQ ID NO: 187008 - DNA, 327 bp, Klebsiella oxytoca
atgatccacctgaccgcagagacgcgcattctccttgccactcaacccgctgattttcgttgtgatattgatggctttgccgcactgtgtcgtcaccaattgaaccaagaccctcgagacgggacgttgtttgtgtttaccaaccgccgccgaaccctgctgcgggcactctgttatgacggctctggcttctggttaatgagcaaacgtctgaccaaaggccgcttccaggactggcccagtcatcaccaagatagggtaacaccgttcgcggccaaacaattgaaagtgctgttgacgggacggtccggttggcaaaaagtatga

SEQ ID NO: 187009 - DNA, 1086 bp, Klebsiella oxytoca
atggcaaatattaatctttccaatgttgttaagcgctatgacgaacatactgtgattcatggtgttgatctcgatatcaaacacggtgaattcgtggtgtttgttggcccgtctggttgtggtaaatcaacattattgcgccttatcgctggcttggaagacattacagatggcgtgttgtgcattgatgatgaagtggtaaaccatgttgaccctgcagagcgcggcattgcgatggtattccagtcttatgctctctacccacacttaacggtggaagagaatatgggctttggcatgaaaatgaaccgttttccaaaggctgaaatcaaacaacgtgttgatgctgctgcaaaagcgctacaacttgatcatttgatggatcgtaagccgaaagatatgtccggcggccaacgtcaacgtgttgcgattggccgagcgatcgtacgtaacccgaaagtgttcttgtttgatgagccactatccaacctcgatgctgaactgcgtgtagatatgcgtttgcaaatatccagccttcatcgtgaacttgccactaccatgatttatgttactcacgatcaggtagaagccatgacgctggcagacaaaatcgtagttttgagagatggtcgtattgagcaagtcggttcaccgcttgaactctataatcgcccagcgaatgagttcgttgcagggtttattggttctccaaaaatgaatatgttacctgcaaaagtgacccatattggcgaagatggggcaacacttaaactgccggatggtcaatccgtcactttgcatatcgacctttcaaaagttgcggtaggagataagttgaccttcggcttgcgccctgaacatctatccgtcggcggagaaggcgactattcgcttcattttaaaacagacgccgttgagcggcttggtaacagtacctatctgtttggtgtgattggtggatatgagaacaataaagtccacctatcaggcgatgtcgcggtgaagcgtggtgaagagattgaactcacttttaaccgagagaattgtcatgtatttaaagattctctgtgcatttctaacctctag

SEQ ID NO: 187010 - DNA, 3090 bp, Klebsiella oxytoca
atgagaacatttgaacaaattattagtgctcgcgaatgggaaaatcagcatgtaacacatcacaatgtgcttgctgctcacgcgccgcttaaagcttatgcaaataaagaagctgcattaacaaaacaagattctgagaatcagctatcactgaacggtgagtggaaattcaagctgtttgactgcccagaaagcgtattagcggcgtcggttgaatcagatttcgacgattccgcgtgggacacaattgcagtacctagcaactggcagttacaaggtttcgataaaccgatctacaccaatgtgaagtatccgtttgcggatacacctccttatgtaccagaagaaaacccaacgggtttgtatcgcctaaactttaacctgccaaaacacttcacaggtaagcgtcaaaccattacgtttgatggtgtgaactctgcattccatctttggtgcaacggcaaatgggtagggtactcacaagatagccgcctagccgctgagttcgatttgacggacttcttagttgaaggtgaaaaccagctttcagccatggtgattcgttggtctgacggttcttatctggaagaccaagacatgtggtggttaagcggcatcttccgcaatgttacattactagctaaaccacaaatctctattcaggatgtacaaatcttaacgccactggatgcgtgttatcgcgatggttggttgaatgtagcaaccagcattagcgagaaaaatgcagcgaaccgtgttgaggttgagctatttgatgcgcaaggcaactcagtgtttggcgtgaagtctgcaaactgtgggcaacgcatcattgatgaaaaaggtccttggctagagcgtgctgagcataacatctacgttgagaacccgcataagtggagcgcagaatcgccttacttatatcgttgcgttgtcactttatttaatggtgaggagcaacttgattgcgaagcctacaacgtgggtttccgtagtgtagaaatcaccgatggtctgcttaaggtcaatggtaaagcgattctggttcgcggtgtgaaccgccatgaacatcatccagaaaccggtcataccatgagccgcgaaattatgctgcaagatatcaaactgcttaagcagcataacttcaacgcagttcgtaccgctcactatccaaatgatccgttgtggtacgagctatgtgacgaatacggtttgtatctagttgatgaagcgaacattgaatcgcatggtcagtttccgatgtgccgtctttctgatgacaccacctggctaaatgcctatatgcgccgtatcactcgtttggttgaacgcgataaaaaccatccgtctgtgatcatttggtctctcggtaacgagtcgggtattggtggcaaccatcatgctatgtatcaatggaccaaactgcgtgacccatcacgcccgattcagtacgaaggtggcggttcaaatacagcggcgactgacatcattgtgccaatgtattcacgtgtcgataaagaccaagtgcatcacatcgacccaacggtgactccgaaatacgcattgaaaaaatggctgggtttaccgggtgaggatcgtccattgattttgtgcgaatacgcgcatgctatggggaacagcttgggtagcttcaacaaatactggcaagccttccgtgattatccacgtctgcaaggcggtttcatttgggactgggttgaccaaggtattactaaaaccgatgaaaacggcactaaatattgggcatacggtggcgatttcggcgatgagatcaacgaccgccagttctgtatcaatggtttgattttccctgatcgaactgtgcatccaactgttttagaagctaaacacgcacagcagttctaccaatttcaactgcttggttctgaaccattagtcattaaagtgaccagtgagaacttgtttacctcttcagataatgagcagctatcgtggaccatcacagaagacggcgcagttattgaaagcggtgaaattccactggctgtggacgctgagcagtctattcagttgcaacttactaaagcgttaccggaagttaaagtcggtaagtcgtatcatttgaaccttaaggttggtttgattggtgatacagcgtgggcacaggcgggtcatactacggctactcatcaatttgaattgccgtctgcatcatcgctggcattaaagaaagcaaaaccaagaggtgttttgacttcatcaatgtttgcggataacgcaatgataagcggtgaaaatttttctatacgcttcaacaaagaaaccggtgtgattgatagctggattgtgggtggtgaagagaagttaatctcaggtccaaaagacaacttctaccgcgcaccgctggataacgatatcggtgtgagtcaagttgacctcgtcgatccaaatgcatggtctgctcgttgggatgcagcaggcattaatcagcttgatggtgaatgtgttgagttacagctttttgataaaacgaatgcagttgaggtagtgactcagtttgcacacaaaaactcgcacggcgtattaatgtctacaatatggacatatcacattttcgcggacggaacggtatcaatagatgttgatgctcgcgtcgcgaaaagcgcaccaccgttggcacgtgtaggtatggaattggcgttaccgcagaaacaacaatcggtagagtggtttggtcgcggtccacatgagaactacccagaccgtttggattcagcgcatattggtcgctacaaagctagccaagacgagatgcacactggatacatcttcccatctgacagcggtttacgttgcgatgtaaaagaaacacaagttggcgagcttactgtacaaggtgacttccatttctcagtgagccgttttgctcaagacaacatggctcaagcaaaacataccaacgaactgaaagacagtggcaacttgttcgtaagaatagatggattccacatgggggttggcggcgatgattcatggacaccaagcgtgcatgacgaatttaaactcgaccgcgaacgttaccgttaccaagttgaattgaagttttaa

SEQ ID NO: 187011 - DNA, 813 bp, Klebsiella oxytoca
atggataagaacaaacttaaccgcgcattgatgtatctgctcctcagcgtgttctccttgttatcgttatttcctttctattggatggtggtatcaagtaccaataccgtaacagatattaacaaaggcaagttcagctttggtgaccagttactcgccaacatcagtcgtttgagcgagcaggtagatctgggacttatcttctggaacaccagcaaaatcgccattatcagtaccttggtgacgttattgatttcttcaatggcaggctatggtttcgaagtgtacaaaagtaaagtgcgcgaccgtgtttatggcgcattactgttgaccatgatgattccgtttgccgcattgatgattccgctatttacactaatggcgaaagctcaactgttagatacccatgtagcagtgatgttgccgactatcgcatcagtattcatcgttttctacttccgccaatgcaccaaagcattcccgcatgagctgattgatgcagctcgtgtggatggtgtgaaagattggaaaatctacctgtttgtttacatcccagtaatgaaaaccacttatgccgcagcgtttattatcgtattcatgacatcttggaatgcgttcttgtggcctttgatcgtactgcaatctgccgaattaaaaacaattaacctcgttttatcatctttatcgtctgcctatttccctgatttcggaatcatcatggtgggaaccgttattgcgacgcttccgactctggctgtgtttttcgtaatgcagaagcaattcgttgcaggtatgacaggttcggtgaaataa

SEQ ID NO: 187012 - DNA, 915 bp, Klebsiella oxytoca
atggatacttctattgccaccagtaaaaaacagaaaaagagcaaaaaaagctttcaccgtttttatgatattaacggttggtcgtttgttcttcctgctgtcgttctcgtcagcctctttatgatttacccgattttgagctcgctctggatgtcgatgcattcaggacgcggcgttatgatgcagtttgtcggctttgacaatgtactgcgtctgttcaacgacccatttttccttaaatcactgaagaacaccttcattttccttgtggttcaggtgccagtgatgattctactttcactgattctttcttcatgcctgaatgctccgaatctgaagtttcgtagtttgttcagattggcgattttcttaccttgtgttacgtcattagtggcgtactcgattctgtttaagagtatgttttcgtacgaagggatcattaattcatttttaatgtggactcacattgtgagtgagccaatcccttggttgtctgatcctttctgggcgaaagtgacgattattattgcgatcacttggcgttggactgggtacaacatgattttcttcctgtctgcgatgcaaaatattgataagtccatctacgaagccgcgcgtatggaaggggttagcccaactaagcaattcttctttattactgtgccattacttaagccagtgattctgtttactaccgtgatgtcgacgattggtacgctgcaactgtttgatgaagtggccaacattactgctggtggtccatcgaatgagaccatgacgctatcgatgtacatctacaacttatcgtttaagttcgtgccaaactttggttatgccgcgacagtgtcatacgtcatcgtattctttgctgcagtgcttgcgattatgcaatttaagatcgctaaggataaataa

SEQ ID NO: 187013 - DNA, 1260 bp, Klebsiella oxytoca
atgaataagaaaatgtttaagaatatgcttgcaacctcggttggtttggcgtgtttcagtaatgcagcacttgccgacgaaattaccgtgtgggcttgggatccaaactttaacgttgcgattatggaagaagcagcgaaggtttatatgaaagaccacccagaaaccacgttcaatgtggtggactttgctaagactgacctcgaacagaaactgcacactatgcttgcatcaggcgttacgtcatcacttcctgacgtggttcttattgaagattacaacgctcaaaaataccttcagtcatacccaggtgcttttgcgccaatgacaaaagatgtggattacaaaaacttcgcaccatacaaagtaaatcttatgacgctgaatggtgaagtttacggcttacctttcgacacgggtgttactggtatgtactaccgtacagacttgcttgagaaagcaggatttactgcgaaagatttagagaacatcacttgggaacgtttcatcgaaattggtaagcaagtgaaagcaaaaacaggcgtggccatgctgggtgtaaactcggatgatcttgtcctagtgcgcttgatgttgcagtctggtggtgaatggtacttcaataaagacggttctttgaatatcgccaacaatgagtcactaaaagaagcactaaaaatatttaaagagttaatgagcccagaagtctctcgcccaacaatcggttggtctgagtgggttggttcattaaaccgtggtcaagtggcttctactgttactggtgtttggattacgccatcggttgaagcggctaaagatcaagcgggtaagtgggctgtgacagctacacctcgtctgcaaaaagctggcgcggtaaacgtatcgaacttaggtggttcaagctggtacgtactaaactcttcgaaagagaagcaagaagcgattaagttccttaacgcaacctttggctctaatgttcctttctatgaaaccattcttaaagagcgtggcgccgttggttcatatatgccttctggacaatcagcggcttatcagtacagcaatgagttctttggtggtcagaaaatttacgcgaacttcacggattggctaggtcagatcccagaagtgaactacggcatctacacctatgaggttgatgcagcgttaagctctatgctacctgcgattgttcagggtgctcctatcgagaaagtgttgggcgatgttcaacaacaacttgagttccaactacgttaa

SEQ ID NO: 187014 - DNA, 957 bp, Klebsiella oxytoca
atgataccagcacaatttactaagctgattgccgagcttgagcacctaacggataaccaagttcgttatatcgaaaagtggctgaaaggggcggatagtacgtctcagttgatatcagagttagaggagcgaatggttgaaaaacctgaatgccaacactgccatagctcattgattaatcgacacggtaaagtaaataagatacagcgatatcgttgtaaaaactgcggtaaaacctttgtagcgactacagggactccgctagccagactgcgatacaaagagctttggctggattacatacggtgtatgctcgatagcaaagtcttacgagtatgtgccgaagaatgtgggattaacctgaaaacatcattccgatggcggcaccgttttctggccttaccttcaacgctaaaagcgaacaggcttgaaggcattattgaagcagacgaaaccctgtttccgtattcagaaaaagggtcaaagaaattgagccgtccaccgcataagcgagggatgaaagctcaaaaacggggtcgctctaaggaagattgggtgcccgttttgacggtcagggacagagccaagaacacctatgaagctattttgcacgacgtaaccaccgaaacgttgcaccaagaactggttggtaagttggaaaaagacagcgtgttgtgtagtgatggctataagccttacatcgcattatcagaaaaaaatgatttaattcacaagcggttagatgtagctggcggcataaaggtgatagataaagtctttcacattcaaaatgttaatgcgtaccacagccgtttaaaactttggataaagcggtttcacggtgtagccacaaaatatcttgatcatcatcttggttggttcagatatatggatacgccagaaaaccttaacgaaaacaggctgttccacattcaacaacagttaatgggaacatag

SEQ ID NO: 187015 - DNA, 315 bp, Klebsiella oxytoca
ttggctgaaaccagtgcaccagttacagactggataaaagcgaaaggcattactaaagtcgccattcatctggacttagatgtcatgtctattgccgatttcggctcgttgtatttcgctgaacgtgatgttcctgccgataaatttgaaggtttaactcaaggtgcaatgaagcttgcagccgttcaacgtctaatcaatgatattgcagattgttctgtcgaggttgttggtttaggtgttacagagcatttaccttgggatgcactccgtctgaaaaatatgctggcaaccttccctctgcttggtaagtaa

SEQ ID NO: 187016 - DNA, 276 bp, Klebsiella oxytoca; identical to SEQ ID NO: 36734

SEQ ID NO: 187017 - DNA, 759 bp, Klebsiella oxytoca
atggctgactattattcgctttctgcatttgttattaataccacccccgttcagagcgaagttctactggaagcaatgaatgagttatttgagcctgacgacaatttcattgctaagctcatctcctgtccgagcactgaaaacctgtctgaaatggaacgtgttgtgcgtcactgtgtgctgaatcatccggacagaactgttgatgaagttattgatgactgcgactggtcatttgatggtgaaatatgttctgagggtttccttgttcacagtgattgcggtaatttcaattcagagcatgcagcgctttttgctcaggcatcactcattgcctttgaaagaaatgaactcatcgagtttcaagtatcacacacctccaataacttcagacgcaccgatggctatggcggtgctgcttgtgtcgtttcccgtgactttattcgctggactggtaaccacgagttccttgaagctgagcgaaccgcatttacagaaagtatgcactattacttctgttcttttaccgagatccacggtgaactggaatttccagagaaatttattcttcgctgcccggctaacgtcaacgcagagcatcgcttcgatgacatactgcttaactatcgcactggcggtgaaaaagataccgatggagtcatcaattttgtttctggctcctctataaaaaaaaccgacctgaaaacgctcactcctgatgaatatcgggtgttgaagcagttcctgacggttatctga

SEQ ID NO: 187018 - DNA, 747 bp, Klebsiella oxytoca
atgacaaaacaaattttacctgcagaactggccgaaattgtaacggctcttctggttaaacctgaactgcttggcgaactggacacacgtgtagctcaccaggagttcatgaaggccatcggatgtgttgttgccgatttctgtggtggtgtcgttaacggggttactgacggagatatatcgagaccctatctctctgatgtcgactgcacaccctatctgcatattgaagcagatgatcgtcttccgtcaccggatcacaatgtctgggctaactatcacatagagggctggcaagaaggtgatgatatggaggcagtatctgttcctgtatctgtgaaatcacagcgagcgggtattcaggggattttaagtaatgccggtctgacacagggtatcgaacaacagttacagctcaaaatggtagactggcgcattgcggaagacagtgagatgctccccgatgaagacgggcgcccttacaccgctaccctccatgtagcgaaccagacatcactggagctggtgggcgagactggagagccatgctttggggtgttgatcgaaatcaatcacggtgtccctgcgctacacctaaacgtggccggaggtgataaccttctgcatatacatgttgcacaaggtgggctgattctgactccggaccattccggggtgcagattggttgtgctgtacccgatcgttatgcctatcacgataatgcatctctgcttgtccggtcataa

SEQ ID NO: 187019 - DNA, 651 bp, Klebsiella oxytoca
atgaatgtcattcagccccgcatgctctctgtatttgattttgacggtacgttaacgcggcatgacagctttatcccttttctgcggtttgcctttggcaatcgagctttttcccgtcgtatcgtcaccatggctcttcccacgttacgctgtatggggaagaagatgacacgtgatgaactgaaagaaattctcatcacaaccttccttactggggttgacgagaaatggctatccaaaaatgctgagaaattttgccaggtctactggagtcggcttatgcgtcctgcaggcctgatggccgtggcgaatgaagtgacttccggcgcggaagtgacattatgttctgcttcaccagaaatggtactcaggccatttgccgacaggctgggcatcaaagtgataggcacgcagcttgaggtcaaagaagggatacttaccgggcgtatcagtgggcataactgccggtgtagccagaaaattatccggctggaaaaagagtatggtcctctgaaagattatcatctgcgggcatggggagacacacgaggggattacgaactcctgtcagctgcaactgatccacactggcggcacttccattcaacctggcgtcggggaaaagtacctttcgaactgactatccggtaa

SEQ ID NO: 187020 - DNA, 1242 bp, Klebsiella oxytoca
atgcaattacaatcaggacagaatatcccgcttcatacatcgactctggacctcaggcttgactatccggcatcatccggttttcgtagtgaacctgaaatatgcatatttatgctgaatgcagagggtaaggttaccggcgatgctgactttatcttctataacaatctgagtgcagctgctggtggtgtaagactatctcccggccaccagcatgcgaacgttcatattgaacttgaccgtattcctgtcaccatacagaaaatcgcgataacccttgtgattgacggaaaggacacgatcagcgcactgtcacaactcaggctaacggcaaccggaacagctgaatttaatgtcgatcttaatggccgcagtgagaaagcggtgattatgggcgagatttatcgacacaaggacagctggaaactccgagcacaggggcaggggtttaacggcggactggagccgctcgctgtcagctatggtgttgatgttgcacagccagctgataccccgccagaggcttcccgtatcagtctggagaagaagctggaagggaaagcccccgcgcttatcagccttgcaaaaaaagccagtgtttctcttgccaagcataagctggataccgttgaagcccgagtggcttttgttctcgatgcctcaggctctatgaccggccagtttaaaaagggacatgtgcagtccgttctcgaccgtatagctgttctgtcagtccagttcgacgatgacggcacgatggatgtatggggctttgctgagcgtcacaagaaataccctgacgtcaccctggacaatcttgatggttatatcgccgggatccagagtactggaaaccggtcaacctgggaaattcttccgggcctgggcgggacgaacaacgagccgccggttatgaatgaggtgatcgacttcttcaaggacagcacactgccggtctatgttgtctgcattacggatggtgggattagtaaaacccgtgaaatcaaagaagccatacgccgctcggccaactaccccattttctggaaatttgtgggcctcggcggctcgaattacggtattctcgaaaaactggataccttcagcgatcggcgaatcgataacagcaacttctttgccatcgataacttcgcaacggtgaaggatgaggtactgtacgagcaactgctggaagagtttaaagactggctggagcaggcaaaaatagcgggtattctgtga

SEQ ID NO: 187021 - DNA, 576 bp, Klebsiella oxytoca
atggcagtttctctcgtaaaaggcggtaatgtttccctgaccaaagaagccccttccatgaatgtggcgcttgtaggccttggctgggatgcacgagtcaccgatggtcaggcgtttgaccttgacgcctccgtttttctggtcggtgacgatggtaaagtattgtctgactctcatttcgttttctataacaacaccaccagcccggacggcgcggtccagcatcagggtgacaaccgtaccggcgaaggcgacggcgatgatgaacaggtcaaaatcgagctggctaaagtcggtgctgaagtcaaaaaactggtgtttgctgtcactattcatgaagctgaagcccgtaaacagaacttcggtatggtcagcaacagctacatgcgtgttgtgaacaacgataacggcgctgagattgcacgttttgacctgtctgaagacgcctcaacagagaccgcgatgatcttcggcgaactctatcgccacggtactgaatggaaattcaaagccgttggtcaggggtttgctggcggtctgggtgcgctggctaaacagcacggcatcaacatctga

SEQ ID NO: 187022 - DNA, 579 bp, Klebsiella oxytoca
atgagtgtttcactatccaaaggcggcaacgtctctctgagcaaagcagccccgacgatgaaaaacgttctgatcggtcttggctgggatgcccgttctaccgatggtcaggactttgacctcgacgcttccgccttcctgctggccgcaaatggtaaggttcgtggtgatgccgattttattttctataacaacctgaaatctgtcgacggttcagtcactcacaccggtgacaaccgtaccggtgaaggcgatggcgatgatgagtccctgaaaatcaaactggatgcagtcccggctgatgtggacaaaatcattttcgtcgtgaccattcacgatgctcaggctcgtcgtcaaagcttcggtcaggtatccggtgcattcatccgcctggtgaatgatgacaatcagacagaagtcgcccgctatgacctgactgaagatgcctctaccgaaaccgccatgctgtttggcgaactgtatcgccacaacgcggaatggaaattccgcgcggttggacagggttatgccggtggtctggcttccgtttgtgcgcagtacggcattaacgcgtcctga

SEQ ID NO: 187023 - DNA, 1041 bp, Klebsiella oxytoca
atggtttcaacacacatcggtttcccgactgaaacagtgattgtttttattgcgctgtcagtcggtgccatctttattgacctgttcatgcaccggcatgacaagccaatttcccttaagagcgcggccttatggtccgttttctgggttatcgttgcgatggcatttgccggtttcctctatgttcatcacggtgcagaagttgccagcctgtttgttacaggttatgccctggaaaaagtgctgtcagttgataaccttttcgtcatgatggctatcttctcatggttctcagtgcctgatcgttatcgtcaccgtgtgctgtactgggggatcattggagccattgtcttcagggggatcttcgttgccattggtaccggactcctcagccttggaccttacgtagaactggtctttgctgtggttgtcgcctggactgccgttatgatgctgaaaagtggtgatgacggtgatgaaattgaggattattcccagcacctcgcctatcgtctggtcaaacgcttcttccccatctggccgaaattgtccgggcatgcgttcctgttaacgcaaaaagaggtggatgcagagctggctaagcccgaaaacaacgatgtcactgtgggtcgggtaaaaaaagcggccttatatgcgacgccgcttatgctgtgcgtggcggttgtggaactctctgacgtcatgtttgccttcgactccgtcccggcaatcattgcggtcagccgtgaacctctgattgtctacagcgcgatgatgtttgctatccttggccttcgtaccctgtattttgtcctggaagccctgaagcagtatctgtctcagctggaaaaggccgttatcgtcctgctgttctttatcgcgattaagctgggactcaatgcctcagatcatatctggcatcatggctacagtctgtccgcgaccaccagtttgtatgttgtattaggtgtgctggcactggggattcttgccagcgtcatcttcccggaaaaaccggaagcagaaaacaaagagagctga

SEQ ID NO: 187024 - DNA, 456 bp, Klebsiella oxytoca
atgagcttttttgacaaagtaaaaggggcgctgacctcagggcgcgaggaactgacccgccaggttggccgttacaaaaacaagaaatttatgcagggtactgttgctgtatgcgcccgtatcgcggttgccagcgacggcgtcagcgctgaagaaaaacagaagatgattggatttctgcgggcgtcagaagaactgaaagtcttcgaaacgactgaggttatcgagtttttcaacaaactggtgaccagcttcgactttgatctggaaatcggcaaaggggagaccatgaagtatatcctcgccctgaaagaccagccagaagcggcgcaactggctctgcgtgtcgggattgcggttgccaagagtgacggtaactttgacgcagatgaacaaaatgccgttcgcgaaattgcacgtgctcttggcttcgacccggctgaattcggcctctga

SEQ ID NO: 187025 - DNA, 1158 bp, Klebsiella oxytoca
atgaacctgactccagggggaaatgcccccgttcccgctcaggaactccgcgtgcggatcctctccggtggctctgtcgatgcctcagctttccgtctgttcgccgatggaaaagtgcagggagacaccgatatggtcttctacggacagccccgcaacgacgataactctgtcagttttcatgccgagggaaataacagcgcttttatcgttgaccttagccgcctcaaatcagaggtacagaaagtcgcttttacggtgacctgtgacggcagccacaccgtctcggctctgaataatctttctatcctggttgaaagtggtgcttctcaactgataagcgggcaggtcgaactgaccggacggcaggaagctgctcttatcctcggtgaattctatcggcgtaacgctgaatggaagttccggtttattgcccaggggtttaatggtgggctcaagccactggctgaacactttggcgtcaatgtctctgatgaacctccaccgtccacacaaccgccgaccacaccgcccccagctccaaataaagtgagcctgagtaaggtgtcgttaaccaaagaaaaaccggctatcagtcttgccaagaaggataactttggtgagatccgcatcaaccttaactggcatcgcggaagcaactccggtggtttactcggtgggatgttcggctctaacaaagcgatcgatcttgatttgggggcgttcgtggagcttcagggcggttacaaatccgtggtccaggctcttggcaatgcctttggcaactatcatcacgaaccttttgttcagctgcagggcgatgatcgtaccggggaggcctcggatggcgaatggatgcatattaatggtcgggagtggaaggaaatcagtcaggtactgatatatgccttcatttatcagggtgtccccagctgggataaaaccgacggtgttgtgactctccatgtaccggaccagccccccattgaaacccgtctgaccgaaggtgataacaaacgaacgctgtgtgcgattgcccgtctggtaaatgacaacgggtccatccgggtagaacgcattaaccagttcttcagaggtcaggaggagatggataaggcatttggctggggatttcgctggtctaaaggttccaaataa

SEQ ID NO: 187026 - DNA, 585 bp, Klebsiella oxytoca
atggtttctttaagtaaaaaccagacggtatcactcagcaaacactctactgctctcagtcaacttcagtttggtcttggatgggatccgctaaagaagaaagggattttcgggggcctatttggcggcaatgattctatcgatctggacgctggttgcgttctgttggacagtgccggtaataaaattgacacaatctggtttcgtaaactgaaatcgacctgcggctcagtggtgcataccggcgataacctgacgggtgacggtgatggtgacgatgaagtcatcaacgtctatctcagcaaattgcctgcaaaagttgaatacctggcttttacggttaacagtttccgtggacagaccttcaacgatgtggataacgccttctgccgcgtagtagaccagaccaataaagaactggcccgatacaaactcaccgaacagggttcacataccgggatcattatcgcctcactgcgacgcaataacggcaactgggactttactgcccatggtaaagccagtactggccgtacaattgatgatatgcacgcggacattgtcagtacggttgttagctcatga

SEQ ID NO: 187027 - DNA, 1059 bp, Klebsiella oxytoca
atgaaaaagaaaatttggtttatggaaggtttgtcatcccagcgagacattattctcgctgttaaatcttttgcagaaaaaaataaaacagacattcaggttatttcttctcaccgtaatgaaagaaatgaaattctctctgtttcagatctctcattaatcgaacctaaaaatgaagatgaccgtctttctttcattcactccgtcacgatgaaccatggcattaatgcgattcataccgggcgaaactgtaaatggtttgaaagtcagcgagatgccattcaatccccgtccgtgagtctgacaacaggcgcgaccgggactgaatggttcgagctcgctgacgaaaaagttactttttcggagttcatggcaaaaaaaggtctcccggttgtaccatctgttcgggtcacctctctcgacgaacttcgcaatttgctgagtcactcgccgtttccttctgattgtctctgcattaagcccgtgaccggcatttatggcatgggattctggcgttttgatgacaatgtttcccctgttgcatttctgaataatcccgacagccgtgttatccgcccgtcacagtatctgtctgcacatgccgaaatggagacctttacacctcaggtgctgatgccttatttatccgggccagaatattccgtggatatggtggtcagtcaagggacggtcctggccgctatcgggcggcgtaaggaaggcgtgcttcagtatctggagaatgaaggggaagcgattgaacttgccatcgactgcgcccgcttaatgaacgcagacggcctggttaatgttcagacccgccataatgccgaaggcaaaccactgttgctggaaattaacatgcgaccatcaggtggtatcggttatacgcagcacagtggcgtgaatctgccgggtctgtatgccttccatacactggggttgatggatgaggatcagatcaggcagtcagcgaaaactgatttttcgcctgcagtcgtccgctctgtcaccgacgtcattcgctacccggcattattgaccaacagaatagattaa

SEQ ID NO: 187028 - DNA, 1143 bp, Klebsiella oxytoca
atgtcagtaatggatggatgttccgtttatcaaaagacattatcttgtgggcggattgaggtaagcagccaggtgaccgattatcctcttactgatctctttgatatcgccgaacggcggaatcctaaacgcgcatttctgtttgtcagtaaagtgctgggtcgccatattcctgtctcgcctcaggtcatgcgcaatgtttacacacagctggcggagcagttccttgggacactggacgggcctgtggtctttatcgggatggccgagacggctgtcggccttggggcgggagtgtttgatgaggtgcgtaagcatcaccctgattgtgtctatctgacatcaacacgccatccggtcgatggcgaactgctgtgcgagtttaaagaagagcacagtcatgccactgaccacctgatctactgtccctccacaccggatatgcggcgcacagtggcagaagctcagacgctggtgctggtggatgatgaagccacgacgggaaaaacgtttctcaatcttctggcctcattacgtgcatcgggtgcactccggcaggtacgacgggttattgctgtcacgctgactgactggagcggagaggccctcagtcagaacagccccctgcctgttcacgctgtatcgctcatctcaggcaactggcgctggacacccgaaccggatgccccgctgcccgtcatgcccccggttaatgtgacctccagggggaacatcccgatcaccggcaaacaatcctgggggcgactcgggatgcagataccggccagtgacctgggccttaaggtgaaggtttcgcacggggaaaacattctggtgctgggcaccggcgaattcgtctgggaaccgttcctgctggctgaacgtttgggatcggcgggcgctcaggtcctttacagttccaccacccgatcaccgatttcaaccggctttgcaatccagtccgccattgctttcagcgataattacggcctgggtatcccgaattttgtctataacgtcgcccaccagcggtttgaccgcatcctgctttgcacagaaactccggcgtcgagcgtggacccccgcctgcttgaggcgctttccgccgtcgctcctgccgtagaggtgattacctatgaataa

SEQ ID NO: 187029 - DNA, 774 bp, Klebsiella oxytoca
atgaataagcccgtcgtattcagcgacctcgatgacaccctgttccagacccgccgaaaaatggtggatgaacttgcccttgaacccttccggaccggcgcactggatcgcagtctcacacctcgcagctttatgaccgaagagcaggccatgctggtggactggttgctggagcatgcggatctcattccggtgacggccagaggaacggaagaaatcagccgggtgcagatccccttccgttcctgggccgtaaccactcatggtgcggtgatccttcgtcctgatggtacgccagaccgcgactggaaagcccatatgctggagagcctgtcctcctacgccgaccgcttaacgtcaatgcaacatatcattaccgaactcatggaagcacggggcatcaatgcctgggcacggctcaactacgaatatgatggtacgccggtgtatctggtcatgaagcactgcgacagcacgaagcttgatgaactgaacgctatcggggatgagatcgagcgcgtcttttcgaccgaagggttttacatccaccgcaacagcaacaacattgcctggttaccctgcccggtagaaaaaggactggccgtttcctggttgctggaaaaactccgtcaggagcgcggggttttcccggtgatagggctgggtgacagcctgagtgaccatcggttcatgaaactgtgcagctggtttggtctcccacgccagagccagtttgctgaggctatttcacagcatatttttggagagcaataa

SEQ ID NO: 187030 - DNA, 1080 bp, Klebsiella oxytoca
atgtctcacatcacttcgttttctggttcgtatcaaccggacgatgttcagtttttgctgaaacccattgctatggagatgacgccggttgacctgaaggaagaactgattcagtcagggaaaatgcattactccgacatgctgagtcaggagcctgagccaacccgctggcatctggatcttttcacccgtgcgctggacgcgggggcagcacggctggcgcgggaggtctctcagcttagccgtgaactggccttacgcgccggtgatgaccccgtggttctggtcagtctggtcagagccggtgtccctcttggtgtgatgctccatcaggcgctacgggcaatgggaaaacggtcttaccattacggtatcagcattatccgcgatcggggtattgacgctgcggcgctcgactacatcgaatcacgtcatggcacaaagggcattgtgtttgtcgacggctggacgggaaaaggagccattaccggcgaattgtcacgcacgctgaaggaccgccccggctacccggtacaacctcgtctggttgtgctggcagatccctgcggatgtgcctggcttgccgccagtgacgatgactggttgatcccattcggtatcatgggtgctcctgtatcaggtctgatttcgcgctctgtctggactgaagaaggcctgcatggctgcgtggtctgcgatcaccttcagtcttttgaatgtagccagatgctagtgaatacggtagcgcatttccgcgaacaacttgacggtcgagaccttcccgcttcaggttgggacgccgggcacaatgccgcacgctggcagctgagccgggacgtcatcggagggttggccgaacgttatgaggtggacagcattaaccggattaaaccgggcattgctgaagcgacacgggcagttctgcgccgtgtgcccgatcatgtgtttgtccggcagatggatgacccggatgtcgctcttctggtcggtctggcaaaagagaaaggtatcgcggtgacggaagccggggacgctctcggccagtatcgtgcagttaccatcatcaaaaaggtacgctga

SEQ ID NO: 187031 - DNA, 957 bp, Klebsiella oxytoca
atgaaaaaacaattcactccctgggatctcggtgcaacgctgtatatgccagcaacccgtatggatcttgccgaagttgtgctggaagggaaaatacccggtctgcggtctctggtggtctgtctggaagatgcggtcagtgagcatgatgttccctttgctcttcagaatctctcactgtttttgcaaaggctgaatgacgcgaaattccaacatggagacgacgagtggccgctggtttttattcgcccccgtcatccggacatggggcgatggctgactgaaaacatggagctgagtgcagttgatgggtttgtgctaccgaaattcacccgttccacgttgccggtatggtgggacatcatggccggtacccggttgagcatgatgccgacgcttgaaacagaagaggtctatgacgttctgaaaatgcaggcgctggcttctgaactgtcggaccatgactgccgggaacgtattattgcgctgcgcatcggggggaacgacctgatgaacgtggtctctctgcgacggccacgggatctgactctctacgacacgccaatgggctatgtcattaaaatgctggtttcggtttttgcaccccgtgattttgcgctgactgctccggtatgcgaacacattgatgaccatggcgtcatggagcgcgagctggcgatggatatcgctcacgggctggtgggaaaaaccgcgatccatccggagcagatcagtgtgattgagggggcactgaaggtctcgcctggcgagcattcagatgcgctgcgtattctgaactccacacaggcagtctttaaatctcagggggcgatgtgcgaaccggcgacccaccggcggtgggctcgggggatcctggcccggggccaggtttacggactgacgacaggacagaaaacggacgggatgaggctgatcccgttctctcagcagcaataa

SEQ ID NO: 187032 - DNA, 621 bp, Klebsiella oxytoca
atgcgtcagaatgcgctgctgcttgagcgtaaaccggcaataccgccctcgaagcgggcgcatacagggaaagtggccgttggagaaagtaaccagcggtggtgctctgacggcttcgagttcagctgtgataacggtgaaaaactgcgggtcacgttcgcgctggactgttgcgatcgcgaggcacttcactgggcggccagtaccggtgggtatgacagtgaaaccgtgcaggacgtcatgctgggtgcagtagagcgtcgcttcggtaacagcctgccgacatccccggttgagtggctgacagacaacggttcagcctaccgttctcatcagacgcgtcagttcgccagaatggtaggactggagcctaaacatacggcggtacgtagcccggaaagcaacgggatggcggagagcttcgtgaaaacgatgaagcgcgactacatcagcatcatgccaaaacctgacgggttaacagcggtaaagaaccttgcggaggccttcgaacattacaacgaatggcatccgcatagtgcactgggatatcgttcaccacgggaatatctgcggcgacgaaccagtaatgggttaagtgataaaaagtgtatggaaacatag

SEQ ID NO: 187033 - DNA, 1305 bp, Klebsiella oxytoca
ttgcatcgtctcaacagtcgggtaaggcagctactcccgccggtagatttgacggaactgttgcttgagatagatgccagaacgggctttacacgtgagtttacgcatgtcagtgaatccggggcccgggcgcaggatctgcacatcagcctgtgcgcggtcctgatggctgaggcttgcaatatcgggctggaaccgctgataaagcacaatataccggcgctgacgcgccaccggctcagttgggtgaaacagaattacctccgggcagaaacgctggtcagcgccaatgtccgcctggttgattttcagtccacactggagcttgctggccgctggggtggcggcgaagtggcttcagctgacggcatgcgctttgtcacgccggtgaaaaccgtcaattcaggacctaacagaaaatattttggttccggacgtggcatcacctggtacaacttcgtctctgatcagtattctggattccacggcatcgttgttcccggcacattacgtgattccatttttgtgctggaaggccttctggagcagcagacagggctgaatccggttgagatcatgacagacacagccggtaccagcgacattatttttggcctcttctggctgctgggataccagttttctcctcggcttgccgatgccggtgaagcagtattctggcgggtggataaatcggcaaattacggtgcactagacgaactggctcgtggttgtgccgatctgtcgaaagccgagtatcagtgggatgagatgatgcgagccgccggttcgctgaaactgggtaccattcatgcttcagaactcattcgctctttgctgaaaagctcgcgcccatcagggttggcacaggcgatcatggaagtggggcgcgtcaacaagacgctgtaccttctaaattatattgatgatgaagattatcgtcggcggatcctgacgcagctaaaccggggagaaggccgccatgctgtggcgagggcgatctgctacgggcagcgcggtgagatcagaaagcgctatcgtgaaggtcaggaagatcaactgggtgcactgggcctcgtcactaacgcagtggtactgtggaacacactttatatgcaggaagccctgagctggatgcgcaggaatggagaagaaaccgggggtgaagatatcgtccggttatccccactgatgcacgggcatatcaatatgctggggcattatacgttcacgctaccggaggatattttgaagggggaactgagagaattaaattttaatttaaacaatgaattaccttcttag

SEQ ID NO: 187034 - DNA, 1713 bp, Klebsiella oxytoca
atggcgcattcttcctggcccgcactggttttcgcgcgccatcacgacgcggcggtcattagccgggcgctgcggcgaggccggttgcagcgtctggcgcgcggcatttacagcggcgatgttcatactcccgcagaaaccctgaccagacgctatttgtgggagattgtcagtgcgctttttcccggcgcggtcgttgccgggccaacggcgatccaagctgacccggccgcctgcgccacgatttacctgatacattcgcgccgccgcgcgctcgccctggccggcgtaacgctcgtacctgtcgcaggcgtggggccacagccggatgatatacggctgacggataacctctggctggcatctccggcacgctgtctgctctggttcttcagccagccggaggcggaacgcgatcttgcgcggctacatgcctggcggcaggcgacgcaaatcgcgcccgatgcgctgctggccgccatcatcagacaggcggcggcgctgaacagggaaagcgcgctgcccgacgccgccgcctttcttgaccagacgccagcgccgcagagcgcgcctgcggggttgccgcccctcggcatgcgcgcccgccagttgctggagtcgcttatcactgacggtagcgccatgcagtctgaactgattacgcggctgacgatgagcaaaagcaccgtttcatcaggcttgcaggagttacagcgtcaccaactgatcgttacgcttgaaggggagcggcgcggtgctcagctatatcaactttcccgccagaccggctgggtgctgggcgccgatatcggcaatacgcaggtgctgttggtcgctcgcggtcttgatggcggccagttggcgctgagacagtttacgcataccgggtccgttcaactggtgaaagcggctgccgacgccatcgcggcgctgcgtcaggagctggcgtcgcttgggccgctgctggctatcgccgttgcgctctccaagccggttcgcccggatattcaactgtcgggccgggaaggaccgtcccaggcaggacagtcgccggaggcgatactggcgcgtctcgcgctgccatcgggcgtaccggtaatcgttgaaaacaacgtcaactgcgcggtcgtggccgaagtgcggcacggcattgcgaaagggttgaaggatgtggtgtttttgcaaatcggcgatcgtatcggcagcggcattttcagtggcggcgttgtgatccacggcgcgcgcggcggcgctggcgaaattgccgatattccgtttccctggagcctgcacgaatcgcctggcgagctgatgctggagcggcatctggcgaaacagggttttcttgagcgacttaacaccagccgcccggccgcttcgcccgtggtgcgctcgtttgatgcgctgcttgaacgggccgcagcaggtgaacctctggctatgcaggcggtggagaaatatggcgagcaaatcggttttcttgccgccggactggtggcgattctggatccggcgatgattgtgacaggaggcagcgtcgggtcgaactggcttatcgtggctgcggtgcgcaaaaccctggccgcgatttccccgcacacggtggtcgccgcttcgcaatggggccagcaggcgaccgttgaaggggcggtgcagctggcgctggacgctgcgcaaatcaggctgctcgggcgagcggttaaaccgcgttag

SEQ ID NO: 187035 - DNA, 1017 bp, Klebsiella oxytoca
atgagcgacaacgaaatcttaattccttttgcgcagggcgtggcccagcagggcgacagccttactgataccgtccagcgcacgcaggcatggctgaatacgctggatcttgaggcgatgcgccgcagcgcgctgctgttcgccggtatcggcgcgtcgtatgccgtgctcgcctcgccggtacatgaactgcgggctgccgggatccgcgcctttcgttccaacggagatgatatgccaaccggcacgcctgtgctggccgactggtatatcggcgtatcccaaagcggacgcagcccggaagtggtgcgtatcctgcaacagcaacgtcacgaacggcggctaacgattgtgaaccaggccgggtcgccgctggagcgcatcagcggccagccgctgtggctcggcacgcttatcgactccagcatgtcctccgtcgcgctgatggccacaagcgtcagcctgggtttattaaccgacgcgctgatcggtcgtgatgagacagcgggctggctgaccctgccgcaaacgctggcagcgcaacggccttccgccgatgcggttattgcccggtttgtcgcccgccttaacaacccaggctgtatcgacttggtcggcggcggcagcagcctcagcgcggcggaacagggggctctgctactgcgcgaaggaccgaaagccgcggcgatgggcatgggtactcgccactacctgcacggcatgaccgatgcggtcggcaataccgcgcatgtgctgatcggcggcgagcgcgaaattttgctggcaaagcagatgtccgcctttggcgtgccggtattgcttatcactgatacgccgcaatcattgcccggcgtagagacgctgaccctaccttcgcttccgcctttgcagcgcctggcgctggaactgctggcgatggagctgctcgccattcatcttggcgccgtgctgggccgcgatatcgataccggcatcgtcgagcgtctggataccaaaatcaacggagagacgttatga

SEQ ID NO: 187036 - DNA, 933 bp, Klebsiella oxytoca
atgaccacctgctggttaggaatggatgtcggggggagcaaaatccaggtgcggatcgaagacccgcgcggcgctgtcctgcttgatacacagtggccgaccggcccttggagcggcgaaccttttgtctacaaagccgcccgcatggcggagctgattgcgctcgcctgcaggcaggcaaaacttaccgcgccgcccgtcgccgtaggcattggcgcgcacggctgcgatacgcgggaagagtgcgccgcgatgaccctgctgatggccgagcgcctgcccggttcagcctgcgaagtcgtgaacgacgccgcgctggtcgcgctctctgccggtagtgggcaggcggccggattgattgccggcaccggctcggtggcggtagcccttgatgccgacggcaactggctgcaaaccggcggctggggctgggtgatcggcgatgaaggcggcgccagcgggctggtgcgcgcggccatcggcgccgtgctgcacgactgggatcgcggcaaacagaatgatccgctgaccgtcgcgctggtcgaggctttcggcgtaacgcatttgcttgaccttccagcgcagctgctgcgctcgccagccagcggatggagtcgccacgcgccgctgattttcgactgcctgccgaaggactcccggctggcccggcaggtggttgacgctgcggtcatgtcgctgacgtcgctgattctgcggctgcgcgcgcggggcgcgcgctttaatcaggtggttgcggcaggcggtgtcattcgccatcagccgatcctgttcggcctgctggcaaacgccctgcgccagcatgacgacgccttaacactctctctgttgcagcaggcgcccgtcaccggcgcgctagctctggcgcgccatatcgcgcccgcgacgctctctttttcccggcgaggtgaatga

SEQ ID NO: 187037 - DNA, 1509 bp, Klebsiella oxytoca
atgtctcagtatgaaaacgacgctgctccggcagtcagcaaagcgtggcggtttcccagcacttataccgtactgattgcgattaccgcggtggtctggttgctgacctgggttattccggccggtcattaccagacgcaggatggccgcccggtagcgggcagttttgaggtcgccgccagcccgctgacggccgatcagcgggtcaaagagctgttcctcgcgccggtgaacggcctgtacggtattgagaacgcggcgggccacgtcggcccttacgagagcggcagcgtctttggcgccatcggcgtcttcttctatgtgctgtcgctgggtgcgtttatcgtcaccaccaccaaaaccggggccattgacgcctgtcttggccatgtcgcgcagcgctttcgccggcgcggcggcctgctgattgccatcgtcatgctgcttatcgccattggtggttccacctacggcatgggcgaagagacgcttgggttttacgcgctgttagtgccgctgctgctcggcctggggtttgaccgcatgacagcggtgggcgttatcctagtgggttcggtagtcggcaacatgaactcgaccgttaacccgtttatgaccggcgccgcctccgcaggcgcaggcgtaccaatgggcagcggtatcgggctgcgttttgtgatgtttctggtgctgaccgggcttgcgattggctacgtcgtgatttatgcccgccgcgtgcagcgcgacaccgcccgttcggtagtgggctttaccgatgaagatcgcacgctggcgaaggcgcagctacagctgccccagccgatgacgcgccagcaaaaagcggtcatgctcgccttcgcgggaacgttcgcctttatgatcttcgcgattattccctgggcgcaggtgattgtcggcccgcaggcggcctcgtggtcgtggcagctggactggtactttccggaactgaccgcgctgtttctggtcatgtcggtggtgacagggctgttgggcggcatgcgcggcaatacgctttacaacgctatgctggcaggtattgccgactttatgggcgcggcgctggttatcgtgctggcgcgcggcattaccgtgatcatgcataacgcccagataaccgataccgtgctgcattcgatggaaagcgtggtcagtggcgcctcaagcggcctgtttgccatcatgatgtatctgatcattatgccgctgtcgttcctggtgcccagctcatcgggcctggcgacgctcgccatgccggtcctggcgcctatcgccgatttcgcgggggtcggacgggagatggtcgtaacggcgtaccagtgttcggtcggaacgatagccatgatctcgcctacctcggccatcgtcatgagcggcctggctctggcaaaggtgagctatccgcgctacctgatgtgggtgctgccgctgcttgcgctgcttgccgtcgccacctgcctgttcctggtggcgggcgccgccctctcctga

SEQ ID NO: 187038 - DNA, 315 bp, Klebsiella oxytoca
gtgagctacatcatcgcgtttgtgaagtttggtgattcggacatgaactatccggtcgaatgttttcgcacggatattaaacctcaggactgggtgctggttcgccttgcgaatgagcggataaaacaggccaccgtcgagcgcgttgattacatgaactgggactgtacgggccgtatcgcctggaaggcgggagaagcccggctcgacgaaaaaggtcggctcgttgcgcagcctgacgcgcccgaaaccgtcgggctggtgatgtcgcaggcgacagcgggctgggaaaaaagctcgggtagactgccttaa

SEQ ID NO: 187039 - DNA, 444 bp, Klebsiella oxytoca
atgtacagcaatcaacgcgagacgtcgcagattctgtttcgcaaaaatggtgtcgatttgctgattctccctgagcgcatcgccacgctgcccgcgccgggcagtgtcgtccatatccgcatcagcgaaggacagctggtgcggcatttcctttccggtaccacttttaatctttatgagggtatttatcgcttcgcccgcagctttacgcacgaagaaaataactatgcgcgctttttccaggcggtaggttcccctaagtgtagcgaccgccgtcatgccacacgtcttgcaagcacaaagcgttattgtcgtctcagcataattcacacgcgccgtgattctgatagcgccttcagccattcctttcgccgtattaaaagcctcacactcagcgaatacagaaaaactatgcgtttaaaaaagaatgaattatctccttag

SEQ ID NO: 187040 - DNA, 1098 bp, Klebsiella oxytoca
atgaacaaaaaaaataaccgaatcaccgtgaaagacgtggcgcgcaaggcgggggtttccaccgcggcggtaggccgggcgctgggaggttacggctatgtcagtgaggagctgcgtgaaaaaatcatgcgcgccgccgaagagctgggctatgtggcaaaccaggtagcgcgggcgatgatcaccggcaaaagccagaccatcggcgtggtgggcgcggacatcagcaacccctttttcgccgaggcgctgcgcggcatcagcgatatcgcccgtcgccacgagttcggcgtgcttattaccagcagcgacgaagacgtgccgcgcgagcaggaggcggtgcgcattctgctggagaaacaggtggacgggcttatcgtctcgcctgctgatataaacaattgccaccacctcgaccaggctatcgcacaaggtattccagtggtgctgctcgaccgtaagctgccgacgctggccgccgacgcggtgcttatcgacaacgtacatgccagccgcgaagctacgcgctacctgctaagctgcggccatcgtcgcatcgccatcatcactgagttaagctcggactacgatacgcaactggcgctggagccggagaagttttcgacgatcaacgccgaccggcttaactcaagcggtgcgcgcctgctcggctacctgctagcgcaccatgaagcgggcgtggcggtggagaaaaccttaatccgccgcactggcaaatattgcgcccagcacgcgtttgaagagacactggctgtgctggacgccgccgcgcccacggcagttttcgcggtggataacgtcatgacccagggcgcctggcgcgcggtgcgtgagcgcggcatcgctgtgccgcaaaagctctctttcttcgccttcgacgaactcgactggctgacgctcaccaccccgcgcatttccaccgttgcacagccgattcaccacatgggcgtgcatgccgccgagctgcttttcaggcgcatacgtgagacagatttacctgtctcgtggcaaacgtatcaggtggagatgaagctgcgcgagtcggtggcgccgatcgcggagaacgtgaaaggataa

SEQ ID NO: 187041 - DNA, 1038 bp, Klebsiella oxytoca
atgacgcaaaacaccacagtttcactgccgctgcgcccgctggaagcggactttatcccgacacttgagaaagtgctgggacagaaaaacgccatcgctggcatcgctgaggccgccgcctcccgcccgctgaaagatatctatttcgtcggctgcggcggctcgttctcttcttccgttcatgcccacgccctactctgcctccacagcaaaaagcttcaggcgtggaacctgaacgcggcggagtttatggcgctgccccctgcccgtctgggagcgtcgtctctggtgatcctctcctcgcactccggcgccacgccggaaacggcgcaggcggcggtctttgcgaaatcttatgacgcgtatgtggtctcgttaagccaggagctgaacacgccgctcgccaataccgccgacaccgcgctggtttactacagcccgcgtaccgtgacgccaggcaaacagcttctgctgctgcaactggtgattgaactgctggagcacgtggataacctagacgtcagcgcctggcgcgacgccctgcccgccctgcctgcggcgctgcaacagtacctcgataaacaagaagccgtcggcgacgccattgcgaaatccatcgctcagggcggcgatatttacgtgaccgccgctggtgctaactacggcgcggcctacacgctttcctactgttatctgatggagatgcagtggcgcaacgccaccccggtgctggcgggtgatttctgccacggcccatttgagatgattttgccgggcgcacacctggtggtgttccacgccgatgacgacagccgcgccatgacgcagcgagccatcgactttgcccgccgctataccgaaaacgtccatgtgtttgacgccgctggctttagcctgccgggcgcagcgccagaagtgaaagcacgctttgccgccatcgcgctgggcctgatgggcacgcgtcttgcagatcacctggagcatcacaccggccactctctcgatgaccgccgttacatgtacaaagtggaatattga

SEQ ID NO: 187042 - DNA, 831 bp, Klebsiella oxytoca
atgcgaatttgtggagtgggtgacaacgtgattgaccgctacctgcactgcgacctgatgttcgcgggcggcaacgcgctcaactttgcggtttttggccgccaggccggggcgcaggccgcctacctcggcatcaccggcaacgatattccggcgggtgttattcgccacgcgctttgcgctgaaggagtagacatcagtcgcgtacggatcaacgaaagctttaacgcgctttcgcaaatcgatatcgacgccgacggcaaccgctttttcgtcggttccgtgccgccgccttaccagctgcggctgagcgaggcggacctggcgtggcttgcggacttcgacctgctgcacaccagcgattacagcgggctggaagcacagcttccccagcttgccgcctgcgcgccgctctcgttcgacttcggttcgcgcgacgacgcctgggccgagccgctgctgcgctgggtgcaggtcgccaccttttcgcgcagtggcagcgcgccgcaggcgattgaaaggctgatcgccaacgcgcacgcggcgggtgtcgccaccgtgctggtcacgcagggcgcggacggcgcgattatcagccaccggggcgaacgccaccgtcagcccgcgctgccgacgcagattgtcgacagcctcggcgcgggggatgcatttatcgccacgctgctggtgaagcttggtcagggatcaacgcttgccgacgcagcgaacgatgcggcccttgcctcggcgagggtttgcgaacgcctcggtgcattcggcagcggcgtgccgctaacgccgctaccgcaggaggcaaaacaacaaccgtag

SEQ ID NO: 187043 - DNA, 756 bp, Klebsiella oxytoca
atgaagatgaaaaccttagcctgttcagtagcgctgctggccgcaatctcgcttgccttacccgccggggccgccgaaaagctggtggtcggcaccgaagccaacggcattcccatctcctttctgaacccgaaaacccatgagctggacggctttatgctggatatcgcccgccaggccgcaaagcacgcgggttatgaggtggagtttaaagcgatggatttctcagcgcttattccggcgctgcgcaccggcaagatagaccttatcgccaccggcatgtatatcaccgagccgcgcaagaaagtgatcgatttcaccacgcctgtgtatagctacggcgaagggatgatcgtgcgtaaagaggacactaaagactacacctcctttaaagagttgcctggcgcggtagtgggcgcgcagatgggcacgatttttatcgagcctcttaagcaggccaacatcttcaaggatgtgaaagcttacgacaccctcaccggcatcatgaaagacgttaacgccgggcgcatcaaagcgggctttggcgataccccttccatggcctattacctctcgcttggcgaatatcccaacgtgcggctggtgaagagctacaagccggtactgccaggctcgctcgggcttggcgtgcgtaaggacgaagagcagcagctggcgaagcttaacgaagctatcgccaccatgcagagcaacggcgagattacggcgctgctggaaaagtggaagcttaattaa

SEQ ID NO: 187044 - DNA, 663 bp, Klebsiella oxytoca
atgaacgacttttttaccttcagcgccaccgccctccccatcctggtggagggggtgaaatacacggtactggttaccttttgttcgcttatcctctcgaccctgctcgggctgacgtgggcgctgatgcgtctatcggcccaccgtccgctgcgcctggtgagcggtgcggtggttaacgtgctgcgcggcatcccgatgctggttcagcttttctatatctactttgtactgcccgatatcggtatcgaaatgtcggcgctgactgccgccattatcggcctcggcatcgcctattcagtttaccaggcggaggattttcgcgccggcattcaggctatcgacaaggggcagatcgaggcggcgcagacgcttggcatgtctaagcgcctgatgatgcgccgcgttatcctgccgcaggccatcaagattatctggccttcatacggcaacaccatggtgatgatgctcaaggacagttcgctcgcctccaccatcaccgtggcggaactttccctgcaagggaagctgctcgcctcggcgacatttcagaacaccaccgttttcacgctggtcgccctgctctatctggtaatgtgctggccgctgatgtggctgtgccgccgggtggaacacgccatgaacaagcgtcggagccactga

SEQ ID NO: 187045 - DNA, 741 bp, Klebsiella oxytoca
atgattgaatatcgcaatgtccataaaagttacggcgcggtacacgtgctgaacggcatcaacctgaccatcaaccgccaggaggtggtttgcatcatcggcccttcaggctccggcaagtcgaccctgttgcgctgcatcaatgggcttgagaactaccagagcggcgagattattttcgacggcgtgcaggtggacggcagcgagcgcgcgctaagtcaggtgcgcggcgaggtggcgatggtcttcctgcgctttaacctcttcccgcaccgcacggtgctggagaacgtcaccgaagggccgatttacgtcaaaggcgagcgccccggccccgcgcgggaatatggcatggagctgcttaaacaggtggggatggaccacaaggcgcattcatacccgcaggatctttccggcggccagcagcaacgcgtggcgatagcccgcgcgctcgcgatgcgcccgcgagccattttgttcgacgaacccacctcggcgcttgacccggagctggtgggcgacgtgctgaaagtgatgcgcgagctggcgaatcagggcaggacgatggtggtggtgacccacgaaatcgccttcgcccgcgaagtggccgaccgcgtggtgtttatcgacggcggtgtggtgaccgaagaaggcccggcgcgccaggtgcttaccaacccttcccacccgcgcacccgcgagtttttacaacgtgtactcaaccccatcagcgaggaataa

SEQ ID NO: 187046 - DNA, 828 bp, Klebsiella oxytoca
atgcttaacgccagccatatctgcgccaccaactttacctattcgcactatcggctgaaccactgcctggacgatgtcgccgcgctcggcgtgcagtggtttgaactatggggcgttgcgccacacctgcatatcgacaccgtgcaggaagcggacctgcaggcgctcaggcgggagctggcggagcgcgagcttaagctcgcctgtttcacgccggagcagtgtgtctacccggttaatatcgccgccgaaaacccgctgcagcgggagtacagcattaactatttccgccgcagcctggagatatgcgaaagccttgagtcgcctctactgtttatgacgccaggctggggttatgaagaggataagcccgcggaggcgcgcagccgcgcggtggacggcctggcgcaactggcgcacctcgcggaaagccgtggcgtgacgctggtgctggaagtgttgcagccgcgcgaaagcaacctcgccagcaccgtgcatgagctggcgtctctggttaacgaagtcagttcgcctgcgctcgacgcggcgctggatatcgtcggcatggcggtgggcggcgacagcgtgaccgattacctcaaagcctttgggccaaagctgcgccactgccattttatcgacggaacccctgcgggccatctggcgctcggcgacggcaacctgccgctgaaaagctacctcagcgcccttcgtgaaggcggctataacggtctgctgtcgcttgagatagccggtgggcgctactggcaggagccgctagagccgatgcgccagagcattacgttcctgcgcgacgcgctcgcatga

SEQ ID NO: 187047 - DNA, 891 bp, Klebsiella oxytoca
atgatagcgcgaagcggcgcggccatgctgcctgcacgcaaaagcgagagcctgctgttgctggtaacgctctgtgccggggcaggctggatcttctctaaagaggcacttggcgcgctgcctccggtcttttttatcgccgtgcgctttctggcgggcggtctgctgctgggcctggcggtgcccgcagccgaccgacgcgaatggcggcgcagcctgtggcccgccttcgccatcggcagcctgatttgcggctcgatgatgtgctggattgtggcgctgcatcttaccaccgcgctgggcgttggcgcgtttctcacctgcctcgggccgctgttggtgccgttcgcaggatggctgctgttccgccaggggctgtcgaagcgcatcgggctcgccatgctgctcgccctacccggcattgcgctgttggtgggcaacagctttctccagtggcggttcgaggcgggccagttctggttttttggtgcggcggcgattttcgccttttacttcagcctgaataaccgcttcgccatcgaccagccggtggtgctattcgccgccatgcagatgatcgcggttggcctgctggcgttgccggtgagcctgtggctggagccgtggcctggcgagctcaacgcggctggttggacatggcttgcgctcagcattctcattcccacctgcctgcgattctttttgcaaaactatgcgcagcggctagcctatacgcccaacggagggctcatcatgctgatggagccagtgtgggcggccattttctcggcgctatggtatggcgaagtgatgacgctgtcgcaggtgggcggcgcgctgcttatcctgctggcgctgacggtcgccagagagcgtcacgtcagcgcctga

SEQ ID NO: 187048 - DNA, 1239 bp, Klebsiella oxytoca
atgactacgactaatcaatttgctgcacatgttggtctggactgggcagataaaaaacacgatgtctgtgttcagtttaaaaacggcgaacgcgtattccatgtgattgaacatacagcagaagcgcttgatgtctggcttaccgagttacaccagaaggtagaaggcaggatcgctatcgccgttgagctgaagaaagatcccatggtgtatgctcttcagaaatatccgtttatcaccattttccctgtccacgctttgtccctggctcgttaccggcaagccttctcgcccagcggcgctaaagatgacccgcaggatgccgagctggcattagagttaatgctacgctatccccaaaagataaaagccattgaacccgacaatgcggatatccggttgcttcagcaactggttgagcaacgtcgtcagttggttgaagataaacgacgctttgtgaaccggataatcaacacgcttaaacagtattatcctcaacccctggagtggttctcacatcggggtagcttactgttgtgtgaactgattatacggtggcccagtctgcaacaattgaaacgtgccaggcgcgacacgatccgcaactttctgaatgctaaaggtggccgcgcaatggcccttaccgagcaacgagtggcgagtattgataacgtgatcccattgactacagacccgagtgttatagaggctaatgctttaatggcaacagcactggcgacacaaattaaagtcgtgagtgaaatcatcaaaacctatgacgaacgaatcgaaacgttgtttgacacattgccagatgcggggctgttcaaatcacttccgggtatggggccgtgtatgggcccacggatgcttgctgcacttggtgataaccgtgaccgttttagcagtgctgaagaaattcaaaactatgcaggtattgcaccggtgacagaacgaagtggccagaaatcctgggtacactggcgttggcaatgtgcaaagctcgtccgacagacattcgtggaatgggctgcgaagacgattaactcatcatactgggccagactttattaccagggccagcgagaaaaagggaaatcgcatcaatcagctatccgggccctggcgtttaaatggataaggatcatttaccgctgctggaagaccagaacctgctacgacgaagcaaaatatttgttggcactcgaagcgcgacactcacctttacttaggccataa

SEQ ID NO: 187049 - DNA, 999 bp, Klebsiella oxytoca; identical to SEQ ID NO: 103025

SEQ ID NO: 187050 - DNA, 246 bp, Klebsiella oxytoca
atggtcgaaatcaccgacgcccagcagattcgtctcaacctgctttcaaccctgaactacgacacagcagcagcaaaagtcgccgtagaatttgttcaggatgatccgcttaagtatcagctgtttattcagcaatacagccgtgtcacatcagagactgaggtagtagcaaagacgatgaaagcagtgcaggaagcaactgaatcgttgccgctctttgataccagcgctgaacaatccagctaa

SEQ ID NO: 187051 - DNA, 993 bp, Klebsiella oxytoca
atggcaaaaccggactggggcgagcttcagcaacggttcctgtccgaacatgccgcaaccggcgtatcaccgaaggattggtgtgaagcgcagggactgaattacgccaccgcccgtcgatacatcaaaaaaccttctgcgcaaactgcgcaaaaacctgcgcagaaaaaattgcgcgctgcgcaaaaggaaatgtgcgcagacgagctggtggatagcaaactgagtccaaaggtaaagcgcttcattgccgaatacctcaaggaccagaacgctacggccgccgctgagcgagcaggctacagcgacccgaactatggccgtcagctcctgacgaatcctaacgttgcgcaggccattgcgcagcagcagaaagcatccattgtgcgcacgcttggcagcgctgatgaggtgcttgagcagatgtggcgcctggccaccttcgatgcaaaccagctatcacagtatcgtcgcgggagctgccgttactgctggggctttggtcaccagtaccaatggcgtgatgccgtggagtacgaagaaaagcgactcgaagcgcttgagcgtaaacgtcgtgaacctctcgatgttggcggttacggttacgaccataccagcgcacctaaccctgaatgcccccgctgcaatggtgatggcatcggtcagccgttcttcgcggatacgcgcaagctggcgcctgatgctgcacttgcctattccggcgtcaagctcgggaagaatggggtcgagataacggctatcagccgcgagcgaatgtacgaagcggtgatgaagcgccttggcctggccgatagcgagttcgcccaacgtctgcagcagatagaaatcgagcgcaggcagctggagaacgacaaactccgcaaagaactggccgctgacccggaggatgacgaaccaacgccagttgcaatcaatatcaacgtagtcgatgcgcgagtgagggaagaggatggcgatagcaccgacgcttaa

SEQ ID NO: 187052 - DNA, 213 bp, Klebsiella oxytoca
atggccggattaacaaaagagcagcgcgctcaacgagctgctgagcaaacagcttctacgcaggcggttaacaacgtacccgtatcgaccacatcgctgctagtggcgatggttaccgatttcccggcattcccgggtgcgcccaatactgccaacgttcaccctgatgaagtggagaactggaaggcgcacggctggaaagaaatggagtga

SEQ ID NO: 187053 - DNA, 393 bp, Klebsiella oxytoca
atgactctcacagaaatcagaaacgctgccatttcccgaatggcggcacagaccgctattgcctctgatgcggtggattatcccaatggtccggtatttgaccccggcggccgcgatatctgggcccgcctcactaacattgcaggacaggctggcgcaaccgagatcggggacgggccggtcgtgcacaggacaggtttactcataattcagctgtttgttccggtcggttccgggacgttgcttatctcccggaccgccgatcagctaacggagctatttgagttcaaggacgacggaaagctgagttatttcgccgtttctgctgtgccggcaggcgagaccaatggctggttacagctcaatcttcaaattccttatcgcgctctgtag

SEQ ID NO: 187054 - DNA, 177 bp, Klebsiella oxytoca
atggctggcgtgccgctccctctatctctgaatgatatcgagctttacctggcatcgcgcaccatcctgatcgaccgcattgagtttgactcagcaatactggccctcgatgatgcctggagggctgagtgggctgagtgggctgaagagcagaaaagacaggcaaaagtgaagtag

SEQ ID NO: 187055 - DNA, 468 bp, Klebsiella oxytoca
gtgaaaagggctttggtggtcgggcttggtttaatggcattgttgggctgtgatgacaagtttcaaatatcaaaactactcccccctaaagccccatcttctattgctgagatgatagctacggggaaagaggaaataacgtcggaatgtaaaaaaggtgatgtttcctttaactgtgaattcctcactggcgatttaaccgggacgggaaagtggcatcataccaagctgtacctgcataacagcgggatggtagatatgattattgacggcaaggcttactatcaaagcgatatcagcagtaacacctttgctggtcaggagacaactaccttcacaatgaaaggcgttggtggcgacaatggtgaagtaaatatcgttagatccaatgaagggaaatctttaaattttgaagcctataacaaagatgacaaacggtttgttatgggaggcgttaaattgcagtaa

SEQ ID NO: 187056 - DNA, 3114 bp, Klebsiella oxytoca
atggcagaacaagaatcacggctagcgatacgcctggacagctccggggcagagaagcaggctgacagccttattgttgcgcttgataagatgactcagtctggtgataaggctgtaaccagcatattcaaagtgacaaaagcgactgacgaagaaaaagatgctctcaataaattacgagcagccattgatccggttggtgctgcaattgatacagtcggtcgccgctatagtgagctaaaaaaatacttcgataagggtctaattgacgaggaagagtttcgttcgctgtctaagatgctgaatgacaccactgaggaactaagtggtgttgcccaagctcaacgagaagcagagaaggccagcaaactggctgctgtgcagcaggaggcgcaggctgatgcattccaaagaatgctcgataaaatcgaccctctggcagctgctcttcgcaatcttgaacaacaacaaagtgaactgaatactgcctttaaatcgggcgcaattaatacttcccaatatgatgcatacagcaaaaaactgcaggagactcgtcgggaagtaaccggcgaagcacaagccgagcgcgaggctgtaaaagcacatgatgagcaggtaaatgcactgcgtcgtcttgaggcccaaatagatcccgtaggtgaagcattccgtcgccttaacgagcagcagcgccagctggatacagctaaaacatccgggatgctgtcgcccctggcttacgatcgcctcaacagcaaacttgcagaatcccgcgatgccctggagaaaacccaggcgcaattgggtaaaacaagccaatctgcagctcagactgccaacgctatgcgcatgatccctgctcagatgaccgatatcgttgtcggtctttctaccgggcagtcaccgtttatggttctcatgcagcagggcggtcagctcaaagatatgttcggcggcattgggcccgcgatcaagggcgttggcacatatgtcatgggtctggttaatccctacagcgtggcagcagcttcagttgggttgctaacgtatgctgtctatcagaaccgacaggaaattgatgctgcgacaaaaatagccacaacgtctcttggcgctaacggagatgctgcagaacggctggcgcttaatatggttgccatatctgacaagaccggtcaggcgattgatgaagtcggtagtatgtttataacgactaatgacggtgcgagcgaagcaataaataagcttatcgacgttggttttagttatgacgaggcaaggacaaaggtagcccaatacaaggattctgctaatttcaccgccttgaatgctgatattgatcagcatcgacgggagatcctgaaaataggtgattcgtggacagctgcagctattgagatcaaaaattattacacagcagcggataagggtaggcaaaacgtagcgcttggtggcgcaattgaccctacgatgaggtttatcggccaggcattagatctgcaaaccacgatgaacacacttaccattgaaggtaataaggcggtaaaaaattccgttgactggattaataaggagtatctggcggcagacagggttgccggtgcagaagctcggttacgcgaggcaagagcgcagtccagaaaaattgctttctcaggaaataaggaagcaatcgatcaagccaatgcgctaattgctgtcagggaaaaggaacttgagcaggccaaaaaagctgggcagcccaagaccaacaaagaaaaagcctatacagaggacgcagcaacccggctgcttgatcagataaaccagcagactaccgtcatgcagtcccagctggatgccagtgacaagcttaacagcgcgacacaggcgcgggttaagttcgaacagcaaattgctgacctcaagtctaaaacgcagctaaccgctgatcagaagtctattctggcgcgttcacaggaaatccttcaggcttacaaaaatcaggaagcgctgcaaaactcggtgaagactttagacgactaccggaaaatgcaggaacaggtcaggtttaaggatgagcagaccaatgatcttcttaaaactcgtcttgaacttctggaaaaggcaaaagcaactgggcaactgaaacctggtgaatatgaaaaaacgcgggcagatatttatcaaaataccgatatgcaactgccctcgacggttcgtaatgttgtgggttataccgcgccaactggcggccaactgtcaggaacattcggaggaatgcagcagcaatatatccagctagatcaagcacaaaaagatttggactcttggctttcccggcaggaagaggcttacgcaaaagccggtgttatcacagctgagggcgaagcgaggatgcaaaaaactcgcgccgatgctgcaaacgctgctgcagttatagaggcacagaaaaacgccattatcaccagcaccacccaaagcatgatggatagcgggttgagtattctggctaatggttttagtgaacaatccggaatatacaaagctgcattcgcagccagtaaagcctatgcaatcgcacagtctatggtggcaatcaatgcggggatcgctcaggccgcaagtctaccttttccgtcaaatttgatggctatggcgacggttgctatggagactgccaatatcgtctctaacataaaagcggttgctgatactggcttcgcttccggcggttataccggccccggcggtaagtatcagcccgcaggtatcgttcataaaggggagtacgtctttgatcaggcatcaacgaaccggatcggggtgtctcagcttgaggcgcttcggaatggtaaaccgcttgatgcaacgctcagcaaaccgggttttgggaccggggtgcagaacgtgaatagtgataacagcaggaaaaccactattcacgcaccgatagaacagcatttccattcacctgctggtgtaacccctgaccagatggctatctctatggcacaaacgcagaagcgggcgacaacagatgcgcttaatcaggttgcagcgcaagtgctgaagggggacgggaaggtgggtaacgcgatgcggagtaaatatcctggcagggggatgagttga

SEQ ID NO: 187057 - DNA, 267 bp, Klebsiella oxytoca
atgcgtgctgctgaatcccggcagggtagatgcaggcgtactgccaacgcggatatcgccattggtataatccagagctccgacaccaaggcacagcagcatctgcacgcgcattttcgtgggatcggcagcatcgaaccgggtaacgggctgcacaacataatcaggataaatacgcacgcgcccaaaaacttcacgaatcgcatcacccagtttcgcgctgtttgctttcgcagggttcaggtcgaggcttcgtccggtggatga

SEQ ID NO: 187058 - DNA, 453 bp, Klebsiella oxytoca
atgacagatggcatgatttaccatggggtaagaaagcatgaactactcagaattatcgagcgttctggcttaaccttcgaagaagcaccaaatacttttggctttgctgaaacctcccataatccactttctttgattctggatggttactttattcagattactcctatggcccgcgaagatcacaactgggaaatagcgccggtcgacactgttattttatctattattattccaccttctcttgatgaagacctggatgaaaacaccatgacgattatgtctgattgcggagttgctgagtttgagcttgaggatgccgggacaaggattaacaggctgataacatttgtcggtggagcaacggcaggcaatttcttacatcaactcaggcttctttacattacggcctgccaaactcaaggggggtttgaagataacgatgaaacttaa

SEQ ID NO: 187059 - DNA, 804 bp, Klebsiella oxytoca
atgactattctttcaaatttaaacattgacctgactacctttaacggacgtattcttatagtaagtgatctgtatggtcactttgaattacttcgcacagggttgtcacacttgacagctgttagcgacgaactcgttattataactaccggtaacctttttgactggggaccatctgctaagagtcttttgaagtcaattgtacaaagaaaaattggcgaccaaaaagtccatgttttttcagtagtgggctttcatgagcttctcatgactgatgctataactcaaaaaaacaataaaagcctgcgctattatccagacacgcatactcgtaaacactggagaagtttgggcggtaaatggcatgatcaatatgatcaaatcttacttgaacgtgacatatacaaaacagactacccattggttattaatgtaaaaacaaagcacggtatttacataattggttcgtctgatatcccccaggatggaagggaatggaaagacataatagataccctaaacaaaatggacagtcaaaaactgcgcattatggcaagtaatatcaccaggagtcgctattttcttgattctggcaaagtaatagacaacgtttcgcttgtagtgttaggtgcgcaccagcctaaagaaattgcatatggacaaaagtctaacgcagtgattaataaacaaatcacttgcctcttccctaatgactggaatggtttatcctctgctcctttggattttaaaataagaattcttgatatcacggatacagaactggggcgtttatatgaagtttaa

SEQ ID NO: 187060 - DNA, 603 bp, Klebsiella oxytoca
atgttaaattctaaggtagggtatttcaaaagtaaagatgaaaaaacaaaattcataagaatcacaaatgaaacggtcatcacaccattaatgttaacattcccagacattgatttttcaattgccgcaaaaaatggacatggtaccattgcatcaataggtaaaaattttgtgtgggttgagcctggaagtgacgtagttctccgtattaatgagggtgtgaaattttacgatttcattcctgtagtttatatggttgggaagaagaaacctaaagttctaacagttgtgacgggtaaaggaataaatgcagctaaagagtccattattatcacctataaggactcgcctgaatttattcgaattactaataatgatgttgtaaacagtgtatctaattttgatgaagtcagtaaaattaaaagtggattttctaatgtaaaagttagcaggtttacatcaataaatctcgacaaagaggtgtatataatttcgagaaatgggatgttaggaggttcacagtatttcacaaagaaccttattgcctaccctaacgaaaatcttataataaaagccaccggggtgactcatgttaaaaaatag

SEQ ID NO: 187061 - DNA, 288 bp, Klebsiella oxytoca
atgattgataaactcgctttatatgggaatcgttgtggatatgaatctcagaatgaaattatagttccaccatcatcggtcagtacatttatggtcccgaatatcgcattattaggattgtgctatacagatgatattaaaatggtttttgtaagcaaaaagttcaatggtttatctagtgagaacaaaaaaatggccgttcctgtagaagtggcgatgcggtttaagcttacttcaactaaaaaatatgaggagtatgttaatgttatttatagccagtgggattaa

SEQ ID NO: 187062 - DNA, 414 bp, Klebsiella oxytoca
atgttatttatagccagtgggattaaaaattcttgtttcgctctattcactttattttttacaactgggattacatgggccttttcctacactatagatacgaatcctcctggggcaataatcattaacgttgtcacaaaacaaaaaataggggtaactcctgtgaaagtagaaataccagatacacaggaaggaagaacatttggtatctcatataaggactaccggaacgttgccctcatgatatacaaaccagctccaacgcctgagagagcctttacgaataacccccccgttgtcgtcacaagtgcccttccgggagaatatccgttgggcgttaacattgatgaatcacaggataaagtcattgtagaattgaggccggtaatgtctgaacgcgtaaatatccaatga

SEQ ID NO: 187063 - DNA, 2718 bp, Klebsiella oxytoca
atgaacaattctcgtcttgcaaaagaactggaaagattaaatcttggacacttcattcctgtagtggacagaatggtagacgttccatattttttactggaagataatgcggtgggcatgtttttcatttgtaacccatctccaggattgtatgacaaccaacaaaacctgatgactgatttgtttaaaatggatttccctgctgagtccattatgcagatgtcgttggtagcattgcctgatgttaatacgtcactctcacgttggttgcgtcgtcgcggtaatcgaatgggcggtcgcgacaatgaaaaagcagacctgttgaccgtatattcacttgattatctttctaagagtcagtatgacccgttgaaagttgctgatggtgtaaaaattacccatgccgatgatttaaaactcaggaactttgagctttggataactgtcagaataccaatcaatagttttgtgccaaatgaatcagaatcaattaggctggatgcaatttataaagatttactggctaaattgaaagggcttagtctatcaccggttactggtgatgctgatatgtggttgtacaccgtagataaagttattaaccctggaaaagatgctcgctggaagtatggtggactggaatcgaactcacttcagccattaaatcagcaggtaaacgttccgggaagaaagtttgaagtcggtgaagattatttcgcttcacttactgctgatggcgaggaaacagctcaacgatattttaaacacctgtctatgacaaagttccctgagtatgtgaattttggggctatatatgaattagttgttgactggatgacaggaagcaaaactatattctcaccatttataattaatttctgcattcagtttccgtatcaaaagaaaattcaaaaagagtatctgcgttataaagcaatcacagataaccaatccaaaatcccgatcgtgttgaaataccttccacgtcttgctgatatggataaagattattcggcattaaccagagagttagaagacaaagcaaaattattaagaacctacatgacatttattgttatggataacactttggatagagtcaaagttgctgcgaaaagccttataagttactacagtgaaaaaaaaatcactgttgttgacgatagttatatttgcttttccggtgtcatgtcagctttacctctctgcaatgaccctcccacattcagagatatggatcgtggtgatgtgatgacaaatacgggggcagctcatttagctccaatttttggcccatggaaaggcaacacacaaaacccggtgataccatttgtcactcgtgaagggcaattggttatgattgatatttttgagacttctgcgtcttataatgtctgcgttggtgcaacatcgggagcgggaaaatcatttgcagctaacaatatcattcttaactatctgtgttcaggtgaacatataaatcctttgtatcattttgatgatattagagaacagcttacaaacgataaattttcccctccacttgatttaagcggtaaatttaatgcttctgctgatggtgctcaagtgtttgtagttgatatcggacgttcatatcaggggcttgctgagcaatttgaagactctcagtttattgacttcggtgttgatgctaagttttctcttaaccctttcgctttcatggttaaaaaatacaccgatgatgaatcattggagggagtaacggggaattcagaaggttcaaataaggaatcagacattatatctcagacaatcatggtcttgaatcaaataaagctaatggcatcaagcaacggtaatattagttcttaccaagaagccgaaatgattcgacttattgttgaagaagcaaaaaacccggaagataattatcttccttctgttactgggtttgcagaaaaatgcaaaaagcaagataaacaggaaattaaagatatcggcgtccaactcggtccatggtgtgaaggaggtatttacgggaaaagatttacaacttccttaccaccaattgattttgatagccggtttattgtattagagctggaagaacttaaaccgacccctcatcttcagtgggttgttttaatgtcaattattcaagctgcacaacacgctatgtttattaagaaagatggtcgacgcagactgtttattcttgatgaggcatgggaatacataggtgaaagtaatggtgatgatgctgcagtcacattcttcactaaattccttgaagctgcgtggcgtcgcttccgaaaaactaactgtgcaggcatctgtattacacagagttttgaagacttctacaagtctccaataggaattgcaatcgcgaacaactcaccatggaagttcatcatgaagcaatctccggaagcgatcgattcaatgcaaaagaacaaatatatctctgcaacagcatctgaatatgaaagaatgaagttgataagaactgaaaaatttgttttttctgaaatcatgattcgtttcgaaaacgtacagcagatagtacgtctatatgtagaccgtaaaatggaactttgctttactacagaccctgctgacaggcgtaaaatctggaatcttattgaggacggatttacctacgcagaggctatcgacagagtgtatgaacaggaacaaattcaattagggctttccaaaaaattagttgcataa

SEQ ID NO: 187064 - DNA, 852 bp, Klebsiella oxytoca
atgaaaaagttacttttcaatttactcattttgattgcattactacactcgtcatattcattctcgaatggtcaatacaatgcagatgctgctgcattaacccgttcagcatctgataacggtcttgctctgaatcagtcgacacgtggtttggtaaacaagctaggggcctaccaggcgaaggatgcaatctacttacctactggtggacttttcttatttgaagatcaacgaagtggtttgacgattgttacaacaacaggtcgttactcattttccgaaggtaaagcctatgacgtaatccgcaagactcagattcagacaattgctgatatcaggaaaagttactttttaccgttgagtgaagcaccgttcagaactgaggattcctttaccatacagtttgggaacccatcactaaaacgtcaggcagtgatatttattacactggactgtgcggattgtgttgcatttatcggaaaaatgaatgaaataaaaaacgatgtgcgttttgacattgtaattctaccgagtccaggagaggctgcaaagagagtcaagcagatgtggtgttctgttaaagccggtaaagtaactaattacgatatacttcagtcattattaggtaaagtaagcgatattaatactcgtcttattccacatgaaagcctgactgactgctctgtagaaccgatcataacaggtttatatcttgcatctatttataacgttcaaggtacaccctctgttgttcgcgaagatgggcttttaggaaatgggatacccacagactttaaagcctggttgaaagtgaatttacaacctttgctgcaaaacccatttgataaataa

SEQ ID NO: 187065 - DNA, 471 bp, Klebsiella oxytoca
atgactatgactgaacagaataataaaaatgaacataatgacgcggactttgatcaagatgtcaaagagagaaaaaatctgacattttctgtatcatactcttttgcagaaaagtcgctgaaatttatcattctggctgcaattatttctggagttggtgtatttctctggaagcaaatagatggaagattcagcctatttaatgagtccgtaaaaatcgcagtgctgaacccttcagcactaaatgaacaatatctgaaagcacataacggaaataataacgattatataccctatatccgtaagctaatggcgctttaccgtgccagagacgtacttgtccttgatatgaattacgtgattacccgaccgtcatctgtaagtgaaatttcttacattagcgacacagacgttgagagtgaactcgctgaatatggaataaacccgaaaatgtttgaggaaaagcagtaa

SEQ ID NO: 187066 - DNA, 1368 bp, Klebsiella oxytoca
atgaaaacattgaagctgaaggaattgtgggcagaaaataaagccattcgtatggcatttttgctcatcgtcgcatttgctgctcttgtgatggtgaccctcacactaatggggggggatgactcaagcaagaaaacgaaaaaaataaagccggttactaatctgcttgatacttcttcggttgaaaatatggatgaagaagggcagaagcgttttttgcagacagtacagatgcaaaaccgtaaagaccaacaaagtatgttggaccaggtaaagcagatggaaaaatacaaatctgagaattctggtgagattaatgagcttagaggccagattaagcagttaactcaacagatttcagatatgcagaatggtaaaggtccggcaagcaaccgcagcctcgacagtcgtggcattcaacaacctactgacagccaacagccgaattctgcataccaacttaatggtaatgctgcaggtaatcgcaatcaggaaatacctgttgctggggggatatcccctcaacgaaatcaactggttcgcaccattacaagcaacagcattacaacggccaataatggtgtgctggaagtaactcctattgttgaaaagaacattacaaatgctaaccaaaagagaatagttaaatcaggttcacctgcgttagctggtgatggaactaaacccatagatagcaacgcaaaacactcaagacgttcagacgatcagtatttgccagcaacgtcacagttgtatggagtcttgattactggtgttgaggccccgacatctctgtcgtcgcaagaagaaccacttggagtgacgttcagggtaaaacgtgatgtgttcctgcctaacaactacagaatggatttgcgtgactgcaaccttttaggcacagcccggggggatatggcttcagagcgagtctatatcagaacgacgaaccttagttgcgtgaactctaaaggaaaaagctttgatattaaactggaagcatacgccgtcagtgagatcgatggtaaagcaggaatcaaaggcacacttatttccagaaatggtaatgcaatcatggggagtgctcttgccggtggtttaagtgcgcttgctcaaggtttgagcccaagtaaggttagtcaactaaatatcgaccccaattcacaagctcaatatcagggaccaaatattggtgcgttaagtgcggtcggtgcgagcggtgctgtatcaggtggactgaataaaatggtcgattggtacactcatatcatggatcagcaatggccggttgttgaactttccccaggaatcaacgctacttttgttgttcttagcggcgcgtccattccaacaaacttagcggcgaaatga

SEQ ID NO: 187067 - DNA, 519 bp, Klebsiella oxytoca
atgattgataagaaaagttacttttctaagttcaaattggccattttgtttagtgttggtttgggtgtgggtttttacatcgctaacattgaaaatgaacgctctcagtttgtacaaattgtgccctctgaatacaaatcgttcgaattccaaaaagctgattatgatgctttcaaagtatatgacatagacaatttactctctgatgagattgacgatcgtgatgctcatttaatatcagggcaaaaaatacccactgagagcgatatcagccatttcgaaccagaaactcatgagcagattaaggagatatctcaaactgcactggagagcgaaaatcagttctatgagcatcttgaaaacaacacattcaaaaatttacgggctgagcctccttactctgttccgcaaatcgatgaaaaggtcagatcattgagggtaaagagatttttacctcccggtaataaaggtcaacgtaatgaaaacattgaagctgaaggaattgtgggcagaaaataa

SEQ ID NO: 187068 - DNA, 1158 bp, Klebsiella oxytoca
atgaaaagaaaactcataggattacttatcactttaaacgtgcttgctccagctgttcatgcagatgaaccatttaatattcctgcttcggcagtgaatacacaagcttttgatgaaccgcctgattcctctgaagctatgaatattgtgaccaatgcagtgaaacaggtccccggtacggtaacgagtactaatgctattcaaccgccaataaatactaaccggccgactacaacgttgccagctgctccagggctttccccagctagtgcttcatctcctgcagttcgttctatgacagatacattgatgaatagtgctccagctgaaggtccaggacaaaaagctgttaatgaagcaaaaaaacgctatcagccaatgcaaaatgtcactgtgccgccaggcgggaacattgtcttacctgtgtctcttggtttgcaaaaccggatccagacaacattcaaaaatgtaagtgtttcaacaactgcaccaccagaagatacgaccatctatgttgatggaggaagtgtttttattacgacggagaaagacgctccggttggaataatgttatctgaagaaggggtgcctgcatccacttataatttgaccttgataccaattgatgttcctggcgctatgattcatgtccaaacacagttaacccagaatatggctatcgaacgcgatcgccatattgctgaaaacacgaacaaggaacttctggagcaagctcagtccggtgaacttgatgaaaaatcgatcgcacaggatgaccgtaagcaacgtatcattgatattctttatcccgtcgctaacggtgaagttcctaccggcttcgcgcttcagcttgataaactttctgtaatacctactaaggaacggacgccttgcagttttaacttttatgcaaaactgggccaacggttggtcggagctcgtgaacttgttgatgtaattcttgttcaaaataacttgacttatccatcggttattgatgaccaaaaatgtattactcctggagtaattgccactgcaatttttgataaagcattcctacaacctggtgaaaaaacggagctgtatatacttcgtgacaagctttatcaggagcgtgagtctcgcgtaactaagcggccaagtctaatcaatgattga

SEQ ID NO: 187069 - DNA, 864 bp, Klebsiella oxytoca
atgaacgaaaagaaaaagtcacttttagattacgtcacgagcttcttctcgtttaaacctaagaagctggttgctgacaatgtagtagatgaagagaaaaatgatggaagaggtcaaaagtccgaaagctatagtacggataaaatacaacgtaggaaaagcatactcaatgtttctgaggaactgaatatacctaaaaaaggaaaaaaaacaggtgcggaactgacatattcccagttaattcaacgggacaagaaactaatattaaacaaccgtttgttgactgttattgctggacttcttgttgtaaaagtggtgtttttttctacaacggaagttattgccataccaccagatatgaccgaagaagtttctgttgcgggtgccaaagctagtgagtcctataaaacacaatggggtctgtttatcgccaccacacttgggaacattaacccaaaaaatgttacattcgtaacgaactatattttaaaaatgtttccggcagcaaaacaatcagatttagaagctgaacttaaaaaagcctctgatttgatgcttgcaagaaaagttgaccaaacttttattccagaagatgtcaactttttgcctagtgacaatgtgctgtatgtttggggcacccgtaaaaccaaatttctcaacgtatcagataaggaacaatcagagcggtggacgtatgagatggtattaagtgttaaaagtggtcgcccaagaatcctgtacctgaaccaatactccggcacacctaatatcaagaaagtaaccgttaatgggaaggtattggaaaaagagttcaccgaaaataccgacatgatccagccacaagatgaagcagaagcccaataa

SEQ ID NO: 187070 - DNA, 369 bp, Klebsiella oxytoca
atgatcaacaaatccatggctatggccccgaaagcagtttctttcacactgtccgaaggtatgcgtaatctgcttagcaataaaatgttccaggtgtttatcgcactaatgtgtgcagctctgttctcatctatcgcgctggctggcggtgatgacggtgctctgggtgaaatttggacccagttgtctgaagcacttaccggggcgcctggtaaagcgttggctgcatgtatgctgatctctgctttctatttctctatcggtcgtccgaacccgggcctggctctcgtttccttcctgatgatgatgattttggctaacggcgaaaagatcatctctggtttccttgatgctggtgtagcactgtaa

SEQ ID NO: 187071 - DNA, 315 bp, Klebsiella oxytoca
atgaaaacgaggttacttgaagttgcgggtttaaacctaaaaatatcgctttataacaatgtgttagttctaagttgcaatattgacggacattgtaactatgaaacccgccgcattattagcaactctattctctctgaatcagagatttttgaaaagattgactctgaatgggtctttaaagttttttccaaaaatataaaacatatcatcaatgtattaaattccaacgtcagcatcatacctttggtaaatcatcaggtatcttctaggaacgaaatgacagatacaatgtcatgtctaaagctcaattga

SEQ ID NO: 187072 - DNA, 699 bp, Klebsiella oxytoca
atgtgggtaacgacagataacattttcatcgtagataaccagcctaactctgatggtcacatgtatatacatcgcccatgtcccaactgtttagggtctggtatcaattgtcaggtttgctctggaatcgggtcattaccaccggctcttgaaaaagtttatcccgtttatgaatgggctgcactacacgggctgaagctacctttcaatcaatcagtagagcagactttcttgaaaaaacatctggttgaacggttagcattggtggagcaagataaaggtgacttctattcatctatctatgcatcacttaacaaaagtaactttcctacaagactccaatatcgttatcttttgcctgccgccgacaaaacaaaaccatctggcggtcggttagttaggccttttaatgcaaaacttggggtaacgatttctgtgactcttttcgtgaaacatattgacgtttttacgaggaaactctcaacagagaaattttcatcactccttatggaaacccctgaacaccggcatttcattctatatgacaacttcccttcgcagtataaaataggtgatgtcattgatgccaagatctatacaaccaaaaggctttggatcaataacataagtattttacaagtaaaattactcacaatttctgatgctaaaagctcctctgacctgctccccgttgattag

SEQ ID NO: 187073 - DNA, 738 bp, Klebsiella oxytoca
atgacgatgtggcgtgcgcagacgctcgatctgaaaatggcgttactggtcagtaattatgatcatattcatgcctgcttcacgctcgacaaatacccccgcccggcagagaaaagccagtatgagggctcgatgtctctccattctgccctgtcggaggagatcattacttttgaacaggcgcgtgatattgcgatccgctgtcatgagcgcacgattaaccaccaacagcgctgggtgaatcattaccagaaccgcctggcctacgaacgcgcgatgctcaatgaaaacggtggcgttgtcacccgaacacaggaatttgaaccaggcgggcaggtactgagtcggggagaatggttaaccattctccgggttaaccggagtaagggggaggtgagttcagtcgaaacgcccggttatcgctttctgggctacagcggcacgatgaaactcacgcccgaccgtatcacggactacaaagccccgacagcggaggaggccagcaacgcgaagaaagcggcgaagcgcccaccgatcgtcaattatccgggggaagggttccgggaaatgacaaaagccgagtgggcgaaattacccgctgattataaaggcgtgcggggtgctgcagaaaccgaaacacacggcgcctatcgcttccgccggtgcatgacgcacggttgtacgctcgtgaatgtgtatatcacagacatgaaaaccgttgaaattccgaaaaaataa

SEQ ID NO: 187074 - DNA, 1362 bp, Klebsiella oxytoca
atgggcacggaaatttcacttaaggtttcaggtgcaacgctagattggagtaaaaatagcttaggtgttgatcatggtgcattgttccagtcaaccgaccacataatgatacctcagcacgaacgctatgatctggaagaaaccgatgaaattgatgaagaaagacgccttcagtggaccgtactcaggaagcctcttgcagcagtagctgaacgggttgagttacttggtttttctcttactgctattcgtgcggaatatgaaaatcttgtaaagcatgaggtttatcaaagaaacgaaatgattgaagcctatcccgataattgggaacctttagaaaatctttttagttttgatgagtttctgggcttacttaagagctatgatctgggggagttaaacgataaagatatcgactttgataattcaaaaaaaacagagaatgataatttcattttgaagttattccctaacgacattttaaaaagaattcctctctatgatccttataacaacttttactggtcagaaaaaacagcgtttttcagtgtcataaacatacttcatccatactctatgatcaaacttttaagtgaaaacaaacataatcttagtgagtatgtcgagtgggactatggggaaatagtcgctaacggatgggttcacattaaccaaataaaaactgaaattaaccgtgaaaattcttttctcatagcaactgaaggttcctcggactcacatatattacaaaaggcatttaagctaattaagcctagcgtttgtgaattttttcgtttcatcgatgtaacatctggccatccattccccggcactgggggattatcaaagtttgctgagggattagtaaaaattgatgtacagaaccaaatcatttttgtactcgacaatgatagtgaaggggttgaagctttcaagaaaatcataaagatgaagcttcctcataatatgagttgcatatgtcttccgaatcttaaggagtttgaaagtttccctacttgtggcccagacggcctaaccttatccaatattaatggaactgctgccgctatagagtgttacttggatttaacatatagtgaatatgactcatacactgttagatggactaactataaaaaagagaccgggatgtatcaaggcgcacttgaatttaaagagtattacgcaaaaagatatcttgatacatcagaagctaagcttatcgaaagtaaatatgacacctccaaacttgaggctttgcttaatgcgatcattgatgcttgttccaaattatctggatcaatacgtattgaaaaaataaagagtcactatccaaatatatggactgaagaaaaagtttaa

SEQ ID NO: 187075 - DNA, 237 bp, Klebsiella oxytoca
atgcagaataacttattagtaaactggacgcgacagcagcactgtagctcgcgcacaaaacaaatctccggatcgagtgtccttaacgacctgtctcaattaatcaaaaacggcgttctgctatttcttaacacaatccgtcgccaagagctgaggcagattgagattggccttgtagccaaaacgactatctacgagatgggtgcggaagtgaatttccgcctcgctttgatctga

SEQ ID NO: 187076 - DNA, 939 bp, Klebsiella oxytoca
atggcgacgataacggtttctccggttcattttgaggactacagtggtatccagttcgagcgcctagtttttgcataccacctgcgcgcgggttggcatgatctgatttggcacggtcaatcaggaggtgatcaagggcgagatatctcgggtattgaaccatttgatgaccagccagcacgtaagaccatcatccaatgcgcgaaccgagacacattgacactggcaaaagctaagagcgacatgagtaagtcgattaaagcaactggcagtgtcccagacgtctttaagttcgtctctcgtggtgcggtctcggatgctggcagaacgcgcatcgagcaagcagcagcttccttgggcgtcaggcatgtaacgatatggtcgggcgtagagttcgaagaaaacttgcgtcttcgtgctgaatatctgctgcaccgttttgtccagggcgtcgagtttcctgatgttgaagctgatattcaaaaattcacggatgattttcccgacctttccgacgccgatgttctgcaactgatggctgccgtatttgaccggccagcatttcgcacaccgtttcaacaagaaagttctctccctgcttttcagaaggcaatcgaagataccattggcgcactaaatacaggtttgtggagaacgcgtgagggcgtcgagatcaggcgcattccttcgatccaccatctcaaaaatcaacgcatccagacagtgatgggaaaagtggttcgtcaggtcgaccaactgcggcgcatcttcgtaactcggcttaaggaaggggaaatcagaccttgtggatgtggtcagcccgattgccccacgtttacgctcacgcaacgcgtggctgacgagctagacgacgcgagacagagaatcttcacgacgtttcaatcagtgtatacttccttcagtgtgagccttagttag

SEQ ID NO: 187077 - DNA, 483 bp, Klebsiella oxytoca
atgatggcactgaccccggaacaaattcactacctcaaccaatatgcaccaggcgaagctgtgtcacatgcattatccgagctactattcattgatcatgatcttctcggtatcgatgctaacgaacggtcgattacctttcgctttgcgatgtacctccaacaatgtttccccggttggactgtagattgcgaatacaaccgggacagcattgaccctaaacggctcagacatttggaactttatccagacagcgaagacgttgaggcaaagacagtatttcctgatgtgatcgtgcatcggcgaggtacacgacagaatcatttggtcttggagttcaaaaaatcaacgagtcgcgtagatagagagatcgatctactaaaacttcgaggttataagcagcagcttggttacgagcacgctctgtttgtggaggtcggcaccgaagggcaatcgatcatcacggcgctcgagtgggcctga

SEQ ID NO: 187078 - DNA, 675 bp, Klebsiella oxytoca
atgacaaagtggaaacgtctgtttaatgcgctcgcaggtgcgcagaaccagtatcaggtcggcaaccatcttattatgttcattaaccgtgcgatgaacccggttaattacgcccgtgatccatcggtgtttgcctggcgacgtgatgaactcaatgttgtcctggctttttccggtttttatatccgtgaggatggtaaggtcgcgagcgccgctaaagtaacgactctggattctgctcgagcccgcgctgggcgacttaaggctgcactcgaaagccgtgctgtgcatgcggaagttttgaactattgccgtgccgaacttcttgacgaaaactattttcatgccgtcttcgaggcgacgaagggggttgcggaacgtattcgtcagttgtccgggttgagcggtgatggtgctgacttggtgaacaaggcatttaccggacaacaacctgttctgactttgggatcgcttaccaccgactcagaaaagagcgaacagaaaggttttgcgaatctactgattggtctattcggcgctgtgcgcaatccactagcccatgcgcctaagaagaattggcccatgtctgaactggatgcgctggacatccttacgttggtttcgcttattcatcgcaagctggatggcacacacaaaaaaatagcctccccatag

SEQ ID NO: 187079 - DNA, 180 bp, Klebsiella oxytoca
atgagctatacggactggcgagtttatcaggaggccattgtagaggtatttagacgtcttggatgtaatgctctgattgactatagaggcaaaggcaatcgagcggctcatgatattgacgtcttcgcgatctttcttcgaccgggtagtggatgtcgaatcgtggcggtgggagggtaa

SEQ ID NO: 187080 - DNA, 621 bp, Klebsiella oxytoca
atgagctatgagactaatgtttttataaattgcccatttgacgatgcttacactgattttattgatgcagcattgtttgcagtttaccgttgtaattttaaacctcgatgcgcattggaaataaatgacgctggtgatcaacggctcgataaaataaatcgcataatcaaggattgtaaaattggaatccatgacatatctagaactgaattagatcacgtcaataatttgcctagatttaatatgccattggaactagggttatttcttggtgctaaaaaatttggctcgagtaaaaatcaaaaaagcaaactagcaattattgtcgacaatgaaaaataccgatatcaaaaatatatttcagatatttcaggacaagacattatgtcacatgacaatagccctgaaaaattcataaaaatcataagggactgtttatcctcatacagaatcgttcagagaatcccatctgcagcaataattattgaagactaccgtagattcttaggaattaagccagcgctgtgtgctcaactacaactagttgagcatgagcttacttttaatgataaaaccagcattattgaatgttacatagagttttatgcagcagcagcataa

SEQ ID NO: 187081 - DNA, 1086 bp, Klebsiella oxytoca
atggaaagtaatattttaggtcatgctcagagagaaacttcaggagcaactacatttggaaaatataatttccaatatcattgggctttatgcagaataattgaaaaacataaatccaatgcagactatgcattattaattgaatatcatgaggatgtcgttatcgcagactcattgtttggcagttcggcgaaatttgaattttttcaagtgaaaaatactgggaattccttcactgttgactctttaactaaacgagtaaaaggtgcagagggacttaagaactccattctaggaaaactattaagctcatgtataggcactgagtatgaaacacgtattacggaaataggtcttgtatccgctagtggcttctcatttgatcagaaagataataagttaaagttagatattataacttcgggtgatcttagcgtggattgtctatcgggcttaactgggaaattaaagtccgagcttgggatagatatttttccagaaaatctaaagttcatcattccaaaaataaagttagaaaatcaagaagaattcgttattgccagatttgctgaattagtaaatgaaatatttccaaatagtcattgtaatgctgtcaatatttatagggcaattatcgacgagattcatcgcaaaggacagaatacttacgactttactatgtgggagaaaatggtagaggataagtctctcacatctcatacggtaaaagatgtcatagctgtaaatacaacgagtccaaaatttgaagactttgagaaagactttgagtatttagctaaaagcgatatgaaatggaataccttaacatatcgaaagatggtaaaaaaaataaaacaaatttacttacgtagagtcgggtatgcttcagcttttgatatgaatataatgagaatagctcaacaggcgctcagtaatgttccggaagaagactatactgaaacaagcgattacattaaggcagttgttatgaaagctaaacagctgaatattgaaagccaaatcccagaagatgatgatatactttgcgagataatttactgttttttgaaggtgatgcatgaataa

SEQ ID NO: 187082 - DNA, 1062 bp, Klebsiella oxytoca
atgacacacgctaccgccgctaataatacattcaatattgtttctcttactgctaatgaagactcagaatcggagattaaatatttcgaatcacatgaattaaccaaagcagtagaatacgaagattgtgatgattacattcttgttcgtgcgaatgagcattttaatgtaagcagcttttctgaaaatgacgttgtaccaattttcaaaaaagtcactccttttcgtgcactacttaatagtaagtaccgtccaaatccgataacccttcgtcgaatgatcaagttgctcatgaataatgagataacagctggaatttgtctgcaaggagagtcagggtctggtaaaactgagctggcattatatatcagccacatgcttaactggcctatcaccatcaagcaaatcaataacgaattatctattgatgaccttgaaggtatgagaacgctggaaaatggtaatacacggtatgtatatagtgaccttgtccaaggctatcgtgatggtcacatcattcttcttgatgagattgataaaataaatcccgatactgctgctaagttacatatgccattagaacgtaaaccgtgggcaactgcgaaagaaggaggcgatttgattcatgcaaatcgtttcacaagatttattggcactgctaatacgaacatgagcggagatgatatgcgtttcgcttcttcacagtctcaagactctgcatttattaagcggtttttaatattgccgatgtttagacctgacgaaaaagatatgtataacgctgcagaggctcacttccctgaactgagtccttcatgtttgagagtgtttgctaaagttgcttttgagctcaacaatctgaaagacgacgagttggttatggatattcgtgaactcatatcatggattgccacttcgaaagttcttgatgaagaaatttctgtagggttcacaattgcattcacttctaagttatcttctgaagcaagaagtagggcggatatattgcttgaacaattgttcccagaagaaatgtttctttcaatttcacaattgaagtag

SEQ ID NO: 187083 - DNA, 858 bp, Klebsiella oxytoca
atgcatttatgtagtaaatttaaaaggattgttaatgaaaaccaacttagttttagcttcttttcattcgaggaagatgaagttaaggagaaggtatataaacctgtggtttcatcttcaatcaatgaatctgatataggtgacgtatcaacctatgaatatcaggagcttgatgatttcgtttggtctgatgaacatatttccacattgttctataagttgatggaatcatcatttgtaactgttcagtaccatatagaccattccatggtttataaaatcgattcacatggttatcgatatttaacacctaaattaaaattggagttagactggtactgtactaaacaatttcaaatcgtgtgtcattactttggatatgaccccgatgaaattattctgtttataaagtcaaggctcttacttgaggtgcgttcaagagagtcaatgcaaaaccttatcaattcattaaacactgacaacttaacattttcacaccctattataggcccgctgaaatggtcagattttttggatccaggttattgcgactcaaggagatcgttaattataaaatggtcaatagcagacagattgaaactctttaaaaagattttcgacgagcaaatgctaatccttgaaaatttaagtgagaatggtgcatggacatgggatcgaattaaagattcatacgtcctaaaaactgaagccgttgattatattcagtggttatattcagatgcatgtaaagttatttctcatgcatacggatttgattacggattacttttaaacacttcaaaagccattatcaaaaacagactttactttacatatatgaaatggggttatttatga

SEQ ID NO: 187084 - DNA, 354 bp, Klebsiella oxytoca
atgtttactaatcatattaatactgtctgtgtttccggtgaggttaataaggttataattcgtccagaatatgacactattatgttaatactggataacaaacaagaaatggaaaataatggtaaagtcgaaatggtcgtttcccctatccaggtgaagataccacaagacctgtatgataaggaatttaaggaaattattcgaggtgatagccttatgatttctggttgtcttgttactgataaagtgtcttctggtgaattcacggtcgtcagagttcaagcccagaaattgcttcatagagtacctaaaccgatagaaggctttggtgcttcaaggttcttaacgcgttaa

SEQ ID NO: 187085 - DNA, 996 bp, Klebsiella oxytoca
atgactacttccgctacaactgctactactgctaaatctacccctattaaagcttcagaagcttcagccaccgctgctattatttcactaccggatgccacccaaattgataaagattcaattttattggcttatgtaaaagaattttatggtgaagtaattccaccatctaatactggtagtgatatttgtaaaattgataaaggcactgatgacgataaggcatacatttggtatatgacagattctgtcagtcgcgtaatcgagttaaaggcgcttgaagaaagttctaaactgaagcatcttgttggttcagaacgctcggtgatctacagtgtaaatgttagcgataccttcattaagaaaatcaccctcgatgaggctgagcaacttcttgaagagtttcctgatattccccgcgaaaaaacactagatgcattcttatcatcactggatgttaaacttgaagaattaaatatcagctctattgtttcgtcggaaaatcttaacttcggtaaagacaaactgataaaactgggtgctattaaagttagtcaatggcttgaactagtaatcgatgagatccacgttttttataaacgtgagcactttactgaaactgttgaatctcatcatgaggacctcaatgatttttacagtaaattgaaacctctaatgaaagagttcggtctcaaagataaacattacggcttatcttttaaagagatgatgattcacaaagttactggttttgactttgttgtagctgattcaatgtctaagttgctcaagcttgaagcatccttgaaagatgatgaatcaagagccgcggctatcaatcaggaaacatcgcttaatgatgtcatctctgaaattccagagaaagcagtctcgatttttgataaggtcgtatcaagagtacttaaaggtgctgcttgcataggcattctctattatggggcttctactattgttaactttgctagttatctttaa

SEQ ID NO: 187086 - DNA, 225 bp, Klebsiella oxytoca
atgaatcaaatgaaaatgaacgaacatgggttagctgaatcgctagaatctgtactctgtcagatagttgctttgcttaatgttactcagaatgcacttgatggaagtgaaagtagcatctatatgcgagatgctgtgcaaatgctcaatgctgcgcgtaatctagccattgaagcagagcaataccgagcggaatgggaacaactgattattcgcaaccggtaa

SEQ ID NO: 187087 - DNA, 309 bp, Klebsiella oxytoca
atgtttaacgtaataacccacccggcagcgctggaagagttacaggaactaccggacgagttacgaggtcgcatgacccgactggttgaaagactggaaagtgaaggaaaactaaaaatgcctcatagccgcgtaattggcgccgggctttttgagttaagggttggagacaaaaacatagcaagaacgttatacgcttacgcagtcggccacgaaatctacctactgcatgcgtttgttaagaagacacaaaaaaccccgtcaggggccatagagatagcgagaaagcgcctgaaggagatgagctaa

SEQ ID NO: 187088 - DNA, 288 bp, Klebsiella oxytoca
atgaaagtaaaaggcatcccatttaaccaggtcaaagaaagtctgctcaacaccccggaggcaatccgggcttaccaggaagcagataaagagctggcactggtcgaaatgctgtacgacatgcgagaaaaggctgggttaagcaaatctgccctagcggaacggatggggatcactccatctgctattagccgcctcgaggggaaccctttgggggccagcatgaagacactgagcaaatacgcgcaagcgtgcggcgctgaaattaacatccaggccgtgtactga

SEQ ID NO: 187089 - DNA, 297 bp, Klebsiella oxytoca
atgaatgctgattttgttgctgattaccttgccgactacaagtatctgttttattttttctgtctggcaattctcgtctaccgcttcatcacggttgggcgtaagtacccgctatttcggagtcaaaaagtcaaagatagctctgtgaaccacacttcgaaatttagtggcagtggtcgcaaaataaatgagaattttttaaaggtacgagagtgggatatatctgatccgcgttctctcgaacatttttactacgtcaaagaaatagactcacatagttcttctgacgataactaa

SEQ ID NO: 187090 - DNA, 2133 bp, Klebsiella oxytoca
atgcaggatataggggcagccatcagtagtggcgtaggctctgaagcaggcttatccacggatgccaagcagacaaaagggttcgcggcagcttttggtggtgctgtagactttgctcttggtttggctaaaggcggaggaggtggaaatgggggagggaaaaatgcccctcaggatgcagggcaagctatagaaatggggggcggtttgagggggtatatacaaactcgaattaataacgattcctctttaaccgatagccaaaaaaaggcatttaccgacagtctcaataacgtattgaaagatggaagttcgtttgccaaagatatcgctaaatttgaatcaaacagcatccaaaacggattcactgattcagacagttatcaaaaagtagcacagcagatgcaacaacatgcccagtccatcagtaattccgaaactaatggatttagtaaaactggaggccaggcttcccaactttccatgagtaacagcctcaacattgacggaggagtgctgtcagacacgatgagcaaaccggccactgaaaaatctgtcggagatttctggtcgtcacttggcgggaaccgcgaagctgctgttgcagaatggaaatccatgaaagatacgttgaacggtagcaatacactgggagacacgaaaaatggtaatgatgcatttgttaaacagatgtttaacaaagcagatgagttaaccaggatgggctccggtgaaacggtagcgcagaatctgggagacattcaacaaacatcgaaaatgtttaaaaatgcgatcagtatgatgggtgctaacgccgggatccttgcgccagcagcggaaaaactggatcagttcgttggtctcggtagcggtggcaattatgccagccatcaggaacaaacacagaaagcccctgatacttctgctgtacctggcacaggcgacatttctggcaacttcaatagccagcgtggtcaggttacaggtggactgggcgaacgccgggaagcagcgaaaacacagcctggaacaaccatcgggggaatgtcagcacaatccctcaaagaagatgatgctaaacagtttgtcgctaatcggtctggtgagaatgagggcaggatcctttctacgagtcagagagaagctcttcaaaatgtccgggagaaattaccagagagcaaccaaaaagaaacactggaaaaagctctgcaggcagctgataaagactccctgccggtaaaaatcgccggtggcgttcagtctgcaatactgggtgatgcagagtcagtagattacgatgcagcaacacagcaaaccatgagtaatatgcaatcaagagaaccaccaaaaaatgctgaatcattccgtccatctggagataaaacagcggatgctaaagaaacgttaacccaggcggcattacacagcgaaaatgcccgacatcagactggtgaggccagggaaaaaagcctcgcccagagtgaagcttaccgcaattcatataacaatgtaaccggtggtaatctgacaacatcggatgtttctcgtgttgctcgattaggcgcagacggaaaaaacaatggatttgaaaatgggctatcagatgtcgttaaatccgttgtcagtggctcgggaacgacaggtgcgcgtccggccaccggtacagctgattatcatttgggtgaaggcatacgcgataacaatgggcatgcgccaggaataatgaacaaaataggagcggcggctgagaaggcggtcgataattccccacttgcgcagcgaatctttacaggtgcaggttcggatcgtcatgttgctaattccatggaaattagtggtgggtcttctcaaggaacactcatcggcaatatgactaataacattcaactggaacagacaattgctggtgcacaaaataccccaggcattacggaagataaattcaccagaatgtccgatcaaagtcaacagatgatgagcaatgtgcaacaccgtttatctgaagatcctagatatgggccagaagcagcagcagattatccccggtttgtaggtaatctgtctggaaatctaagcgaaagagagtcgtctgacaaggctaaagaattccttgataaacatcggaaatcctaa

SEQ ID NO: 187091 - DNA, 1200 bp, Klebsiella oxytoca
atgtctgtcatttcagaaaaaaacacgcttgcaaaaaacacgatttattctttaacctttctgggtgtgctgttaattgcatccaacttaagggcacccattactgcgctcgggccagtaatccacgaaattgcagcctcattcaatctcaccagttctgcaacaggcttgctcaatgccctgcccttactgatttttggacttgcgtcacctttcgcccccctgctgacccgaaaagtcggccttgagaaggcattgctggctgctcttgttctgattaccctgggatgtatcgtccgttctcttatgggcttgtccggactctgggtcgggacatttgtgataggcctgggtatagccattgctaacgttcttgtcgttccgctcgttaaaagagatttcccgtcacatactgcacgctgtgtcgggctctatgcggcaacgatggcgcttacagcagcattttccagcggcgttgctgccccactttccgcgctcagcaatgccggatggcgactgtctacgggtatctgggttatcaccgcccttctgggcttagttgtgtggctcagagtttgtgccggtgcgactcaggagtcggtcactgtcgttcaggcacagactcccgttaagcggtcagtgtggcgtagctctgttgcatggcaggtttcgatgtttatggctctgcacaccatggtgttctatacgctcattgactggtatccatcaatggcagttgagcatggggtcagcgcgtcgacagcaggctatcacctgtttctgtatcaggccattgccgtcattgctaatttgacaactgccgcgtttatttcacgccttaaggatcaacgcctccttggcctcatttgttcactgttcattacaatcggtgtggcagggattcttttcaaaccggctttttctgctgtgtggctgctgttcgcaggtgtaggtgcgggaatgtctatggtcacctgcctcacgctctttgggctgcggactcgtgaacacagccaggcaggtcagctatccggcaaagcgcaatgtatcggctatttgattggtgctctcggcccctaccttgcgggcattattcgcggccactcactgaactgggactcagtactgctctgcatacttgtcgttacgctggtacaggcctattttgcatggcatgccggtaaagacagattcatttga

SEQ ID NO: 187092 - DNA, 630 bp, Klebsiella oxytoca
atgacaaatcatttcacggataaaaaaattctggtcgttggaggcagctccgggattggcgaggcaacagcccgggctttcgcagaagccggagcacatgtcactattgcatcacggaatctttctaagcttcagtcggcagcttcccgtatcggtcatcataccgaaacggcaatactggatactgctgacgactcagctgtacagcgtttcttcagggaagccggtggcttcgatcacgttgtggtaagtgcggcccagaccccgaccgggcctgtgcgtgagctgccccttgatgatgcacatcaggccatgaacagtaagttctggggcgcttacagggtagcaagacacgtgcagataaacgaagggggttcgttgacctttgtctcaggctttctgagtgtccggccttcaacgccggttttacagggggcaatcaatgcagccctggaagctctgggccgggggcttgctttggaacttgcctcatctaaagtcagggtcaatacagtctctccgggtctcatcgccacccctctgtgggatggtgtggaggaatctgcccggcagtctatgtatgaaaaagcagcgtcaacacttcccgccaggacgctgggtctgccttag

SEQ ID NO: 187093 - DNA, 1044 bp, Klebsiella oxytoca
atgagcaaaaaacacgtattgatcgcgggaagtagtggcactctggggcgagcagccgttcagacatttgaaaacgccggatgggatatcactaccctcagcaggagtgacaacagcgacacgctgaacgatcacgtagcagctgacctgctggaaccggagtcgcttaaggcaggagcccattatttcaaaacggttacgcatctggtgtatacagcacttaagcctaattcagatcctgctgcatcggcagacgaaaatgcggcgatgctggaaaaccttgttgcagcactgcgcagtgccgatgctccgctggagagaattatcttcattcagggaggaaaggtttacggtgctcagtttggcgtttacaagactccggcgagggagagcgacagccgccattttccgccaaatctctatttccgccatgaggactttgcaatctcattgcagtctgaaggtataaaatggacagctttacgccctgatatcattattggtcactcgctgggctcgcccatgaatctcgggaacctcattggcgtatacgggacgctttgtcgggaaacggggacggcaatgaatttccctggaccggaagctgcctatcgcaatgccctggtcaatattaccagcgctgaagttattgcagaggccgcactctgggctgctcagcagggggccgacggtgcctataacataactaacggagatatcttccgctgggcacatgtctggccaagactggcggatttttttggtatcgaagccggagagccgcaaccgatctcactggcacagcgcgtgccagccctcagttctgtatggcgctctgtggcgcagaataaagcactcattgaacctgacgtaaaccgtatcgctctcggcagctttggtgatttcatttttcatgttcagaacgatgccattttcgatgtgactaaagcgcgtcaggcgggtttcaccggcatgacccgccgctctgatgatgtgctcatagaacatcttgaaaatatgcgcaggctgcggctgatcccctga

SEQ ID NO: 187094 - DNA, 924 bp, Klebsiella oxytoca
atggcttttgagaacttcgcgcttttacgcttttttattgatgtgattgaggaaggttcgatctcaggggcagcccgcgcgcataacatttctttgcctgcggcgagccgaaaaatgcgtcagcttgaaaacgtctttggggtaaggttgttgcagagaaccacaaggcgacagtcgcttacggaggaagggggattgctttacgagcaggctgtgcggatccttggcgatctggaaacgctggagcacatgctcaggcaaaacagcagagaagttgcgggtgttttacgtgtgaccgcaccggtatcattaggccgtcgaaggattaccccattgttggcccagtttggcgctatgtatccggatctgtcgatccacttaaaactgacagatacggtgctggatctcgtggcttcaggcatggatgtggcgatacgttacggcgcaactgaagattcgtcctatgtctccagaccgctggcaaataattatcgtatcctttgtgcttccccggagtatgtgcaggttcatggcgttccggcatcgcctcatgaacttataagacatcgctgtctgcactctggtaccgagtcgtcggtcgactggtcgctgggagacctctccgtacgaattaactctccgttcacgtcaaatgacggagaggttatccgtcagctaatgctcgatgggcatggtattgctctgaaatcgatctgggacgttgcggaagatatcgaaagcggaaggctctgtcagatccttccgcagtatcagtctcaggctgcgcctcttcacgccatatatccccacagacaacatgtgcctccccgggttaaggtctttattgactttttaattaaaaatatccgcgagccagatatttatgcgaaaggatccggtgtggaaaacaggaaacctgattaa

SEQ ID NO: 187095 - DNA, 1197 bp, Klebsiella oxytoca
atgtcctgttcatccataacccgttctggagtcacaagcgcacgactccctctcatacctctgctggcgcttgccctgggcgggtttgttacaatactcaccgaggctcttcctgcgggtctgctgccacaaatcagttccgggctgaatatctctgaggcaatggctggccagctcgtcacgatttatgccataggctctcttctggccgcgatcccgttaaccgtgatgacccaggggatgcgtcgtcgaccgttactgataacggcgatcgctggattcgttgttgccaatacggtcaccgctttttcggatagctattttcttacgatgagtgcccgctttgttgccggtatcgcggccgggctactctgggcattattgcccggttatgcttcccggatggttcctgaaagccttcagggaagagccattgccattgcaatggttgggactcctcttgcgctttcgcttggcgtaccggcggggactttccttggcaacctggtcgggtggagaatgtgttttggcattatgagcgtaatggcgttgttactcgtgctatggatttatatccgtgtcccggacttcccgggtcagaagaacagtcagcgccttccgttacatcgtgttctgggcgttgcgggagtgcgtccggtactgctcgctgtgctcaccttcgttctggcacataatatcctgtacacctatatcgccccgtttatcaatgcgtcaggtatcggggggcagaccgacattgctttgcttctctttgggatcacttcgttattgggtatctgggtgacaggcatgtttatcgatgcgcacctgagaggactgacgctgggtagtaccgttctgttcgccctttcagccgccgctctgggtgtggccagtcacataccggccgtaacctatgcgtcgattgcggcatggggactggcctttggcggtgcagcaacattcttccagacggcaatggcaaaaacggctggtgatgtcgctgatgtggcccaatccatggttgtgaccgtctggaataccgccattgcaggaggcggactgattggcggattactgctcaatcatatgggcgtggctgcgtttcctccggcgcttctcatattacttgctgccacgtttattattgtatttatcgcccgcaagcacggatttccgccaattagccggaactaa

SEQ ID NO: 187096 - DNA, 912 bp, Klebsiella oxytoca
atggcacagctgagcggcatagatatttttgtacaggcggcagaagcaaggagcttttctgtggctggtcgactgttgggcgtcacgccatcagcggtggggaaaagcatatccaggctggaagagcgtcttggcgttcgtctttttcatcgaagtactcgtagcgttacgttgacggcagaagggggcctttttctggagcgatgtcgtcggatcctcagtgaaatagaggcggcagagcttgaactatcagaaacgcagcaggcccccagaggcaaactgcgtgtcagcctgcctctggttggtatgctggttatgccagcactgactgacttcatgcatcgttatccggcagttgaaatggatgttcatttctccgaccgggttgtaaacgtaatcgaggaagggttcgacgttgttatgcgcttcggagagcctcatgattcgaggctgatgtccagatcgctgggacagtacaggctgcatcttgttgcctctccgggttatctggccctgagaggtacccctgataagccgggtgagcttgtcaaccacgcatgccttcagcacagattccccagttcggggaagtttgaaccctggccatttaagcaaacggaagaaattgcagatttagtcctgcctacttcaatgatttgcaatacttcagcggctcttctggatgttgccagggccgggctgggtatagcttgtctgccggactttatggttcaggaggcgatagacaaaggagagcttgttaccgtactggacgaacatactgagcatcatggaacactcagattattctggccatcgagcaagtatttgtctccaaaattacgcgtgtttatcgatttcatggttgaacaaatatttgcgcagaaaaatttcagattaacgcaagagtag

SEQ ID NO: 187097 - DNA, 711 bp, Klebsiella oxytoca
atgcgaatcggtgatcgattcagacgcgattttgcattcaaacgcctgcattatcccgtcgatatcattgccctgtgtgtgcgctggtacctggcctatgccctgagtctgcgcaatctcgaagagatgatggccgagcgcggcattatcgttgatcattccacgcttcaccgctgggttatccgcctggtgccgttgctggataaagcctttcgccgacataaacaccccgtgggacgtcggtggcgcatggacgaaacctacataaaaatcaaaggtcactggaaatacctgtaccgtgccgttgatactgcaggtcaaaccatcgatttcctgctgaccgccaaacgggatgccgccgctgccttgcgtttctttcgcaaggccattcgccaccacggcgaacccgaagtggtgactatcgataaaagtggcgccaatacggcggcgttggccatgctcaatgccgacaaacctgaagaagaaagcatcactatcaggcagagtaagtacctgaataaccttgtggaacaggatcaccgtaatatcaaacgacggacacgtccgatgctgggattcaactcgttccgacgagcgcagacgctgttggcaggcatcgaactggtacacatgatatgcaaagggcagtatcagcatccactcggtgatggattgtccgtagcgggacaattttatctgttggctgcctga

SEQ ID NO: 187098 - DNA, 1017 bp, Klebsiella oxytoca
atggcaaccataaacgatgtttgtaaattaacgggagtctccaaggccactgtctcgcgggccatcaatggcaccggccaggtaaaagaatcgacccgtcagtcgatctttgctgccatggaagagcttaatttcaggcccaattcactggcccaggctctggcttgcaagaccggtgatagcatcggcctggttatctccaattttgaaggcaactattttggccagttactgaaaagtgtcaccagtgtctctgatgaagcaggtaaacagctgatcgttactgatggccatgacacagccgaacgggaaatccaggcgatttacgccctgatggacaggcgctgcgacgtgttgattgtctatagccgaaatatgtcaaagcaggagatgatcgccgttcagcaagaggtggggcgtcctattatctatttgggccgcaccctgcctgcgggcagcggttattcggtcaacttaaacaagaaacaggccgcctggctgccgatgaatcatctgctgtcgctcgggcatcggaacatcgcctattttggccccgccacccatacgcctaccggtattgcccgcatgagcacctatcgcgagatgctcgcaacgcaaggtatcaagtttcaggatgagtggtatcagtgctgtggattcagcctcgatgagggttatgccgctgcaaaacgcttcctggcaagtggcgctaaatgttctgcgttgtttgccgccagtgacagtatcgcctttggtgccatgcacgcattctgcgaggccgggcttaccttgccaacagacctctccatcgccagtattgatgatgagaagcttgccgcatttgtcactccgtccttgaccagtgcctgcctgccaatgaacgacatgattcaacatgccatgaccattgcgcttaaattgatggaaggcgagagtgtcccgcttgagtccaaagtttttcaaggtgaactgaaagtgcgtcgttccaccattccttaccttcctacaggctcatag

SEQ ID NO: 187099 - DNA, 321 bp, Klebsiella oxytoca
atgaataagaaaatatatctgttctgtgccgctggtatgtccacctctctgctggtttccaaaatgcgcgagcaggcgactaagcacaacgttcaggtcgaaattcacgccttccctgaatccatgtctggtgaaaaaggcccggaagcagacgttatcctgctgggtccgcaagtgggttatatgcatgcagaaattgcagcccgtttcccaaccaagccagtcgccgttattgatacttccatgtatggccgcattgatggcctgagtgttctgaaagtcgcaatagccgagattaaaaaggccgctcagtcagcctga

SEQ ID NO: 187100 - DNA, 372 bp, Klebsiella oxytoca
atggatattagcggtctggattttgacgcactggagatggactcctccgagcaggagaaaatggatttcgaagagcaggtcatgggcatcattattaattccggcgaggctcgcagcctttcttataaggcgctggcgttagccaagaaaggagagttcgagcaggctgaagctaagatggaagaagcgcgcctcgcggcgaatgctgcccatctggtgcaaacccaactgattgaagccgatatgggcgagggcaagaccaccatgacgctaatcatggttcatgctcaggatcatctgatgacttctatgttggcgcgggagcttatcaaagagcttatcgatcttcaccgcacggttgctgctaagtaa

SEQ ID NO: 187101 - DNA, 1410 bp, Klebsiella oxytoca
atgaaatttgcacatgattttctgttcggggccgcttctgcttcttatcaagtcgaaggtgcctgggatgaagacggcaagggcatgacaaactgggatgaattctccaagatcccaggtaaaacttttgaaggcaccaatggcgatgtggcggttgatcattatcaccgttacaaagaagacgtggcgctgatggcggagatgggtcttgaatcctatcgcttttctatctcctgggcgcggatcttccctaccggggatggtgagatcaatccaaagggcatcgagttttacaacaatctgatcgatgaatgccttaaatatggcatcgtgccgttcgtcacgctctatcactgggatctgccacttaacctggaaaaagagggcggttggctgagcccacgcacagtgcaggccttcgttaaatatgcaaagacctgtttcgaagcatttggtgaccgcgttaagcacttcatcacgttcaacgaaacgatagtcttctgtaatctgggatatatggccggggctcatcctcctggcatccaaaacgatcctaagaagtacttccaggcgattcataacgttttctacgctcacgctcaggcggtgctgctgtataagtcgatgaagcagtttggcgagattggtatcagccacgtgttcggcccggcatacggtgtcgatagctccgaagatagccagaaagcggcttatcacgccgatgcgtattccattcacctttactacgatccaatcctcaagggcgaataccctgcttatgtaatggatgcacttaaggtaagtggtttgcatccacagcagaccgtgcaggagctggccatcatcaaacaggcggctggcctgaatgacttcatggggctcaattactaccagccatgccgtgtcgagctgattaaagatagcgttgagtcgcgtgaaatcacgcgtgaaaactcaacaggcgcgcctggcaacccaagctttgacggtttcttccgcagcgtgaagatggatgacaagcgttacaccaagtgggactgggaaatctctccggaaggtttcgtcgatggcctgaagatgctcaaagagcgctatgggcagattaagttctacatcaccgaaaacggcctcggagacgaagatccgataatcgaagatgtcatttgcgatgtaccacgtatcaactacatcaaggaacacttgcaagccgtcaagcaggccattgcagaaggggtgaacgtgaagggctatttcgcctggtcggtcatcgacttgctgagctggcttaacggttacaagaagcagtacggttttatttatgtcgatcacaagaacaactatgagcgtaagaagaagctgtcttttgactggtatcgctctgttatcgaaaaccgtggagggaacctctaa

SEQ ID NO: 187102 - DNA, 1347 bp, Klebsiella oxytoca
atgagcactgtgaatgagaaagtcaacgccgtcatgccgtatgtgatgggatttgttaactccaaacctgtcagggcgataaaagatggtttcctctataccatgcctttgaccattattggttcggtgttcctgcttttggcctttatcccaattcctggctacaacgagtttatggcgagcgtctttggcgcgaattggcaggctcctttgttccaggtagtgggttccaccttcgatatcctggcgcttattggggtatttggtgtggcctacagttgggtaaaaaacgaaggttatcaaggcctcagcgccggtatcttcgccattgtcgcgatgcttatcctcaacgataacttcgtgctcggcaccgatggtgcgagcatcggtagcgtcatccctaaagcctatatgggcggtaagggtatgatcgtggcaatcttcgtcggtatctacgttggctggctctatagctggtgtatgaagaagaatctgaccatcaagatgccagagggcgtgccggaaggggttgccaacgccttcatcgcgctgattcctggtgcgctgattattctgagcgcctttttaacctggatcttcttcgaagcttcgctcgacaagaccatcatcgccgtcatctacgatctgttgcaaattccgctgcaaggtctgtctgacacgctcggtggcgttattatcgttgcattgctgatctccttcctgtggtggtgtggtgtacacggctcagccatcatgatgggcatcatgggcccgattgtgaccgccaacgcgctgcacaaccaagagctgttcctgaagggcgagcaactgattgcaggcgaaaatgccaagatagtgactaaccagtttgttgatcagtacatcacttttggtggtgctggtctgacgcttggcctggttgtttcgatgatgttgtttgccaagtcccgtcagtttaaggatttagggcgcctcgctatcatgcctggtctgtttaatatcaacgaaccggttatcttcgccttcccgatcgtgttcaacccattcatgttgatcccgttcatcgcggcaccggttatttctgtgctgatggtttacttctcaatctctaccggcttagttgagccgtttaccgccatctctgtgccatggacaacgccgatgattatcagtggctttatcatcggtggctggaaagcagctctgctacaaatcgctgtattcctgatgaccatcgctgtctacatgcctttcatgaaggtacaagacaagcaggctcagcaaagcgaagcaatgcgtgagaagtccgctgaggacgaagacgacgagctggcgctgcaactgtaa

SEQ ID NO: 187103 - DNA, 894 bp, Klebsiella oxytoca
atgaaaattgcttcatttgatatcggtggtacagcgttaaaaatgggggtgatgacctccgaagggcagttgctggtcaagggaaagcagacgattaatgacagtaatggcgaacaaattttgcaagccatgctgagctgggttgcactgcatcctgaatgtgaagggattgctatcagtgcgccgggctatgtgaatccccacactggttttatcgaaatgggcggtgccattcgccagtttgataacttcgccattaaagcgtggttagaagaacaaacccaactccccgtagccattgaaaacgatgccaactgtgtgctgctcgctgagcgttggcagggcaaggctgcagatatgagtgatttcctggtgctgaccatcggtactggcatcggcggtgctattttctgcaataaccgactggtccacggcgcacgttttcgcgcgggtgaattcggctatatgttgaccgaacgaccaggcccgcgcgatgttcgccgctactcaatgaatgaaaactgcacacttcgcacgctgcgccagaactattccgattacacaggtaaagcgctggaagaggtgacgggggaggaaatatttgaccgttttgatgctggcgacgccgcatgccagcgcatggtcagcgagttcttaaataacctcggcatcggcttgtataacctcgtcaatctgttcgacccgcaaaaaatcctcgtcggtggcggcattgttgaacgccctggtttccttgcactgcttcgccagcacctgacctggttcaccattgatgagcatatcgatgctgtcagccacggcaacgatgccgggcttatcggcgcggtctaccattttaaccagcagtacccatcgcgcacagcgatagctaattga

SEQ ID NO: 187104 - DNA, 1431 bp, Klebsiella oxytoca
atgtctggatttaaaaaagggttcttgtggggcggcgcggttgctgcgcaccaactggaaggtggctggaaagaagggggcaaaggtgtcagcgttgccgatgtgatgaccgttggcgcgcatggcgtcccacgtgaaattaccaatggtgtgctgccaggtaaaaactatcccaatcatgaagcgattgatttctaccatcgctacaaagaagacatccagctgtttgctgagatgggctacaaatgtttccgtacttccatcgcgtggacgcgcatcttcccgctgggcgatgagcttgagccgaatgaagctggcttacaattttacgatgatctgttcgacgagtgccttaaacacggcattgagcctgttattacgctgtcgcactttgagatgccataccatctggtgactgaatatggcggctggcgcaatcgtaagcttatcgacttcttcgtgcgctttgccaaagtggtgctgacccgctatcagcataaagtgaagtactggatgacctttaacgagattaacaaccaggcgaacttccacgaagactttgcaccgtttactaactccgggcttaagtattcaccaggtgaagaccgggaaccggtgatgtaccaggcgtcgcattacgagctggtggccagtgcgctggcagtacgcgctgcgcgtgaaatcaacccgcagttgcagatgggttgtatgatagccatgtgtccaatctacccacttacctgtgcgccgaacgatatgatgatggcgatgaacgctatgcatcgtcgctactggtttaccgatgtgcacgtgcgtggcaaatacccgcagcatttgctgaactactttgagcgcaaaggctttgagctggatattacccagcaagatctcgctgacctcgcacagggctgcgttgattatattggctttagctactacatgtcgtttaccaccaaagccaccgatgacaacccgctgttagactacgatgaaacgaagagtctggtgtccaacccgtatgttaagaaatcagactggggctggcagattgacccggtggggctgcgttattccctgaactggttctgggatcattatcagctgccgttgtttatcgttgagaacggattcggtgcaattgatgtgcaggagagtgatggttcggtgaacgaccagtaccgcatcgactatttgtctgctcacatcgccgagatgaaaaaagcagtggtcgaagatggtgttgatctgatgggttacaccccatggggctgcatcgatctggtttctgcgggcactggcgagatgaaaaaacgctacggctttatttacgtagacaaagacaacgagggcaacgggacccttaatcgcagccgtaagaaatccttcgcctggtataaggacgtgattgagtcaaacggcgaaaagctctga

SEQ ID NO: 187105 - DNA, 690 bp, Klebsiella oxytoca
ttgagtcaaacggcgaaaagctctgatttatttgactttgcaatcataggtatacgaccaggtgaaccgctctccaacctagatgcgtccctgcgtggacagatgcgtaccgagttggcgcgcttgcaccagaaactggggaccacaatgatctacgtgacccatgatcaggtagaggcgatgacgctgggggatcggatagtggtctttaacaagggacatattgaacaggtgggtttgccactggatctttaccagcgtccgaccactgagtttgtggctacttttctcggcatgccaaagatgaacatgttgagctgtaagctgaagggaagagataacggattctggaagctaacgctgggtaaagtgagcgaagtggtggcaccagaaacgttatttgattgtgcagatcagagcaatataaaggtggggatccgccctgagcatctgttggtcggtgcggaaggagacccgaatgcccatattcacggacgggtttctctggttgaaaacctcggtgatgcggctatcttgcacatcaagtgcgaaggcatagaaggggtccgcttggaaaacggaaaacaaaccacgataaggctattttttaaccagcgcgctcttgcctgtcccttgaatagcggcgctactgcgtttttgtgtccgaaaccgaacgattacgtacactaa

SEQ ID NO: 187106 - DNA, 1380 bp, Klebsiella oxytoca
atgaaaacaattaaaaaacttccattaacaatggcggttatcgccgcgctgtgcccaatttctgtactcgcacaagaaccgatgtctcaggaacaaattgaccaaatcgtggcgaaggccgtggataaagcgctggccgaccgtgatgcgaaaatagaagcggcacgactaaaaagaaccgatacgttagttacgccgcaagttcccaccacgccagatcaagctgttccattggggcttaaattcaccggctatgcgcgttacggtgcgcatttccaggcaggtgatcaaaaatatattggcgttgatggttcctataacggctcctccgcaattggtcgtttaggtaacgaaggcaacggcggcgaattccagctcaccaaaatcataaaagccgataacggggccatctgggatatcggcgtgatgattgaccactggggcgatgaagttaacctgaaaaaagcctacgcgggtgtcactaatctttttgaatcacagccaaatgcttatttctgggccggtcgcgacttccatcagcgcccgcaacaagggctcaacgactacttctggatgaaccacgatgggcaaggtgcgggggtgaaaagcctcgatctcggctttgctcaactggacatggcggcggttgcgtcggtggagcagtgtaatcctgaaatgattgaagatggcggcaacccgtcgcgtatctcttgtactggcggctccggcactggcgacaaaggcaactacgcggcaacgtcaaaactgcatggcatcaaattcggcccgatcgatttcgagctgtacgccaactatgggtttgactccaaagccattgatagcgatgaacgttccaaagcctggcaagccgcggtggtgttaagccacaccggtgaaaatagcctgaataaaattattgcccgttattctgaccactcggataacagcgtttataacaaaaccaatggcctgcacaccgtgtataccagcttcgaagggaactataagttcactcagcaagcgcaggtggaatatctgttggccttccacgattacgataatgacgagcaaacgctcgataaccgccgcaactacgctgccatcgttcgcccgatgtacttctggaacgacatccattcaacgtggcttgaagcgggttatcagcgcgtagattatgagaatgatggcgataacaaaggctggaaactgacgctgtcgcagaacatttctatcgcgatggggccggagttccgcccgatgctgcgcttctacgttaccggcggccaggtggagaacaaccacaccacgcgtgtcgcagggcaggataatacgcagcttgattcgttcaacgtgggtgcgatgtgggaagcctggtggtaa

SEQ ID NO: 187107 - DNA, 549 bp, Klebsiella oxytoca
atgtctgataattttctgcctgaactcaaacgtgcgcatgacaagttaatacaactaaattttgctgataaagcgaaatcgctgctggaacgccatgcaaaactacatcctcttggatttggagcctgtacgagggacgtaattcgctggggttgcccttatgtgcttaagtgtcagtctggcctgccttgtggctacttctctcttacagggcgtcttggtgaagcggaggaagcatcaaggcgtttatcaagcaagcgagaagaaatcattcaactccgtaagctgactgaaatgaatccgcgcttcatgctggctttaaaagaacaagaagaagctcttattgtacttgaggctcttgaaactgacgctattaaggctcagggcgagaaaaaactggtttccctgatttctgatgatcagaataacccattatgtcgggttattgagcgaattaatgagcaaatgctaattggtaaaatccccaaaaccctggcggatctgttctttattgaacagaaacgtatagagagaaataataatggctaa

SEQ ID NO: 187108 - DNA, 504 bp, Klebsiella oxytoca
atggctaagaccccacgcagtcgcaatgcagacgataaagtcattcagggtaaagaacttgatgcttacatcaaagccgagttacaagttatggtgcatgagggactggaaaaatcccccattcaaccatccacattacatgcccgtcttaaagccaaaggaataattaaagggggcattagtaccctgacctctcgtaaaagtatcatcaacaattacaaacttcgccagcataacaactacgaagacggtaaacgagagttgactacagatgaaaaggataaattggctaaggggcgaaccggtgctgcttatataagtaaggcaaatcgtcttgatactgaaattatagccttgaaagctaaatatgaacgaaatattctggcgctcgccgacatcattgagtatgtcgacaacgcaaccccaatcaaagtagaggatattcttgctgacgatctcattcgagaacttgctgagcgcaaaagaaattcaagtatgagctaa

SEQ ID NO: 187109 - DNA, 549 bp, Klebsiella oxytoca
atgaatagtcaagtaatcaaccctgagtcgtacatattttctgcaatcttttatattgggaaggataatttcaccagtaacgatgtagcgaaaattcttatcgagcgattttcacttcagaaaacttttttaaaggctaaagcttttacttataatcaaattcaacgtctggttagaaatgggttattaaataaagtacgaatagttggtgtatatcaatattcatactcaactacctctgagtttaacgttgcaataaaaagtgtagatttaattgaggtaccatcaagttcttcttgtcaacttgtttcaagtgcaaccagcaatgaaaacattaaaataaagtctcttattgaaaaatacagcagtgagttggcgaaagtatcaggagcaaaggagatttatgaagaattgatcattgctgtgccaagtagagaggatgaatttagaaaactttcttttgagcaagagagaaaacacattaagataaatgaaaaaataaatacattaattagaattgttaatgaatctgtttcgataaatcaatga

SEQ ID NO: 187110 - DNA, 231 bp, Klebsiella oxytoca
atgaattttgaaaaatacttgaaactaaatggattcatgaaaaagagagggcaaagccttgccctctcccctcatgcactgataaatcatcataaaatgatgatttacagcacgcaccactatatgctagtccttaataaatataatcccagccgactccagatgcaacctttcagtttacactgctactcattaaacaatgagttcatcattacaccttataagctgtaa

SEQ ID NO: 187111 - DNA, 372 bp, Klebsiella oxytoca
ttgaccgtgtttattcgccgtgaagtcatttccagaatcgtgcttatcatcatggcagttgccgtgctgagcagttcgcttatggtaaaaccacaggctgcatacaacattcaggaaacaacaaccgtcagcgaacatcagcacgacagcgatgaaccactgaatgagcacgatccactgctgtttcactcccacggtagcgtgcatcacctcaatgccgatcattcccacgatctgaataaactctttgctctgactgccctgcacgcctggaatccgggaatgcgggtaatgtttgcgttgagttcagaacaaatactgcaaatgccgcagaccacccccgaacgccctccgagaatcctttctgcgtaa

SEQ ID NO: 187112 - DNA, 1794 bp, Klebsiella oxytoca
atgtctattaaattaagttcttctttgcgttcaaagttagcagctcagaatatcgctcgtgtcattggtgctgaccctgaccttactattaggtttgccggtcgcaaaatgaacccacgaattgatatggttaaaaaaataatatatttacctgatggtgactttagtaatgataaatactggaagttatgctctggttggattagtcatgaaggtggtcataatcgttttactgaattagaaacctgcataagttttgagaatgagtacctttcaaaattaccaggttttgatcatatattacctgatggtgttcctgttttctcttcagaaaacgatgagaagaaagcacgaattaagttaaaaagacttcatcgggaaatcaacctttttgaagacattcagatggaggagaaaactgggaatctttttccattatctaaatcgatgctttctgaagtgtattctttaatggttcaagatggttacatgactgcagatggaaaaaatatagtttcatatgtggaaatgtacattttaaataaactccgagtcaaccaattagggcaagaaggcattcctgagattttaaaaaatttctttgatcttgctgatactactctattaggtttgaaagatcgttttgattcattaatcgcagaagctaccggtgttaattcaactcttatggcatgtgatttaggattaaaacttcatgaagagtttgaaaaattacgtgatgatctaaaagagaaagaagaagagcagaagaaacatgatgattctgatgactctgatgactctgatgactctgatgactctgatgattctgatgattctgatgattctgacagctccgatgattcttctttaagtgataattcagatctaaaacctgtttactcacccgaacagataaaaaaggccatagaggatcttgataattatcttgattctgacaatgaccaaacaccatcgcatgattttcatgaagctcttaaaaaagcaattaccgtgatggcagcatcattcagtgatgaagatgttacaaattacggggttcgcatcggttttatccgtcttactgaagaggactatactaaagcacaaaataattcacgtgacctaagaaagttactttcttctctattaaaacagaatgtccgccgtaacaaccggcttacagaccgtggagctcgccttcatggaagaaagcttgttgaggtacctatgggcgcaacatctgtctttaagaaaggtggggatggatggaagcgatctgacgtgggtatagttaatctacgtgatatctcggcatctatgtatgaagttggtgaactagctttaaatgctaacctcgcttttaccttggcttgtgagtcggtaaacaatattgatgttgctgatgttgtttatccggtccagaaagaaggttttatagacattcttaagccatttaacgaatcagttgctcacaatttctctgattacgaaaatgtaagtagcggattacatactccaactgctgaagcgataaatgaatgcgtagaatatttattacgtttcaattttacacgtaaggttatttttatagcgacagatggtttaccgtctagtcctgtagaatgcgttagcagagcagttgaacatgccaagaaacatggtatagaaattgtctgtatcggttatggcattgaaaaaccacaaggcttcgacggcgtttattttaaaacaataaacgatatatctgaattaattcctttgtataaggaattaatcagaagtctggtctaa

SEQ ID NO: 187113 - DNA, 231 bp, Klebsiella oxytoca
atgaaaggtgaaaaatatattaagcgtgtccgagttgactctcgtcaattggacggtggaatgatcggaaccaagatatacgttactgaaggagaagttgttgacggtgtattgccggttgaacgtcttgtgcgtgattccagcttttccgaggaaaattctgaagtaatggactcagtagttgacaaactggtgagtaaatatcggaataacggttacgaaatcttataa

SEQ ID NO: 187114 - DNA, 1245 bp, Klebsiella oxytoca
atgagtcattctacaagttctaatttaccggctaaatcaccaatgcagcatgcacaagagacatttgacctcgtcaagtctcacgttcatcaattgggtggatggcgtaatgttctttccttttatcctgaatttcatgaggcgttagaaaaagcacctcgctccgtaaaatgcccgtttacaggcgacggcaaaacgaaatttagatttaaagaccgttcactagaaagtgttcatgctatacatgaagattatccacataatgcattcattgatggcattgatttaattgctgaacttaaaaatgttagtaaaacgcaggcagctaaagacattctggaaatgatgggtgtttctaaagtcagaaagttgaatgaagctgatcgcgttaatatcgttctttatgagaaaaaagcttcatctttctccgatatcggtgaggaggaaaggcttgatcgcataaagaaattagaagctgtatacaaatatactaacgttgcgactcctgattctttagtagcgcgatatctttcagggcgcggaatcaagaggattctcacaaagttacctgcaagcctggggttaaatccaaaaatgcgttactggcatggtgctaataaacctgccagctttcaccccacgatggttgctatctttaacgataagttaggtcgcaattgcactatccataaaactcatcttagtgatgatgggcttgtaaaagcagatgttgaaaacccaaagttaatgatgaaaccggtctatcagatgaatggtggctcgatccagttgtttaaaccaacctatgatgaaatgtctaaggcttggtttttgggtatcagcgaaggtatagagaatgcgttgtctgtaactgaggcaacttcaataccatgctgggcatcttcaagttctacgtttatggaaatgctggaaattcctgatcattttatgcctccttctgattgcgagttcatcgaattgacaatttgggcagataaagatcgggttaatccaaaaacaggtaatgctgcgggagaaactgctgcacaggttcttaagacccgaatggaaccattattcgctgcacgctatcctcacgcgaatgtccatgttcacattttcttaccagaaattgatattcctgatggtaagaaaggtgtcgactggaatgatgtgctgatactcaatgggacagaaacttttcctggtaaacttgaagaaaagtttttcgacctgattaagtaa

SEQ ID NO: 187115 - DNA, 540 bp, Klebsiella oxytoca
atgaacaatatttctgcaattgatattgaatcggtattcgcctgggtaaaagataacttcattttgaagcattcctccactcttgttaatacaccgtggtatgactacgacatagagacagatttgcgtttaatcaagcaagccttaatcaatggtaactctgaatttatctacgttgttcgcgatcatggcaccatgttgcttttgttatctgaatttcactcctccatggcacttgattgggatggtagtgaggactttgcatattatcattgtaaaatgtttagcatgcagagcgtccgtctcacaaagcaaaatgccggtgttctgttagatcgagggcctttacttaagtcttttagcggtggcaacaaaaacacctatctgaaagagattttagattttgttaataataaaggttttaactccgatcccgtacgttcactctttgactgccttcacatcggagaggagttaaaccttccctcaatgaagaacttcattgcgcgagttgaaaaccatcttcgctgcttaaattaa

SEQ ID NO: 187116 - DNA, 219 bp, Klebsiella oxytoca
atgaactacagacacgaatgctatggcctagaaaagttacttttggccgatgatgatttccttctctacctttttggtggggacaatgctgaagctttacgtacggacttgaaattgcgttatgcagccggtgaacgacttatcacaacgcaaaattgtccagacttttcacctgtcaggggttgccctgggcatgagagagagtgtgttgatgagtaa

SEQ ID NO: 187117 - DNA, 609 bp, Klebsiella oxytoca
atgagtaacccgtatgacctttcaatgtattcattactggttgtgatggtcattttggcccttgtttcaacgtggtatgcaaaagaccacaaaataaacttttatttgttccttctcagcatagttacttttgttgctttattggctgtcgggcttatcaactggttcgttgaaggctcagtttatggtgctttaatcacaagtgcaggtatcatttgtctcagtatgaccagactgagactgttagtttatcgctatagcattaaggccagtgttaaaagcatcgtatcttcggttactgatggtagaagggtggttttcattgctcacgataatttagacctgagagaagtcgtcttatccttgttcagccatcacttaccaacacaatcacgcatagtacgtggtcctctgggtttcggaatggataatgatattgatttcataaaacaacataacctttctgataaggggtacctggttatcttcttaaaccaggaagattcatactcatggttaaagctcatcgcagatggtgcaccagaaaaggcagttgcttttaattttgattatattccagatctggagagcaaacatgaaaacgaatga

SEQ ID NO: 187118 - DNA, 243 bp, Klebsiella oxytoca
atgaaaacgaatgatgtgcatggcgcagctgacggcttgccggtgaacacgcttgtcattgacacagcaacagcacgtcgttttgaatgtgtaaaagagagggtgcgtagactcgggttcaataacatatccgaccctgaaattattgacgcaatcttgtctgaaataacaacagctgatgctgctggtattattatcgagtacaaattaaaaaataccaaacctctgctctcgatagattag

SEQ ID NO: 187119 - DNA, 300 bp, Klebsiella oxytoca
atgggcccaaaggcccagggccagctcctctgttcatttagttttaatgttgatgagacctatgtggcagataccgaggaaggcccccggattatgaaagccgaaatgatgaacgcggttatgcagattgttcctgactacattgagcttacggatcgtcaaacccatgcaatcagggaagaagtttccgtgtttgatcgagtttgtgcaatgcgccttaccggtggtcacgggagctcaaagtcgctgtgggagaacgatatcctcccacgcatgaagagccatagccaattacagtga

SEQ ID NO: 187120 - DNA, 408 bp, Klebsiella oxytoca
atgggtaaagtgcacagtatcggaaacattacttggaagaactacgaaagtgcatcgtttaaagcctatgccggtatcggggcaattttaagccttggactcattacagcgacggtgcgtaactatgaaatcctgcagatgacggttccgtattcatggtatctctactttacggcattctggctactttatccgtcctttaggatctctttcagcgaacacgccgggcgaatgttcatttcgtggggattttacggcctgaagctgataacgattaaccggcctgtccctgctggttactggctagtgtcgatggagaaaacacgataccggttgattcgggtgtgtcaggacggacgtcgcctgccgctatggctgacattcagaactttacctgaattcatttaa

SEQ ID NO: 187121 - DNA, 960 bp, Klebsiella oxytoca
atgaatactgacttcgcacattacaatgaagagcaactacgcaaactcgatgagctgcacagtttactccaggatagcgagatcggatcagcttaccttgcttcgctcccggagccacgaagcatggaggagtatcatcccccacaggaaattaaggtgactcactcggtgcctggcctcgacaccctggtggacatttaccggcagcagcgggttgataaaggcttggcgaaaaatgaaccttattcaaccaaaatcacccgtaaataccccgggtttattgtcgtcaataataatcatgacgaagtgttggcgctggtaggagaaatcaaccggctacgggataagtttgctgatgcggtcaaaagtatcactcaatacagggactcccggtcagaaattctgcatcaggtttgcccgtggctggtgaccctgcaggcatcccgtaacatccgcatcgtgactgagaaaattcgcacactcggtttcacctggcaaattccggtcgttcataaattcacccgcctggaaacggttattgatcgcttacgcagggaactaacggcactacagcctgatatcaggttgactatacaggatgttaagcgactgaagcaggagcgtagtgaggaaatcatgatgttgtcattgctcaatgaagaggtcagccatgaagatgagcagttgaggaagtttcgcatcatccgggaaagtaactttcctgctgttaacgtcaatatcaggtacaccagtccacatgatcctgatgacgtgtccggaccgtacaaactcaacttcagagcccctttaccgttaattttgttcagtgagccgggccgttttaacccgttaaaagattacgaaaaaggtgaaaggcagaagcgcggaaatgttgatgaaaaatatcgatctgtcctgccccgaattgggctggtggaagtgattaaggagtcggcatga

SEQ ID NO: 187122 - DNA, 756 bp, Klebsiella oxytoca
atgagcaggattttaaccggtatttgtcatgcggacccggccaacaggctttacgaggtcgcggtcagtcggggaatatcgtttgtgaacgcgaaggaacgtttccgggttcagatcagttttaaaaatgctatgacgcaaccgagtgaagacagatttctggctgagttactgacagttcatcatttcctctcggatccctccattctgtggcatatggagaaacaggtttatgccagtaccaccttatgggccagtacatcggcctggctgcctgatatctatcagcgcaaagccagtacgcccggcgtggtaaagatcatccggtatatgcatgctctgttcccgggactcaacacatcggtggaaaccagtgagcagggctacgggcaggctctgaccagcacgagtcttgaagttccttcctggcctgcgatgccacagtttgactgcgaactgggtacagtccagatcacgatgggagggatgatccgttacacagaaaccatgagcaataaaaattgcagaaacccacttgcactgatgatgaagagtttcaggaaagggatgatccccgtagataaactgccagagagcaagacagcaagacttttgccactcgatatgaataccgctggtgaggttttttctcacaccacctggccgagatatcgctatgtgtttgctcccggcgagggcggcattaagaaactggtaaatgtggtcaggctgaaattaaaacccctggaggaataa

SEQ ID NO: 187123 - DNA, 324 bp, Klebsiella oxytoca
atgaattatgcaattttcatggtcgtaaccgccctgtgtgcgtatggccttaattttttgacaagcaaaatcggggccggtgcgagccagaatattcggggcgacggcacggaagggatgtccttacggtgtatcatttcatttattctgcttctcgtagctttatttttgcccatcaaaccggcagtgattcatctgggggtggaatttgctgcactggtaaatttcattgcctgtgtggttctttacaccctggcgggtatcaaggaaaaacggagattgaaaaaacaacggaaagccgaaaaggcagaccagaaacgctaa

SEQ ID NO: 187124 - DNA, 318 bp, Klebsiella oxytoca
atgaataataaacgaaccattactactcgtgagcaaataaaagtaaatggagagattaaagaaagaacagccacacatattgtcacaggtgcacatgggtacgaaacactctgcacaagtggttataatatcgacaggaatgagcagggtgaaattatccataattgcgagaaaatagccgaagatgaattaccggttacctgtccaacgtgtcgtgttgtctggtttcatacccatgaattcagtctgactgacttcgacacactatcagaaaaaggtaattttgtattaaccggtttaaaggagattaatatttaa

SEQ ID NO: 187125 - DNA, 1254 bp, Klebsiella oxytoca
atgatgtccctctgggatgcgctccggatgaatatgatgatctcatatcaggaacttgttcgcaccttccttagtatactggttataaaaccagtgctgttaaaagacatgagatcttccatgacagatagaacgaagctgatagccctatcccggcccgatgacatgagcgcactggatgcgcttaagctattacgtttccgccgctacaacactgcgagaagccagttaaggaccacccgtgtctggtcgtcatggtgtgccaaaaatggcctgacgcccttccctgtggctgctgttgatgttgaacgttatatcaacgggctgaatggatccgtcaaaatggcgaccatttctcatttcattgcttgccttgcgagcgttaacgggagtctcggattccctgacttccgcaacgttcttattaaagcgcttgtccaggtctggcgggcgcgggaaaatgagaaaaaagtggttaccggccaggcgcttccttttatggttgcagacctcaatatactccgtcgggccctccagaagagcgacgacgtcagggatatccgtgacctggctatgatctgggttggttttgaaacgctgctgcgcaacgtggaaatcaggaggattaaaaccggtgacctcaaatggcaaaatgacagtgcctgttaccttctggatgtgatgcggaccaaaacaagcctgtcgagcaacctgacgtttcaactttcgccacagtgcagccgacacgtcaggcgactgattgaaacggtggagtatacggatacagaaaccttcgggaaccgttacctgtttcaacctgtcaacgtccatacaaaccggtattttccggccaccagcagtaagctgtccagaggcaaatctatagataacatgctcctgaaggctggcttcaatcaggcgttgctcactcagctgcagaaggactcacaggtcacacgagaggatgtcggtattctgtcctccaattcactgaaccaggcattttcgcgcctgtgggatatagccggtaaagtgggtgataaccggcagtctggccggtacattaagtggacagggcacagtgtgcgagtcgggggggctattgaactgtttagggacggatacactctggagaaaattacggagatggggaactggtctgatccgaaaatggttttccggtatatcagggcataccttgccagtgaaaaagccatggtgagctttatgcgcaatcatctggacgacatataa

SEQ ID NO: 187126 - DNA, 300 bp, Klebsiella oxytoca
atgaaaaatgatatgatagttccatatatcgatccttttatagagtacaaagggttaataactatctgtttggttgttttcctggttttcttgctttggttaacactaaggcatcttgcaacctattatgtcgccattaaaatacagacagcccataagaaaggactcgctaatgatgaccatcctgaggtcacccaatggctcaaaaacaagagtattacgttcttctgcttgcatcttgcagcactggtcgtcatatcatacagcgcaattcgtttttacttgcagaactatccgtaa

SEQ ID NO: 187127 - DNA, 606 bp, Klebsiella oxytoca
ttgactgttctacctaccaaacgcccagatacagaactggctcacttttcatggtgtatccttatcgctgttgcgcttgctcgcagggaaggaaagatacagtcttcgctacaaacccatatgtttattatgcaatggttgtctactgcacagaaacgtaaactgtttcccagatcattagcacaggatattatctggttacaggaacagggtaagcataagggcccgtctgcacgcctgtataataaggttgaatatttatggctggcgagttcaggtgagttaaccaaacagagtaccttattcaggttcacctgcatgatagacacacttcgaactatgggatggcaggattatctgctctcggatacagactggcagaatggctggacatctggccccgggaaaccttctatctatacgcagaaatcaacgcttaaagatttttttactcaatctggaatgctcatccagccccttagcatacgcttgtccggatgtactgacggtatatatcccttgctagagcagtgtaggcttagttacgagtctcaacctgcaaccgaagggttttccgttctgcagttaaatgctgatacgaaatga

SEQ ID NO: 187128 - DNA, 405 bp, Klebsiella oxytoca
atgagcgagacactacaggttctaaacaatattcgtacacttcgcgctcagacacgggaagtggctttagaggcgctcgaagatattcttgaaaaattaacggtaatcgttagtgagcgtcgtgaagaagaaaaagcaaatgaagaagcaaaccgggtgcatttagaaaaactcagtcaatatcgtgaaatgctgattgctgatggtattgatccgagtgaactaatgtctacaaccggtatcgtaaaagaacggaagcagcgtaaatctcgtcctgcgaaatatgtgtacaccgacgataccggtgtggagaaaacctggacaggccagggacgtacaccgggtccaattcaggcccagctcaatacaggcaaatcacttgaagatttcctaatcgaaaagtaa

SEQ ID NO: 187129 - DNA, 345 bp, Klebsiella oxytoca
atgggtagcgtcgacactaaccatgctgaacgtgataagcacattcgttcagcctctttcctgaatgctacaaaattcccggaagccacctttgtttccaaagaagttaaaaagaatggtgaaggcctcgatatcaccggcgaccttacattgaatggtgtaatgcacccggtaacgctggatgcgaaactcattggaaaaggcgatgatccgtggggtggtaaacgcgcaggttttgaagcaaccggcaatatccaccttaaagactttaatatcaccaccgaccttggaccggcctcgcaggacgttgagcttattatctctgtcgaaggtattcagcagtag

SEQ ID NO: 187130 - DNA, 795 bp, Klebsiella oxytoca
atgacttcccacgaactgaaagaaacgaatcttgtagaaagcgttgtgtctgagcgggacatggcaatgaatctctttattaatggattaactgccatatccgaagcggaaaaactgatgggcatctcccttattgatcagctcagaattgcatatgttcgctttaacccagcccatttagataaccagatagagagggcgagagttttgattgacagagaatcatggaagaaactcatagaccgaacatcattaaatatttactggaatgcacctcaactgaaatcatttattgacgaattgataacagaaccgcccattatgacgattcaggcagcaagagagaaagtctctcatacggttaataatcgggcagacatactctgcgagggcctggtttcatgcctgggtaatctgagccatgattttaaaaagaacgcccgaagctttgttatcaatgaaaatatggtcataaaaaacgggttcaagaaggatgtacactaccttgacgaaacggatcgagacctgaacagcctcaatgacctttacaggatttcccggtacatagaagggctatcctacagccagcaggatgttatcgttcctaagctttttgctcttcgagagaagaatgattatcaaaaagttgactatatcgacacggatttaaatattaaatttattgtgtatggaaacggaaacatccatatgcggtttatggatagaaaggtcctggatgggcttaatgatgtgcttgcatcataccagagaaacaacctgcctgacgtgaagtaa

SEQ ID NO: 187131 - DNA, 822 bp, Klebsiella oxytoca
atggtccagattctcaatacaacgggtttgaattatcacgtagagcaaaccatcgcgaatgccgaagagcgcattatcctgataagcccttacctgaaactcagcgccagaattaaggagcttattgaagataaaaaccgtatgaaggtagatattcgtatcatctacggtaaatctgaactcaacccaaaagaccatgaatggctggtcagtttgccctacgttcgactgagtttctgccagaaccttcacgctaaattttatgctaatgaaagccagagcctgatatgcagccttaatctgtatgattttagccaaatcaataaccatgaactgggggtgttaattgttaaagatgaagaccgggaagcattcaatgcttctattacagaggcccagcgtttaatccggatcagcactgaaaacattccatccccagcatcattgcaaaccgctgactctgattcgaaaaaaaatcaggaacagaaaaaagatgtttcgaaatcatccacaaaaagtgacgataaaactcacgtatctactgatgataaaaccactgatttggatgacagcgcaggcaaagacgatgaagctaatgccgagcctgcaaataaattaaccaccacaaatttatcaaaacagcacaagatggggttatccgacatgtatacgaagctgatcacagcgggatacctcaaagataatgatggtaagtatgaattgacaccgttaggggtatctattggcggtgaaagtaaacttaatcgttacagaaaaaatggagagaaatatttcatgtggccttctgacatctcaatctaa

SEQ ID NO: 187132 - DNA, 495 bp, Klebsiella oxytoca
atgattaatatcccgatgaccagatttaccattgtccctttgtctgtatttattttatctgtgccgatgctttcctgtgctgaaaccatttcagggaaagttgtgcgagttattgatggcgatactgtccaggtttatgacggcgctacaaataccagagtgcggctctatgggattgatgccccggagagtaagcaggccttcggccagaaggcaaagcaagccatgacacagctggcagcaaacaaggttgtcgttattgaggaccacgggcaggacgtgtatggccgtatgctgggtaccctctatctgaataaccaggatcttaatgccgttatggtcgcagaaggcatggcatgggcatatcgttatcaggggcggcttacggttcctcagtatggttctcttgagcaaaatgcacgtaacgcaggtaaagggttatggtctgacccacacgcggtagagccacgccagtggcgtaaagcaaataattaa

SEQ ID NO: 187133 - DNA, 1272 bp, Klebsiella oxytoca
atgtctactgtaagtgatgtgattgtatcttatggagtggacagtaaaaggtattcaagagacttccagaccaaagaggaatttaaaaagagctggtatgccgttttatctcgtgcgcacgcttctgtagacgcgaaggtaagctgttcctgtaagggaaaaggcccaaaattacttgccgtaaaatatcatacagccggcgatacgtattttctggcacggtatccgaatacaggtagccagcattctcctgattgtattttcttcactctggataaagataattcagggttaaaatgctacacacaaagcgtggtcaaagaccttaaagatggtggctatggtatcaggctcgacgtggcattagcctcatctgactcgcaatcaacgtcgatcgtgccaccagataacaggaatacccccggtggggtctcgcaaaatagtatgtcactgttaggtttactccagttcctttgggatgacagcggcctgaatcgctggtatccaaaaatggccgggaaacgtaatccagcaaaggtattcaaccttctaaccagttcagcggaaaaaataaaagtggcctcacttccactgtcctctcatttactggttggggcatatccatcgactccccaggtagccaggaatataaaaatgacagaagaggttctgattaacaaagaacgtctcatttgcgtgaatgcactgtcaaaatataatcctgaaaagcattccaatgaatcaaaacgtctcccgcttaagtatttttctggtgttccggtcgtgctcatgaatacagaagactggactcttctggagaagagattccccactgaaatagcaaactggagggccggaggcaacgtcatctgtattgctataggggatttggggcaatttaaagggaaagatgcgtactatctcaaaaccctccagttagccctgatgacggttgatgataactggatcccggctgattcaagctatgaactgaccatgcttaattatctacataaacaggaaagatcgtttatcaaaccccttcgatatgacgcctcaaataatgatgtattccctgatttttgcctgacagatacagggggccatgaattgtttcctattgaggtgtttggtatggaatccgcttcatatctggcgcggaaggcgatcaaagaaagttactataatgagcgatatggtaagaatggctgggcctcctgggttgcaccggctggcccccttccccaactccccaccaaaaccagaagttaa

SEQ ID NO: 187134 - DNA, 720 bp, Klebsiella oxytoca
atgttcagttttcaggcccatagaaaatttttggttaaatgcacttttccgctctgtgtagaaaaacaccgggtactgctgttgctaagatggttgtcacctgaacaaacggatgattttatgaaaattattgaggtcagctacggccccactgagggagtatccattagtggtttatatctgcgagtgacgacaactacacaaaaatccggcacactcttaggcggtggactatctcagtccggcgtagttctgggtggtggcggttactctggtagcgaaacaaatcagacggggcgatcggctatttttgcgcctcctcagggcaaaacagctgaaccggatatatcgagaatgcatgagctgttaatgtacctggttgtgggattcatcgcattgaacattctcacttatggtacatatggaattttcatgctcactggatttgagttgtcaaagacaggtgtggatttatttgaaagttcgttttacttttatatgacaataggtattgtcgctgcattatgtataatgctaatggctccaagggattattctccggtcctgatggaaaacaggaagaatgaattgcgaaaggaagtttacctacgtctccgttatgttgattcagacaatatcgttttcgatcctgtaacactaacgggttgccatgctgacagagactatatttcttctttaattgaaaaccttatcaggtaa

SEQ ID NO: 187135 - DNA, 729 bp, Klebsiella oxytoca
atggcaggtacagaacttgttcctcttggcttatatcaacactgtgcaatggcttctgttgcttacgtagagcgccgtcgatccatgggcaggaatctgggggagctggcctatgcaaaagcttttttcagagcattaacgggtaaggctcaaattacatcaagtgatgtccgtcaggtcgatgcttcttatgatccgtcagttcgtggtgaggctacaaaaatggattacatccgtgctatcgatctcctgattgatacccgtggagaagcctttactctgccgctctcatggtctgtggccgtagcgatgtttccaggcttacagccccgggtaacacagcgccgcgatcaccgtgaaaggattatggaactgcgggaccagcgcaagaccaccagccattcgcaatcaaaagaaatctcgtttcataccgctaaggccatttcaagccagcacctcaatttctgccgtcctggggagcacaaacaatggctcagggactggcacgatgagatccatggtcagtgtctaggtgatagtgatattttcatgatgctcagaacatggtggtcaagattctggattactaaatatcgaagtgactatatctggtgcaactcgttacatgagttgcttgatgaaattgattatgttcttagctcaattactttatgggaatacaatttgtgtgtttcagcattgccattgagtattacattttcaatgtga

SEQ ID NO: 187136 - DNA, 255 bp, Klebsiella oxytoca
ttgttgaaaagcccaaatgctgaaagcaacctcagagaagtttatctcctgaagttcagaaaatgcagtacaacagaaacccttgataaagtttttgaacgtatccaggataaattaaacgaggaaggtggaccaataaacgagattatcagtctgaatggggcttatgaccaccgcagggctgagatttatatgaaaaagatatatgacaaaatacccgcctctgtgtggagtctcattcctgatgatatttaa

SEQ ID NO: 187137 - DNA, 1062 bp, Klebsiella oxytoca
atgaaacgtaatgcacgaaagtggatcccatttggttttgataaagacacaaataaaatcgttgatattgccagtgttgaaaatggtctttcgtgcaactgtatttgcctcatctgtggcacctctctcatagccagacagggacaaagtaaaaaatggcatttcagccactccacggatgttaaaggcgtttgcagtgaactgaccttacaacatctaaaaaaatacattcagatgaagatacaggagaaaaaatttctggctcttccacaccttttgcacggtaaggaaaaaggtgttgtcacacttaaaaacatcaccgctggtgggattgtatgcgggctgaatgctgaccttatcgggcagtgtaatgacacaactatcgggatcttcatcaatgatacagctgaggacatccagccaaatccagacctgttagcccagaccggccagctggcgctggttgagatagacgcggttcgaatagaaagcatcgtcgcaccataccgggagaagggagaaggtataaagctgatggatgcggtagaaaagttacttttcgtttctgaggaagcgaaaaaatggatctaccatccaatgatgaaaacggttaagcctgatgccttacaccagtacaagagggagttcaccagcagcggtaatcagcttcttgcgttgatcccgcatgaactgccgataagcatgaatgtattaccgtcgtcaccgtctctgcagtggcatcatttaaggtgcaccttaaaccttctctgtagcttaagccgcgccgatatccctccaggaagtaaagcgtttgacaagttggtatattttatcccacgcctgcttgaggcttcagaatctatcaatgtcccggcatacgaacggtggtacgacttttttttacgtaagagaggtgatggtgaactgaatgaggctgaaatggcattcatagggttcatcgtcaaaataatcaactggaacatgtctatccatcaactgcctggcttcgatgacaaacaggcttttcatgactggtttctcctcaatgatcggaacaaataa

SEQ ID NO: 187138 - DNA, 885 bp, Klebsiella oxytoca
atgaacagtgaaatcaatcaattaccgttaattatcactgaaatagaaaaaagtacgggcgaagttatacagctgatccccaactcgaaacaaagcatccaacctaaatcgcttctgcgattgggtgtatttgttccaaccctgaaagatggctctgatcccatgtccagaggacatcacattgacgccaccaaggagttgtgcagactgtcatctctctccggagaaggttacgagaagatcagcattttcggcccgcgccttgatatggatactgattttaaggtctggttagggattgtggattcactgaccaataagtacctggaaaaggacggcactgtacgaatgaatttcattgattttgcatgcagctgcgggctggcgacaaagcgtgtagactcccggttacgcaagcgattcagtgactctctgacgcgaattcagcatacgcatttccagttcattaagccgtcttcggttgaaggcaaaaaaatcaaaattgatatgagtctggtctccacctcttactatgatgagggtaccgatgaggtcatcatcaggccaaacccggacctgaacaccctctaccaggtcgatggtaaaactaggctataccttaaaatcctgaaaaccttggcccgaaaagagtcagcacaggcgctgtacctgtaccttgtggagttaccggataacttctatcgcattggctttgaccgactaagggaacggctgcaactcactgcacacaaaggctctcagaatgccaccatcagacgggcgttggagcagctggaagaagctggcttcctgaagtattcgatcgaaaaatcccgtggtgattatgtgctggtcattctaaacagaaataagaaaatagcctga

SEQ ID NO: 187139 - DNA, 684 bp, Klebsiella oxytoca
gtgagtaacagaggcagagaagacagcgttaccgatgtgtttaaatctcaggtgcggaatgcgtgccgtgaacacggaatgagtgatctcattgcctccctgaacggcagcgaccgggatataaatgcagataccctcttcggtgtatgcgaccggttctttctggtcgagatgaaatcgtacaacagaaatgttcgtgatgaagccaaaaagcctgcagtctgccttctctgcaatggattacagagaagctctcgggtccgcagctggcacagagcatgtcacttcatcatgtgggggcgtgttgttaaggattcgcttgaaacccgtttcaacatctaccaggacagtgtatgtcgggattctgtccttccgaactgcagtggtctcggggagcctcctaaaccaaccatctatcggggggaggacctggcaaggggagcagctttaggtacagcgggcttatcaaaaccagattttttcaattacctgtggtggttgttaaatggccgggctgtagatgtagacgaatttaaaatcacacccggtagcaggttaggtttcagtttgtttggtacatcagatgcaagcggtaaggtaatcagtaaaacgttcagaacttacgatgaccttgaagtgtgggctgaagatgcattaaaacaattagtcaccttcaggggataa

SEQ ID NO: 187140 - DNA, 564 bp, Klebsiella oxytoca
gtgagaaagccacaacaaaaatatgacctggatattcccgacgattataaaatggcttatgttatggaaggtgacagaacgaattttgagtctatcaacaaatggttttacctcggggctgacttcataaaccctcgctatgcaaaggtaggaattacgatgggtaatttaagttcccgctcatacagttccgctaatccaaattattacgtgttctgtgcctttcaatgtgaccaaaaaacaacgaggacaatactcgaaacaatagaaagaggggctctgaactatttagacgaccagttcagatcggataatggtcagacaaaacgtgcgcgtcactttgagtcacaacgcttgtcagagtgttattatggcattgaatttgaagattttttcggatgtttacacagctatcttctggataatcacgcacagcattttcagattgatggctatgaagatgaggcgggttacaattgtggccattcacttgcaatgcttttcaaccctcgtttacaacaggatgttcaatcttcatttcggaatatggtcatacgtgcataa

SEQ ID NO: 187141 - DNA, 918 bp, Klebsiella oxytoca
ttggaaaagattcgggcaactgcagttaaatatatcaagctgggagagggaggcgaatgggaacgtgagtgcctgacatctggcattattaggtttggttacgacaaaacaccccatcagatgtgtcttgagggaaagtgggaagaagtcaataaagtctggttagaagagagaaaatataaccaggccactgccaccagtgatgtcaggcagataagaacattttacacagccacccctgatatactgttcataactttcagccagggattattgtattggtgtcagccttcaggggaagtcacagaactggatgatggcagcaggagccgccccactgtgaatggatggcacagtcatagtctggccggaaaccttctctccaacagcatcctgagcggtgctttactcgctacacagaattaccggggcaccatctgcgatgtgcgtttggccgattacgccatgcggaaaattaacgatgagcaatcgccggaaatcatagacgcggatattgctgaagctcagtacctgaaggctattaccaggttgtgtagtttacttacctggcaggactttgagttgcttgtagatctgattttttccgccagcggatggagaagaaccgggagccttgggaggacacagaagacggtcgacattgagcttgaactgcccaccaccggagaacgggcatttgtgcaagtaaaatctgttgccgagcagtctgtattctctgagtatctgtcactgttccagaccagtgacagctatgatcggatgttctttgtctggcatcgaggcacattgagtgaggatctccgtgctgaaggcgtcactatgattgggccctcgaggcttgcaaaactcatactggacaccgggctggcacgatggcttagaaataaggtttcgtag

SEQ ID NO: 187142 - DNA, 777 bp, Klebsiella oxytoca
gtgatcctgcctggcgggatcaggggcgttatctgtctgccccctgcggtgattgacggtacaacggccgtagcgtttcgtaaggatttggcggccgataaaaatctggagcagctgacccgcgaggggattttcagtgactgccggaagattaccggcagcaagcaaagcctaacggatgatgattttttccttaaagagctgcacagcagcgaaaaatggcccgcattcctgcaaaccgccgttgagaagaaacgcactatcgtgatctgcggtgaaaccgggtcggggaaaacggtactcacgcgcgcgctgttaaaatcgctacataaagacgagcgtgtaattattttagaggacgttcacgaagtcacggtcgatcacgttgtagaagccgtttatatgatgtacggcgatgcaggaaagatcggccgcgtcagcgccactgatgccctgcgagcctgtatgcgtctgacaccgggccgtatcatcatgactgagcttagggatgatgctgcgtgggattatcttaaagcacttaataccggccatccaggcggtgttatgtcaacgcacgctaactctgcgcgcgatgcctttaaccgtattgggctgcttatcaaggcgacccctatcggccgtatgctcgatatgagcgatattatgcgaatgctctactccaccattgacgttgtggtgcatatggaaaagcggaaaatcaaagaaatttattttgaccctgaatataaaatgcagtgtgtgaacgggagcctgtaa

SEQ ID NO: 187143 - DNA, 141 bp, Klebsiella oxytoca; identical to SEQ ID NO: 36145

SEQ ID NO: 187144 - DNA, 1320 bp, Klebsiella oxytoca
atgcaaacttattttgaccagctcgaacgcgttctttttgccggacctaaaaccgataatcctctggcgtttcgccactataatccggatgaaatcgtgctgggaaaacgcatggcagatcatctgcgttttgccgcctgttattggcataacttctgctggaatggcgcggatatgtttggcgccggctcgtttgagcgtccctggcaggccgcgggcgatgcgctggaaatggccaaacgcaaagcggacgtggcgtttgaatttttctacaagctcaacgtgccgtattactgcttccacgatgtcgacgtctcgccagaaggcgcgtcgctgaaagaatatctgcacaatttcgccgtgatgaccgaggtgctggcggagaaacagcagcaaaccggcgtgaaactgctgtggggcaccgccaactgctttacccacccgcgctacggcgccggggcggcgaccaaccccgatccggaggtgtttgcctgggcggccacgcaggtggtgaccgccatgaacgccacccaccagctcggcggcgaaaactatgttctgtggggcggtcgcgaaggttacgagtccctgctgaataccgacctgcgtcaggagcgcgagcagattggccgcttcctgcagatggtggtggagcacaagcataagattggctttggcggcacgctgcttatcgagccgaaaccgcaggagcccaccaagcatcagtacgattacgatgtcgcgacggtgtatggcttcctgaagcagtttggtctggaaaatgagatcaaggtgaacattgaagccaaccacgccaccctagcggggcactctttccaccatgaaatcgccagcgccatcgcgctggggatcttcggctccgttgatgccaaccgcggcgatgcgcagctcggctgggataccgatcagttcccgaacagcgtggaagaaaataccctggtgatgtacgagatcctcaaagccgggggattcaccaccggcggcctgaactttgacgccaaagttcgccggcagagcaccgacaaatacgacatgttctatggccatattggcgccatggacgtgatggcgctgtccctcaagttggccgcgcggatgattgaggatggcaagctcgatcgggctctggcaaaacgctatgccggctggcagggcgaactggggcagcaaattatggccggccgtatgtcgctggataatattgcccggtacgctgagcagcataatctgaatccgcagcatcacagcgggcgtcaggaattactcgaaaatctcgtcaatacctatatctttggttaa

SEQ ID NO: 187145 - DNA, 1413 bp, Klebsiella oxytoca
atgataaggttgaaaaagatatttgatttaacagaagaagaaataaaattaacaagcgaaattgcagaagctattaataaagaaccaacagcagaaactcacgaagtgaatataaatttcattgatgttttacctataataccaaacccccataatttaggtttatcaaaaaatatagatccattatctttgatatattctaaatttgttagtgaaacagatatacccccagctttacccgttttttcatttttaagttatttaagtgcttttagtgtaaataacaatataatgtataaacaccctacaagcccagcggattacttgaatacttggactttaatacttgcaccttctggtgctgcaaagactttatcttcttctatcattgaaaaatctataccaaaagacatagaagaaaaaccaatgataagaccaaattttgaaggtgctgacggttcggcagcattcattgctgagttagcaaaagcagagaaaaaaattgataatttcggaaaaccaatacagccgattttctggatagaagatgaatactcccagtttatgaaaaaattaatgccgggaggttctatggttgaaaccagaaaaacaatgttaaagatccatgataacgataaagcccgaagggttacgaaaaatgatattattgaaactgaaagtatcgttatgagtggtttatttctaaatacaattgatagctttgcaagaaatttcgatcaggaaagtattaatgatggtttaggaagaagacacaattttgtgtatgctgaaagagatgataaagtaataccaacatggactattgaacacatcatcgaatcactcaaagagggattagatgatttcttttccaatgttagaacaaatgttatttatacatattctccagagtgtagaaaaatttatgatcatttttatatggtctataaagaaaaattcgacaaaatattaggagaggaaacaaacggaacattcttccgaacatattttatgttgagttggaaatatgcagctatatatcatattttgctgaaagaggaaggaacagaagttcaggcaaaatcttttgactatggtataaaagtttcattaatgttcttatccagtattaaaagatttttagattacaagattgatttaaaatctggtgcgaaagaagtaagaagagaatatttaaacaaaagagcagagaaagaaatttccaatattgaaaaatacaaagagtttttattgaacaatgcagaaattacattgagagattttaacagaaagtacaatttgaaaaaggctgatagtttgaaaataatcaaaacaatcagagaaaacaaattaataaaataccatccattgtttgaagttttggcaaaagaagaagccaaagcaaaaaaataa

SEQ ID NO: 187146 - DNA, 348 bp, Klebsiella oxytoca
atgagctacaaggatagatacaacaggaagcacagcataaccctgtgcttcaatgatgaagaatttgcacaggttgaagaactggcttctatgttgaaaaaacccagagcaacagccgttagagatcttattctcaataaagattttaaactcaaaaaagaaatagcaaaaaataaaactggcgatgtatattttgaactccataaaataggagtaaacattaaccagattgcaagagcaataaatactgatattgataaatttatttctcatgagtttgcagaagattttttaaatttgtttgaggaaataacaaatgagatagaagaaataaaaaggagaatataa

SEQ ID NO: 187147 - DNA, 1419 bp, Klebsiella oxytoca
atgtaccataaaataataggaggtaaaaaaagcaaaggtcaaagaaatataaataaaagcattgagtatttattgagggagaaaaacccggaacaacagaaagacataaaaatattatcaaccacaacaaaacaagacctaatcaattttgaaaattttattttagataaaaacaaatcaaacccatatgtttgtggtgttttatcttttgaagaaaaaacaatatccgaagaattaaaaacaagaataataacagagtttgaggatatattatttgcagggattcaaccagaaaacaggccccctgttttatgggttgaacataatgacaaaggcagggtagagttaaattatttaacttttaatagtcttcaagataaaagatcatacactgtatatttagataaaagagatcgaggcttggtaaatgattactctgaaataatcaattatgaaaataatctatcaagtccattcgaagaaaaggaaaataaaaatacattagtaaacacaccaaaaaccaatataccaaaagacaaaaaagaatttgtagaaaaattaaatactgaaatattagcattaattattaatgaagagttagaaaatagagaagatacaattaaacacattgaaagcattcaaggtgtaaaaattaatagagttagaaaaaatcaaatatctgtcaaatgtgatttttttaacgacgataaaccaattgttttaaaaggtgatatatatgaagagggaagaaattacagcgattatagaaaagaatacgactcaaaacctaaacgagatccacagcttgttgaagcaaaactcacagaacttaaaagatcattttcaggaagaattgaaaaaagaaaaattagaaatagagaaagatttaagatctcacagaacaaaaataaatcagagaatacaaaaaacattgaaagagaaaatatcaatattgaatatagatctattaacaataatattggttttactggcaacaacaacagctttacaactaataacgatagtttatttactttggagaaaataaataatgagtcaattaatccagaatataaaacaaaaacaacaacagaagaaacagcaagatcagaaagaaaaagagatattgaacaaattaatcagcaacaacaatttgttaattcgagacttgaagaagctggaagaaaacaacagcaattcagaaagtcgattgatacaactgagggaagatttggagtatgtagaagatctgtacactcaattatttctacttttggaagatacatacgaacgttttcagcatatacaaggaagaatgaacacaggcaaaaattcgaaaaaagaagaaaaatcgaagaagaaaaactcaaaatccaaaatcagagaaataacaacagaaaacgatttaaattcaattaa

SEQ ID NO: 187148 - DNA, 1413 bp, Klebsiella oxytoca
atgataaggttgaaaaagatatttgatttaacagaagaagaaataaaattaacaagcgaaattgcagaagctattaataaagaaccaacagcagaaactcacgaagtgaatataaatttcattgatgttttacctataataccaaacccccataatttaggtttatcaaaaaatatagatccattatctttgatatattctaaatttgttagtgaaacagatatacccccagctttacccgttttttcatttttaagttatttaagtgcttttagtgtaaataacaatataatgtataaacaccctacaagcccagcggattacttgaatacttggactttaatacttgcaccttctggtgctgcaaagactttatcttcttctatcattgaaaaatctataccaaaagacatagaagaaaaaccaatgataagaccaaattttgaaggtgctgacggttcggcagcattcattgctgagttagcaaaagcagagaaaaaaattgataatttcggaaaaccaatacagccgattttctggatagaagatgaatactcccagtttatgaaaaaattaatgccgggaggttctatggttgaaaccagaaaaacaatgttaaagatccatgataacgataaagcccgaagggttacgaaaaatgatattattgaaactgaaagtatcgttatgagtggtttatttctaaatacaattgatagctttgcaagaaatttcgatcaggaaagtattaatgatggtttaggaagaagacacaattttgtgtatgctgaaagagatgataaagtaataccaacatggactattgaacacatcatcgaatcactcaaagagggattagatgatttcttttccaatgttagaacaaatgttatttatacatattctccagagtgtagaaaaatttatgatcatttttatatggtctataaagaaaaattcgacaaaatattaggagaggaaacaaacggaacattcttccgaacatattttatgttgagttggaaatatgcagctatatatcatattttgctgaaagaggaaggaacagaagttcaggcaaaatcttttgactatggtataaaagtttcattaatgttcttatccagtattaaaagatttttagattacaagattgatttaaaatctggtgcgaaagaagtaagaagagaatatttaaacaaaagagcagagaaagaaatttccaatattgaaaaatacaaagagtttttattgaacaatgcagaaattacattgagagattttaacagaaagtacaatttgaaaaaggctgatagtttgaaaataatcaaaacaatcagagaaaacaaattaataaaataccatccattgtttgaagttttggcaaaagaagaagccaaagcaaaaaaatag

SEQ ID NO: 187149 - DNA, 330 bp, Klebsiella oxytoca; identical to SEQ ID NO: 23334

SEQ ID NO: 187150 - DNA, 435 bp, Klebsiella oxytoca
atgacgcaacaacactctcatccgcgtgaggtggtggagatgtcccggcgtatttttgaaaatttaatctccagtagcctcaattcatctgataccacaggaacctgcatgtatggttcgattctggtatccatgctcctggagaaattttcaggtgtcaggacacgtatcgccggtggagatggtgttgatgatggtggaatacttactgccgccggtatgaaagggcattattgggttgttgccaacgtaaatggaatgctctttgttgtcgatatcacggcagatcagtttggcatggacaaaatcgtatacaaagggctaaaggatgctccagagtatattgagggccaccaaatcaccattgatgagcatgttcatgagacccttcaccagatcataggaagttacagttcagaatataaccagctgtga

SEQ ID NO: 187151 - DNA, 375 bp, Klebsiella oxytoca
atggcgatgaataaaaaagaacaagcagcctatgatcagctggtggcacaggccagaataaacagagctttacgttggtctgactatcgggttgaacgtgatatgcccgtaccggagacctcgggggattaccaaaacggatggagcttcaacgtggcctctggcactgtttatccgacatggagcggtaatagtgtccacggcacccgggaggagggcgaagttgttgatgcagcctcccgtcgtatgcgtggtatgaatggtagccagaatggcataccacagttcagcactaaagaacgcgccctgaaggcattacgccgctcactagaaatcaagtttgccatgcaattggatggcatagataaccgataa

SEQ ID NO: 187152 - DNA, 711 bp, Klebsiella oxytoca
atggataaatggatttttgaagaagataaagtgacgcagggaattgtagcgttacaaaaggtaggacgtattccgacagtgacaatcaatccggcttcggctgttttgaagcgtcaccagaagaagcgttatgcaagtgcagtacagttcagtgcgccagtgttatttgaagattgtggacgctacaacccacccggtggttcgattgccgtgtggtacgctgcagactcatcattaacggcagcggcggaagcatacggacgtttacttcatttgggtggtcctgttaattacccagagaaagtcttacatcagcattatatgtgctcgatagatgtcaacagaacggtaaaagtgatcgatattgttggtttatgccagctgcttcacattccacctgacagtgttgaaaacgaaaactataccttcacacaatggcttatgtcgtatttgcatacgcattttggaagtgattttgatgggatctcttattctggaaggcactatcgctacaagcgttgttacgctttctgggaaatgcctggtaagccaccagctttcactgatactcccggggggatggtaccttatgcatctttcagggagacagatacagggatttttcctgtaggttggcatggcacgttcatgaccggcgaagagatgtttgaggaattactaaacttcagaattatgcccgaaccgaagtaa

SEQ ID NO: 187153 - DNA, 642 bp, Klebsiella oxytoca
atgtacaaaaacaccacagcggaaaaactaccagacactactggtaacctgacagattttcagcttaatttactgaaaagaataaacaatattgcactgtctctgatgccagagtttgaggacaaatctcaggccatggaagcgatcacactggatgatggctcattgatgcagttgctgtactctgtgcaaatgcagcagaaaacgcgcgcatctgagtatgaaatgcgtaaggttcatcgccgtcgtgaaaatctggaagctttttacagaagccttcaggaaatgggcggcacccttaaagtcaatgatgtggctgacatactggggattacccgacaggcagtgaacatccgggtgaagaagaatcagcttctggcctttaagcaaaacggtgactttatgttcccggtcttccagtttactgataaaggtctgagacctggatttaaagacatcatggacgcattcgatgaaaatacccatccggtgttgcggctggaggttttcaaagcaccgattgcggtcagcgatgagcaaaccaaaacacccgtccagatcctgactgatggcgcagctgaagatgaactggctctggccgttcgggccgcacgactattcggcagccatgttgccagctga

SEQ ID NO: 187154 - DNA, 360 bp, Klebsiella oxytoca
atgtttaaaagccttgccgagtatctgcagtctcaacgagacagggaggaagcacagaaacgtaaactaaacctgttaaagcgtaccgtaaggaatggtgaggcgggagaaataatcgcaggactgattgacctcggttcagttggtgtggattttaaaaaaacgacgaccgattacatctgtgagtactttgcatccgcccgttctattgatgtgttagtggtcatgctatttctcaatatgaagcatcccctctccgatggagcaataaaaaaagcctatgcaaggcaaaccgactgcgaagattcgaggtctgcttatataggcctgatagtggacactatggataaacgccggtaa

SEQ ID NO: 187155 - DNA, 579 bp, Klebsiella oxytoca
atgccatctcagataccacttgacccaaaacttccggccaattttgatgacacccctaacagtgaacgaagcaaaaaacagctggatgaatggtgggatcatccttatgggatcactaaaccagacggctcaattacggtcaggtgtctcaacggtggagcgtgggaccgctcatcggtgcttggaaatgcaggaacttacgaagaggcttgtgtcctagcccacgacgcccaggcaaaatggatttttacacgtcagcaacccattttcatgtattctaacgaacctcccttcaggctggtggtacagtctcagcgaccggactatgaagaaagcatcgttggtgagttcaatactattgatgaaatgaatttgttctcgttaaagcagaaaaaacccgaactgcttgagctacctccgaccattgaaacaaaaggcatggatactgaggccttgacctggtacgggaacgagcttgatctggctgcatcgagacttgaggcagcacttaagaccgtttctgttttgcgtgacgaggtcagtatggcctttctaaggaaaaaaggagacgccagttag

SEQ ID NO: 187156 - DNA, 1524 bp, Klebsiella oxytoca
atggcatattccatcttacatttatcaaggaacaaccagagaactcatctcatagttgatgatgtgactaccctaccggtcatgttcgccacaatttatggaatgaatgaactgagcaagaaacacctggggactcaggaaaacattttgtgttcgctgcgtttcttttacgtctattactataagaagcacaaacaaacatttgactacgatttctatcggtctggctacaatatctcctattttatcagggagcttgatggcttctttacttacctgctcgggaagcaacacctgagtaacgagcccgacataattgctactgggtttatacattctgcaatctccagagccaacaagtacacctatggtaatcacgtcagaaacgttggccgattccttaagtatctcaactatcgatatatgaatctggcattccaggatatgtcacccgttgaggctcaccggattaaccagatgaaccgcagggatcttgctgacagaattaaggtcttcaataaagttgaagtatctaggaacgaacccgcataccgatacaaaagtattaccggtcagcagagtgtcgagctaacgaacatgttaataccctccactcctgaattttcagatatcgaaaccggcgaattattcacggccgtggttaatccccagaatccatttaatgcagggtttcaacaataccgtaactaccttatccatcggttaatgtttaactatggcttgcgcgttggtgaagttcaattgttgatgaaggattgtgtgggaccatcccttccagactcacgaggtaacattcgtttcatcctgattgtacaaaatctaccagatgatgtggttgatccaaggaaacaacagccttcaatcaagactgaacattcccagcgacaaatcgaactgactgaagatgacttcattatgttctctatttatatggaacaatatcgcgatccattatttgaaaagaaaaatatagcagatcatgaatttgtttttattaaaggctcaggtaagttaactccattaacttacgatgcaattcgaactttttataaagaaaaaattgatcctgcattcattgccctattccctcattatcgcccgaaaaacaatagaaatattaataacatggtcaatataacaccacacgttgggcggcatacatgggctaatataacactcgaatttatctacaacagtctcctgagtgagtcagtaatgctggcgcatgactatggaattcgtgcgaggatgaatggaatactcgaaccagctattgaacaacttcgtgctttaggtggctggtcagtgagcagcaaggttccattaaaatataccaagcgctttgttgaagtggttagtaaccagagcaactataaacgtacgaaacattcagatatgcagttagcccccccagtaataaacgtttcgcaaaacaaaacctacaacctgttagaagacgatgattatgataaaggcttcacattcgaagatctattccactga

SEQ ID NO: 187157 - DNA, 1665 bp, Klebsiella oxytoca
atgataaaggcttcacattcgaagatctattccactgatagcgatattttcggggagagttcatctaaaacctaccccctccatttcacaaaagaacagtttgaatggattcgagatattcagctaccagcacgattgttcttaatgaatgctacagaatttgatgacacatatttatatctacacgatgactggcgataccgattctcaggtgataacaaggctatcttattttcttctggtaaacattttcgtgatttgtcaccagttacgctcaagctcttaaagtacttgacgatcgagtatatcagcgagaactctgcaggtgttgctgataaatttgctcagtttgtcgcgacaactttcaaacagattgaagctatcactcgcgaaagtcttattgctaaaatgcagatgcttgttgtgaagactgagcgaggtcatgctgacaatagtcagttctattacactctttatgctttacgcaaacttgatcgtagcggattcttcgaaagtaaggatgatagtgacgaacttgaggacctattgctggaagtgccacgccctaggaacaataactggagtcgctaccaaaacctagatctcgttatcccagaagaagtatgccttatgattgaaaatggcattcagcgttgggcatctaaactatgctcaaaaattgttgctggaaaaaataaaatttctcaattagaaaccgtaaagaaaactgtaaagcttgaaacgttacgggactgcatcattattggcatagtttattacattggggctaggccagtacaaatcggaaaattttccggaggtgattatatcgttgataccgagaacaagtacgggatgcgttattcagtacttgtgccctatgccaaaaagtcaaaattaactgtcgatcgggttcgcgttgctatccccgaagaacttggaaagctaatcacactatataaatacttagctgaaatcggtgatactgatccaatgttttccattatagtatcctcaaagaagatggtggatgcgtcgttaaagaaaatgcttttcaggttttcaccacaagagattcaggaggctgtgagaaacgaggagtatcaactgccggtatataccgcaagcctctttcgtcacaacgttggtcactcaatggcaatgagtggtgccagtgcccctgagatagcttatatattgggtcaatcctcttatgttgttgcagatcgatacatcgcagccacccctgagatggctgatattcgtgaggcagctttgggtcgtaaccctgtttttaaaaacatgatggcactcatgttgactggtagtttagttcacagcagcgaatgggaaggccgcagagttgcaggctcaattggcgggcaacttcactaccaccttggagggtgtaattacgaagaaggtatgtgcccctttgcacagggtcgtggatgttacggttgcctgtatttcaagccttttacagatggaaaccacaaagaagtatttttttcgctgaatgatgagatcgaagatgttcgtgatgtgtccgatgatgctggcgttttaaatcacccacttctaaaagaattagtgcggcggaaacagcatgtaaatcaggttatggctcgcattgaaatggcaaaagtccagaggactatttaa

SEQ ID NO: 187158 - DNA, 2016 bp, Klebsiella oxytoca
atgactacgcaagtaacaatactcaataagcaggcggataatcttcttacttatatagagaaatataaagctaaatttgaagagcgtcttgttgcctacaatgctgttgggcaactggagtggaatgctggttcttggcattttggtgagaaaggtgttgcatggcttaaagaaacaaaagatcgcggctttaagtgggacgaagtttctggtcgtgttaagggactctcacagatggatatttcttcagaatttcagagttttatgcgagcctatcacatgcagctggtgtgtatctctggcggattaccagcgggttctacactagacaaaccattacaggtgatgaagcgctggtattgggaaatggtcaataaaacaggtcaaaagcacccaatgtatctgactgccgatattatttatgcagcaatggagcggcatcatgagaattctgacagtcctgataatgtcagtgactattgcgatattgcagtaaaggcgattgctttactacgtcaatatgatcttttcttagttaatattgaagttaaaaataagtatccctgtcgaaatggttctaacagcactaaagaaaggaagaaagcgcaacaagccgcccctgatcaaactgatgatgaaagactcatatcaatccgtgcatttatgtgtgttattgagttgatctcattggctgagactggttatcagcgtatcttttacaatatgttgttgctcacaattatatgcggtttccgtttccaggaaataatgttgctgaaaatgacttctttggttaagcgagaaatcacggataaagaaaaacgtcagcacgcaatagatcaacactggcccacttacaggttgggtattgagtatcttggtgcgaaaaaggctggatggcggatccattggctggcaccaagcacttatcctgtcgttgagatgatttataaatctgttcaagaattgacctctgaattccgtaaaacgattaagggctttagagattctaatttcactaacatgctgccaggtaagatcgctgattttcctgatgaatggattgagcaaaattatcttgaagatatcatgtttagtggttctggtggttccaggaatgatcttgggaagagtattcggaattctattgcgaattttagcggacataaacctaagataatacctgttcataaacagaagaatagctggtacttcactaaaaagcagttgaatgattacgtctatcagcgctatgctcaaacaaaaaactttgagcctgggcaccagtgcataatttcagccaaaaacaatggtatttgggaacacttccattatgaagacctgatgttcatcatgccggaaggtgcatttggaattggtaaagactttgtttcattgcaacatatttttccacttgatgaaaactcagtagaagcgtggttgggaggaacacaaaaccgaaaatctatctttgaacactttaatctttttgaagatgatgggtcccgtgtcgttatcaaaaagcatgtaccaagacataacatcaatacattcctggcaatcgctggagtgacggatcatattcaggccattctaatggggcgtgttgatatcacccagaataaacactatcagcatcaggccgaatcacagtcctaccagaccgcttctctagcaatcaatatgctggaaaaggcttataatgagaacaatcaagctctcacgaagagtttccagctttcaccctttaccccgcagcagaagccttccattccggtcaacctaccctcccccagaactgaggttagccgcaggatggcagctctatcccggtcttctaagacggcaaaaaatacaggtgttgcaaacgttaaattaacagcctcaataatgataaatcctgagttcaatatagaacataacctgaagcagaatatgcagacttttggtgaaacaactgctgaggttgctgactatatagctggggctttgttgaataaatcagatttcgggtaa

SEQ ID NO: 187159 - DNA, 1119 bp, Klebsiella oxytoca; identical to SEQ ID NO: 103021

SEQ ID NO: 187160 - DNA, 1260 bp, Klebsiella oxytoca
atgagcaatagagcattttatcgtaatccaaattattggttttcctcatgttacagcatggtttactatgccgcgggaagtttagttttttcattttatgcaatctggttgagtagccagattggacttagtgcacggcaaacaggtattgtttattctctgaacttcttcattgcattaatcattatgtttatctatggagtagttcaggacaagcttgttttaaagaaaaatttagtctggttccaaagccttataattacatgtgcagctcctttcctcattaacgtttatgaacccttactccgcgaccatttttatataggagtagtgacggggagtgtatatcttggtctgggatgggtagccggtatggggcttattgactcctattgtgagaaaataagtagagcatttggttttgaatttggtcaggcccgtacctggggaagtatagcctacgctgctggaaccttacttgcaggaatactcattgctaaaaatcctcaccttaatttttgggccgcttctgttgtaggtattctgtttatcatcctgaatttcacctttaaaccggatatgtcacactacagttcagcgctaatgaaggtaaatgatcctttaacctttcatgagatcatggctgtttttcgattgaaagacttttgggttttcgttgtttacgttcttggcacatacagtttgtataatatttatgatcagcaactgtttcctgtctattttactcaccttttcggaaatgaaggtgaaggctataaaatttatggcgtgttgaattcattgcaggttttcctggaagcaggggtgatgtttacggtgccattcatcgttaaccgtgttggcgcgaaaaacgcattgatatttgcagcctgtatttctgctgcaagaatccttatgacaggatacacaagctctcttgtttttatttcgattataaaattaatgcattgcatggagattactactgtcctggttgcagtttttaaatatatcgcgattaattttgaccgtcgattatcagcgacagtctttctggttggatatcaagttgctggttctgttggggttatcctgttctcaactgttgcaggaaatttttatgataaggtcggtccagcgaccacctttaaaggtttgggattgattgttgttatcttcatgatattcgctgcaatattcctcaacagtgaaaaaaagagccaggtaaaaataaaaactaacgatacttcttttagctaa

SEQ ID NO: 187161 - DNA, 276 bp, Klebsiella oxytoca; identical to SEQ ID NO: 103024

SEQ ID NO: 187162 - DNA, 582 bp, Klebsiella oxytoca
atggcattattagggtatgcaagagtatcaaccagccatcagaaactgacgagccaggttactgagctcaacacagcgggagtgagggatgatcgagtgtttactgacatgatgtcgggagcaactgatgagcgcgaagggctacagcgactccttgccagagcggagaaagatgacattattctctgtacaaaaatggatcgtcttggacgtaataccgcagatatgattcgcatcgtggatacttgctataaaaaaggcatcgctattcgctttcttgagaacggccttagtactgaaggcactatgggaaaaatggtcatccagatactagctgctgttgccgaagcggaacgtgaaaggatcttggaacgaactaacgatggacggcaggcagctatgattaagggcgtcaaattcggaagaaaacctcatagaaaggctgaattagctaatgaattgatcaataaggacgtagaagtaaaagaggtaatggaaaaaacgggtatatcacgggcgacgtattttaggctgaaaagaaaaacggttactaacaatattaatctttccaataataaataa

SEQ ID NO: 187163 - DNA, 1392 bp, Klebsiella oxytoca
ttgagtcaatatttaaagcttggcgatgaccagtctccggttcagttggacccacacagcgaagttggtgcatttaaagtcgttggacactgcgcatgggcaaaaccagaagataaaatcactcctgactttttgcgttcaagagtagaaccttggttaactgcgctttttcagtctgaacacttaaatatacttattggcgccggccttagttcggctatccaagagtcagcgaccggcaccaaacctcaaggtatgggatggattgaagatctcaaagtttgtaaggctgaaatagacagttatgtagctaaaacagcagacgcctcaggaaggggaaagggtaatattgaagatcagattcgttcaattaatgagttgattaaaggactagagattttaacggtacaaaacctaccggttccaccatctccaccaggtgctccctcatatcgaaatttaaaaagtgagttagtagagttaaataatgagctaacaaggtgtctgaaattattttcagactcagttagttatggtgaaaaattaattcgtgatgcaaacaacgatttaaaaacagaaacatttaattatttagtaagttttttgatgagtttttcaagtcgaacagcaactagggatcgattacatatttttacgacaaattacgacaggataattgaaacgggcgctgaaatagcaggtcttcgtttaattgacagatttgtcggtactatagcaccaatttttagatcttctcggttagaagtggattatcattacaacccaccagggattcggggtgagccaagatatttggaaggtgtggcgcgatttactaaattacatggttcattggactggtatgctactgaaggggctataaggcgttttggattgccatttggagccagttcggttgaaccctttttacaggtggaaactaccggaactgcaaattatcaacaattaatgatttatccaaattcagttaaagaccgtgaaacatctgaatatccttatgttgagctatttagggatttagcatctgcaacatgtcgtcctaatagcaccttggtaacatatggttatagttttggcgatgagcatataaatcgggttattattgacatgttgacaataccctcaacgcatatagtaataattgcatacggtgatccacttggtagaatcatgcgttttataaacgatagtggaagaaaagctcaaatatctttattgcttggtgatcactttggagatataaagaaattagtagatttttatcttcctaaagccgcgatagacagatcatcaattcgtatggcggagctattgaagtcaagaggtttgtatcgtgcaactacctcaaataatagtggggattccgaatga

SEQ ID NO: 187164 - DNA, 2064 bp, Klebsiella oxytoca; identical to SEQ ID NO: 144618

SEQ ID NO: 187165 - DNA, 1458 bp, Klebsiella oxytoca
atgagtaaaaacataatgcacagtcggcatgatgaatatcataaattaacccgtggagaacgaattggttatggcatgggcgactttgcgcaaaacctggttttcggcacaattgggggttttctggctttgcatatgctgacggtaaataccatcagcacggcaacggcaggctttatttttctttttgtccgcataattaacgtgttttgggatccgatggtcggcacctacgtggataaacgaacctcgaaggcagggaaatatcgtccgtggctgttacgagccggcgtgccgctggtgatcctctcggcattactgttcgcgcccatccccggagtgaaaggttcggtggctttcgcctttattatttatctggcgctggacctggtttattccttagtcaatattccctatggctcgctgaatgcgtcgctgacccgcgacccggaatcgatcgataaactgaccagtacccgcatgatgctggccaacagcgccaacctgctggtctataccctgttcccgatgtttgtgcagatggcggcgccgaaagatcgcagcctgaaagacaccggcttttttggccttgagctgaatctggggaattatgccgatccgtcggcaaattacgcctggtttggcgtgtacgccatctatatgatcatcggcgcggtggctctgtttatctgttataaattcaccaaagaacgcgttgtcgcgaccgccgagcagaccgccaacgtcaaaaccaccgaccttttccacgagctccgacataaccgcccgctggttattctgggcatgttctttatgctggcctttaccttcatgttcttcatgaacactgttaacggcttcttcaaccagtacgtcgtcggccactccgaatggatgggcgcggtgggtctcgtcgcgtctattcccggcatcgccttcccgattttctggccgaaactgaaaaaaatctttggtaaaaaaggcttcttccatctgttcctcgccatgtttatcgtcggcgaactgctgacctacgtctggtcccgcgaagggatgcacgacgccctgtggctggcctacatcgccacctttattaaacagtggggcttaacctccgccaccggctttatgtgggcgctggtaccggaagtcatcgcgtacggcgaattaaaatctggcaaacgcaatgccgccattatcaatgccattatgggactcttcttcaagatcggcttcaccatcggcggcgcgatcccgctgtggctgctggcggtgtatggctttaatgaaagcggcgccgtgcagagcgccagcgccatcgacgggatcattatgaccgcggtgtggatcccgatcgcgctggccgctatttcgatggtgattatccaggtttatccgatctccgataaacatgttaccgacatcaaccgtcagctggatgagatccgcggcgtgtag

SEQ ID NO: 187166 - DNA, 1680 bp, Klebsiella oxytoca
atgtcacttattcaaaacccgatattacgcggctttaatgccgaccccagtattattcgcgtcgaggatacgtactatattgccaactcgacgtttgagtggtttccgggcgtgcgtttacatgagtcgaaagacctgaaaaactggaacctgctgccttcgccgctctccaccaccaccctgctggacatgaagggcaacccctcctccggcggcatttgggcgccggcgctctcctgggccgacgggcaattctggttggtgtataccgatgtgaaggtcaccgaaggcgccttcaaagacatgaccaactacctgaccaccgcgaaggatattcggggcccgtggagcgacccgatcaagctgaacggagtcgggtttgacgcctcgctgttccatgacgacgatggccggaaatatatcgtccagcaaacctgggatcaccgggagtaccatcaccccttcgatggcattaccttaacggagctggataccaacacgctgaagttaatgccggaaaccgcgcgcaccatctaccgcggcaccgccgtagcgctggtcgaggggccgcacctctataaactgaacggctactactacctgtttgccgcccagggcggcaccgtgtttacccaccaggaggtggtggcgcggtcgaaaaccctcgaggccgacagctttgaaaccgagccgggcgacgtgttcttaaccaacgtcgacaccccggacagctacatccagaaacagggccatggcgcgctggtctccaccccggaaggcgaatggtattacgcctcgctctgcgcccggccgtggaatcgcccgggggaatccatctacgacccgcgcggctggtcaaccctcggccgggaaaccgcgatccagaaagtgtactgggatgacgagggctggccgcgtattgaaggcggtcacggcgggaaaaccttcgtcgaaggaccgaaagacgccatcttcaccgaaagcgccagcgataatagccagcaggatgactttacgtcgccagccctcgacccgaactggaataccctgcgggtgccgtttacggccaaaatgggcaccaccggtaacggcaaattaaccttaatcggccagggttcgttagccaatacgcatgatctgtcgctgattgcccgccgctggcaggccttctattttgacgccgcggtgaaggtgaaattcgagcccttcagctaccagcagatggccgggttaacgaattactataacgaccgccactggagcttcgtcttcctgacctggaatgaaattaacggcaaggtcatcgaagtcggcgaaaataaccgcgggaaatacacgtcgtacctgaaagataacgccatcaaggtgccggacggcgtggaatacgtctggttccggaccaaagtccgcaagcagacctacagctatgaatacagcttcgatggcgtgacgttcaccgagatcccggtccagctggatgccgcggtgctgtccgatgactatgtgttgcagagctacggcgggttctttaccggggcgttcgtcggcctggcggcggtagactacgccgggtacggcacccaggctgagttttatcagttcgagtatcaggagctgggcgatagcttagcggccaatggcagctacagctgggaggctggcgagacgcgggataagtaa

SEQ ID NO: 187167 - DNA, 639 bp, Klebsiella oxytoca
atgaaaaaactaccggaccatttatccagggaatgcatcatcgccgccattcgcgcttacgatgcaggcgttgcgcatcagtttaaaagcgcgcgtctgtatgagatcgagtttgaggggcgtcggtatccttcaaaagccatcgtcgggttagcggccacgcttgcgacgggaacggaatttaccccggcggatttcagcggggggattaaatcaaaatgcgtgcgtctgttactggagcaaggatttacgatcgcgtcgcagggcgctggcgatgacgaggttgcgcttttccccgatgaggggcagacgaccatggagtacgtggaaggggcggcgttgcaggtggtggtcaatcgctatgagcgcgaccgtcaggctcgtcaggcggcgcttcgcctgcatggctgccagtgtcaggtatgcggtctggatatggccagccgctatggcgatatcggccagggctttatccatatccaccatctcatcccgctggccgggataaagcaggactaccgcctgaaccctgaaaccgatctgatcccggtatgtcccaactgccatgcgatgctgcaccggcgagatccgccgtttacccccgaagagctgaaggcccggctgcgccccacagactga

SEQ ID NO: 187168 - DNA, 309 bp, Klebsiella oxytoca
atgccctccagcacgaccctgcaacacgcgatcgagaacatcaccatctggcgcaaaggcgaacagcgtgcgccgcataaaccactattgctgctgtacgtcctctcgcaataccagcgcggccatgcgcggatgttcgactacgcctcggagatacgtgatgagctgcatagcctgctggaacgctttggcccgcagcgccgccagtaccggccggacatgcccttctggcgcctgaaaggcgacggcttctgggagctacacaacagcgaacagtgctcaacccagggcacccggctttttttctga

SEQ ID NO: 187169 - DNA, 219 bp, Klebsiella oxytoca
atgttctccggctggcgctgcctggaaatgcaggtcgcgcaataccgccggaagaaaacgctttacccgcccgtactgttccaccatttcgtcatggaaattgttgttctgaggccgggccagctcatttaccttgctgacggattctgccagcctacttttcggtatgctgctgaatatggtctccctcagttcagcatcgtcagcctgctcagctag

SEQ ID NO: 187170 - DNA, 567 bp, Klebsiella oxytoca; identical to SEQ ID NO: 152639

SEQ ID NO: 187171 - DNA, 708 bp, Klebsiella oxytoca
gtgagaacatttgttataatttggacgatagctttcattgcggtaattgctgtaatgtgtacagtggatctttcattatatgtaccttcaatttacaccgtatttaataaaaacaaacctttagtaactggtattatatatatactactaatatctatttttatatggctaattgtagcgttatatcttttaaaaaaatactcatttaaagtagagaaattaagtttaggcggcgttaatgttctgttcaatgaaagtggtacgttatatcgcaaaagtataaaaaatcatctggattcaaaaagagctatctttaagttgaagaaaaatgtggacgcattcgatgaagttatctcatcatattatcagacatatcaatttattagagatgaaatgaaactattgaatccaaaaaaagacaatgagttatataatattagcaatgatatgttaatggtgttaaataaatttttaactaaaaatcaaaataattataaaagatggtataaatatatatcagataaggatgaagttattgatgttataactaatacaccattaaaagttcacctgacgcctataaataaaatacaaaagcaatactataactacagtaaaatatgtaacgattttaaagtagtaaatgattttttcacatcacgggttcaacaaacatttaacgtgaacaccaccaaatgggattggtaa

SEQ ID NO: 187172 - DNA, 615 bp, Klebsiella oxytoca
gtgaccaagcacaaagttttcatcagttaccaccatgctaatgaccaatggtacaaaaacgaacttgaaaaaatgaatgatgtttttgatatttttgtgaatcgctcggtatcacttggtgacattgatgaagaagaagaacctcaaaagatcagagaaataataagggatgaatatttacgtgatacatccgctcttattttactcgttgggactgagactaaaaatagaaagcatgttgattgggaattatattcatccatgagggatagtcccagaaacggcaaatcaggtatttttattataaatcttccttcaacagggacaaacaacattagagccagtcatggtgaaaatgaaaaaaatgaatttcatcctaatataaccgagtggataacaatcaacgacagaacaacatataaagaaatatatccatatatgcctgaaagagttatcgataacttgatgagtgaaaagtcatatatatcaatagtcaactgggatcagatacacaataacccagaaaaccttagaaaaatgattgagttaacatatcaagataaagataagtgcgaatacgttttttctaccccaatgagaatgcgtaatggctag

SEQ ID NO: 187173 - DNA, 486 bp, Klebsiella oxytoca; identical to SEQ ID NO: 95527

SEQ ID NO: 187174 - DNA, 234 bp, Klebsiella oxytoca; identical to SEQ ID NO: 95529

SEQ ID NO: 187175 - DNA, 228 bp, Klebsiella oxytoca; identical to SEQ ID NO: 95528

SEQ ID NO: 187176 - DNA, 480 bp, Klebsiella oxytoca
ttgaataatcttatttttgagaatcaatatgttgcggtgttccttaatgactctggacacttgcgcataagccagaaacacggtggcgttgttgttattcctgaatgcaatggaaaatacgcattaatccaacattcaagaaatggtgtcgtgctcattgaatttccaagagggtttatcgaaaatggagaatcacatatagatggtgccgaacgagaacttagagaagaattgaatctcgtttcggtgaatagctattcgttaggcgaattgattactgattcaggattgattgctgacaatattcgggctgttatttgtgaagtgaaagatacatctcaattatcattgcaatcaagcgagggtgttataggttgtgattattatacttatgatgaagttattgagcttgtaaaaaatgggaaggttaaagataatttcaccttggcctcattaatgctattacaggctaacaggtaa

SEQ ID NO: 187177 - DNA, 618 bp, Klebsiella oxytoca
atgtcagtctctaaagatttcttactttctgtatatgagcggtgcaatgaacatttgaaagaacaatcgacaaaacgtgatcaggcgatagctttttatttggttgttatatcgttttatttcgggtcatactccgcaattagcaagttactggtaagtccatactcccctattttttttaatgtggttatatgtctgattagtggtatgacaatcagaacgctgtctggtttacgttcctggcatatgcaatatgctaactcggcgttagtgcttaataaagtgatatcgaaaaatatcctcgaattagatacacttaactcagagattacatcttttttcgttaagaaagaaaaagaatacaaggaaatgacgcttgctaaaatgttctctggtattgaaaatagagtcatacttgggatgactcttatttccggatttccggttgtgatgttagttaaagaagttatgtctttacttaaagtaagcaataaagaaatcatagtattagttgagtgtgcattttacatagcatatgttgtatattatttttacaatactataatgataattcgtaaatcagcaaatcataaaacttggattgtaaattttgaataa

SEQ ID NO: 187178 - DNA, 741 bp, Klebsiella oxytoca
atgaaattccatgtatattgttctgaatgctcatcgcaggattctgagacagaatgtttaccctcaaaacttgaaattaaaaatgattggagctacgaattcacatgccccaacggacatgctaatattctcgacttgatgaaccaaaaatttgagatcctctttgaaataggagctcatgcaataattgatggatattatagagaagctgtctcatcgttcacatctgcactagaaagattttatgagttctttatcaaaacaatatgcctcagcaaagatatagagttagagtccttcattaatacatggaaggaaatatccagccaatctgaaaggcaattaggtgcttttatattcctttactttaccgaattaaaagaaaaaccattactacttagtaaaaaaagcgtaagttttagaaacgatgtaattcataaaggattaataccagatcaaaaacaagccatccaatatggacaggaagttatggtgattataaatacaatattaaatagactcagagaggaatataaacattttttaaatattgccattttatcagatctcccagatagaatatctccgctgagtgatgagaaaatcaattcaacttatacattagcattaattttaaatgctggcatggataatcaaagacttaaaaaattcgacttaagtgaagcacttttgagaatacaaaatcaaaaatttttttacgacaatattgctaataaatag

SEQ ID NO: 187179 - DNA, 342 bp, Klebsiella oxytoca
atgaataaaaaagtttatatatgtgccatcaaacctaagacaggttacagctttgatgttttcattaaagagcttaacgaagatttaaagcctgatgatggcgtattagatacgatacaagactactttgaatattacatgaaaaatggtaataaagattataactttaccgattggggctacataccacacgacattgagcgattggttgaatctggctacttaattggtgcaccaataaccactttaaaaagatatgatttattaactaaagatggaaaattcactgaaaaaggcaaaaagattttctcttacctctctgataaattcgaattgaagtag

SEQ ID NO: 187180 - DNA, 435 bp, Klebsiella oxytoca
atgccttacccgggctacgggtggtactgtagcccgggcacgcgctgtgcgccgcccccgggagaagagcatggagtagcagaattcccggaggcgatgctgcacatctgtccgggctaccgggtggcatgcaacaggcgaaaaaaaaagcccgtactcgcgtacgagctcttcttaaaatatggcggtgagggggggattgactcgctgcgctcgccgttactcggcccgtccctgggcctcgcccctgcggggccagcgcaagcgctgttcaaaattgctcccggcaattttgtcggggcagattcctcgcaggctcgtcatctgtccaactggctgtcgccagttgtcgaaccccggtcggggcttctcatccccccggcggggtgctatatgcgaaaaaaaagcccgtactcgcgtacgagctcttcttaa

SEQ ID NO: 187181 - DNA, 1074 bp, Klebsiella oxytoca
atgtgtgaaagttctatgggaaataatgaatccgaacaacaaaatgctttacaagatcaaattgcggaaattcttgtagactatgaactttccccatccgaaggcatgaactcagcacatgtaggtcgttggattgcgcaatttgaggagagagatcaaatttttattcttgagcaaacgctggagttacttcgaaattcatatatcagcaaaaatgattatgtagaaatgattgctctcatccttgggaatcagagaaatagaccgatattttcccaatcagctttccttgatattcaagaagctaatcgtgggactagtcagagagatttgctggagctgttagaaacccaagcagaggagttagaaggggtagatatagttacattatcaagatcctctgccaatcagagagctgcagaattcaatagttttatttatcttgacgatgtttgtttttctggcaccaaagccttgaatgatattacttggtttgtagaaaattttaaccttagtaatgtgactattcgcgtgtgtttcttgggaacacataaatatgcaacctatatgctagagacgactctcgcacgaagatttgaagggcgaaatatcacacttgttatcaaagaaaatggatttatcaaaacacgcgaaaatcgccttaggtattcttcgtgttctgaagttttctggttacgtagaaatggtattgacctaccagattggattcaaaatccggagatctatacatcgcgcgaaggcactgaaaggacccattttagcccaaacaccatcttccgcaacatggctgatcgctatcgttttgaatatgcactgactaaggctggtttttacatactacagcaaagtcaaaatcccgcaccgattctaaaacctctcggcttttcaacattccctggactagggtttggcggaacaatttttacctatcgaaattgtccaaataatactccactagctttttggtggggaagatatgagcgagatgggattccaaacagggcactggattgctggtatccattgatgcgtagaatcgggtataatcagtaa

SEQ ID NO: 187182 - DNA, 612 bp, Klebsiella oxytoca; identical to SEQ ID NO: 110907

SEQ ID NO: 187183 - DNA, 816 bp, Klebsiella oxytoca
atggaaggtggtaaatcaaagaaaatcaccacttacaatttaccattaaaaaatgttgatgagaattttctaaattcggttgatattagcccgtgtgatgtgtctactttgacaaatgttgacctgcactcctatgagcgaaaacttgtattaagatcatcgttaattgagttatataacgattctaatgagaaaaatacgttccttagctcagtgttaaattcaccgaaaaaattgtgggatttattttccattaactatgaaatatacatcaacaaatattccataaataaagtaatacacgaggttgaaactcagaaattagatttcttatcaaagcttaattctttgattcaagaacatcagaccaaatcactttctatacctgctgttctggtaagtacagccataataaagggctggtctccatctggtttactgcttatatttgtagctatgctacttacgtgctctgtagttatattgggtatccataatgccaaaaaatcattatcagatattattgaatcatctaataagacgatgattttattcacgaaagagaatgccaatgatgatgacgaagcattaaccaaccgtattaatcagatcacaaccgaagctttaaccaaactcagtaataaaaaagtcgatgctgaaaaaaccttgaataagctccaatggttgattttcattggtgtatcagtctggtctatgtttgttttatatcaattcaaagataacataatcccagttattgaattagcctatcagcatataaagagtttcattacttatttattaagcaagggctaa

SEQ ID NO: 187184 - DNA, 1161 bp, Klebsiella oxytoca
atggctatatatcatttaagttttaaattatgcaaaagatcagatggtaaatcttccgtatatttggctgcatatcagaatagaaataaaatcaaagataatagaaccggtacagtatggaattacagcaaaaaagaaggctttgacggttcgttaatcctggcaccaccacaagcaccaggatggcttgtgaagtcgtctgaggccctatggaatgaggttgagaggacagaacgacagaagaacggacagactgccaggtacttcgatgtcgccttgccggtggagctggacgacaaacaaaaaaaagaccttttaataaaatactgtcaggataatttcgtagatgagggaatgattgccgatattgcattccacgatctaaatagtaaaaatccccatgcccatgtaatgttaacaatgaaaaatgttgggccagaaggttttttaacaaaaaacagagaatggaatgataagaaatgtttagaagcctggaggcaaaattgggaggttattaccaatgaggcattaaaaaaatatggtcataaatcccgtattgattcccgttcattggaagaacaaaaagaagaggctgatagaaaagcaaaagttgcaaaaactccacaggcaaaagctgcttggatcgctaaatctatccgtctggacagaacgccgatgacccgcattcacaggcataattggaaagctgggcagaaattaagaaaattggagcaagaagaaaggaagattttatataaaaaggcttcgttaacatatcaccaaatgactaaaccaattgagcctgagcaatctatgaaaatagaaaaatcacaaatagctcaaaaaataaaatctatattcgaaactgccaaaaataaattaaattcgaaaatcgctgactttttcaagcctaaacccaaaaaagaaactcctgaaaaatttgtcagtagttatgaaattgacgagttaggaaatcacatattgaaaaaagaggctgaaaattgggatcagaaaaacaatgataaaattaaaaagcaggttcgtgagaaaaaagaaaaagaagaatccgaaaggttgaggcttaaagaagaggatgagaaattaaaaaatagctccaagccaattcagcaaaataacaatcataggaaattaaagcgatag

SEQ ID NO: 187185 - DNA, 252 bp, Klebsiella oxytoca
atggaatataaaaatatatataaaaagtgttgtaagtgtaggaaagaaacagaacacgaaagagaagaggcttatgtaatggaaaaatctttaagcaaagacgattgggaatattcgccgtctgaattggcttcttatatgaatggtgagttttatgacgattatgaagaggttttaaggctatttgatacctgttgtgtatgtggtgataaatcttatggtagttggtcaagtgaagaattaacaagataa

SEQ ID NO: 187186 - DNA, 324 bp, Klebsiella oxytoca
atggaaaatatatttacagttcacattgaggaaggtttcccaatttcatctattccggctttaatcgatttgtttttacgtcattatcattgtaataactttgatatagataaggctcttgaggctacaagggaaaacatagccgataatttaggggcattaactaaaatgaaaaagccaaaagtcgatattgaaaagattatggttgaagatattatgtcagggttaaaaacaatggttgaagaaatgggagtgttagaattatataaaattcattttgaaataaacgaaatgggaatgagttggggggttgataatgagtaa

SEQ ID NO: 187187 - DNA, 1701 bp, Klebsiella oxytoca
atgaagacattactaacatctcggtgtattaatcaacggggagcaggtcacttactcaaaggcgatcccgagggtgcctgggcagaccatcttgaatccctttatctcgaaaaatttaacggcagcgccgaggtcaccaatctctacaaggcaaaatggttcaaagcattaagccctcaagataaagaagccgaaattaacaagcgctatctggcatttgtccagaccattgagcgagacaagctctatcacttcttgatggcctgcgatcaacctaacccagtgctgattattcgcagcccgacaggaactaaagaaatcaagcaattcctcggctacgagtggagttccgccaagggtgatgaaggcatcaagctcatcaaggatgccaatggccggcaccttacgccgctttacgacgagacaagtcgggataatgcggcgaagctgaattactacattgcagagaatttcaatggtaatcccgtagctatcccatctgcattacatagcgtggcgcgcacgacggcattggtggatattctggacttttctcgccatgtatttgataaacagttcaacttagctgtaaaggggggagtaaagttcgtatctaagtggccaatttcctctttgaggattcaggctcaaatacgaaaaggtacctcaattacgcagaaaaaagctgtgcctgggccttttaaagttgttgcgggaggaatgactcacgcatatacgcacaatacttccaatcgagaagccaacaccatcacggtcagcgcatcaggtgccagtgcgggttttgttgccttctggaaagagccaatttttgcatctgactgtacaacgatacgtggtgcaaatgacgagcacactgaatatctgtactacgtgctgaaaagccggcaaagcgagattcaggcattgtctactggagcagcacaaccccatgtttatccgaaagaccttgagactctccaggttgcggtacctgactctaccacattgaggatgattgtttcggaatgcaagtcggttgagaatgatgtccattcttcacaaaccagtattgagcaagcaatagcgcgtattgagttagaggctgcagagatttatggttcctctacccgacgtacagaaatcgataaactggccgtcagcatccagtatggtctgaatgaggccatgaacgaaggtggtgtaggctacaaaattttccgcatgaacgaaattatccgcggccgaatggtggacaacggcagcatgaagtgcgccgacattagcgccgaggagtttgccaagtacaagctcaataagggggatttgcttttcaatcgtaccaacagtattgagcatgtcggtaaaaccggactatttgatctagagggggagtattgctttgcttcttacctcgtgcgtgttgtgcctgacaccagcatagtgctgccgaaatacttggaaaagatgatgaactcatctgccttccagtcagaagctaagagtaaagcatccaaatccatcaatcaggcgaatatcaacgctaccattatgcgaaatatcaaagtaccgcttctttcgattgcagaacaacaattgtttgttaacagaatagaggcactagaaaagcagattaaagatgcgcaagcagtgatcgatgctgctgacgcccgtaagcaggccatcctgcagaaatatctgtaa

SEQ ID NO: 187188 - DNA, 1995 bp, Klebsiella oxytoca
atggctgcagatgaactgaatccgccgctgggtacgacaacgcctgaaatctttttagataacgttaagcgggccgatcggttagtgaacgggccggaggaaacggtaaacgatcgcggcggggagccgctggatacctggcgtcagatgatggcgaaaaatgatgaggtccggcagaacatcattccgctgagtaagcagtacatgacgcttgatgcggcccaggccgatatcgtcaatatcccggagggcagcaccacctatgtgcgcagtcctgatgatagcgccctggccattgaatatatgaacgtcgccggaactctgcagtcaacaggaaggaggatgatctcaaaggagtatgttgatgcgctgaaaaagcttatcaatgtctcatcggataacaatctgaccttttttaacgatgtcgatgatgccactgtcacagtgcaggatgatttcggagatatgcacctggcggggatgccaggttctgtccgggatcggctgaaaacacttcaggcaaataaggctccggccattctcaggctgacggatgcagaaaaagctgcctacgcctctgttgatgagtacggggatttttatttgcctggcatgacagaaagtattcagcgcatgctcaggaaaaataaaaatgatgtggatcgtcttcgtaaaagagggatgattcttgatgcaagggattgcggcctgaatgtaaaaactggagaggactctcagcgagcgttacagcgcgggtatgactggctgtcaggaaacggcggaggaaagctttacactccccctggttatttcaagctggcgaaaccggtcaatcctcgttctggcgtggctctgctgggggctggagtgggtgttacaaacttcctgccatttgggtatctggccgcttttacgtatcagggggcagagacctacattgaaaatattcagtttactgattttacaattgacggagaaaaccagcagttacacccggtgaacggatatatacccgatataaaaggtatatatctccagtattaccggaatactatttttgaccgcataaagattcagaacacgggagccactgggcttggcgtggatatgcctgataacgtttcaatcatgcgtgtggttacggaaaattgtggccgactcggccaggttggttctttgggagcttcaggcattggtctgggaaccgggtaccttgccagtgaaccgatttatatcggtcagaccgtgaataagggcaataaaaattacggtatatttttcgagccacaacgtggcgtcggtgtggctcgcgacactattgctatcgggaatgtgtgtgagtacaaccatgcggggatggccgactgcggtatagatggcctcatcgcgatcggtaataacctgcgtttcaatgaatatgggtttaaaggttctccgggaacaaacggcgcgggaaaccccggtaaccgaggcattctgaagggcaaccacatcaacggtaatactaaacacggcatttatctttatacggataaagggcttgctatagagggggagtacaattattccgctaaccgtatcgctgacaatgagctcgacggcattcatgttgaatatgctcatacatccgcgaagttactgaacagtaagtttgcggataatgatatttatcgtaatggtcgtcatggtcttaactttgtcagcggcaatctggtcaatgttgacattatggataaccggctctggaacaatggacgtacagaagtgggggatgccatcgctggcgcagcggatatggtgaaatgcgggattaccggcaataaaatccgcgacacgcaggacactgcaactcagcgatacccggttaatctctccggagcactgacagataccgatatctcattcaaccattgtgttggaaatgcccagaacaccttaaatcttaccggcacacaaacccgagttaccacgatcaacaacccagggattgcataa

SEQ ID NO: 187189 - DNA, 3009 bp, Klebsiella oxytoca
atgagtgatgactttcttaccagcgaacagacagaaaactacggtcgctatgtggcagacccaaatgaggttcagctggctcggtattttcatctggatgagcgtgaccttgcttttattaatcagcgacggggaaaacataaccggctggggattgcacttcagctgactacggcgcgctttctgggaacgtttcttcctgatccccttcaaattccctcattcatccgtttttacattgcggcacagttgaacatcagccgaccagagatcctttcccggtatgctgaaagagaaaatacccgctgggagcatcaggggcttatcaagctctattatgattatcatgattttggtgatttcccctggacattcagactgaagcgtttgctctatactcgcgcctggctcagcaatgagcgtccaggtctgctgtttgattttgctaccgcatggttgctgcaaaataagatcctgctacccgcagcctcgactctgacaaggctgattggcgaagtacgcgaacgggcaagtcgacgattatggcgaaggctggctttgttgcctgacagctggcagaaaacacaactggacggtttacttgaaatacctgaagggcagcgtatatcggtgctggaggagatgcgaaaaggtcctgtcactatcagtgggccgtcatttacagacgccctggagcgatatacccgactgcgtagcatggagttttcccggttgaatttctccggtctgcctgccatccagctgcggaatttggcccgttatgccggaatggcttcggtgaaatacatttcaagaatgcctgacgaacggcgactggccgtgcttactgcgtttgtgaaagcacaggaaatttcggcgcttgacgaggccgtggatgcgctggatatgcttattctggatatcacgcgttctgcaaaaaatatcgggcagaaaaagcggctcaggaccctgaaagatcttgatcgtgccgcgctattactggcacgggcatgcacgttattacttgatgagaacaccgatgaagcagctctgcggcaggctatttttcgccgcataccaaaggacaaactggctgaatccgtcggcaaggtaaatgagctggcgcgcccgcaagatactcagtttcaggatgaaatggtggaacaatatggacgggtgaagcgtttcctgtccgcgatgttgcgtgacttacactttcaggccgccccggccggggagctcacgttgtcagcaatccattatctggccgaactgagtggctcaaaaaagcgaattctcgacgatgcaccagagcaaatcatttccggcccatggaaacgtctggtctacgacagagatggtaggattctacgagcgggttactcgctgtgtcttctcgagcgccttcaagattctttgcgccgtcgtgatctctggctggagaacagtgatcggtggggggacccgcgtcaaaaattgcttcagggagctgaatggcaggcacaacgcatcccggtatgtcgggcgctgggtcatccatcagacggaactaaagcagcagaacaactggctacgcggcttgatgacacatggaaatcagtggcttcacgttttgcctgcaacgcagcggtcagcataagcaatgaaggtaagcatccctcactgacgattagcagtctggataaactggatgagccaccggcactgatacaattgaatcgtcgggtaagagaattgatccctccggttgatctgacggagctgttgcttgaaatagatgcccgaaccggttttaccagcgaattcagccacgtcagtgaatcaggtgctcgggcgcaggatctccaggtcagtctgtgcgcaacactgctggcagaagcctgcaatatagggcatgaacccctgataaagcataatattcccgcgcttactcgccatcgtctgagctgggttaaacaaaattatctcagggcagaaacgctggtcaccgctaatgcacggctggttgattttcagtccacgctgccgctcgcggggtactggggaggtggtgaggttgcctccgcagatggtatgcgttttgtcacaccggttaaaacggttaattccggaccaaatcgtaaatactttggttcaggacgcggtatcacctggtacaacttcgtctccgatcaatactccggtttccatggcattgtagttcccgggacgcttcgtgattccatctttgtactggaagggcttctggagcagcagaccgggctgaatccggtagaaattatgacggacacggcaggatccagcgatatcatttttggcctgttctggttactgggctaccagttttcccctcgtctggccgatgcaggcggggcgatattctggcgggcagataaaacggcacattatggtgccctgaatgagctggcccggggatgtgttgaactgtcaaaaatagaatcccaatgggatgaaatgatgcgaatggcgggctcactgaagcttgggaccatccatgcatcagagcttattcgttcactgttgagaagtagccgaccatctggtctggctcaggcgattatggaagtgggccgggtcaacaagacgttgtatcttctcaactatatcgatgatgaggattaccggcgtcggatcctcactcagctcaaccggggagaaggacgccatgcagtggctcgagccatttgctacggacaacgtggtgagattagaaaacgctaccgtgaagggcaggaagatcaactcggtgctctgggtctggtgaccaatgcggttgtgctgtggaatacactttacatgcaggaggcgttgtcacatcttcgcaaatcgggggaaacacctgaagaggagcatctggcaagattatcgccgctgatacatggccatataaatatgctgggacattatacgttttcgttaccggaagatattctgaagggcgagttaagaccattaaatttgaatacaaacaatgaattaacctcttag

SEQ ID NO: 187190 - DNA, 210 bp, Klebsiella oxytoca
atgctggtcacagtaatatccgtaccggtatcgccgacgtccccacccgcatccgtctgcagtacgttaccgctgataatcgcggactcgtatcctacggagtcggttaccgccacatccaccgcggtcgctacgctgagattcgccaggaaattcaccagcgtcggcagcagcccggtattcgttggcgacgaaatcactaccgtatag

SEQ ID NO: 187191 - DNA, 1500 bp, Klebsiella oxytoca
atggcaaatattgttacatgtaaaactaaggatggaaaaaccattcagtatgtcgatgaagtcatcggctcaggctcaatgaaggatgtgtatttttctccagataaatcgtacgttgtggccttctatcataagcctcagaacgatcaggcccgcgaacgtattaatatgataacgggcagataccggcaaaatattttcgaacaatcaggaggagattactggaaaggtcttttttgctggcctacagatgttgtcgagcacggcgacaaggtggggattgtggtgccctcctatcagcagcacttttttttccggtatggctccaaaaataacgattttctcgggatcaaaggacgggaaaaagaaggaaaatggttcgccagcgccaacaatcagaataagttcctcgatcctcgtgaacggggcaatactctcaactacctcaaagtttgcttactgttaacccgggcagtcagacggatgcatgctgcaggactgtgccacagtgacctgagctataagaatgtcctgatagaccctgaactgggccatgcgtgcatcatcgatgttgacgggttggttgtacctggcaaatacccccccgacgtggttggcacaccagattttattgccccggaagtggtgacaacaagccatctgccaaaagatgacgctaagcgtgtactgccaagcatagccaccgaccggcatgcgctttcagtactgatttatatgtatctgctttttcgtcatcccttacggggtggaaagatccacgacatggacgatgaggtgcgggatgaatcccttgctatgggggaaaaggctctgttcatcgaacatccgacagaccacagcaacgcggttaaactcagccaggtctcctcattttctcttccctgggccgatcctcagaaaatcccatacaccgtcctgggtccttatttaacaccgctattcgaccgggcatttattgacgggctgcatgatccgtcaaaacggcctacagcggatgaatgggaaacggccctggtaaaaacggtcgatttagttcagccttgccagaatgatgcctgtgagcagaagtggtacgttttttccggcaaaacgaaaccggcgtgtccttactgtggaacgccatacaaaggtaagcttccgatcctgaatctgtattcatccagaaaagcagggtctttcaggcctgatgaccaccggctaatggtctggagcgggcagtctgtatatgcctggcatgttaaccggctggttgcacccaatgaaagaacaacagctgaccagaaaaaacgagtggggtatttcgttttccataatgaccagtggtggcttgtaaacgagggaatacacgggttgatgtctctacccgaccgcagagtgatagccattggtgataagctccgtctggatgacaacgctcaatttattctttctgctgaggaaggcgggcgattggtggtggttcagcttttggataattag

SEQ ID NO: 187192 - DNA, 1521 bp, Klebsiella oxytoca
atgagtcaagaccctaaaaaatgtcctgttacccacctgactactgaagctggtgcccctgtggtcgataatcagaacagtatgacggcaggtgcgcgtggacctttacttgcccaagatttatggttgaatgaaaaattagcaaacttcgtccgcgaagtgattccagagcgtcgtatgcacgctaaaggttcaggtgcttttggtacctttaccgtgaccaatgatattacccaatatactcgcgctaaaattttctctgaagtcggcaaaaaaactgaaatgtttgcgcgtttctcaacggtggcgggtgaacgtggcgcggccgatgcagaacgtgatattcgaggttttgccctgaaattctatactgaagaaggcaactgggatctggtcggcaataataccccggtgtttttcctgcgggatccccgtaagttccctgacctgaataaagcagtcaaacgtgacccgaaaaccaacaagcgcagtgccaccaataactgggatttctggacattattgcctgaagccttgcatcaggtgaccattgtgatgtcggatcgcggtattcctgctggctaccgtcatatgcatggttttggcagccataccttcagttttatcaatgccaaaaatgaacgcttctgggtgaaattccatatgcgtacccagcaaggcatccagaacctgaccgatgctgaagcagcagatttgattgctaaagatcgtgaaagtagtcagactgacttatttgatgccattgagcgtggtgagtatccaaaatggaaaatgtacgttcagatcatgccggaactggaagctgaaacagttccttatcatccatttgacctgaccaaagtctggccgaaaggtgattatccactgattgaagtcggtgaattcgaactgaaccgcaatccggaaaattatttccaggatgtagaacaggctgcctttgcaccaagcaatctggtaccgggaattagctactcaccagatcgtatgttacaggcacgtctggtgaactatgctgatgcagcacgttatcgtgttggtgtaaatcattcacaggttccggtcaatgctgcacgctgccctgtaaactctaatcgtcgtgatggtcagggccgcatggatggcaactatggttcattgccacattatgaaccgaacagttttaaccagtggcaggaacaacctcagtttaaagaaccagcattaaagattaccggtgatgctgatttctgggacttccgtgaagatgacaatgactacttcagccagccccgtgccctgttcaatttgatgaatgatgagcagaaacaagcattgtttaataacacggccgcagcgatgggtgatgcgctagatttcatcaaataccgtcatatccgcaactgttatgcttgcgatccagcttatgggcaaggcgttgctaaggcattaggtatgactgtagcagatgctcaagcggcacgtgaaacagatcctgctaaaggtttaccaagttttctttaa

SEQ ID NO: 187193 - DNA, 1095 bp, Klebsiella oxytoca
ttgacttctttacaggttttgaatgctatcgctgttaggattacacctccagagaacgaacagaaagattggtcctataccttaggtgctctctggcccaccgatcagcaggaagtcatcacatttacaacgaaagtagatgcaagatttcataagagcagtaaatctcatgcgaagtttcaaaaaccttatccaggaagctctttcccttcaaagctgtcaaaatttttagaaaaagaaacttcattcgaagtcttcgtagatgattttatccagaaaaagttaattacatctgcaagacaatccagagcaagtaatggtgcaatattggtttttactcattaccaactgcaacatgaaaaggaagatggttctgttcataaagatttcgagcgacttcttgttttaatgcttaaaaacaccgatgcactaagattcaaagaaaacctacaactaaatcccgttgatataattgacttagataaattcttgcagggagcaagaattgatataaccagatttatttctgaggaggtagaagatgaagacaaaaataatttatgcttcatccgtggaactggtgatgtaagaaaatattttaccgaatcaattggcgccgaagatattatctccaataaaaccagtagtgaacaatgtattaaagctttggaacaattctctcatcaaaaagaatttggtcgtgctttgagagaaaaaatcgaatccaaggttcaggaactatttaataattgtaagcgtggacagtccataaccttagaaaagattcaaacacaaatcgatgctattatacctgttgatttagcagagcataaaaatacattcgtagattttgtaaacgaaaatggatttgaagttaatgaagaattcgaagtatctgcaagtgataaaagacaatatgaatggttagattttgaaaccaatattgcaaaaatgagtgtaagaaaacatcagattggtttgcctggttctgatagaccaattatctttgacacagaaacaaacgaagtaaagctaactcagaagattaatgatccaataattattgctcggctgaaagagcttgcaaatgaataa

SEQ ID NO: 187194 - DNA, 576 bp, Klebsiella oxytoca
atgcaccatgatcaccacaatcagcgccaccgcagagaaggagtgcagcatcagcgcgaagcggataaccgggatggagaaggccggcgcaaagtacggacgccagatgatcacgccgctcaccagcagcagcaccaggaagataatcgccgcccagaacacgcatttctggccgaagttatagcgcccggtgtcgcccacttcctcgttgacgacaatcttgcgaatatttttcgcccagaaaatatcgtcccggttgatcaggttgtggtgccagtagcggaagaacatgatgatgaacgaagcaaacataatcacgcccacgaacgggtgcagaatacgcgccagctgcggggtgcccatgatgtgcatcagccagttgaaggacgggaagaaaaagcccagtccgctcactgccgccagcacgaagcagaaggcggtgacccagtggttgattcgctccggcgcggtgtagcgcacgatggtgtcacgtcttttcatttgcgcacctcgtctttctcttcatccagattgtcctcttcctcttccgcgcggttcggaccgacgccgacgtag

SEQ ID NO: 187195 - DNA, 1221 bp, Klebsiella oxytoca
atggacgaaaagtccctctatgctcatatcctcaacctgtctgctccgtggcaggtaacgtctctttctctcgatgaaaatgcggggtctgttaccgttactgtcgggatcgctgaaaatactcagttgacctgtccggcctgcgggaaatcctgtcctgctcacgatcaccggcatcgcaaatggcgtcatctcgatacctgccagttttcaacgatagtcgaagccgatgtcccccgcattatgtgcccggaacatggttgcctgacgctgccagttccgtgggcgggacccggcagccggtatacgttgttgttcgaatccttcgtgctctcatggctgaaaatcagtaccgttgatgctgtcaggaaacaactgaaactcagctggaatgccgtcgataacatcatgcagcgtgcggtaaagcgaggactggcgcgccgacggttgccccagtctgcgcgtcacctctgtgtggatgaggtgagcttcaaaaagggttatcagtatgtcaccgttatctcggatacgcagggacaagcgcttgagctaagggatgatcgtggtgttgagagtcttgccggttatctccgaaacctgggtgaccgccagctcgaatccatcaaaaccttgtcgatggatatgaacccggcctatatcagcgcggcccggatccacttacccaacgcagtagaaaaaatcgccttcgatcacttccatgtagccaaaatgctctgtgccgtggtggataaaacacggcagtcagagatgaaaacgatcccgttgcaggcccgaaaacgtgcacatcgctcccgctatctgtggctgtacggccgtcataagcgtcatggtcgaatagcagaaagactggaggcagcgcagatggtcctgcctgataccagccgttgctgggcaatgaaagagctggcgcgggaactctggaaccgtcggtatgacgagcacagcagacgcctgtggcaggaatggatagcgatggcaaaagatgttggcgtcccgctgctgagtagtgccgccagaacgttacgtaaacggctgtacggtatcctgaatgcgatgaagcatcgggtatcaaacggcaatgcagaatcgctgaacagcaagatcagactgctgcggatcaagtcgaggggataccggaacaaggagcggttcaaagtagctgtgatgttccattacggcaggttaaacatggacttctga

SEQ ID NO: 187196 - DNA, 1152 bp, Klebsiella oxytoca
atgagacgaacatttacagcagaggaaaaagcttctgtttttgaactatggaagaacggaacaggcttcagtgaaatagcgaatatcctgggttcaaaacccggaacgatcttcactatgttaagggatactggaggcataaaaccccatgagcgtaagcgggctgtagctcacctgacactgtctgagcgcgaggagatacgagctggtttgtcagccaaaatgagcattcgtgcgatagctactgcgctgaatcgcagtccttcgacgatctcacgtgaagttcagcgtaatcggggcagacgctattacaaagctgttgatgctaataaccgagccaacagaatggcgaaaaggccaaaaccgtgcttactggatcaaaatttaccattgcgaaagcttgttctggaaaagctggagatgaaatggtctccagagcaaatatcaggatggttaaggcgaacaaaaccacgtcaaaaaacgctgcgaatatcacctgagacaatttataaaacgctgtactttcgtagccgtgaagcgctacaccacctgaatatacagcatctgcgacggtcgcatagccttcgccatggcaggcgtcatacccgcaaaggcgaaagaggtacgattaacatagtgaacggaacaccaattcacgaacgttcccgaaatatcgataacagacgctctctggggcattgggagggcgatttagtctcaggtacaaaaaactctcatatagccacacttgtagaccgaaaatcacgttatacgatcatccttagactcaggggcaaagattctgtctcagtaaatcaggctcttaccgacaaattcctgagtttaccgtcagaactcagaaaatcactgacatgggacagaggaatggaactggccagacatctagaatttactgtcagcaccggcgttaaagtttacttctgcgatcctcagagtccttggcagcggggaacaaatgagaacacaaatgggctaattcggcagtactttcctaaaaagacatgtcttgcccaatatactcaacatgaactagatctggttgctgctcagctaaacaacagaccgagaaagacactgaagttcaaaacaccgaaagagataattgaaaggggtgttgcattgacagattga

SEQ ID NO: 187197 - DNA, 930 bp, Klebsiella oxytoca
atggatgtcgataccattaacggcattgagtccgcgtactggagcccgcggggagagtattttgatttcgctactgacgacagtatctcggcactggaaatgctgcaaaagatcgccaacgccgggaagtcacgttttctgctgagtgatggcctggcgacagttaacagggaagggattaagccctggacaggcgtgatcaccccgcatgagatggtcgaagagctgcagagtggtttcactgcgccatctgacgatgattacgacggcgttgacgtgacgtacatcaacgggaccacctgggcggaagagacggttaaatgccgcactcccgataaccctacaccggtgaaagtcgaggattacaaactcgacggggtattgagtcaggatcacgcttatcaaatcgggatgcggcgcctgatgaaatacctgcaacagcgggtaacgttccagacgacgaccgaactggacgcactctgctacaacgttggggatcgtattgtgctgaccgatgatataccggggaataacacgatttcctgtcttgttgaggagataacaacggctggcggtgtgacgaccttcaccgttacggaggcgctggactggtcttttgaaaaccctcgcgcgctgatccgttaccaggatggctcggcctccgggctgatggtggcgaccagagcaggggatcatcaactttcggtcccgcatctgagtgagtttgatgacccgctgaaaatcaatttatcgtctgcaactatcgagccgatccggctggtgttctgcggctcgacacggcatatctatgatgcgctggtggcagaaattgccccacagtctgacggcacctgccaggtgaccgccaacgaatatcttgaatcgctctacgcctacgacgacgccacataccccggcgacgtttcgtaa

SEQ ID NO: 187198 - DNA, 921 bp, Klebsiella oxytoca
atggatgtcgataccatcaacgcgctggagtccgcgtactggacgccacggggcgagtatttcgattacgctaccggcgacagtatctcagcgctggaaatgctgcagaagattaccgcagcggggaaatcgtattttctgctgagtgatgggctcgcatccgtaggcagggaaggggttaagaactggtcggggatcatcagcccgcatgaaatgaccgaagaactgcagactagttttacggcaccgtctgctgatgattacgatggcgttgatgtgacatatatcaacggcatcacctgggcagaggagactgtgaaatgccgaacacccgacaatcccacgccggtgaaaatcgagaactacaaactcgatggggtactcaatcaggaccacgcttaccagataggtatgcggcgtctgatgaaatatttgcatcagcggctgggtcataatacgacgactgagctggatgcactggtatatgagtacggtgatcgcatcctgctgacagatgatattccgggaaataaaaccgtgagttgtctggtcgtggatatggccacaacgggtatcgaaacggtatttaccgtttccgaacagctggactggacctttgaaaacccgcgcgcaattttgcgctaccaggatggctctgcctcggggctgctggtggccactttcgtcggggattatcagttgtctgttccatggcaagccgctttcgatgaaatcatgctgaacgatccgagcattgaaccgccgcgactggtgttctgtagctcaacgcggggtatctatgacgccatatttgaggaaatagcgccgcaggcagacggaacctgccaggtgactgcaagacagtacagcgacattttctaccagtacgacgacgccacataccccggcgacgtcgcgtaa

SEQ ID NO: 187199 - DNA, 399 bp, Klebsiella oxytoca
atgcgtttagcatcccgatttggacttactcattccattcgtcaggaacgcccactgactaacgatgaattagtcaaggttgtaccttctgtgttttcagaagaaaagcataattcacgtagtgatcgctatacctatattccaaccattacactgctggataaattacgtgaagaaggtttccagccattttttgcctgtcagtcacgagtaagggatgaggataaacgggggcatactaagcatatggtaagacttcgccgtgaaggggccaataaaggaacagaagtacccgaaatcattcttcttaactcgcatgatggatcgtccagttatcaaatgatcccgggtatgttccgttttgtatgggctttgttgaataaatcgaacttttgctga

SEQ ID NO: 187200 - DNA, 810 bp, Klebsiella oxytoca
atgacgatgtgtcgggtactgaatgtcgaccgggccgggttctatgcgtggatgcataaccctgtctcggcgcgtgataaagataaccagcgcctgctgatacttatccgcgactcatattccctgagcggaggcgtatacggttaccggcgggttcatggcgatctgaacgaaatcggggaaacctgcgttaaaaaccgggtgggtcggatcatgcaactgaaccggattaaagccgtgcgcggctataaagcgccacgtcgtatcgctggcaggccttcaatcgttgctcctaatcgcgtgcagcggcagttcaccgttgtccgggccaaccaggtctgggtcaccgatattacttatatccgcacctggcagggctggctgtatctggcggtggttatcgatctctttgcccgtaatgtggtcggctggtcgatgaaacccactctctcgcgcgaactggcgctcgacgcgctgatgatggcggtctggcgccgaaaaccggacggcgaggtcatcgtacatagcgatcaaggtagtcagtacggcagtgacgactggcagcgcttctgccgggccaatcacctggcaccgagcatgagccggcgtggcaactgctgggataatgcggtggccgaatccttcttcagttcactgaaaaaagaacgcatcaggaagagaatatacaaaacccgggatctggcccgggcggatatcttcgattacattgaagtgttctacaaccgggcccggcgccacagccacctcggcggcgtcagtccggaggcctttgaacaggcctcgtcgtga

SEQ ID NO: 187201 - DNA, 285 bp, Klebsiella oxytoca
atgggcacaccacgatttacacccgaatttaaggaagaagccgtccgtcagataacggaacgcggttattccgtcgccgaagtatctgaccgtctgggcgtctctgcacacagcctctacaagtggctacgggctatcaaacctgataacagcgagcagcatgcccgggatttactggaagcgaaaagcgagatcctgaaactccgggcgcagctaaaacgtaccgaaggagaacgggatatcctgaaaaaggccgcgcggtactttgcaagggagcccgactga

SEQ ID NO: 187202 - DNA, 837 bp, Klebsiella oxytoca
atgggaataccttttcctttcttttataaattttcagcattaaatataaactcattatcagctttagctgaaggaaaagcctggttttcaagattggctgactttaatgatcctttcgaaggacagtttttgattaagcgcccagatatagaaattgataaagaaagattgtttcagcatatgggtaatacactccctaaaaatgttctttcagaaccagtttcagaaataatcaggaggaattacgaacagtctccggaaggtttcaaaaaaactatagagcaggcaatatctacaacatataatagatttcacaatgcctttcagaatatcagtgcattttgtttagcaagtgatataccaaatgtacatgcatcacatgttagtaatgttatgatgtggtctcattacgcagatggtatgaagggattctgtataaaattcaagccagagtatttgttgtcatccttaagagaaatgaatgagacaaattttaatattgctcaagttcactaccaaaatgagatgtataacgtagacttttttgatttggttgatctttcaaaaaatgtttatacgcaggccatacatactaaacatactggttgggaatatgaatacgagtgtagaataattaccgaaaacccaggattatataaatattctcatgatgcaatagattccatattcattggaagtaaaatgccattacctcaccaaaaaatattgatagatatttgctctgtaaatattccgaatgttaatatttttagtgttaggactcatgcatcaggttatgctgtagagttagggaaatatcagaaagttacaaaatga

SEQ ID NO: 187203 - DNA, 195 bp, Klebsiella oxytoca
atgaagaagcttttaatatgtattgtggcaatgctcccgctggcggcccatgctttaacagttacaataacgcttcaagatataatcgaagcggcagacggtaaaatctgcgtgtatggtaaccaactgcgaaccgaaaccatcaagatccgcaatggtcagtgcagccatacaaaaactttcacgatcgattga

SEQ ID NO: 187204 - DNA, 414 bp, Klebsiella oxytoca
atgactgagtattatccggcggtgtttggtagtgatgcttttaactgcccttattgcggtgcttattcccggcagcgttgggtacgattaaaatatgggcttcacgggaattgcgattcacctttcactttttcaaaatgtgaacgctgcgatgagaaagcttactggcacgaagcaacaatgatggtaccagcttctgcaaacatcgaaatgccaaactctgatatgcctgaagtctgtaagtccgactatatggaagctagaagcatagttaatctgtcacctaaaggtgctgctgcgctccttcgtctgtgtcttcagaaacttatgatccacttaggcgagcctgggaaaaatatcaataccgatatcaagtctctcgttgagaaaggattacctcctcgtattcagtaa

SEQ ID NO: 187205 - DNA, 351 bp, Klebsiella oxytoca
atgggtctgaagtgcgcagcgctgctggagaatcccattcaaaccgcggagcctaactatctctgcaacggcaaccatctgctgtttagcctgatgggctgcgagtcagaaagggttgcagaactttacgattcggatgcgcagctgcagcagttcagcgagcggctttcggcagaaggggctaaaccctatattgttcccgtcggcggctcaaacgcgctggggtcgctgggctacgttgagtgcgcgctggagatagcggagcagtgcgagcagatgtgtgcagtccgtggtggtgtcctccggcagcgcggggacgcatgccgaataccgcagggatggaggcggtag

SEQ ID NO: 187206 - DNA, 720 bp, Klebsiella oxytoca
atgaataaaattgttttcgttgaggatgatgccgaagtaggcgcgctgattgcggcctatctcgggaaacatgatatggacgtcgtggttgagcctcgcggtgaccgtgccgaagaggttatcgcgcgcgaaaagcccgatctggtgctgctggatatcatgctgcctggtaaagatgggatgacgttgtgccgggatttacgcggccagtggcaagggcccatcgtgctgcttacgtcactggatagcgatatgaaccatatcctgtcgctcgaaatgggcgccagcgattatattctgaaaacaacgccacccgcagtgctgttagcccgactgcgtctgcatttgcgccagcatgtccccccccaggacagtagcggcgtcccctcctcgctgacgccgcataaagcgatcgcttttggttcgctgagtatcgatccggtcaatcgtcaggttatgctcagcggggaaaacgtcgcgttgtccaccgcggatttcgatctgttatgggagctggcgacccacgcaggacaaattatggatcgggatgcgctattaaaaaacctgcgcggcgtaagctacgatggtatggaccgcagcgtcgacgtcgccatttcgcgtttgcgcaaaaagcttctcgacaacgcgactgagccttatcgcatcaaaacggtacgcaataaaggctatttattcgccccgcacgcgtgggacaattaa

SEQ ID NO: 187207 - DNA, 477 bp, Klebsiella oxytoca
atggcggcggaagtcccctacctggctgcaacccataaagcctttccgcgtctgttcgcgcgcaccaacaaaaacaatgcgccgtcgtcttcgctgtggctcaccaatattagcgtgcaggcttcactggtattgatttggctgaccggctcggattacaacacgctgctgacgatcgcctcagagatgattctggtcccttattttctggtcggcgcatttctgctgaagattgcccggcgcccgctgcacaaggcggtaggcgtcggagcctgcatttatggcttatggttattatatgcgtccggccctgtgcatttattgttgtcagtgatactttacgctccgggtcttctggtgttcctgtatgcccgtcgtacacaccagcacgatcgcccgcttaaacgccgtgacctggcattaattggttttttgctggttgccgccgtaccggcaacgtggatgttggtagggtaa

SEQ ID NO: 187208 - DNA, 141 bp, Klebsiella oxytoca
atgtcggataaacgggtcaggggatttacctttagcggcctgtttttctttaatataaataatcaaagcaaaatagatttatcttccttttcctcgtcagcaaggtatataaccaggtttaagcatgcagtgggcttctga

SEQ ID NO: 187209 - DNA, 1623 bp, Klebsiella oxytoca
atgcacatccgttttcgcctgcccgcgctggcggcgctatttttaaccggcgcgttttccgcctgggccgccgacgccccggttaaaggtggtacgttaatctatctggagcagcagccgcatactaatctttacccaccggccggtggcttctaccccaacggcggcattcttaatcaaataaccgataagctcacctggcagaacccgaaaacgctgcaggtggagccgtggatcgccgaaagctggagcgccaacgcggataaaaccgaatatacctttaagcttcgccccggggtgaccttctcagatggcaccccgcttgacgccagggcggtcgccaaaaactttgatacctacggcctcggtgataaagcgcaccgcctgccggtgtctgaggtcattaataactacgatcgcagcgaagtcatcgatccgctgacggtaaagttctactttaaaaagccctcgccgggatttctgcagggcaccaccaccatcggctccgggctggtatccctcagtaccctggcgcgtaattttgaagagctgggcgatgcccgccatattattggctccggaccttttacggtaaaagatgaaaagccggggcgcgaactcactctggtcgcgcgcaaagattatcaatggggaccgaaaaatctcacccagcaggggccagctaatctcgatggcatcacttacatcgttacccctgaagatggcgtgcgcattggcgctctgctggcgggccaggctgactttatccgtcaggtacaggcctacgatgaaaagcaggccaccgggcagggctttaaaatttatgctgcccccacgcgcggcgttaacgatagcctgagcttccggccggataatccgctggttgccgacctgcgcgttcgtcaggcgctgctgcacgccaccgacgccaggcaggtagtcgaaacgctgttctccgccaactatccgcaggcgacctccgtcgtcgccagtaccgccgccgggtacgttaacctcagcgacaagctggctttcgatccggccaaagcaaaacaactgcttgatgatgcaggctggaaaccggctgccgatggtattcgggtcaaagatggccagcggctggccttaaccgtctatgaatctctgccacaaccgcaaaataaagaagttttgcagcttgtcgctcagcagtggcgtcaggtcggcgtcgcgctggcggtcaaagccggcgatgccggcagccgtacgctggataacctcgatccgctgaaaacgccgctcaccgtgtcggaagtgggccgcgccgaccccgacgtggtgaaaagcatgtttttccccactaaccgcgacgcgctgctgcaaaaaggcggctccagcgacaaagtacagggcttccgcgacgataagctcaacgcattgctgagcgcgatttcagccgaagttgaaccgcaaaaacggctccagctcaccggcgatgcccaacgctatctgctggataatgcctacgtgatcccgatatttgaagaaccgcaggtcttcgccggcgccccgtgggtgaaaggcgtcagttttgaagcggtaggccgcccgtcgttctacggcgcgtggctggaaaagcactga

SEQ ID NO: 187210 - DNA, 447 bp, Klebsiella oxytoca
atgacgcgtaaacgactgggttttttcactcgcctgctggaccacgtcgcgccaggtgagcgctatcggctggctaccgaacaaattcgccacgccgaacgactgggtttcgacagcgcctgggtcgctcagcaccattttcatgagcacgaaggcggcctgccgtcgccgctggactttctcgcccacgcggcagcgcatacggagcgcattcgcctgggaaccgccattatcaccctgccgatggaaaacccgctgcgggttgccgaggatgcggcggtgctggatctgctcgccgatggacgactggaagtgggcttcgggtctggcggcacgccgacctcgtttttaccctttggattgaccatcgaccagcgcagtctttgccgaacacctgcatctgattcaaagcgcctggcgcggagattcactttcgcatccggataa

SEQ ID NO: 187211 - DNA, 774 bp, Klebsiella oxytoca
atgcgatttaaccataaagtcgtggccattaccggcgccgcgcaggggattggccgacagaccgcagagcaagcggcgcgtgagggtgcgcggctgctattgattgaccgatctcgctatgttcacgaactggcggcggcgctgaacgccgccggttgccaggcgctggcgctggaagccgatcttgaacaatgggaaagtaccgagcgggcattcgccaacggcgtggcccattttggccacctggatgtattgattaacaatgtcggcggcaccatctgggcgcggccgtttgcggaatatcagccggatcagatagagaaggagattcgccgctcgctgtttccgaccctgtggggctgtcgggctgcgctaccgtggatgctgaagcagggcaagggcagtatcgttaatatttcgtcggtggcaacggcgggcgtgaaccgggtgccttattccgcagcgaaaggcggcgttaatgcgttgacccgttcgctagccctggaatatagcgcaaacgggatccgcattaacgccgtggcgccggggggcaccgaggcgcctgcgcgccggacgccgcggaatgaggagctgccgtcggcgcaggagcagacgtggtatcagcaggtggtcgatcagacggtggcgagcagcctgatgcatcgctacggtacgctggcggaacaggccaatgctatcctgtttctcgccagcgatgaggccagctacatcaccggcgtgacgctgccggtcgccggcggcgacctcggttag

SEQ ID NO: 187212 - DNA, 126 bp, Klebsiella oxytoca
atgcaaaaaatgttcaccacattaaaagataaaatcaccaatgcattaattgtcgatcgtaaaagcatatttatcgctgccatcgctcaatatttaccgatccgcagctatttgattttgaaatga

SEQ ID NO: 187213 - DNA, 1119 bp, Klebsiella oxytoca
atgaccgcgaccattgaacgtattgaaagctggctggtagatatcccgaccattcgaccgcacaaactctccatgaccacgatgggctgtcagacgctggcgatcgtccgcatcacccgttcggacgggatttgcggtattggcgaagccaccaccatcggtggattgagctacggcgtggagagcccggaagctatcgtttcggcaattaaccattacctgatgccgctgctgaagggccagcctgccgataatctcaattccctgaccgcgcgaatgaacggcgcggttaaaggcaacacctttgccaaatcggcgatcgaaaccgcgctgctggatgcgcagggaaaggcgcttggcctgccggtttccgcgctgcttggtggcgcgctgacgacctcgctgccggttctctggacgctggcgagcggcgacaccgagaaagatattgccgagggggaaaggctactcgcggagcgtcgccatcgggcctttaagctaaaaatcggcgcgcgcgagctggcgactgacctgcgccatacccgcgcgattgttgaagccctgggcgatcgggccagcatccgcgtcgacgtgaatcaggcgtgggaagccaccgtcgcggcaaagggctgccgcgagctggcggcgatgggggtcgatttgattgaacagccagttagcgctcaggataacactgcgctggtgcgcctcagccatcacatcggcacggctattctggccgatgaagcggtagcgacccattacgaaggctatcgcctggcgcagcagggattcagcggggcctatgcgctgaagattgccaaagcgggcgggccaaacagcgtgctggcgctggcgaaggtggcgcaagcggcgggaattgggctttacggcggcacgatgcttgaggggaccgttggcaccctggcctcgctgcacgcctggtcgacgctccccctacagtggggcagcgagatgtttggcccgttattgctgaaggacgatattgtcagcgtgccgctcacgttcgccgaaggcgaagtgacgctaccgcaaacgccgggtcttggcgctgaactggatgaagacaaactgcgcttctatagccgcaaaggataa

SEQ ID NO: 187214 - DNA, 186 bp, Klebsiella oxytoca
gtgcccccccccactcaaactatcgtacctgatttcacccactgcgagttttactccttcattgaaggccgcgccgtccaccttggcggagaatggctatcccaagccggatttatcgaagacatgcccatcaaagtccgcgtgatgaaagattgtatcgtgatcaccccgcagaacacccactag

SEQ ID NO: 187215 - DNA, 852 bp, Klebsiella oxytoca
atgggaaaaatatacaaaactgaattaattagtcataacactgatacgagctatattttgaaagaagctcaagcgtttgacattatattattcaacaataagacatggtctttaaaaacactttttgtaaaaattggcagcaatagtggttggaatcatgcagccttagttatggatgagcccccctttggatctaataatgaaaaatgtaaatacttgtatgaatatgctgccagcggtcagcctataacttttcaaaaattagacgttaaattgaatagtgagagattcaatcgtatcgctctgataaggtttaaaaacaatcctgcaaactttagttcagcagaaagaactgaagctaaaaaaatagtaattaatgatttttttaatcgagaaggaagagatgccagtgacttatcgcatggatctgacagtatctctaaaaaatttcaatacaatgctacaaacattatgcatagaggcgtactatcgattgcattaacattagccattgctatatatttcctttccattctttcgtttttgaacaattggtttcgcgacgcccttctgatttgtttaattgcaacacctttaataataatcatgaagtattttttcgaatggttatatagaaaaacaaataatgagaccataaaaacccaagccatttgttcaagctacccaccaatgattttgaaatcgataatttataactcgaacactcaaaagtgcgaaattgaaaaatttgaggataagtggataaatggaactcccccatcgccaaagaatttatactttcttgctaaatcaagtgaagagtgcataatatacaattacaagaagaattag

SEQ ID NO: 187216 - DNA, 3402 bp, Klebsiella oxytoca
atgaaaacagataaaaatcagaaagaaactatttctgctgcgttcacggtggtacttacagccgtggcgatcacgttccttattttactggggggactggcgtactggtttttcataggtgaccatgctgcaaaatggtcggttatctatccgattctgctggtgtgcggtcttctctggattgtgctggtatgtgtcgtatctctggtttttctggcgatacatctttggatcatcagtcgagccaggcgttcatcagcggctggacagagtacatcagcaaagacgctggcgttgaaacgcccgatgctatcgaaagaaatagccacccatctccgccgccgctatacccgtttctggcgccacaaagtccgcctgctgctggtggccggtgaacccgcgcacattgccgccatcgcccccggtctggcggaaaaacagtggctcgaaggccaccgcacggtgctgatttacggcggcactctgtcatcggcgccggatactgaacgcctggccgccctgcgcaagctgcgccgcagctgtccgctggatggcatcgtgctggcgcttgatgaggcgcaggcgaccagcgctagcctggataaccatcttcgcaccctcgagcaggtcggggaggccctgcgctggcagccgccggtgtacctgtggcaggtgactgacagcgcctggccgcaggatacccgcatcagccagacggtgggggcgctgttcccgcccggcgccacgccggagggggtggggcaacaactccgcgccattctgccgtccctgggggaaaggggaatgcagcagctgtgcgccgacccggcccatgattatctgctgcgcctggggcgcacgcttgaggggagcggcattgcccgctggcgtacgctgctgacgccctggctgacggagcgcctgcagcgcgttccgctgcgcggcctgatgttcagcccgccgctggcgccggacacgaccgccggggagacgccacatcctcaccgctggtccgctccggcggtctggcagggagtgacggcggactgcgctcaggcgcggggcgtgcgggccggtctgccctggcagcgcgcatcgggggttatcgccctgtcgctgatggccctgtggggggcgggcagcctggtctccttcgccgttaaccgccagcatgttgtcagcgcggcgcagctgctggtgagctctcccgcggtgaatgatgaacagctgatggcgctgcaggcgctgcgtaacgatatcggacggttacagcatcagcaggcgcatggcgcgccctggtatcagcgcttcgggctggaccataacgccccgctgctggcggccctgatgccgtggtacgggcaggcgaataaccggctgatacgcgatgcggcggcgcaggcgctcacaaagcagctgaacgcgctggcagacctgccgccgcgcagtccgctgcgcgagaaacgggcgaagccgggctacgaccagctgaaggcgtacctgatgatggcgcacccggagaaggcggacgccgcgttttttgcgcaggtgatgaaaaccaccgaaccgtcccgtccgggtctgtccccggcgctgtggcaggagatggcgccggatttgcacaccttttacatgcagagcctgcccgcgcagccgtcatggaaaatcacgccggatgcggcgctggtggcgcaggtgagcagggtgctgctggagcaggcaggccagcgcaacgccgaaagcacgctctatgagaacatgctgacggccgtccggcgcaactatgccgatatgacgcttgaggacatgacgccgcagaccgacgcccgccgtctgttcagcacggacgaggtggtgccgggaatgttcacccgccaggcgtgggaaggcgggattcaggacgccatcgacgccgccgtggcctcgcggcgcgatgaaatcgactgggtgctgagcgacaaccgtaacaccgtgtccacggatgtctccccggaggcgctgaaacagcggctgacgaaccgctactttaccgattttgccggagcgtggctgaacttccttaacagcatccggctgaatccggcgcacaacattaccgatgtcaccgaccagctcaccctgaccggcgatgtccgccagtcgccgctgattgcgctgatgaacaccctggcctggcaggggcagaccggggagcagggggaggctatctctgatttcctggtgaggacggcgaaaaatctgccgggtaaggataaaaagccggtcattgaccagcaggcagccggtccgcgcggcccgctggacagcaccttcggcccgctgctgaccctgacgggcaaaaacagcgcacagaaggtgatggctgccgacagctcgctcagcttacagacctggctcacccgcatcacccgcgtgcgcctgaaacttcagcaggtggcgaacgccgccgacccgcaggcgatgatgcagcagctggcgcagacggtgttccggggccggagcgtggagctgaccgacacgcaggagtacggcagcctggtggcggccagcctcggtgaggcgtggcgcggtttcgggcagacgatgtttgttcagccgctgactcaggcccgggaggcggtactgcagccgtcggcggccagcctgaacgaggcgtggcagcgctctgtggtcgcgaactggaatgcggcgtttcaggggcgctatccctttgcagccgggaagagcgacgcttcgctgccgatgctggcggcgtttatccgccgagataccggacgtattgaccgttttctcagtacggagctgggcggggtgctgcgccgggagggcagcgactgggtggcggacagcacccgcagccaggggctgaccttcagcccggccttcctgaacgcggtgaaccagctcagccagctgtccgatattctgttcaccgacggcagccagggcatcagctttgagatgcagggggtggcgatgcgggaagtggtagaaacagcgctgacgcttgacgggcagacgctgcactattttaaccagctggccgactggcagcgcttccgctggccgggggtgatgaataaaccgggggcgatgctgacctggacgtcaacgacggcgggaagccgtctgtatgcaaaccacagcggcccgtggggcgtcatccggatgctggagccgatggcgcggcagaaagcgggggacgggctgtaccggctgaccgtcaccgcaccggacaggcggcagctgcagtggctgctgcgcacggagctgggcgacggtccgctggcgctgctgaagctgcgcaacttcaggctgccggcgcagatattcagcgccggtgtcccggcagccggccgcacggatgaagagggatacgacgcgggggagatgagtgaataa

SEQ ID NO: 187217 - DNA, 522 bp, Klebsiella oxytoca
atgcagggaatagttaagacagtgccgctgttatgttttttactgctgggctgtgatccggcagaaaaagaagcaccgcgcggcagcgggaagaccagctacgtagcggctaatctgttgggctataaccatatggcaggcacgaatatcaactggttctccgtcaacggctatcgggggcacgccggagggtttacctgctgcatatcgctgccggaaaaatggcgacccaatatgcaggtggtagtggagtgggaggttaaccctaacccttttccgaaggatatcccccacttcgatgatccaaactatgaacattatatggaaaaatataaggctacctttcgtcagtataaagcggtagccactattcccgaatatgaagattcctgcggcctgcaggtgcatttcttgccctgtcagcagattaaagtaaaggccacctgccacgggccgacccatcctgaccacccgataaaagatccctaccgccagtcggagcctgcccaatgcccccaataa

SEQ ID NO: 187218 - DNA, 852 bp, Klebsiella oxytoca
atgaatgctcctgataaatataaagtatacgccattccgaaaagaaagcagggatatcgaataattgcccaaccatcgcgagagctaaaacattatcagcgtcagttgcaagattttattatattccctaaacataaatgcgcaatggcgtatcgcaaaggattgagtataaaaaataatgcattgtctcatgtgaataattcttatcttcttaagttagacttagagaatttttttaatagtattacaccggatcttttttggagtgtatggtcaagaacttggtctttaccatcaaaagaagaccaattgtttctagagaaattgattttttggcgttttcagggttctttaatattaagtgttggagctccaagttctccttctatatcaaatttttgtatgtattattttgacggcgaagttgaagctatatgcacgaaaatgaaaataacttacactagatatgctgatgatcttacattttcatcgaacgtaaggaatatattgtttgaaattcctgtgttaattgaaaatatcttgaatgaacaattcaaaggtttgcttagacttaattcgagtaaaactatcttttcatccaaagcgcataatagacatgttactggcattacacttaacaataatggcaaaatttctttaggtagagatagaaaacgatatatcaagcataaggttcatttgtataccttgggtatgttagatgctacagaactcaatcacctaaagggtatgatcacatttgctagattcatagagcccgcgttctttaaatcgcttgaaacgaaatataactcgaatgtgatttttaggcttactcaggagaaaatatga

SEQ ID NO: 187219 - DNA, 1677 bp, Klebsiella oxytoca
atgaacaggaatgaaagagttaacaaagaaattttaacactcgagagaagatctaagaaaggggatgtcttttcagcttttaagttatacaagtattatgaaaatggaatagttgagcgtttagataatggcgaaataaaacagattatagctgccgatgaagacaaagccaatttttatttgggggtttgtcatgatattgtcattgataattctgattgcgaccgtaaaaatgggttttattttaaacgtttatttttaactgattttagaaagtttaaaagcttacacgttaaacttgataagagcttaactgtatttattggtgacaatggatcaggaaagacaacggtaatagatgctcttgttaaagttataagttacatcgcatcaaatattgttcgtaaaaatggtaaaggtaagcagattagtgagtatgatgtgaattcagactcggaaagatttgcagagataaaatcgcaactatatttgagcccacattctttatgtgaggctgctctcaggaaaagttctaaaatttatacggaacatgcatttagccatattgagtcattagaggaattaggtgagctttatagggttttatcgagctcaagaaatgatagaggaaatgaaaatatcactcttcctgtttttctgtactattctgtagacagaaataatattaaaactaataggacttttgacgaaggaagtatttccgtttcaacggaaagattttcttcatacgataaaaaagcattagatggcgcatctgatttttctggattcttggaatggtttatactcattgataatcttgcagatagtaatttgaaaagtagtattgaagcttcagataaaagaatttcaagtttaaaaaatgctggagcctgtgaaaaggaacatgatttatatggtctttatatcaatgaattagctgagcatcaaaaactatctcaagctttagagaataaaaaggtttatttaagaaagattgatctcattaagagtgtcatcaaaaacgcaattcctggatttaaagatatctatgtcgataaaaaaacaggccgagcggaagttatgattgcaattgatgatgagagaattaacatcacacaaacatctcaaggacagcaagtcttggtttcactcatcactgatatagctcgacgtattttaactttgaatcctaatttagataatccattggattcttacggtattgtagtgatagatgaaattgaacttcatttacatccaaaatggcagcaaaatgttgttaatgccttactaaaatcttttaaaaacgttcaattcgttataacgactcacagcccacaagtattatctacggttgataagaagaatataagaatgtttgttaaaaatgatcaaggggaaatgagatctgtctctcctactttccaaacaaaaggtgttaaaagtgcggatgtgatggcccgtataatgggtgctgattcaatccctgatgtcaaagaagcaagagatgttgatgaattttctcaattattatctgaaggtaaaaaagatgatgcgctttctcttttagatgagttaaagcttcattttggagaagagcatcctgttattcttgattgtgaaaactctataaaaatttatgaattaaaagaaaggattaggaataagggctag

SEQ ID NO: 187220 - DNA, 642 bp, Klebsiella oxytoca
atgcgtaagcttgatagaatgctcgctaattcaccccaatgcttgggtaattattcttatctggtgaataaatgggatgatttaacccaaaagcaaatggtctgggatgagttagataaatttcaagataagatttgtgtttattgcgaaagtgttgcggagaaaggtaatggtcacatcgaacattttttccataaggctgatgctcgattcactaatttaactttcgattggggtaatttatttggttgttgttcttcaaacttacattgtggtcactataaagatcaaattttaacaggtggggttaaaaggcaatatgacccttatgctttgattaaacccgacgaggaagatccagaagattttttgcaattcctagaaagtgggaagataaaagccaaagacggtatcaatgatgcgatgaaagagagagcgtcaaaaacgatcactgctcttaatttggattgctctgcactaaattcttcgagagaaaatcaaattgataggtttaaaaaaagattgttagcgttaacaaatattgatgatgaattacttttaactgcggaatataaccgaataaaaatagaagctatgaattcatttcatagaacggctttaaaacagtcactctcttggtga

SEQ ID NO: 187221 - DNA, 237 bp, Klebsiella oxytoca
atgttactgagacatctgcttgatccacactacggcctaatcctgcgctacacacagtttggaaacggcggagtgatccagaagcatattgatgctgataccacaccgtgtgacgcaatgaattttaccgtgggaaagtacgatctggcacgtacagactgtcatggcttcaacgtgaaagagcagtctcagtatatcggtagtatcgatatactccgtgcaccggaaggctactga

SEQ ID NO: 187222 - DNA, 321 bp, Klebsiella oxytoca
atgagcagtaatgtcacatggggactgcagcgggatatcacgccacgcctgggagcccgtctggtgcaggagggcaaccggctgcactatctggctgaccgggccagtattaccggtaagttcagtgacgccgattgtcttaagctggatgtggcatttccgcattttatccgtcagatggaatcaatgctgaccactggtgaactgaatccccgccatgcccactgtgtcaccctataccacaacggtttcacctgcgaagcagattcccttggcagttgcggctacgtatacatcgccatttatcacactaaacgctaa

SEQ ID NO: 187223 - DNA, 222 bp, Klebsiella oxytoca
atgaaaattatcagtaaacgccgggcgatgacgatttaccgtcagcatccggcctcacgcatttttcgatactgcaccggcagataccagtggcacggcagtgtctgtcattacaccggaaaggtagttcctgacattcccggcgtcctggcggtatacgccgaacgccgccaggaccgcagcggaccgtatgcctgcctgatgagtattaccctgaactga

SEQ ID NO: 187224 - DNA, 483 bp, Klebsiella oxytoca
atgatggaacagtcaatttccccactggctccggtactcccactgaccgcacaacgcacggtaaaacgcgccttaacgctgcttgaccgacacctgcgcgaaacaggcgtagcattcacctccactcaggctgcccgtgactggctgaaactgaaaatggcggggctggagcgtgaagagtttatggtgatgtatttgaaccagcaaaaccagttgattgcccatgaaaccctgtttgtcggttctattagcagtaccgaggtacatccccgtgaggtagtcaaacgcgccctgtacttcaatgcggcagcagtgatactggcgcataaccacccttccggcgacaccactcccagccaggcagataagaccataacgcagcgtctggtgcaggcgcttcagctcgttggtatccgtgtacctgaccatctcatcgtcggtggcacgcagatattgtcgttcgctgaacacggtctgttttga

SEQ ID NO: 187225 - DNA, 459 bp, Klebsiella oxytoca
atgacgacaaaaacgcaatgcgaattgatgtccgcaaatgaacctcaatttgacctcactgtaacaccagtacctgacgaacagcgcctcgatttctggccgctgtactttggcgctatcccgcaatggataacgctggaaccccgtattttcgcctggatggaacgcttttgtgatgagtacagcggtggtatctggtccttttatacgctcagcaatggcagcgcgtttatggcccctgatgctgacgatggtgagaaatggcatctgttcaacagcatgaacggcaatgatgcggaaatgagcgtggaagccgcaggtatcgctgtctgcctgattgaatacagccatcacgcctgtcgcaccgaatgcgaggtcatgacggagcactattaccgcctgcgggattacgccctgcagcaccctgagtccagcgccattatgcgcataattgattaa

SEQ ID NO: 187226 - DNA, 360 bp, Klebsiella oxytoca
atgtctgaatctcacatgcttccaccgagaccttttacccgacagcaggccgaagcggttacccgccggtatcaaaacatcgctattgaagatgaccagcgcagtcacttccgcctggtggttcgcgactctgaaggtcgaatgatctggcgggcgtggtgctttgaaccggatgccggtgaagggcttaaccgttatatccgcaagtcaggcatcctcagagcatcctcctcctgcccccccattcatcattcctgtatgtcctttatttcccatacgccagccatcgttgctggcgttttattgacggagaatatccatgacgacaaaaacgcaatgcgaattgatgtccgcaaatga

SEQ ID NO: 187227 - DNA, 864 bp, Klebsiella oxytoca
atgaaaaaatatgagggtctgcagtcaatgcagcaatcgctttccggtctaccactctgggcatcagagcgtattctgcagcagataaaccagcttactcactacgagccaataatcggcattatgggtaaaacaggggtggggaagtcatcgctgtgcaatgccctgtttgccggtgaggtgtcgccggtcagcaatgtggcggcctgtacccgttcccccctgcgctttcgtttggcggttggagagcgctttatgactattgtggacttgcctggtgtaggtgaaagcgaaagtcgtgatacggaatacgctgtactttatcgcaagctacttcctcgactcgacctggtactgtggcttattaaggctgatgaccgggcgctggcggtggatgagcatttttatcgccgggtaattggtgaggcatatcagcataaggtgctgtttgttatcagccagtcagataaggtcgaacccaccagcggtggtgaaaagctgtctacaaagcagaaacaaaatatcaatcgcaaaatctgtctattgcatgagttattccaacctgtaaaccctgtctgtgcggtgtcggtacgtttgcagtgggggctgcgggttatggctgaacggatgattcgttgcctgccacgggaggccagcagcccggtggcagtacagcttagtgctccacttcgaaccgatgctgttaataaaaaagcccgtgacgattttggtgaaacgatcggctcggtactggacacagtaagttccctgcccctcataccggccccggttcggactgccatccagtctgtacgcgacatcgtggtatcagtcgctcgtgcagtctggaatttcttcttctga

SEQ ID NO: 187228 - DNA, 1107 bp, Klebsiella oxytoca
gtgcttttcgatatagagaaaatcaaagagctgcttcgtgaatttcccggccttacaggtaagcagatagctaaaaaacttgggtacactgataaatctgccctgaattcttttttatacagccatgttgaaggtctaaaacaggccgaatggaaatggtatgtagacgatgaatacattttggttctggatactggcacttggatagatgaaaacatttttgaagctaacttatccgctgcaggatgtctgctgggcgcttcagctagcaggtgtaggataagctttccggagggctgtaggattttactggcggctggagcgagagtgattgctcttgcaaatcaggctgcctatttggggaaggttgttgaactggatttcagtaaatgcccttcgacaaaaaactttttggaccgattaggtttttttgaacatttgcattcggatgtgagggtgcggcctgagaggcccacggaatcaagggcgacacgctaccggggcaacagtgacaatctggttgagatagcatccattaatctggatgattttgataattctataccggtaaaactgaccaagcaatttgcattccatgccggtcaggaatattacatggctgtgtttacaattttctctgagctgattggaaatgttcgggatcacagcgagacccctattcctgggtttgctgcattgcagttatataaggggaagcgacgtcatatccagactgtaatctctgatagcggtttagggatagcaacaaccttgaaacgcaatctcgagacattttatcctgaaattttcaaggcgcttgagtcttcaactgaagattctgatgtctttctggttactcaagccttaaaaaagggagggctgagtcagtttggctccgcacctgataaggccgctcgtgggctgggattgaaacgctctcaagaattggctgcaagatacgacgcgattgttcttgtccggcaaccaaacttcgagctgaaaatcctatataaggacggtgaacttatcgatattgccatgaaaaaggggctagccttgattaagggcactcaagtttgttttgattttttcttaggctatgattaa

SEQ ID NO: 187229 - DNA, 549 bp, Klebsiella oxytoca
atgaaagtcaaactgctagaactaactgaaaacaataaccatccatttggaaatgttttggggcgggaggtgtttaagcgacttcaaaatgttgttgactcaaaccctggctgcaagtcatttgaaatttcacttgaaggtattgttgctaccgattcctcttttccacgggaaagtgtaattgcacttgcaaaacagctttgtggagaaaagtacttctttatcaccgatgtcagctctgcagatctcatcgataactgggattatgctgcaactgcaaagcagcaatctttaatagtggtgttggctgacgaagtgaggatcataggccccgaagcgaaaagttcgacaaaagctttgctcgatgtcgtgttaagccttaatggtgccactaccgcaaatgtcgctaagtctctcaacatatctgttcagaacgcgagtacaaggcttaaaaagcttgttagtgaaggagtgatcatgcgttcggaggtgtcttcaccaacaggtggtattgagtttatctacacaggtccaaatatttccgattaa

SEQ ID NO: 187230 - DNA, 1089 bp, Klebsiella oxytoca
atgcaagatattcaatcacaacatcaccaccgccgcttcattgaggtggcagacgaaactctcttgttccgtcaggtagttatggaggacagcactcctaacggctcacagatttcagctgcatcggggtttaaacctgatcaaatgcctgttgtgcttatgctacttccgaatggttctctggaagatatccgccctgacgaagttgtggatcttagttctgaggttcgtcgctttattgttgttgaatcagatcgcacctatttttttacaattgatggcgcacgtctggaatggccatgtcgtttcattaccggctatagcattcgtcagcttggagacataggcgataataaaaaattgttactggagcgtgaggacgaagctgatcttgaagtccagaatgatcagattatagatcttgatgccgatgggattgaacgtttcatcagcaggaaggcaacgtggaaactgaatattcagggtaaggaatttacatttgatactccgactgttgttatccgcgatgccgtcatccgtgcagggctgaaccccaatcaggcatggcatatttttctcaaagttgaaggacagccaaaggttgagaagaatattgatgatgtcatcgatttgcgtacgcctggaattgagaagctgcgtctcacgccgaaggatgtgaacaatggtgaagagcccagggctactcgtcgtgatttcagtttgcggcctgaagatgagcattatcttgatgaaatgggatattgttgggaaacacgccaggtcggaaatgctcgctggctgattatccacgattatgaattaccggatgggtataaccatcatcaggttaatctggcactgttaataacttcaggttatcccgtaaacatgctggatatgttttacgtatatccaccactcgcacgggtcaatggcgtcaatattccggcaacggaagcgacggtagctattgatagtgtcgcttatcagcgctggtcccgccatcgctcatggaatcctgaaatcgattcagttatctctcaactggcgatggctgatggttgtctgcaaaaggaggtaggccaatga

SEQ ID NO: 187231 - DNA, 1371 bp, Klebsiella oxytoca
atgagcagtggaaatcgtctgattttgacgcaggaactgcatactatgctccagaaacatctattccctggagacggaaaagaggctgctgcaatcctaatttgtaaccgctacgagggggggcgactgaaactcttggccaaggaactaatccttgttccgtatgaagagtgcaaatctaggacaagtgattttattgcttggccgggtaactacctagaaaaggccattgatgttgcagaagaaaaatcaatgtcgattatccttatacattcgcatcccggtggtttccttgtattctcggatacggacgattcaagtgatatgcagactatgcaatcgctttttcagggagttgacgccattcatggttcagcgatcatgattcatagtggcgaaatgcgagcccggctctatcgagaggggaagttcgctgagaatgtggaactcgtaactgtagcgggtgatgatattcactattggtgggatgataaagctgagcagcagctaaagccgattgcttttacatcgggaatgacggatacctttcagaagctaaccgcagccatcattggcgtatctggtacaggatcgattgtggctgagcaggtcgcaaggctgggttttggcgaaattctattaattgatcacgaccatatagagaagaaaaatctgaacaggatcctcaactctacccttaaggatgcgttgagtcaccgcccgaaggtagatatgtttgcggaagctattcggtgtatccgggggaaagatatttcccgccctattaataatactattttttcgcgagaggctgttcttgccgcagcaaatgcagacgtgcttttttgctgcgttgatacatatttagcacgaatgatcgcagatcgcattgcttcttcttttttaattccacttctagatgtaggggtaaaaataccgactcatgtggatcccgacgatggacgaaaaattacggacgtaatggggcggatagactatgtaaaacccggcggctcaaccttatctgatcgtcatgtatacacgcctgagcttatatatagggaaaacctgaatgcagaggaatatgaagatcagctcgaaagaggttacataacaggggttgaggaagaagctccatctgttatcactcttaacatgcgagccgcatcagcgtgtgtatcagaatttattgccaggtgtttcccttttcgtgaataccctaacaagcgctttacccggacattttttagccttgctggtgctgaagaggactatatagatgaaagtgcgataacgcaggcacttaatacccgcctagcggtagggtgtgaagagccccttttaggacttcctgaactgggagataaataa

SEQ ID NO: 187232 - DNA, 801 bp, Klebsiella oxytoca
atgaatagtaacctgaccaagatatgttaccgtggtgagactggtgaaagtgatttaagaacattgatacttggcgaaattctatatatttcattgagagatgttttagtcactctcaataaagaaaatagagaaatcaacgctgattatacagtaaaatcgatgacaggaattatcagagcacaattgcaagctcttgattctgatgaatatatcactacagacgttgaaaacagtgcatttgaaggccaaaaagaaattttcgtaacacagcctggtttgtatcgtgttatgtctagtgaccgaagtgctgccggtaaacgttttcagaagtggctgtttcatgaggtcataccatcattgaccaagcatggagtctacccacctccgccagaggcaaaaggttctgccctagcacaaatggcagaaatacttgctcaaaattcacgagcacttgctgatgctatccatagacatgaaaaattggcagaagatgtctcacaagtaaaaaatcaggttgctgatgttgaaaaccgcttggggttgctggaatctggaccactacttgcaactgaaaacatgcaatcccttgttagtcggcttgctttcttagaaatggatatggaagaaaagcatttcaccgagatattagcttggtgtgaaaatctttctattagaaataacaggcaggtggttcgcagggattgtagagagaactcactttttacaacgcagacaattgacgaggcgatagctattatgactgcaagtggaaaaatcatgccaaatcaaatcatctaa

SEQ ID NO: 187233 - DNA, 690 bp, Klebsiella oxytoca
atggaatcacaatattcacttaccaacgaagaaatcgatgacttggtagaaatagcctccagaaagtatagatcacccattgacctcaatattctcaattcactgcttgaaatggtctacgacacgctggagcagcataaccggatactggctattcgtactgacactaggttcgctctgtctcatgcaccaggagaacctgatttaccgctgtgcttccagcgagatgatgcgcaggccatcactcgcttcttcgagtcactgaaaagccagttacgggcagatcatcaccggtccaagagaccgggtaacccgacatttccatcttatgggtggtgcagggaacgtgatgcaagcgcacatccccattatcacctgatgttgttgtttaatgcagatgtatatgggtacctaggcaactaccaagaactcaatgctaaaaatatggcaacccgaatacagaaagcctggtctagtgctataggacttgctcacgaagattacgcagcattaactgaattcccaccaaatgctgtttacaggtttagccgattcgacgccttggatcgtagcccagtctactggggtttcctaattcgactggcgtatctggcgaaaaccaggaccaaggatacttatagcggttaccgcaactttggcacaagccagtatctacgcttaggtggatga

SEQ ID NO: 187234 - DNA, 1515 bp, Klebsiella oxytoca
atgtctaaaaaaaatagctcaacgcaaaataaagaacttggactaaagttccagacgcttcccacttttgcacaacggttaataagctacatacattataaaacaggagccgccgctgaacttattttaatagtgttacttggggtaatggcactttcctgccaggacaaatttgatattcagcttaaaaatgggagaacctttacatcactttatctgatgctattggcacgctcaggtagcaggaaatcaacggtattcaggctgttgatgggggaaatttatcaactggaaaaagagctgcgaaatgattttctgttaaaagagaaaattcataagcttaaactagtatcctgggaaaccgagctaaaagagcttaaaaaacaatttggcaaagctgttcgtcagaaggttgatgtaactgaggcacttgaggcgttggaggagtgccaaagaagaaaaccatctgtcccagaaagaaagtatcttactaaaaatgattcgacaagtgaggggcttagaaaggcattagcgctgggttctccatcattgatgctcggctctgatgaagccggtggggtgattgacagcaatctttttcgcaatatatcagtttttaactctctttggggagaagggagaatctctgacagcagagcatctcgtgacagctacgatgttgatgatgtccggctgaccgtattgctgttgttacagcctgaattgtttaacgactttataagtaagcaggggaaaaaattaagaaaatcaggattcttagcgcgtttattattgattgatctggagcaacttcctgaactatgcaacatccctgatgcgtgttcatggtctgatgaaccaggacttgatggttttttctctattctcattaagcatttgcaagacgggatagagcgtagagaaaaaaatgaagaacgtatctgtattactttatctgaagaggcgaaagcgtcatgggatacacaaagtaaacgaatcagggaactaatgcaaaaaggagaggagttgcatcactatgatgatttcgcctcaagaattatggaacaagctacgagaatcgcagcagtaatacaaatgtttattacacccgactcaccaataattaccaaggaaacgttaatgtcagctactaaaataacacaatggattattaatcaccttatcactaaggtcgatactacccgagaacctacaactgcagaaaaattggtatggttcatggaggagcatcttgttagtaatggttcttacgatttcaagaggaatgatatcattaaaaaaggtccatattcagtcaggcgttcagaaagtctgaattctgctttagaaaaacttgaatctgaaggaatagtacaactatttgaacgaggtggggttaattatgtcaaatttattggttccaaaatggaacctagtgaactagctgaaaagactaatatcccgttgttagattcaggaacagttgcaatgagtaaactacgtttacctgaataa

SEQ ID NO: 187235 - DNA, 138 bp, Klebsiella oxytoca
atgatccaacttttccgaagaaaagaaagcttggaacacaatcagttggatggcttgaatcagaaattgatgaatggttgttacatcgtagtcttattaattaattataaagaggagttagatagaatgtatgtctaa

SEQ ID NO: 187236 - DNA, 744 bp, Klebsiella oxytoca
atgatgaaagagcgggtctggaactccaagaagtttggtcccggaatattattgtattcatcatcttatttgaaggagcatagctacagtgactctcataaggactttccatcaaatgagaaaagcatcgagttagctaagcttattgaatgttattggagtacattggaggctgaacttctgagagataatgttgctgtcattattcctgaatatatctctatggatgagcttttcaaatttcatcttaggtatgcacagaagtgctataaatggggtgaattagttatatcagacaatgaggatgttgcatttgaagcatttaaaaaagcatctgagttatttgataaaagcatggggatggtttggtgtaagatctctgtagataaacaaactaaacttttatctaccaggaatagatcaggaagaaaaggtggggtaaaaaaatctgaaatgtatcgtcctattcaggaaaaactggtggaacttataaatgatttggctcctgaggaaggatggagaagtaaagctgcggcggtgaatgttctcattgaacctttgtggctatttatagaggagtcaaaattgaatgttaataagcaggataaaaaatatcgaatgccaactaccagtcaggaagccttagccgataccattttaaaatcgtggtctacaaatattgaaagtgtgaggcaggctttcgaggacactgtaagcagaaaaaaaagaactagtcagttgtaa

SEQ ID NO: 187237 - DNA, 210 bp, Klebsiella oxytoca
atgcgtctatggtctcgcctggttgaagacgttcttcttcaacccgcacgtgccacgttttgcaacgagtatgttgacacgtacattttccgacaggcagaaaattggctactccccaacgacgggcgcaaccttaacataattttagaatataaaacaataacagaatcgcgttattttaataaccaaatgataacgattttcatttga

SEQ ID NO: 187238 - DNA, 438 bp, Klebsiella oxytoca
atggctaaacgacgggctaatcatgtcctgctttttcccgtatcgttcttactttctgcctgcacggtagacgtcagccggtccgtgccttccgcttccactattaagcaaccatcgcagcaatgggcgattaagcttcagcgccagagctcggtggctaataacacgctgactgaaattaacgcacaagatctgctccccggcgatctccttttctcttccagcattggcgtgacgtccctggggattcgtgctcttagcacatcctccgttagccatgtcgctatctatatcggtgataaccaggttgcagaggcaaccggcgctggggtgcaggttgtgcctctccggcaagcgatgcagcatccggggacaaaaaaatgtggttttgttcggagtttgtcagcgatgccttcgcgaaggccggacacccgctga

SEQ ID NO: 187239 - DNA, 2160 bp, Klebsiella oxytoca
atgtcttctattgcgaataaaaagaatacacaagactccgatgaaatcgatctggggcgtataataggtgaactgattgatcaccgaaagcttattattactatatctgtatttttcacagctgtagcaattatatatgcattgtttgctactccggtatatcaggctgattcattaatacagattgaacagaaacaaggcaatgtacttttaaatgatctaagtcaaatgttgccggatagtcaaccacaatcagcacctgaaattattcttttacaatcaagaatgatattaggtaaaacagttgatgacttaaatttgcaagcaaaagttgagcagaacttttttccggtctttggtcagggatgggccagattgagtggtgaaaaaccagctaagattaatgttagtagattatatattgattctgtcaatgggaaaacgcctaaactaaatttaaccgttgtagataataaaaatttcaaggttgaaattgaagggaataacgcagtaataaatggtaaagttggaactttactaaatgatgaaggcatttctttacttgtcgataatatcgaagcaaaacctggtgacagcttcacaattacatacttaacaagactaaatgccatttctgatttgcaaaaaacctttacagtcaccgatcaaggtaagggctcaggaatactgaatttaaccttgaccggagaggaccagtctcgtacaactgatcttcttcgcagtataagtgcaaattatcttaatcaaaatatagctcgtcaggcagcgcaggatgagaaaagtttagaatttcttaataaacaattaccacaagtaagaatggaattggatcaagctgaggacaaactcaacgcatacaggcaacagaaagactccgttgatttaacaatggaagcgaagtcagtacttgaccagattgtaaatgttgacaatcaacttaacggattaacgtttagggaagcagagatatctcaactctatacaaaagaacatcctacttataaagctcttgcagagaaaagaagtactctattgcaagaacgcgctaaattaaataaacgtgtttcatcgatgcctgcaacacaacaagaagttttgcgcctgggacgtgatgtagagtctggtcgtgcagtatacatgcaactattaaatcgacagcaggaacttagtatcgcaaaatcaagtgccatcggttatgtgagaataatagatgatgctgttacagatcctaatcccataaaacctaaaaaaactttaatagtgataattgggttgtttttaggaatactaacctcagttggcatagtaattttacgcgtgtttttaagaaggggcattgaatcaccagagcaattagaagaacttggtataaatgtttatgcaagtgtaccagtttctgagtcactcgctaagatgaaagcaaagggaagaaaattccagcatgaagataaatcattgcttgcgcttgataacccagctgatttagcgatagaagctatacgtggtttacggacaagtctacattttgcaatgatggaagctcgcaataatgtgttaatgatttctggtgccagcccaaacgtgggtaaaacttttattagcactaacctttcagcaattattgcccaagcggggaaaaaaatactacttatcgatgccgatatgcgaaaaggatatgtacataagctatttaacgcaaataataataaaggcctgtctgatgttttatccgggaaaacggaagttcaggattctgtacagtgtatagaaagtgctggttttgattttatttcgagagggattgtccctcctaaccctgctgaattattaatgcataaaaacttttcggaattaattaattgggctggtgttaattatgatttggttattatcgatacacctccggtgttggctgtaacggatgccgcaattatcggtcgctatgtaggtacaactcttttagtcgcacgttttgaggaaaacacagctaaggaaattgatgttagtattaaacgttttgaacaaagcggtgtttcggttaaaggatgtatccttaatggggtagtcaaaaaagcgagtagctattatgggtatgggtataaccactatgggtattcatatacggatgaacaaaaataa

SEQ ID NO: 187240 - DNA, 132 bp, Klebsiella oxytoca
atgttactcggtcactggatggggcagaaggatataccagatccttatcgacaaggcaaagaggcctttgaatttgtttatcagttgattgagcaatcatgccagcaatgggctgaaaagctaagtagctaa

SEQ ID NO: 187241 - DNA, 1296 bp, Klebsiella oxytoca
atgacgcaatcatcatcgcgcgccggtaccttcggcgctattctccgcgtgaccagcggtaattttcttgagcaattcgacttttttctgttcggtttttacgccacctacatcgccagaacgttctttccggcggaaagtgagtttgcggcgttaatgctcaccttcgccgtgtttggttcgggcttcctgatgcgccctatcggggcgatagtgctgggggcctatatcgacagaatcgggcggcgtaaagggctgatggtgacgctggcaattatgggctgcgggacactgctgatagcactggtccccggctatcacgccatcggcgttctcgcccccattctggtattagtcggccgtctgctgcagggattctcggcgggcgtagagctcggcggcgtgtcggtctacctgtcggaaatcgccaccccggggaaaaaggggttctataccagctggcaatccgccagccagcaggtggctatcgtggtcgcggcgctgattggctacgcgctgaacgaaacgcttggccatgatgagatcgccgaatggggctggcgtatccccttctttattggttgtctgatcattccgctgatttttgtactgcggcgttcgctacaggaaaccgaagctttcctgcagcgtaaacatcgtcctgatacccgagaaatcctgagcacgattgtaaaaaactggcgcatcatctcggcgggcaccttactggtggcgatgaccacgaccactttttactttattaccgtttataccccaacctacgggagagccgtgctgcatctgagcgctcgcgatagcctgctggttaccatgctggtcggtatctctaactttatctggttaccgattggcggggcaatttctgacagaataggccgtcgtccggtgctgatgggcatcaccctgctggcgctgtttaccacctggccggtgatgcactggctcaccgccgcgccggattttacccgtatgacgctggttctgctctggttctcgtttttcttcggtatgtataacggcgcgatggtcgcggcgctgaccgaagtgatgccggtctacgtccgcaccgtgggcttttcgttagcctttagcctcgccaccgctatctttggcggcctgacgccggctatttccaccgcgctggtcgagatcaccggggataaaagctcgccgggctggtggctgatgtgcgctgcgctatgcggacttgccgcaaccgccatgctctttactcgcctgagccgcagctatcagccagcagaaataccccgctaa

SEQ ID NO: 187242 - DNA, 1221 bp, Klebsiella oxytoca
atgacagcaggcggacaggctcaaattggtaacgtcgatctcgtaaaacagctgaacagcgcggccgtttatcggctcatcgatcagcacggccccatctcgcgtatccagattgcggaacaaagccagcttgcccctgccagcgtaacgaaaattacgcgtcagcttattgaacgcgggctgatcaaagaagtcgatcagcaggcctccaccgggggccgccgcgctatctccatcgttgctgaaacccgtagcttccacgccatcggtgtacgcctgggccgctatgacgccaccctgacgctctatgatttgagcagcaaaacgcttgaagaagagcactacccgctgccggaaagaacccaggaaaccctggaacacgcgctgctaaatatcattgccgcctttatggagcgctgccagcgtaaaatccgcgaactgatcgccatctcggtgatcctgccgggactggtcgatccggaaagcggcgtcattcgctacatgccgcacatccaggttgaaaactggggtctggtcgaagcgctggaaaaaaagtttaaggtcacctgttttgtcggtcacgatatccgtagcctcgcgctggcggagcactacttcggtgcgagccacgactgcgaagactccattctggtgcgcgtacaccgcggaaccggcgcggggatcatctccaacgggcggatttttattggccgtaacggtaacgtcggcgaaatcggccatattcaggtcgaccccttaggcgagcgctgccactgcggtaacttcggttgtctggagaccgtcgccgccaacgcggcaattgaacatcgcgttcgtcatctgctggaacagggttatcagagcaaaatctccctcgatgactgtacgatcaaaacaatctgtaaagccgcgaataaaggcgatgcgctggcctgcgaggtgatcgagcacgttggccgtcatctgggtaaaactatcgccatcgccattaacctgtttaatccgcaaaaagtggtgattgccggtgagatcgtcgaagcggaaaaagtgctgttgccggctattgaaggctgcattaacacccaggcgctgaaggcatttcgtaaaaatctgccggtggtccgttctacgctcgatcatcgttctgccatcggcgcttttgctctggtcaagcgcgcgatgcttaacgggatcctgctccagcgtttgctggaaagctaa

SEQ ID NO: 187243 - DNA, 561 bp, Klebsiella oxytoca
atgaaaaaaacaattgtagctgtaatggttgctgcttcagcagttctgagtgctcaggctttcgcggcagggaacagttctcaactgacaattctcggcaacgtaaccgacactggtgaatcctgcaacgtgaccccatctgctcagattcagggcggctccttaactctggatgatgtaaaagcttctatactggaaggccagggcgttaactctccgtacatggcgctggctaaagatattgagtataaagttgaagactgccagaagggcgcgactgattacacaggtaacctgaacgttaccgttaccggtgactacatcagcggccaggatgacgtcctgacaaacaccgcagttaacccggcaaccaatgcagctgtaaccgtagtaaataccgacggttcacgcgttagcttcaccggtactaccgcaaaaactatcgcttacaccgcaggcactccatcatatctgcgttataaagcagcttatgttaaaactgctaatggcgtaaccgatggtgcagttaaaggtgttgctacctttactatcacctactaa

SEQ ID NO: 187244 - DNA, 693 bp, Klebsiella oxytoca
atgtttaagtcattatttaaaatagtggccgttatttctctttccgcaagctttgccgcccacagtggggttgtcgttgactctacccgtcacctttataaagaaggcacgcgagaaatcagcgccaatctggaaaataaagacaatatcccttacctggtcaagtcatgggttgaaccgcgtgaaggaagcgctacctcattttttatggtaaccccccccctgtttcggcttgaggctaagcagaaaaacaccgtccgtatttttcctaatgccaacattatcaatgcgccaaaagacagagagtccgtttattattttaacgtgatgtctataccaccaaccagcgatgcggataccgataaaaacagaatccagctggcggtacgccatagaatgcgtctgatctatcgcccttcatccatccaggatctctccataaaccaagaagctaaaaagctggaatggcgaaaagtcaacaacaaaatcacggtgaaaaatacaacgccgttttttatctatttcaaatctatcaaaattaatggcgttgaactgagtggtttcatcaataatattgatgcctttgcgactaaagaattttcgctaccagcaggcgcaaatggttctcaaatagagtggaaaatcgcaaccgacaacgggggcacgggtgctgcctactcggcatctctttaa

SEQ ID NO: 187245 - DNA, 2544 bp, Klebsiella oxytoca
atgtctattttaataaaaaaaagggatgaagttttttctggtgtgtcccgcacatttttcgttcttgtacctgcgctagcccttggttttagtaacaataccttggctcgcgatttttttgatcctgactttatcaaatcagtgggtcaaagcgatccttcctcaataccggatttatcattatacgcaacaaaagatgcacaggcgccaggaaaatatcgtatcgatgttgttttgaacaataatttgcaagagacaacagacgtacgcttcgttgaaagaaaagatccggcaaccggtgatttgaagttagtgccatgtttaagtattgctacattaaaaagttatgggttaagggctgaggcatttccaaacttaaccgaggacgctgacggctgcacaaataccagcgtaataccgaatttcaaaacagattttaactttaatactcaacagctgttggtatctatacctcaggccgcactttccaccgttgcacaaggttttgtccctccggaagagtatgatgagggtatcaacgcgttactgacaaactatcagttcagcacaggaaaggatgctgaggccgataatgaatactataacctcaacctgcagtcaggattgaacatcgggccatggcgtcttcgcaatctgagcacctggaataaatcagcgggtgtgaaaagcgactgggattcagtttatctttatgcccagcgcagcatcgtgccattaaagagtacgctggtaatgggggaaagctcatccctgtcgagcatttttgatagcgtgccttttacggggattcagctggcaacagacgaggatatgatcccggaaagcctacgtggctttgcgcccattgtgcgcggtatcgccagaacgaacgctcgcgtcgttatcaagcagaatggttatcaaatttaccaggcctttgtcgctccaggggcttttgaaataaccgatctctactctaccggcggtaacggcgacctgtacgttaccgttgaagaagccgatggctcgcgccaaaacttcgtcgttccgtacgcttctctgccgctgatgctcagagaaggccagatggagtatgaaattaccagcggtaaatatcgcccctatgatgataacgttgatgagaaaccatttactcaggctaccatcagctatggtgcattgagtaatacaactttctacaccggccttcaggctgcatcgaactatcaggcgctcgcgctcggcgttgggcagaacctgggggatattggcgcgctttcagccgacgttactgaagcctggtcgaaaaagaaagatacggacaaaacatccggtcagtcctggcgcatccgttacggcaaaaatattctcgaaaccgggacgaatatttccgtcgccggctatcgctactctacatccggctttaatacgctgacagatgtgatgaatacctacaataaccgctatggcagttatacctctcacgcaattcgtaaccgaaccaatattaccgtcagccaaagcctggggtctgggttgggtagcctttccgtatccggtgtatttgaagactactgggatagcaatcgacgtaacaattctttgaacattggctataacggtgggttccgtcgctttaactattacgcgggctacagctacagtcgttactcgtgggggagtaatagctcaagccgtaccgtagaggacgatcatgtctttacccttaacatcaccgtaccgttaagcgactggctaccgaaaacctacgcaacctataacgtcacgaacagtaatccgggttctaccgatcaatttgtctccctgagcggtacggcgctcgataacgataatctggactggagcgtacagcagggttatagcaatcgggaagatgccagcggcggcgtatacggtaactaccgtggctccatgggttcggtgaacggcggctacagttacggcaaacatagtcagttggttaactatggaatgagcggtggcgtattagtccatgctgacggtttgaccttaggccaggaaatgtcagagacctcagtattggttaaagcacccggcctgagccacgtccgcctggagaacgatgagactatagagacggattatcgtggttatgcaattcttccgtacgtaacgccgtatcatcgtaccagcgtaacgctggatagcacatctcttagcgataacatggagttgccgagcacgacccagaaagtcgtaccgacgcgtgccgccatcgcaagagcgaattttgaaggcaacattggccgccgtgcattcctgatactgaaaagaacctcaggagattatgtcccttatggtgcaacggtaaccttgacgctcgataaaaatgcccaggccagcattgtttcagacggcggtatggtctacatgtcgggcttaaaagatagtggagaggtttatgctcgttggggaacaaaaaacaatcaacagtgtaaggcatcttatctgttaggtgctgtagctgaagggattagccaagccactgctgtttgccgttaa

SEQ ID NO: 187246 - DNA, 1056 bp, Klebsiella oxytoca
atgaaaactttaatcttttttattagtatgctttgcttgtgtcttaaggctcaagctgactgtacctatagccctggcgctagcggcggcggcggcggcggcggcggcggcgtaacggttaatttcactggcgttaaaattttagctgatgatacgctacctaacggctcaatactggcagcagaaacaagaggtggtaacgtcaccgatcttaaaacgttcagaagctgtgccgctaatgatatttttgttattagaagtacgaatgatactgttgctaatgttaaaggaattcaaaatggtactgtatatgaaacaggcattcctggaattggctatcagatctctgatataacaaatggaacggtgctgcgtcccgttcccgcaaacttcaatgatccgattcccgcatctagtcactattactctaaaaccagtgtacctgggcaagtacgtgtatggctagtaaagacaggaaaaatcacacaaactacgctttctaactatattacagcttactttttagctggtgctcagaacgcacaaacccagggcacaggaaaccctaatagttctcaattgctgagagtaaatattaaccttggtggtattcagtataaaaatacaacatgtaatattacgcccgaaggcggtaatactgtaaggttacaatctatagaagcatctcagcttaaagccctaagtagagggagcgctacaggaaagcaaaaagacattaagctaaaaatagattgcccaacatcagaagtcgggacaaagtatatgtactggtttaaccccattaccgaaaactcgacaaccgaagctggcgttctaaaaaataatgctccgggagggcctggcgaagtcggcattatcatcaagcaagacaacaaagctattaaattttatgataccgacacatatagtatagctagtgtaaaacaaactcagtggatgacgcttattgctgattattataaattttctgacaacataaaaattggaactggtgaggtgatggggatatttgaaataatactccaggaaaaataa

SEQ ID NO: 187247 - DNA, 375 bp, Klebsiella oxytoca
atgaaagaactgactattgtcgaaatgaatgatgtttcaggtgcaggtattctgcagattattaatggaacacaagatcttattacaggcgcagtagatactgttatcggcggggtacttggtgcggttgtcggctcctcaaccggcgggcttcagggtggcgttactggtagtggcgcaggcggtgggttgttaggttttggtttaattacaatcgccgttggatctatctggggcggaattcatggtgccgtatacggcgcactggcaggcgcattcaacggcgctgaagtagtagatcaatattcacagcgtattatcgatggtgtgttgaatggtactggcggtgcttataagcccaatagctggttttaa

SEQ ID NO: 187248 - DNA, 366 bp, Klebsiella oxytoca
atgaaagaattaacttacaatgaaatgaatgatgtctctggtgccggtattgcggcatttcttgctggccagcaaggcgctgtctccgcgctggttgatgctgttgcagccggggtttatggcttcgctgtcttttcagcattaggtggtttgcagggtggtgtaaccggtaacagtaaaggcggcggtatgctcggtttcggtgttatttcaaccgcagtcggttctatctggggtgcaatcgagggcggtatttggggcgcattaattggtgcttataatggtaccgagtatatcaacaccattgctcttcagggcgctgatggcgtcattgatggtaccagcggtggtttcagaccatcctga

SEQ ID NO: 187249 - DNA, 1287 bp, Klebsiella oxytoca
atgagaaataaactctatcgcaaggaagcgattgaacataaaaaaaaccactggaaaggaaaagcattattactcgccggaatgcccgcgtggctcattctattaacctcattgttttttttatttatattaattgtaacgcttcgagtctgtagctacacgcagcgtattgatgtgcgcggtgaggtaatcacccttcctcactcaattaacgtcttcgcaccacagcaaggttttgtcgtcaaaaaacatgttaatattggggatatcgtaaagaaaggtactcctttatacgaaatagatgtttcacgttccaccgtgaatggcaatgtcactgatacgatgtcagcggttattactgaaaaaatcgccaatgctgaagaaattatcgcgaaaacgctgataaataaagaagagacattagacgcattgaacactcaggtgaatcaatactctacttcgttaaaagaaacgaccatcatgctggccaatgctaatgctggtctaaaaaaaatgaaagagaacctttcaagttatgatcagtatctcaaacagggtttaatcactaaagatcagtataattaccaacattctctttatttccaacagcagagcacctatcagtcgctgatcagccaaagaatgcagctggaatctcagttgactcaaattaaaagcgacatagtgactaaagctgcagattttgacaaccagatttccagtcaaaaaaaccaaatcaatgactttaaaaatcaacgcgtcgaatcaaatgcaaatggtaatctcgtcattaaagcaacctctgatggtaaagtcgaatcggtagcggtaaccgctggacaaatggttgataaaggaagtagtctcgcacaaattaaaccaacgggtaatatcgaatatttcttagtattgtggctgccaaacaatgcaataccctatgtcaagcccggagacacagttaatatacgttatgatgcattcccatcggataagttcggccaattcccagggaaagtaatatcgatatcttcggtgccagcttctcgccaggaaatgtctgaatatactaatgttgcaacaggaaccaatcagcaagagctcgcactgtacaaaaccatagtcaagataaaaaataataaattcgcctacaatggaaagacacttgagttatctaatggcctaaaagcacaggctatcgtttttcttgaagagcgcccactttatatgtggatgtttacacctatctataagatttctcaaagtgtgagtggcccaatccatgactga

SEQ ID NO: 187250 - DNA, 855 bp, Klebsiella oxytoca
atgatactcaaaggactcaacactgcaccgcttaaacatggcgaacatctctgtctgatgatgttcaaaattaaggatactaacgataaacagcatataatgtatatgcaggtttcaaccttaattgactttttaatcatcttgcgttcacggatgctcaaagtttctcagcgtttgtctgataatggtgagatatataaagcaaaaatcatggccagcattgaatcactttcaatcaatacgcctgagattatgactaacgaagtcatgcaacccgatcccgtgaatttgattacaggcctggcgcccaagttcaaagatgaacaattttcacttattactatattacaaaatgaaaaagtaataacactagatatagatgatactcaagctgaattcattatcattgcgattcagcaagcatttaatacgattcaagataatgaaactatgctgctcataggttcattactcgatttcatcttaatttattctgttgatttaacaaatcttgaatacttaaattacagtgaagttaatcacgaagtctggaaaaagcagatttactcagattatgtgagtgttgtttattgttttgaaaatgagcagggaatgaaaaacctcgcgggcgcagtaattaaagttaatacatcatcagccccccaggatatagaaaagattgctcagaaagttgctaaactgacaccgagatttaaagcaattcaggaaaaataccccctatgcagagcttactatgaagtcatttcatgccaggcggagcaaaaattaacgcgagaggagtgtcttaaccatttgcatgccttttgtcttaaagtccaaaccaggctcagctaa

SEQ ID NO: 187251 - DNA, 840 bp, Klebsiella oxytoca
atgccattagtaaacggtaatatcctgctcgatcgtatccgtgaaaaacgtgtcctggctggtgctttcaacaccactaacctggaaaccactatttcgattctggacgcgattgagcgttcaggattgcctaactttattcagatagcaccgacaaacgcaaaactgtcgggttatgactatatctatgaaatcgtgcgtaaacgcgctgcgaccatggatgtgccggtcagtctccatcttgatcatggtaaagagctggatgatgttaagcgagctgttcgtgcaggcttcacctcagtgatgattgacggtgcagagttgccgtatgaagaaaatattgcgtttactaaagaagctgtagatttctgtaaatcgtttggcgtacctgtagaagcggaacttggcgcgattctgggtaaagaagatgaccacgtcagtgaggctgactgtaagacggatgtcaatcaggtgcgtcgttttgtggaagagactggatgtagcatgctggcagtttccgtcggcaacgttcacggccttgaagatattccgcgcattgacatccctttattacaagcgatcgctaaagtatgtccgtgtccgctggttattcatggagggtccgggatcgatgaagctatcatccgcagttttgtgaactataacgtcgtgaaacttaatattgccagcgacttgcgtaaggcatttattactactgtcggccaggcatggactaaaaataacaatgaagcaaacttggcaaaagtaatgtcgggagcgaaagatgcggtggaagctgacgtctatagtaaaattctgatgatgaacaaggtatcctga

SEQ ID NO: 187252 - DNA, 1371 bp, Klebsiella oxytoca
atgatacttactaccccagataataacttaagcgaaggtttcaccgacgacttagatttattcaaaagaaaaccattatttgagcaaataatgagagttattctccaggcaccagatgaaaacttagtgttagcgttagaggataaatgggggaacggcaaatcaacatttgtaaaaatgatgacgtcagaaataaaattgaaccatgaagatcttaatgttatttatttcgacgcttacgaaagcgattatcaatcagacccattcatatcattatcttcagtgatatatgaaatggtcgaaaatgaaaagaaactgacctcaaaatttggcgaaaagcttttaattgcaagcaaaaaaatcggtctctctgtgctttcccatacagcaaaatttgctatctctaccgcaacagcaaacctcttaaccgccactacaattgaacaggcatcgggagcactagcagagtcattttctaaccctatagaggagtatatcgctgacaaaataaaatcagcaaaaaatgaaaaaaacaatataattcattttaaagaaacactggaagaaattcacacaaccactcagaagaaaaccctcatcattattgacgaacttgatagagcaaggcctgattatgcattggacctgcttgaaaaaatcaagcatctattttctgtgaaaggttttatttttctccttgtagttaatcgtgagcagttcgaaaaaagtattgagtgccgttacggacaaattgattcaaggctatatcttaataaattcatacattattggtttactttgccaaaattgactcgaactaccgaagatgtgaggaatggtttttatcagtccacactagaaacatacttactctcaattgatgcgaagcaaaaattattatctcatgggggagcacttgtaaaaacgttggctatgttattagaagttaatggttgttcacttagggaagctgaaagatgctattcagtgctctctgtcactgataacagacatatgatacgtgaattgagcggtaaaaacttccaggtttcactagcattaatatgttatttaaaggtatgcaatccgaagcttctagaggatttaatttataagagtatcacgactgaaaacatgttggaaaacctacacattaagcagcatgaaatcgatacagatgaaaatatttataaattaaactctattattaactaccatctcctgagtgattctgaaatgagaaaaagaagagagaactcacaacctaaagatttattacttcaagagatagaaggcagccgaaacgaacgaattgaatacattcaaaatatatataactcattcaataatatgcgcatttctaattattag

SEQ ID NO: 187253 - DNA, 1260 bp, Klebsiella oxytoca
atggttgcaccggggttgctgttgactgcaacccatgtacttgatgaactacgggcttcgggaaatcatccgatattcctgacattcttgcctacaggtgcaaggggatggcttgctaaagaaagtcggaacgcaatgcgcgagagtaagtttgaggaaggtgaagcaaacccatcagacctaactttagtgagctgcacgctaaactcggatgcattggctgattacccgcttaacctatggactttaagggttgggttgccactcgttggagagcgtttgtgggcatttggatttaggcatggtcatgttgaagatgatgtagcctccgtgagtccgatggtctcgtctgggctggtaactgccgcgtttcctcaaggacgtggtgagcgaatgcctgcaccatgtatcgaggtagaaatggacactatgggagggatgagcggaggcccggttgttgactcggatgggaacgtcattggtgtggtgtcatcttcatttgatggtggaccatcttacgttacgcttatttgggatgctctaaattatcgaattggagggacggttccagcgctaacgaagtatcaagatgttagtcttttaactgcaaaggcaatggggctttctagaattaaaggcagtattgagcgcaagccttggggggatatcgtcttcacgatgtctgaagatgagatggaattcatgaaattatcatcggatccatcgaccattacaacatccaataaattcctgaaagatgaacaattagaagaattcattgataaatggggagacgatctagagcatgcagcatctgaagctgcaattgaatgtctcgagagcgcatcagactctcctatccaaagatttttaggggcggttggggttcctctgaaatgtattaaaaccatccagaatttttcagctaccgactttgaaggtgttgaggatccggagatatactcaagcgagcaattaaatgatgaaaatatcaagctcggatattattttgagctactgagcgtagtgtgggggatccaggtcttaaaagaaaactatcatgctcacaaaatggacttcgatagccacttttataatcaagagttaaaagatgaaatggtacatatggaggctttccaacggtgcctttttaaagctgatgtgattttcaacccagaaaaagaagagtttactgatataaaaatcgtctggatgggtattcggataccaaacaagagagtacaaaataatactgaatga

SEQ ID NO: 187254 - DNA, 354 bp, Klebsiella oxytoca
atgtcaggaacagtacagattgagtcgttcaacgcagaatttctgaccaaagagaaactgcacgacctgattttttaccggaaaagttttgatatcacgaatgttactgacatcagtgaaaccgtcaaaagagtggagtatgcgattgaacatcagcagaagaaattaacctgccgagtatacaccgaatacagaagcactgcggtggcaggctctctgtggtcaccaacagcacttctgggagcggtgagcgccgccgcaatcggtgtccataatctggcgacatggaacccggactatgaaattggtaagaattacgtcaaaagaaccctatccgtaaggtataaaaagtaa

SEQ ID NO: 187255 - DNA, 144 bp, Klebsiella oxytoca; identical to SEQ ID NO: 106709

SEQ ID NO: 187256 - DNA, 1602 bp, Klebsiella oxytoca; identical to SEQ ID NO: 106710

SEQ ID NO: 187257 - DNA, 594 bp, Klebsiella oxytoca
atggtgtattacagttctgaaataatatcgtcaacccccccttatgagaaaatagcccccaaactatcatttcttaatgatattgattacttagaccgtgatgcttttctaatcgatatgtttacgtacgaaaattggtcttcagcagtgtggacatatgtatttcgtcgagaattagcaattcattctcaggctatttttacacagcgtgttgcgcatgaggaccatctatttacattgagactggtcggcggggctgagaaaatatgcgttataaaagatgttttgtatttccaaaaaagaacggttggctctcttactaactcgaagaaaaatttagaatatatagcagagcgatttaaagcttttgaagaagcaactttagatatgcacggaaaatttaatagccgttctattcaaatgtatctggagtggtctttatactcttttttgttcctttgttttgaaaactttaaagttatacgtgtttggtttgtaacgccgaaggcgtatagaaaactatgggaatataaagtggatttaactagattaatcattgctcttctcaagaaaaaaatgcagagaatcttatga

SEQ ID NO: 187258 - DNA, 828 bp, Klebsiella oxytoca
atgataagcgttaacctaactacaactcatagtcgattagatttatgttcagctactttatggtccctattacatcaaagtttattacctgaaagaattaatctttggatctctcatgagccgttcatggctgataaaggaatttcgtcattaccgaattgggttaatgaacttaataatattcatgatattattcgagttcattatgtggataataatggtccttatcgaaaggttatccctgcattacgttcgtctactgatgaagatgtaattgtttatgtcgatgatgatgttatatatgctaatacttggttcgaaggtctggttcagacattcgaaaagtttgaacggaaatatgttgtagcttctcgtgtcagagttaaggtatttaactttttcggtaagagacaaagttataacatgttccatgtttgtgccgagcagaaactatttgctactaactttattgttactggggttggtggttgtattttaatgaggagacatataaaagatgagtttctcgagctagatgattttcgtgatctaattcctagaactgatgatatttggattagcaagataattgagttgtcaaactctcaggtatattgtgatcctggtttattaagttttgttcaagaaattgaacatactaataatgctttaaatcaaacgaataatacaatgtattctggggctttattagggaaactgtatcttaaggttaggaataaaatttttggctacttaggaaaacagctatcaaacaatgataaagctataaatatcgttgaaagtttttttgaggccagggataagtaa

SEQ ID NO: 187259 - DNA, 825 bp, Klebsiella oxytoca
atgagaattaaagtaatatctttgccgtttgataaagagcgtcgtttcaaaatagaaaaagatttcattgcgaatgacttggagtttactttttctgatgctatctatggcaaagagatccctaaggaaataaaggaaagtcttcctctggagtcatttttaaagcgtaaggataagaaaccaactgacggtgaaattggttgtacgttcagtcatataaatgtctataaaagttttttgcaatcatctgatgaatggatatgtatacttgaagatgatgctataattgataaagaattcaaaaaatttattcagtcattggattactccagccttaaacctggagctctatatattttaggcggccaagatggtttgaacaatcgccacaaagttgttcgtgcgatatcaggtaacagatatattggccagcaaaagttttatcgtattgtggccggtgaacaatatgtttttagaacatgttgctacatgttacatagaacgacagcacagaaaatgatttcagaatttcaagagtctttttacttggctgatgaatgggcttattttaaaagaaaaggtgttattgacgatatctttttggcttcatttattcaccaccctttagatttaagtgatagttggattgaaaaagaaaggattgttaaatatagcgatgctaaaattgatgtagagatatcatttttaaaaaaaatcaagcttcttctaaagaataaatatacaactcaaattaaaaagcatttaacaatggctttttggaatgttcgtaactatttagttgcgttatctaagtatcacttctga

SEQ ID NO: 187260 - DNA, 1431 bp, Klebsiella oxytoca
ttgataagtaaacataaaattaggagtgcagcactttggtctgcatttgaagccataagctctgctggtttaagtgtaatatcaattgtatttttagccaggatattaaagccagaagattatggccaaattgctgcagctcaaataattgcagcactacttgttttgatatttagtttgggtttatctgaggctgttatccaaaagaaaaatctatctattaatcatcaattaacagtattttggggatcatgtgcaagtgcgctcattgtactatgcatttgcttatctatcgctttctatttatattttttcggctcgagtaaagttgtaggtttagtattggtttttgaaggaattggtgctgctcttcaattgttagttattttaccaacagggctattattaaaaaatcttgatgtaagtgttttaacaaagcgaaatctaatttcgcgagttgttttttttattattgctattcccatggctctatatggctatggattatggagcattgtttttgcaaacctttttcaatatttaatagcgttcattttgattttctatcaatccagaaatattataccaagaggttactactttaatttcaggcagtttattgaactttgtagatttggtctttttgtaatgttggaaaacttactttggaccgttctcacacgggtttttagtttgcttatattaaattttcatggcactacccaattaggtatttataatatttcaactagacttacggatgcagtactaaatatccttaatactgttattggtcgaatggcgcttcccgttttttcgtcagttcaagatgaccgtcaaaaacttgcaagtttctttttcaatgctacgaagttattcaatatagtatcaatgcctgcttttgtaggtttggcctttacttgccaatactggattcctgttgtgttaggtacacaatgggttgaggcgataccaataatccaaattatcgccattatgaatgcaataatgttttcaaggatatttgtaagtcaacttatgaaggccgtgggagagtcaaggagatttctctttttatcatttacttcagcatttgtggctattgcggcagctttagttactgcaaagttttcactatacgagactatgcttgcatggtcttccatgagagtgttgattacaattcctcttgggatttatcttgtaaacaagatactacatataaacgcgtttgaacaattgcggccaattattttaccttttgttgtcacggccataatgatattcgtaatggtagcatttaggatattatcagagaggttcgtcctgtcgaatattatctcgataactttagaaattgcattgggtgtaattacatattcttttaccatggcctttttaattaaaactaagaaaataattcttcgttaa

SEQ ID NO: 187261 - DNA, 966 bp, Klebsiella oxytoca
atgttgcctaataaacaaatgttacaattgaaagataatctttcttttatccttaaatatattaaggataaaaacaatgtcatttttttagactatcctctatatcataatgtaggtgatcttttaattttccaaggaactcaaaagttctttaaagataacggtataaaagttaaaatgtataggtctgcacttgactataatatcgaagagctgaaaaaaaacattgatccacaaacgaccttgatctgccaaggtggcggtaactttggtgatttatatgatacccatcaaaacctccgtgttagtctagttactaatttcaaaaataatcgtatcatcatacttccgcaaacagctcatttctcaaatgaacaaaagttaaatcaaaacatagctatttttaaacagcactcggatgtcattctttttgccagagatgcaaaaacatttgaactttttcaaaagtttactgataaaactcatttgatgcctgatatggctcatcagttatatggtgaacttccaattagtgatgtaacaatctctcatccattatattttcttcgtgtagacaaagaaaaaaatgacatacagcagtctttaatgagtaataatgagatccaaagtatcgactgggaagattttgttacttctaatgattgccgatatgagcattttttaaataaatttgctcgctttgcaaataagataaacgcaggttttttaaagaactttgtttattcgctatggaataaacattcgtcgcgagtggttaataggagcgctagttttttttcccaatacggtcttataattacctcgcgcatgcatggccacattttatcttgtttagtaaacagaaagaatgaagttatagataattcttacggtaaaaatagtggttattttaatgaatggacgaagaaaacccgcttaggaactttattggttgaggacgaataa

SEQ ID NO: 187262 - DNA, 414 bp, Klebsiella oxytoca
atgaaacgctatcacgttatctctatctcagtgttgctaggtcttatcgctggtctttcagtgtcaaaggcggcagaagcaaacaccctcatttgtcataacgcaaccgtcattgttaagcctgtaggcgtgaccacaacaacaatgattgttagcacgtcgccgggtagggctgttctcacggcgggaggtgaatctatcccctttactatgaagcgcgtcattaatgacggctggaaagctgacgctgatagcaggttgtacgcaggaagttttaagtatggaaaagctacaggctctttacatctggcgtggcttgatggtggaaaagagatagatgctgtttacgaatatcaggacggggaaggaaaagaattaagcgtagtgggtacggggtgtgtaaatgaaaaatga

SEQ ID NO: 187263 - DNA, 456 bp, Klebsiella oxytoca
ttgcaaatcaaatgcaactttgaatttaaggttaagttaatgaaaaaattaatttttgtagctctcactgcttccctgttagcagggtgtgccccttcttacatgtcagaaaatgcttctacgctgcctgatgagttgttgtgtagccgtattggttatgcaaaggctgtaggtgatatggaagcctttagaggtggctatagcgagctatcccgccgtaagtctctaaacatcctgaatatcacgcaagaggattgcactaactacgctgaaatggggataggtgaggcgcaagaggtggagcgtaaaaaacaggcaatgtctcaggccattaatcagcaacagcaatttcaacagcagcaaaatctattgatgcaacagcagataaacgcaacaaaacctaattacacaacgtgtaacaggtttggaaatactgttaactgttccagttattaa

SEQ ID NO: 187264 - DNA, 252 bp, Klebsiella oxytoca
atgacaaatacaaccgtaattgaaaagaaatttgaagatttgcagactttagtgattggcctgatggcagagcttgacaaggcacaagcacgaatcacggttttagaaggttacgccgctgaatatgccgctgatattgaacagaccgaaaaagagtttatagagtttgtggaaagcctgaaagaacagattcagatgaccgatagcagtattaagcgtgagattatggaggcttttagcctgaatttttaa

SEQ ID NO: 187265 - DNA, 342 bp, Klebsiella oxytoca
atggcaaacattgaaaatttaatccccggtcaggggcggcccaaaggggcaaagaacaaaaagaccattgcgagacaggaagcctttgaaaagtatctacttgagaaaaacgctctctatcgcttgcttgatgagctttttaaccgtcttgaaaatgaccctaaagcagtacgcacagccgacattatcaacgccttgcgctggattgcaccctatgagcttaaaactattgcagagcaggaagcaagcgagcgcgtagataagattttaggcagtgccttagagcctcagcagatgaaagcagaaatcattgatttcttcgggcttaaacaggttgcgtaa

SEQ ID NO: 187266 - DNA, 1566 bp, Klebsiella oxytoca
atggattgtgaactgttatccaatctggtgagtcttgataaccttaatagcctttcacctgaaaagattcaagagctttatgagcttatccagccttaccgcacttatcagaagtataaccgcattgaatttatcaatccttttgattatcaagagaagttttttaaagcgggtaagacgtttaaacatcgctacttatcagcggctaaccgtattggtaagacgtttggaggggctattgagtttgcttatcacttaaccgggcgttacccggaagggtggcaaggtcgagttattgagggttccgggcgtgtgtattggtgcattggtcttaatctcactatggttactgatattcaacaaaaagaactattaggaactaacaacataggtttgattgaggaaatcggcacaggtgctatccctcgtgaatgtatcgagattaaaggcggtttagagaaagacggcccacgatgcgtaaaaattcgcatcaagcacaaagacggcggtttaaatgagcttgctttctttggctctactgatcctgatattttgatggggcgtaaggtggctggatgttggttagatgaggaaagcccgtattctaacgaaatctataaccagtgcattgcacgtatcgcaaacggcattagacccggtgaggatggatttatattcatcactgcaacaccagagcaaggcgaaacgccgctatacatgaagtttgcagcagacaaaaccgggttactctacattcagcgtgttacgtggtgggattctccgctattcacagaggaacagattaacggcctcttagcggctcttgatgagcatgaaagagatcttaggtctaaaggtattccggcagtaggtagaggcgcggtattcaagattccagatgatgaaatcaaggtaacagacgttaacccgctatcacattggcaaatcgtacatagcgtagattgggggcatgttaaagaccctacagttattgctactggtgtgcatgatgttgataacgatattttttacctaatcaatattgattatttagatgaatcagaggaagcgcgtagccctgctaacgtcgctaagatcattctaagcggcccttatccgggagcgcctgttatcgtcccccatgatagcggcatcaaatcagaggcgtcagaaagcaacggtaagctgttacagcgcttaggcgttaacgttcctccagatcctttctttaatcccgtagatacgcagctaagaaacatcaagttaggacagaaatcacgctcaggcttgagcattgaaacaggtctaagcgaaatgcgttacttgatgagtacaggacaatacaaagtagctgattgttgtgatcattggtttagagaaaaacatagttactcatacagctataacgagcgtacacgaacgctaggctatgcgggtgctgatcattgcatagatgcaagccgctataacgttatgtcactggtagcttgtaggggcgttacagtcgcagaggcaacacagccagcaggttacgcacctattgaggatttaccattcaccctataa

SEQ ID NO: 187267 - DNA, 2151 bp, Klebsiella oxytoca
ttgaaaaaactaactgaagaactaaaagagaaaattttaacccattgtgaacagagtaaggcaagtgcagaaggcccgcgcattgagtacctttcaaaatgggtagaagcaaacaagtataaaaatcttgagctacctactacaacctttgtaggtgaaaacctgccaaagaatattaccccatacgttgagccagtgttacgcgagactatcaaagaggctttacctcagttgctggacagtttcaccagtgaccgccgattagctgttatctttcgttcccgtggttggaacaataaccaaaaacgtaacgagcttatcactaacaacattaataaaatctttttggatgagcaagacggttacggcctgattgagaaaaccattaacgaggctcttaacgctggtagcgcatttaacaaggtgtttgtagatgagaaaacttatcacgaacaggcaaccgctagcgagtgggtagagctaacagaatttatgtcaatgctttctgatggttggactattgaccctcccgcctcttttgccactgataagaaaggtgatgttaaaggttttgaatggaaaacacagactaacagctttacagacccacagacaggaaagaaagcaagccaatctctgttaatggttaagggttctattcctctcatcaagaaagagacacacatcaattgtgagtttatcgagcctaaagatttatggtttgacacgacaaacggcgatgatttcagcaagtctcgttatatgtgccagcgcattttaactacagttggtgaggcagagcttaaaggctatgacaaagacaagttagcagaagcctctatagatgataaagggctttatcttgataactactcaggcacagagggcgatttctttgataacaacagcgtagacgagaaagagcgaaaaattaacctgtatgagcattacatctactcaagtctacttgataacaaaggtgagtctaaaaagtatcaggttattgcaactcataacgatattttagaggttaatgaggttgctttcttcccgtttgtacactgtaagaaagaaattgtgattggtgagttttacgggcgcggcttctttgatgatgctaaaccgtatcagatcgcactgactaagaaagcacgacaggcagagactagcgcagaccgtcagacctatgggcgctacttagctgttaaaggtcagtacaaccgcgaaagcctgttaaataacagaccgggcgcagtgattgaacagactacaccgggagcggttgaccgcatgttagagcatgagttagggcaatcattcgcatacagttacgataagctacaggaaagcgctgataagtctttacgtcgtggttttggtagcgccaatcttgaggaaatcccgccgattgctaccgctaccgttgctatgggcgtgtatcaggatgcacagcgcggaatgttgctatcaaaaactattgcgcgtacttatcttaacccgcttttctctctcatctatgaaactatgcgctatgagaattggcctttagaagatgagaatgggcagagcgtaccgggcgtagagctacccgctctttatgatctcagtgttgatgtgaatacgaaaggcgacgacgcagcgcaggtaatgcaaatgcaggttatcaatcagacagcacagatgttagcagcaacacaggcaagctacatcacagaccaaaacaagtacaacatgcttaaatttatgtgtaagtgtgctgatttggatgctgaattgttccttactgatcctgaatcacaggagcaagacccgcaaatgatgcagatgcaaaaagaaaatgaagcaattcagcatattgcatctaaacaccagttacaaacaatcatcctcaataactggaaacttgcagcagagattaacgagcttgaacagaaagcacataacgaaatctctaacgaggctatcaagcatgaggaaagtttagcgcgtattcaaagcattgttactaatgcacagaatcaggcagaggctaacaaggtaagagctaaagaggtggaagtaaaagacaaggctgttaactatgaaacgattttagcagcacagaaacacgccactgatttaactacaccacgcatcaacggtgtgcgttaa

SEQ ID NO: 187268 - DNA, 645 bp, Klebsiella oxytoca
atggctaacaccaatgtagtaacagcggaacaaggcgctgtaaaagctgaaatttcaaaagtagttacctcttacaagggcgctactaaaggctttgtagatttgtttatcggtctttgtgaccgctttacaggtaaagataattgctctggtgatatgttcgagcatttgattaacctgattgatgattcacacaaaaccttgagaagtcgtgttgtagttcgcttgcgtgaatttagcgataacaccctgcttgttaagtggaatgaagattccgaaaagtggagtgttagggttaaacgtgacgaaaaagataagtccctgtttaacaaagattatttcatcgaaagcgttagactagctaaagaatcagctaatgcccttacattctcaccaaacacacctattgaggatgaggatgaaagagctaagcgacttgcagaggaaaaacataagcgcttcttaaagagagttaaatccggctctgttgaaaaacaggtttcaaaagatttaactgagctagcaaaaggtatgcttgcagtagatgaaagcgcaaccattgaaacactgaaaatccgtctacgcgctatgattgatattgctcttttggatattaagccagcgattgaaggcgaaaaagcctaa

SEQ ID NO: 187269 - DNA, 240 bp, Klebsiella oxytoca
atgatgctacctaacgaactgattacaaatgaaattgagtttaaacactcttgcagtgtacacggaaaggacaccgtaaaaatcttgcgttacatacaaggccaatggaaagaacaagttttttcagaacggcaggaagggaaacagaaagcccttatctatcaggtaaaaaacattgattctgttattcaagaaatcattgacgcaaacattaacaccgcaccaatcagcacaatctaa

SEQ ID NO: 187270 - DNA, 1014 bp, Klebsiella oxytoca
atgaatgaagaaagcatgtttattgatacagacaactttgattttactcagcttgaggatgttgtagagctaccacgcgaggaagtagccccgcgaggcgtaacgcttgatgaggttacagaggatggcggtttagttgatgatattagtgatttgggggatttgctggaaggtgacactgatagcgatgattacgacactgaaacagagacagaccctaacgacgatgcaagcgacattacagagccagaggattacgcagagaagatcactatctttaacgatttgcctgatgatgttcccctttattttgacggtcaggaaatgactaaagcagacgttaagcgcctgtttgaagataaagaaacctttgattcacagcgtgagctagtaagcacagcagctaacagtattgaccagattcaccgccatatcacacaagaggcagtgaaacacgtaaccgctattgatctcaatattcagagcattcagcggaagatgagcggcaatgttagcgctactgaatacggcgaactatcacgacagcttaatagcgctatggaagcccggagcaaccttaacgcgcgtgtagatgagcagatgcggctacttgatattgagaaagcagaaacaacccgtttccgcattgccaatactgatagccagatgaaaaaagaggttccacagtgggataagctgaaaggcggtttactgcaagatatgcagaaacgaggcgttaacttaggtgagttagaaaaagtctggtctaaagatgtggcactcatggcgctgaacgattaccgatacaggaaacagaaagagaaagcaggagcggcagcaatggaagcagcgaaagcaaaagccccgcgctctacatcctccccggtaaacgcgaaacgcattaaggcagcagaagctaaggacgctaagaaatcagccctgttacgcaaggcgcgtagcggtaatctatcagagaatgattactctgatatgtttgaatttttagctgattaa

SEQ ID NO: 187271 - DNA, 1050 bp, Klebsiella oxytoca
atgggcggaatgttcaaaaagaaaagtagtaagactactactaacgaaacaactaaaaatgagaattggttagcacagaacaaggattatgcaaaccttgttaatcaggggattaaagaaggttctactatggacattcctgattataacgtcgctgactataaccaaaattggtacgacgcactacaaaacctgcaaaatggcactaacttagattacttgtctaaaggtgctgattatatgcagggtatggggcaaggtcagttagaaagcggcctagacctacagaagcaagcgcaagaccagttaagcaagtttgctaacatgactcaggaagattatcaaaaaggctttgagtccgagtataacagcgatcttgtaaacgagcagattggacagcttaaaaatgatgtaaatgatgcttacaatcagcaagttaatagccttaaccaacagtcaacagctagcggtaacatgggatctagccgcgcaggtgttgcacagggtgtaattgcaggtcaggcacagaaagctatttccagtggttccctccagtatcgcacagcggaggaaaacaacgcctttaaccgttatacaacgatgttaggtatgcagcaatcaggcgctaaccagttggcaggcatggcacagaatcagattagtgcaggtgctaatttctacggtcagggtatgaactaccaaaaccagtataacgccgggtatctacagaatcagcaaaactctgttaacgctggctcactgctacagcagattcagcaagcacagaatgacgctgatagacaaaatcaattgttcgctaattcccctgctttagctcgcttaggctggatgaatcaattcatggggccaatcgctaactattccactacaggcaaccggacaagcacaacaaccgcacccgcacagggtaacggtatgatgggcggccttatgggtgctgtaggtggtattgcgggtgcttactttggcggcccggctggagcgtctttaggtgcttctttgggtggctcaatcggtcagagcatgtaa

SEQ ID NO: 187272 - DNA, 525 bp, Klebsiella oxytoca
atgatgaatcaacaatataacccgctcgacccggaatatgggcctaatgcttttgatatgcttcaatcttaccgtgaaagagcggcacagttacgcggagaaatgcagcagcaggaagcgccagcctataacccttatcagcctgaacagaatcaggatgattcacagggtgagcatatttcaaatatggaacaatggttaagccctgtaaaaatggatgctttcgagcctcaagcaagttacacggaagaaaaacatgataacttcttagaaaatctggaagctgacccggctgttaaagagtatggcgaacaattccatgcctatcttgaatccctgctttcagcggttaacgctggtcagttagaccaagaaacggctatgcagatggggcaggattatctaaccaatgtagttaaaccaatcatcactaaacaccacaaagaaaaagatagtggtagttttcacaagaaacgtgagccggaaatcccggagattgtgaaaaaaatccgagggggtaaataa

SEQ ID NO: 187273 - DNA, 1341 bp, Klebsiella oxytoca
atggctagtgtatgggataaacaatatgatttaggtgatgatacctacaatcctactcagtctaatgttttggggcagaatctagcccctatcaacactcaaggcgagttagcagcggtagacgcaaccaacgatacccgcgattctctacaatacaagattgatgctcaacaggctaacgctattgctaccaatgcaccggatgaggatgaaaattacatttccagtgcgaacggtaacaagtatgaaaaagtagataacagtacatggaatcagtcactaactgtagcagccaactacatgaccgcttattttgcaagtggtggtaacgttggtgtagcaggacgtgcagcgggccaatcactgtacgatatggacgcaaaagcacaccgcttatcacaggttgataaactggaggaacaaggtttaaacccgcttgatattcagagttggattaacagcggcaataagaaagaccttgtaaccaacaaaggtagttggacaagtggcggtaacggcacgatgtttaacaccctaacaggtgaaacccgtaagattccgggcgctgtaaatactaatattcctgtcaagactgaaaatctaggtgatcgcattgttgaatattaccctgatggaactaccaaagagcgtacaagaggcttaagccctgatacatcgtttagggcattgggtgctagcggtggctctattgggatggatgatgatgaaaacactagtccagcctataaagaggacgctagcggcggcttgctgaaactcagcggctataacaaagacggtagcccacgctacacagcagctaactctaaagacattgaaacctacaacgctaagaaaggtgctggcactccagacgctaaccaacagttagtatctgatgaccttgcactaatcaaatcagcgaagccagaacagattaacgcctttacaggtcagattgttggacgtaatgagctggcgcgtgattttgcatcaagcacagaccctacaacacgtagcatttataacgcctctcagcgtttgggtactcagttaggtaacgctgcaatcagtgcggctaaggatgctggcgcgtctggtatcaatacagaggcagagcttaagcgctttacttctggtgtgcctcagcctgattacaccagttacgataactataataagtctatcgctaacattgaaacctacgctaacaactaccgtaatcagcttttagctaagtatggtgttaaagccccagcgcaggaacaggaacaggctcaaccacagccacaggcaaccaataacgcacagggtaagaaaacctttaacaatctttggtaa

SEQ ID NO: 187274 - DNA, 378 bp, Klebsiella oxytoca
atggctaagaaatacttcacggatgaagaacgcagggaagcagccagattagcccagcgccgttacagggagtcaggccgcaagcgtaaccctacttttgagatgggaagaaaggcaaacctaaagcgctacgggttaacgcttgatgaatacgacgaaatgctagaggctcaagattttaaatgtgctatttgtggcacaacagacacaggcacaaaatacaatcatttttcagtagaccatgaccacgaatctaatgaggtgcgcggtttgctttgccattattgtaacagcgctatcggttttgcgcgtgataatgtcaatgttttgcagagtgctattgattatctgaaacagggaggttatcagaatgcctaa

SEQ ID NO: 187275 - DNA, 2850 bp, Klebsiella oxytoca
atgcctaagaaatggaatgaagtgattagctcacctgcttaccagtccctaagcgctcaggataaagcagcagcacagagccaatattttgatgaggttgttagacctcagttaagcccggaagatgtagacgcagcacacacacagttttacagtgaatatcctgtaggctctcaggcttcacaggaagccccacaagaggcgcaagccgtaaccaacccaactacacagcctgtaccagttgaagcccctacagacactgacagcgcgttagataacgcctttaacacagtgggtaacgtagccgctagcggtgggcgtatgattgcaggcggtgtagcaggtttggctaacgttggtgtaggtgctttaaacactatcgggcagggtgtgcaatccctctctaatgctgttactggtgaggatgcacagtatcagccaatcccggcggcgggttatggtgagttagacccttatctaatgccccgtggtaaaggggaagaatttgtagctgatgttgtaccgtttgtggcaggtggtgaggttgcggccccactgaaagcagcagagggtgcaggtaagttagcccggtttgctaccagtgttgctaaccagttgccagcaagcgcagcaggtgcattagctgaacataatcagggtgatgagtccggtagtgttttagcagatatggctattaattcagttgtaggcggtacgcttgagaaagtaggcggtgctgcaattgataaggtacgcaatgcgctaccagagtctttaggcggcttctcagcggcagagaaagcagcacaggtagtaagccctgaatttctcgctaaagccactcagagcggaaatcaggaagcacaacaggctttcagaactgctaccactgatgaggcaggtaacagcctcttaaccccttctcaggtttttaacactgaaagaggcggtaagtatatcagagcagagcagcgagatttaaacaggggtactaactcagagtatcaggcccggttagatgcacagcgtagcggtgatggtttgacccgcgctattgatgatgtagcggccccggtatctggtgacgtgtcattactgcaacaggcagcacaggacactacaggagcatttaaagatcgtgccagccagctttacaacgaaagtaaacagagcgcacaacagattttaaatgattccaatatctcacaactcaagctaccagaaactaaacagattgctctttctcatcttgatgataacgcagcaacaggaaacatcaagctgacagcagagacacgcagaacgcttaaacagtttgcaagcgatgagaacaaaatcaagtctattgatgatttggacgtttggaaacgccagcttaacgagaaagcgcaaaaggcttaccgggcgggtgatttcaccagttataacgctcttaacgaggttaaaaacagtctgcgtaatgaggctgatacaacaatcacagcgtttaaccctcaagccgggagcctctaccgtgatgctgattccttctattctgcctcagtgggtgattttggggataaatcagtattaggcaaagtggcagggaaagacaatcctgatttagcggctaatgctcttatccgtggtcagaatgcagagtttaacactcagcagattgtaagcgctttgcaggatgctattaaccgtggtgatattcctaatgctcaggcactggcagcacagttaggacagggcttaggcgatgctacccgtaatgaagcgttacgagcagctacgacaggtgagaactttagccctactaaatttgctaacactatgtcacgtcttgagccacaggcagaagcggctaacactttgggcgctggtagtcaggcagagattaataacgctctctctgatgctatccgtattcagcgtgaccgggcatcaatggcacagcctagcgaacttgtaagccagcttgcaggacgtgctacaggtggcggcttaggctctctgattggtgggcctgtaggggcggcagtaggtcaggagattggcggcagggtatcagctaaaatctctcagggcttgttagaccgtatcacaggcactgttaagcgtggtaacgaatacattgattatctttctaatcctgaaaatgcacaagccgtagcagatgtgttagcggcaagaggtgcaacctttgacaatgccacagcgcaagaggttaaagggattgttgatagtctgcgtaaaggcgttacaggctctatgttgatgggcgatgatgataaacaggcagagcctaacccggttttacctactctctcagcgccacagcagacaaccacacaggcagagccagagcaacacgcacaggctgttaacctacctaaatctttaggctctaagaaagcaatcaacctctataaatctcttgcagcagcagagacggggaatcttgataatcgctatatcagaactaaagcagcagaggcagggccatctacggcctacggccccgcgcagattacagcgacgttagctaaagactaccttaataatcatcctgaactgttcacagctaaagagcttgattatctggacaggtttgttaagcagggtaaacagatgcttaacgctgaccctagcgaccctgtttatggttatggcggtgttggtgtgttgggggcaagcaaggcagaccagagaacttacgcacacgtagccgttaagatgcttgatcatatgattgaggctaacggcggctcactggataagactgttaaacgctggcgcggtgctgatgataaggcttactttgctaaggtacgcgcagcaatgcgacaggtaagaagcagttaa

SEQ ID NO: 187276 - DNA, 393 bp, Klebsiella oxytoca
atggaatttatcaaggcattcaggaaagcaggacagccaacagcggcggcccctctctacctttgcgagcaagcaagacaatctctaacaatctggaatgagcagccattaaaggttatctatgagcgcgtaaacaggcagattgcagaggttgacagatacgaatttatagccctagaggatgggttaatcaaaggtatgatgataatttgtatcgaaccggaagaaattcacactggtaaagatattctttacacaaaactagccttttcaacagagccgggagcgctgaaagaaggttacaaggctatgagggagttagcaaaagagcttaacatcccttatatccatttctcaaggcatccagaaacgttacacaaggtaagatgttaa

SEQ ID NO: 187277 - DNA, 267 bp, Klebsiella oxytoca
atgattaacgcaagtgtaaagcgttggggtaactctccagcggtacgcatcccggctactatcatggaagccctgaaactaaacattgatgatgaaatcaagattgatttagtagagggtaagttagtgattgagcctgtagcaaagcaaggaaagcagacgcataaacgccgctttgaccttaaaaccatgttagcgcaggtaacgccagataatcagcatgagcctgtagattttggccccgctcagggtaaagaggtctggtaa

SEQ ID NO: 187278 - DNA, 348 bp, Klebsiella oxytoca
atggttaggcggtatgttccaactatcggggatgtaatctggattaactttgatcccacgttaggccatgagcaaggcggctttaggcccgctgtagtaatcaccggctttgagtctaaccgggtgttagggatgctctcttgtatacctctcaccacgtcgattaagggctatccgtttgaggtggccataagctcagagcgtgacagtgtagccctatgcgatcaggtgcgttctatcgactggaaagcccggaaggtagagaagaaaggcactgtaacgcctgatgagctactagagatacaggaaaagatttccgctctctttgaattgcctaactttgaatag

SEQ ID NO: 187279 - DNA, 306 bp, Klebsiella oxytoca
atggaaatcttcaccacgtttaaccagattaacaaatcaatccttaactatgctgcaaagcgcggtattgaattagaagttgataacgatagtgaagcggtgttgttttgggatgcgcgcgaacagtcggaatggatgtttagctatggcatcgcatcgcgtgacggctcgttagtgtggcgtggtaacatctacttgccggacgatctgaaagaggaactaccagcgcacattatgagcggtgagaagttgaaagaggtgattaactttatcagcgctgagtatgtgagcaagcaggtagcgtaa

SEQ ID NO: 187280 - DNA, 258 bp, Klebsiella oxytoca
atggctattgaaaaggtaatgaaaggcggtactaacagagatacagctaaggccgttgcgtcaatcactgaggttaagccagcccggttacagttgaacattcacccggacatgcacaagcagtttaaaaaggtgtcgtttaacaatgatgaggaaatgagcgacattgttctaaatgctgttgctgattacctccgcgctaatggtgttgatgttagccccgtatggctcatgcgtcctaaagattggaataagtag

SEQ ID NO: 187281 - DNA, 627 bp, Klebsiella oxytoca
atgaaattgatttctgtcttgaatggtaaaggcggagtggggaaaacaactatcagcgtaaatctttcatggtgtcttgccttaatgggtttccgtgtagcgctgatagatacagatcctcaaggctctgttacatcgtggtatgagcctgatacatgcccctttgaggtctatagcgttagtgatgagaaagacatttacgcattacggaaagagtttaaacactttgattacgtgatcgtagacggggccgcaacaatcagcgctatttctgctgctgctgttatggtgagtgatcttgttcttatccctgttacagcgtcaccgttagactttgccgcctcatctggagtgttagcagtgatagaggctagagcggccttaaaacctgttacagcgcgttttgtacagactaagcgtgttaccaatgcccggatgaatcagacgcttaaagctagcattaaggctacagggatagaggaaacaagagccagcattgctaaccgtcaaagctatgtgcgctctatgctcgatggcgggtctattttcactgtgaacgatagccaggctaaagcagagatacagattttaacgaaagagattttagatttactggaggcggcttaa

SEQ ID NO: 187282 - DNA, 1374 bp, Klebsiella oxytoca
atgtactcacttacccagattgtaagttcaggtggccgaaggcaatggatcctgatggatgtgcaaatctgtttgccagcactttatccgctcaggtatctagttgaccacctggagtatcgctcgctatcaactcaatcagcttctcttcaagcgattaagtttttttatgagttttggttcataaagcatggaacgacattctgctatagcttttactgctccggacatgaccctgcaatcgccattcatgagatggcggccttttttcaatatttggaaaatggccgcctagttagcttcgcaccacgagcattgccatttaaacattctagcggcatgacgaatgctgccagagtccgtgcagtaattcgattcataggctacctgatctctacctatatatctccgtactatcgaaatgaaacgccaaaagaactgtctcggtatgcatcccgcctaaacactcgtttgctgatatgcaaaaacgagtttaaaactctagaaagaagcaatcagcggtataactctcgagttactgaaggatttcagagcatgactggtgatatggttgaaaatgtatatcgcatagtaataccaagttcaaaacataaaaataactttctaaaccccttcccttctggattaattcagtttcgaaattatttaattatgcggttaatgctcaactatgggctgcgtattggtgagttgttgttgttagagtgcgcgtctgttaaaactagtatcaaaggagataaatttagcttaatcattagcatgccttgtggtatgaatgatccaagagtacatgcaccatcattaaaaaatgattactcacatcgagttttggaactagacaaaatagattatgaattcctgatgatttatatgcaaaaaatccgaaaaaattcaatgactcacgacttcatatttgcatcgagccaaaaccctgaaaaccctttatcctataatgcagtacatttgattttctctgagatcgataaggttttttcacttaactatcctgaatgcaaatcagcagaacgctttgatgctataaaaaaatttactcctcatgttacaaggcatacttgggcttacttaactttaaagaaactatatcatttaaaaaataaaagactcagtggctctggtaatgatttcgtcaaaaactcactttcaatagggttgatggatgaggcaaaagaggctctccgtttgctaggcggttggagcataaaaagccaaatgcctgatctttatgccaaaagatttttatctgagcaagctaatgcagcaaacattcagcgaatattgcaacataactctgatttggattgcttaataaaggagttatttaatggagattaa

SEQ ID NO: 187283 - DNA, 1551 bp, Klebsiella oxytoca
atggagattaagcctaacacacttctcccgcaagattctgaaatgtatgatcaggatctttcttcaaaattagtatctttagttattcctgaacgtattttcttgaaatccagcagcaattttgatgatacacatattcataacaaagggagcaaatgggttttttattattccgggagtaagcggtatgtttattttaagcttgatgagttaacaaatacgctcttgaaatatttttgtttcaaatatgcgtcaacgatgttcccaactttcttaccagtactgtcgcatcagtgggcacaagcattcaattactgcaaaggaaatggtggttttacattacctatattgcgacaatatatagaaaacgatgctctagatgtaagatccttctattctatactattcgggttgaagatcctttgttctgaagagttccctggattttccttggaagactatgaggatcttgagtttatacccagaccaaatgcatataactgggagatttatcaggatattgacaatcttcttgatcctgttgaaaaaagcatgataagtaaaggcttatttgaaatggcaacggcattggccagaggtaaatgctatgccattagagagctcaaacatgctgtagtactcggattaagttatgttacaggagcgcgtcctgtacagttggcaaagctagctgttaaagactttcgtattgatacctgtaatactgatacaggattaattagatacagtattctgttaccctacgtaaaacaaagacgtcttacaaccgagcgtttactactggctattccgcctgaaattggtgcgctaatcaagcattatgtggatagagttcagttattatctgatgataaattgcttgagatgggggtgtccgccccagcttttgtctctcaagctattagccaaacagttctaaacttcagtccctcagattatcaaaccgctgttgcttgtggagaagccgccctgccatcaatcacaccaactgatctgcgccataacgttggtcactcattggctatgcaaggtgccagtgcggaggagattgctcatattctcggtcattcatctctagttgtggcaaaacattacattttggcgacgcctgccttggcattgatccgtgctaaagctctcggttttaaccctgtgtggcaaaacatggtagctatgatgctgacaggcaagttggtcaggtcagaggaatggcaaggtcgacgtgtggttggcatggttggtgatcgattgcactatgagattggtggctgtgcaagaaccgatgacgaatgtcctttctgtgaagttcgttgctgttatggttgcttgtattaccgccctttcctcgatggctaccaccaggacgtattggatagcatttctaaagaagtcgatgagctgatagctgtttccgatagcgtcggtaatgctcacaatccactaatttccatccacgaaacaacgcagatcgaagtcaagtcagtgatagcccgttgtcatttgcatcacaccaaaggttgtgaacaatga

SEQ ID NO: 187284 - DNA, 2352 bp, Klebsiella oxytoca
atgaaaaaaaatatcgagaactttgacacttttattgtggaacaaaaaacctggttcgacgagaatttggcagaaaattttgcagagccgtgggatagtcgcgcttgggtatgtgggagtaaaggctccggttggttgcgaggcaatggggccaatatattgcgttttgatgaaattaatcggctcaaagggattgacgatcgccatattgtatccgagccttatcagttgttcatgaaagccatgctggtactcacctatcgaggcagaaatcgtagtatttctcctgcggttgctgttgcaacactggtcattttgaaacgttggtactgcgctctcttcaagttaaccggacaaactcatcccatctatctgactacaggtgtcgtacgtagcgcaatggatagtctgagtgcggcatcccgaccaggtgatcccaacatagccaactacaagggacggtgtgtaaagattcaaaaattagtaaatcatcacgccttcaccttagtaacattgcaatatgtatccgatgaacgttacaccaaccagaccaatttgacccggaaagcccgggaaacaatcgctttaaaacaaaaagacaagctggatgatacgaccactgataatgaagatgcgctgattaccattagagggttcctcaatatcgtgtcattaatccagctagtcgaaagcagtactgaaaagattgctctcaattgccttctgttactgattataactgggtttcgttctgttgaagcattcaatctaaggcaggatgcgttggtaaaacgacagatagataattctgatgtcagtaaaagtctgagagataaaggcttaccggattattttcttggtatacgttatgttggtgttaagggggctggcgaacgaacacattgggtcgagcctctagctgtaccgctggtcgaaaatatattcaaatcggttaagttgttaacagctggatttcgcaaacatctcataaatttacgctcaaaagaattttctgattatctaccaaagacaatcagtgatattactggcgaactcgttgaacttgatgatattttagaacacatagcccagtcctcatcagagtttcgagggcgtgcaggattacgtgataaagcgtcaaaagcgttagcgaaccgaggttgtattccgattaaagtcattattggggcaggtaatagaaaagaaaaatactatttaaaatcagaccttagtcattttcttaaaaatgaattcggggataacagtgcaaacactccttgtactcacgcatgggtagagaatggcaggagatacgagattaagtatgaagatctattgttcctttatcccaaaggatcactgactttaaagagaacgctggaactaaaagccacgccattaccactgaataataatgggttaaacaaatttcttggtaattatgagggttacacatccgttttcagcaaatataggttgctagaagatgacggccgccctacccaactacgtacgcatatacctcgacacaatataaacacgtttctagcgattgcagaaatttcagaccacttacaagcgctgttgatggggcgtgttgatattactcaaaatcaacattatcagcacctggctctcaaggaacgccgaaaagttgcttctctgacccctttagttccaaccataccggtacagacagcatatattgctatggacgctgatacaccgctcaatgcggtaaagcgaagcggtatgatgctatttagccacacgcagaatctggaaaccaacataaaagcgaatctgcataccttcgataatcgcgacgatgtagcaggtttcatcgaagcatcgtttgacgatggattattcgacgacatagccgctgcgttcgaggaaatcagtaaaaatgaagggccattacaagcgtctgaaatggtgaaaaggcatgcggtactgcatccattaaaattgggctcctgcatgagagacgttaacttgtggggatgcccttaccgtatgaagtgtcagtctttgaagccctgtgagcatttcacattgaccggtcgtattgatgagtactccgcagttgaagttaaaagtctggcattaaacgaggcaaagcttgctcttgaaaaatataccgcggccctaccgggcaagcagcttgtacaaggcaacattgacgataacctagcacaactagatgcaataagtgagcaattacgcagacgctccaactcgctgcaagtaatcacctctcagatggccctatctggagatataaaggtggaaggtgaaattcgtactctggctcaattatttgccctcgagtaccaaaaaatcaaatag

SEQ ID NO: 187285 - DNA, 444 bp, Klebsiella oxytoca
atgcgtggtaaagaattggatactcagatcgagcatgaactacaactgatgttgattgaagggtttgataaatcacctatttcagccaaaagcttacatgccagactgaaatcaaaaggcatcgtcaaaggcgggttaagtacattaagtaacttggaacgtaagcgtcttattgcagcctatatcgatcaacaactatcgcctctaaatcttcgtcataaagaaaaacagcagtacgttaatcgtaagactcgccaagctttgcttggccgtaatcagcaattgcaggaggaaaataaagagctgcgcgagcaacttgcacagaacacactgtctttgattgaaattgtgaaagcagttaaaattaatacagtcattccggtagaacactttctggccccacatctgattatggagttacatgaccagaaaaagaatcaatga

SEQ ID NO: 187286 - DNA, 249 bp, Klebsiella oxytoca
atgaagagcgaactaatcttgtcgaagcactcaagttgtcatcagggattaaccatgcagacaaaaaatgaagtgattcgcctggctacagcgcttttcgaagggaatgtaaacgccgcactaaactggtgtagcagaccaaaccgggcgttacactggaagtctccctttgaaatcattgactcagaagaaggggcaatgatggttgccacactcattttgcgtatagaacatggcgtttattcttaa

SEQ ID NO: 187287 - DNA, 561 bp, Klebsiella oxytoca
atgaatagtcgtgtaatcgctcctaaatcgtacattttttctgcaattatttatcttggtaaagttaattttactagcaacgatttagcaaggattcttgttgagagattttcattgcagagagattatttgaaggcaaaagcttttgcatataatcaaatacaaaatctcgtcaatagaggattgttaaataaagtaagacaaaaaggaatttatcaatacttatactctaccactcaggagtttgaccgtgcaatcgaaagtacagttctaatctatcccgaatcagacattacactctcaaaaattgaacacaccacacttcagatatgtaatgatacaaaaatcactctgaaacgccttattgataaatatgtgggcgaattggaaaaaatatctggagcaaaagaaatttatgaggaattaacaatgataatgcctgatagagaaaaagaattcagaaaactttctattgagcaaagcaggaaatacatccgaacgaatgaaaaaattaacacattaaaaaacattgtcgataacacaattaatctaaggcaatag

SEQ ID NO: 187288 - DNA, 933 bp, Klebsiella oxytoca
atggcacctacggtatttatatcctattcgcacgataacgaattgcacaaaaactgggtgttgcaacttgcaacgaggctgagatccaatggcgttgatgtcttgctggaccgttggaatctgaaactgggtcaggatttggcggccttcatggagcgtggtttatcgtcatctcatcgggtgctgtgtatttgttctgaaacctatgtcaccaaagcgaatgacggtgaagggggcgtcggttatgaaaagcagattatcacagacgagctattaggtgatttgaatacaaactgggttattcctgttatcagaaacaaccctcaactcaaaaaagtgcccagttttttggccggaagaatgtatgttagctttgaagacgataaattgtacgagacccgctatgaagaggtgttgagagagctgctggatgagcctttgttacccatacctccactaggtcccaacccatttaaaacagcaaaaatatacggcgagcaaaaattctttccgaccagcgagcggtacgtttcacccacgccaaaaggccgggtgacttttgactactccaataataatggccgctattttatcggacaggaagtgctggcgtttgagctgtgtttttataagtccggcgaccaggatattcaactgctgaatgaccccatcagtataaataccgttgcggtggttaaagataaaaatgatttttccgagattaatgacgcacgggtttatgatggctcgtcgagaatcaggaggccaaaaataaaccaaattgcgatacttcagaatagtaatgggttttatgcggccattaaaattctgtccattaaggacgacactcgtggcgccgagtatgatgaggttacatttgactacgttatacagactaacggcactcccgattttacggcgttgaaacagtag

SEQ ID NO: 187289 - DNA, 1419 bp, Klebsiella oxytoca
atgccgcctgactacaacctgctggaatatcatcggggggcgattacggccccggccgggtgcggtaaaacacaaatcattgcggataccctggccctgcatacggggaccaggccggtacttatcctcacgcacaccaacgcgggtgtgacaacactgcgtctgcgtatgcaacgtgccggggtttctgccgtggcctaccgtatcgccaccattgatggatttgccatgcgtcttgtggcgatgtttccggcgcggagtgggctcaatgttgaggtccttcaactacgcaatcgcagaactgactatcccgctatacggcaggctgcctgccagttgctgcaggcagggcatctcaatgatattctggcggccagttacgctcacctcatcgtggacgaataccaggactgcaacctggtgcaacatgcactggtaaccgcgctatcaacggtgctgcctgcctgtgtactgggtgaccccatgcaggccatttttggctttcgggggaaccagctcgtggactgggatgcacatgtactctctcactttccactgattggtgagctcaatcatccatggcgctgggctaacgcaggggcgccggagctcggtcgctggcttctggactgccgacggatgttgctgaatggtaacgccattgaccttcgccaggtgcctgctgaggtgacctgggtgccgttacgggcagaaacagttgttcagcagcgccttactgcagccctgacacgcgctgtcaccgcaaacgggcaggtactggtgattggaaacagctatgacacccgcgggcgtcagcagatggccagccagaccccgggagcaacgaccgtcgaagccgtcgatttagtcgaccttaccgactttggtgcagcgtttaacctagacgctgcggatgcgttgacgcgcctggtgcagtttgccgcaggcgtcatgacccaagttggccccgcagcattgctgccccgtctggaaacgctacgaagagggcgagcccgcaacccgccgacggttgccgaagcagcgttagtggcatttgcagagagacccggttttacgctggccgctgaggcactgcgccttctgacccgccaggataatgcgcgggtctatcggccagaggttttgcgctgttgtttgcgcgccttgcagtcggctgctgccggaggctgcacatttgcagacgcgacggtaaatgagcgcgaacgcaatcgccacgagagtcgaccgctggcccggcgtgtaatcggcagcacattgttgctaaagggacttgaaggggaggtggctgtcatcacatccccggaagagatggatgcgcggcacctctatgtcgctatgacgcgaggatcttcgcggctggttgtgtgctcgttaactcccgtattgacggcccgctaa

SEQ ID NO: 187290 - DNA, 777 bp, Klebsiella oxytoca
gtggccgtgcgtgagcttaatggcaaccagctctttgtcgtgcggggccatccgacagcaccccacctggtgctgccggtgggcatttccgatgatattcaaagtacggtccgggccgaccccgaagcctttctggcgcgtagcgtgatcgtctgtgaaggggcgagcgaggtagggttaatccgcgggctggatcactactggacctccctcaacggtaattccatgctgagtgcaggaaccgcattcgtgaatgttggtggaggagagcctgaccgatgttttgtgcgtgggctagcactgagtcgacttggctaccgtgtgctggttctggtggatgcggataagccgcccaccccggcgacggtcgaggccttcgaggctgcgggtggagaacatatcacatggcgagccggtcgcgcgctggaggatgaattgtttatgagcctgccggatgcaggcgtcgacgcgctgcttcaacgaggcattgagcttatggaggaggaactggtggcggcacatatccagacgcaatccaacggtcaggtaacgcttgcccatattcggcaacagcggcacctgattggggggccttattctcctgaaatacgacaactattgggactcactgcgcgtaaccgacgaaacgggtggtttaaatcggtgacccggtatgaggatgtggcgcacgatatcctcggtcctcatctccccgcgtccgatgccgggttccaggcgctgattagccggctttactggtgggcacatgccgcctga

SEQ ID NO: 187291 - DNA, 2799 bp, Klebsiella oxytoca
atgcggggaagcgaagaaaaatctacgccggatgttttggactctgcccagttggtacgtattgaagccgtacaccggggattcctttatcagcacttgtatgccgttggctgcttgctgctggcacagaaagccagcgtggaggcagtgaccgttgagctggatgaggatattgagctgaactccgggcaggagcgcatttacgttcaggttaaaacccgcctgaaacccatcattctcagcgatgtgtctggcgcgctcgcgcggtttgcggagctgcgtaacgagcacactgatgggcgccgccagggaagcgcttctttcgttatcgtcgccaaccaggcaccaggttcacatctgcagaagatgattgaggataatatgcttcctgcggatgtccgttttatctggccccagtcaaccgctgagcgccatcccgcacttccccctgcctgggacaccgtggctgatgcggccgcgtggtgcatcgcgcaagcagagcaactgaatttttcgttattgtcgccagaatccctgatctggaagatggccggtctggtccagctcgccgccaccggaggtgatgctgacggacagcatgcgttttatacccgggatcttcctgccctgttcgaacaactcatcgttcagttacaggacttccctgcaccgccgacactctaccggccacaaagagaggaaccctcttttgtgtcggatgagcggatacgcatcatttgcggcttgtccggtgcaggtaaaacagcatgggcagcacaggctgcccagcacagtactcaggcgtgtgcatattacgacgctggcgaccttccaggccctgcacttgccagtacgctggttcgtgagctggcagcccggtttgcgactcaggagcaaggtggcctgcgaagaatactgctccctggtgccagtggcgttgaagcgctgagaacgttcgacaccttcttgcagcaacggaacgacaacctgctgctggttctggataatgcgcatcgtatccctgtggagaacttgcgggatgttctgcacgccacaacccgtatccattttgtgctgctgtgccagccccatgacaatgtccgtcaactggaggcgatgactggacttcagcgtgaatcgttacagggatgggatatcgacacagtggctgccgcagtggccgacctcggtgggcacgccagtgcgctgggatatgagcagctacgaagctacaccggagggttgccgctgtatgtcgaaagcgcggcgagagttgccgcagaggaatacaaaggggatatagacacgctgtgtgctgaactgcggcaacaggaaaacagtacggaaaccgcgcaggaagtcattctcagccgtgtctatcaggggtttgagccactggtccagaacgctctggcgttgttcagtctgtccgatgtggggctaagccgtgatgaagtttcagagtaccttgcccgctcattgaatatcccttcaaacggggcagccacattaattaaaaaaatgcgggccaccggaaccattgaaaactatggaaaccagacgttaaaggtacacgatgctgtcagggcgctggggctgcaacacctgaccatgatggacgtggatatcgtaaataacgcgttactggcgttaaaagatcttttgattgagagccttcagcaagaacgcgacacttcgcgattttctcttctaacgcagatttacatcaagcttaacgatgtcatgacgctcatcgctctatctggtgaagagctgttttatgagatgggcattgctgtcgacattatggaaagcctgaaacaggcgacagcttcggactctctggcgcctttacaaaagttctgggcacttgatgggctcgttttttccgagcttaaagacggtgtttctgagcaaattgcacaatggctggaagcgatgggagctttgcttacagaacatgagtttggttaccgggaacgcacggcctacaccatgaaacggatgcttttcttatccgaaaagggagaccttagtgaagtgcaaacgctggctgaagatgcccgccccagccttccggatgaggagcatgcgcgtatttttgactataaccatgctatcgcgctctggagactgaaaagatacaaacaagcagaaacactgtgtctgagcgtagtgaatcgctactacgcgttatttggtattaccccacaggatgtcatgggtaaaaactcggatgtgctgtgggcaatcatcaaccagcctgaaaatgttcacgagcacatcaaacatctggccgatgccctagagttgctcgccagaattaatgacgcgcagggaaaggtgtcaccgtttctgcgcattcacgcgatgaaattttataacatgaccgcagcccccgaatctctggtccgggtaggacaggatctagctgatgagtttgtcgcaataaaggactatgtcggtgccagagaggtgatggagcaatacgtcctgccagtcgtcaatgaagccggtctagtacagcgactggttcaggtccgaagccagtacgccgttatactggcacttgcaggcgaacatgagcaggcagaagcggagatgtgtcggctagcccccttttttgaagggttaacaggtgagcagcgactagaggttgaaaatcagtcgaactacatcgcgcagcttgcttacaaggcggctaaatccgaagtaacgcgattgttcggggcggtaggcagaaatgaaccttgtccctgcgggtcgggagtaaagtataaaaaatgtcatggagcctga

SEQ ID NO: 187292 - DNA, 1143 bp, Klebsiella oxytoca
atgaacgaaaccatcgaaaaactgattgccagtggaaaggaagggccatggtgggactttaaacaaacctaccaccaaaacaatgcagcccttgttcacgatatcctctgcatggcaaacgtcctgcatgacggtgaccggtatctgatttttggcgtgaatgatgaaggggtgattaccggcgtgccggaagatggtaagcaacttaaccaggcaaatttaatcgatctgttaagaaaagtcagttttgcagagcaccattgtccggatattcagctgcaccacatcacactccagcataaggtgctggctattctacaaattcgtaacgtcagaatgaaaccctactatctgacccaggactatataaaagagggaaaaactgtcagagccggtgtcgtttacacccggcaacaagatgccaatacgcccgtaactagctgtgccagccctggagatgtcatggcaatgtggagagagcgctttaacctggacctggcacccgctgaccgcatagtcagactgcttctggattacgacaattgggaatatgacggtatcagcgaggcctattatcggttggacccggattatgccattcatattggcgacacagaaaaagatataggaggacaacactggtggtcaacgattagcattgagcaaccttgtcactatgaatacatcctcaaataccgtgggcttgtacttgaacgagtgccaatcgtacattacagaaatgagggtttacagtttccctttccagagatggatacgctggcttatccaggaaaaagggatggattcgtaactgattattatgcagacgttttttacttcgtaaaaaacaccttaccctacaatctgttgagtcatatcagagaattacactcactgcctggccgtaattcaggcataaccatgccgttaaccacccagaccaaaccgccgattatcgagctgccattcatggtgtttgagaacgcaggggaaaaagaagaaaagctaaagtttattcaaagtcagcttgctgatttttgtccggatggtatgcctgatacagcatcgatgaaaactgacccagaactaagaatggaagtagagagacaattttcctggtgggtttttaaccatatgcgttga

SEQ ID NO: 187293 - DNA, 4128 bp, Klebsiella oxytoca
atgaatattgatttcagtttaattcgcagcgcccccaaaagccgtaacgatagctttgaagcactcgccgtacagttatttaggaaaacctgtcgagtaccgacaaattccacatttattagtctgcgtggagatggtggagacggtggcgttgaggcatatttccgctcaccggacggtgccgtattcggtgttcaggcaaaatactttttccagcttgcttccgcagagcttacacagattgatagttcccttaaagccgcgctaagcaaccatcccacactaaccgaatactggatttatataccgtttgacctgaccgggcgtgttgctgcgggaaagcgaggaaaaagccaggcggaacgctttgaagaatggaaaagtaaagtcgaatcggaagcgtcagcgacagggaagtcactttctattgtcctttgtaccgcggctgttatctgcaatcaattacttgagatagacccttacggagggatgcgcaggtattggtttgatgacacgttgctgacagcagctcaaattcaacaatgtctggatgacgccattgcttttgcagggccaagatatacttcaatgctggatgtggtgacgaatgctcatgttggtctggatttttttggtgggaccggtgactttcgcgagtggtatgaaacatcattaacaccaatcgttcgagagttccattcactgaatggatacggacgcaaatcgctggatatactcggcgaaacctgtgctacatctgccacggcattgattgaagaaataatcgcctactgtgagagcatgagagataacgatgtcacggccacatcggttacagatctttgcgttgctctgtcatccctattgacacttatcgctgatgcccgccatgctcaagaagataaattttatgaaaagcatggcaagcatagtgatacagaatcgttccgacagttccacgcagagtatatgtgtgcatttcctgccggagatatggatgcggcgagaaaatgggaagagcaggcgcagcaactgcaaaatttgttgacttctcaggtcattggtgctgcaacagcacattccttactgctggttggcccagcgggtatcggcaaaacccacgcaattgtcagcgctgcattgcgtcgactggaacatggtggtttttccttggtcgtctttggagacgactttggcaaagcagagccttgggaagtgctgcgcagtaaaatagggctgggtgccgccatcgatcgttcgacattatttgaatgcatacaggcctgcgccgaacatactggcttaccttttgtcatttatatcgatgccttgaacgaaagcccgcgagaagtgcgctggaaggacaagcttcccgaattgctcgctcaatgcaagtcttatccagacatcaaaatctgcgtttcaacccgagatacctatcgcaatcttgtggtcgattcacgctttccagggtttgctttcgaacatatcggtttctcaggacatcaattcgaagcggtacaagctttcgcagcctactatgggctggatgcagagattacaccacttttttcacccgaactcagtaatcctttatttttacacttagcctgtaaaacgctaaagggcgaaggccgtgacaatctggatatttctttgccgggttttacctctctgtttcaaggacatctcaaacattgcgatgttttaattcgagaacacctccactacgcaaaccctcgcaatctggtaagggctgcaatgatggcactcgcgaataccctgacacatgagttgccgcagaaccgaacctgggaaacctgttgcgaagcactgagcaaaatagtgggaactgagaccacacctgaatcctttttaaatgcattggcacatgaaggcctcattattctttctgttgtagatgaggataccttcctgatccgtctgggttatcaacgctactgtgacatactccgtgctatcagccttgtggaagctcttgattcggatacagcgaaactcgcggagaaaattgcagcgttaacagaagaagatgctggattgctggaagctcttgccgccgtgctgccagagaaaactgctcttgaaattactgctgaagaagtaggattaccatccgaaaaagcccataagctgttcatccagtcattggtttggcgctcccgacaaagtgtagtggaagaaattgatgaacacatccatgcagcactgcatacacctggattatgggagtcggtttatgaagcgctgttttcacttagtctggttcctgaccatcgtctaaacgcaactaactggctggggccatttttacggcagtcatccttagctgaacgtgacacctacttgtcattagctgcgctgggatcatttgataacaagactgctgtctattcactcatccatgcagcactatttgctgacataacccattggcctgctgaaagccggaggctggccagtctaacacttgcctggctcacttcgtgtgctgaccgccgaatcagggatttatcctcaaaagggctaagcagaatcctggcaaactacccggagaactgccaaacagtaatcagtgaatttgcatattgtgatgatgattacgtattagagcgtattagccttgctatctacagtgcatgcttattgtcacaccaacgcagaaatgcgtttatgccagcgctccctggtctattaagcattgcgtcagatagcaagaatattctgctccgggatacggttcagctattagtaaacttgttgaaaacaggagaatttcccacagccgtaacaagccaattacagcattaccagacaaacgtatcattaccatcacgatggcctgtaatggcggatgtcaaacccctcctagatctggaacatttaccatcaaacatggtgctctggggagagtccatggccccggatttctggcgttatcaggtggaatcgaagatttccggctttgacttggagagcgccaatatcagccatgaaaacattgcctgttggttaatgcgagaagcacttaatttaggatatcccggttataaccactgcgcgctcaattatgatcgccatatcgggagtcagtatggctcgggacggggtagaaaagggtatgctgaccgactcggtaaaaaatattactggatcgccttacatcgactactgggcattctggccagtaatgttcccgcactggaagacccatattccgactacgaacctacaagtgatcatctatggtcagtcgacgtccgtaaagtcgacctgaccgatgtacgcgacatcaccgcagaaagtgtctatccagtactgatggaagaaacaaattatgcattccctgaccgcaattcagatatcaaaggttgggttcggaccgatgatttgtcaccttatgaagcttgtctgattcgaactgacaaggaaggggaacagtgggtagcgctttcacacagctattgggacgaggataaagcgccgaatgaaaatagctggaattcaccttacctggcagttcgtgcttattattcaagcgcactcataaatgaaagcatccagaactttaaacagaaaagtgcgcgcgatattttccaatataatcaggggaatagctgttatcgcggttatcttgctgaatatcctgacagcccagtgtacaaacaacttcttaataatgaggaagatagtgaagcatttaattttacagaagtcagtttactacgcggaagcgaatgggaatatgactactcatataccacgcccgagcgccaggatagcctcattgcgccatgccagggaatcattcaaaaactcgaacttttatgggattgtcaaagcggttgggttgatcgttctggcaaacttatcgccttccatcataaaggtgtaagacaaagcggacttttcattcatcgttcggcgttgaacgcctacctgtccataacaggtgaagaacttatatatcgccgttttgctaacaggggatattttgatttagctggccgtaacggctcgcaaatagacctgaaaacttggatccagtaccgggcagacaaggcgccagtagttttacgagaagaggaactgccgtttaactgctga

SEQ ID NO: 187294 - DNA, 1425 bp, Klebsiella oxytoca
atgttagatttcaaagagttgagcaaagatggaaaagaatttgaactcctaattagggagttgcttttttccaaagggtttaaggtctattggagtggtgtcgggccagatggtggtcgagatctcgtttgtatagaagaacataaaagcttcttcgcgcccagtcaaaaaaagtggttaattcagtgcaagcataatgctaacggaggcggatcagtaggaatcaaggatcttgatgatattgttgattcatgttctcaacatggtgcgacaggctttattttggcgtgttcgactcagccatcatcagctgttgtcgaccgacttgaatcgattactaataatcaaaggaatgatatcacagccatatattgggattatatttttattgagcaagcgctttcaaccccagccctttggcgagtggctcaacgttttttcccagtatcatcagaatcaactacttggaaagtatatgcgactgaaaatccaaatcattgggtagtaaattataaaggttactatttccacttagctaatagaatcggctcatatcatgagcaccattttgagagtataagtaaaagaattgaggaaattgagtcaattataatgcctgacaatcattttatacgggttagatcagtatatttcgacgacaagaatggaaattatacatggtacttggattacatgtacccagatgcagatatgccaaaatatagctcagctgaaattaaacattacttaggtgacgggtatgcattagaggatggacaatgttatacatttgatgtaaaactaagatcttatttccagtttagtgaccactatgacccagatcactacgattactattcaccttatatcaacaattatttatatggtatgaagcgggagggtaactgggatgatcacgaagaggcataccgttcggatcaggaactaagagagaagttagaggcatgcagaaatgtgagttttgaaaagctatctgaaaagtttaaagaacttgatttttgccgattgatgcggtcatcaaatgcgcgcctagaagatctagataaattccatctacaacggaattggtctgagttgatgtcttccttagatattgaaactgatagatttttttcggcttggtttatttttgacgtcagtaacgttgatagatttcatgagttagtgtcatatatacctcagtacgtactttataactttagacttaccagggcttatatttatttgcctgaaagtgacaatagaagcgttttggattcagatgatgatgagtacattttcgaattaacattatcaattcatcctgcagaactttctaataaattcattgcaagggaaaagttaaatgagtactttgatttgattattgatggaattaatgaatttcagtctaagtgctattaa

SEQ ID NO: 187295 - DNA, 645 bp, Klebsiella oxytoca
gtgacaaaattgataaagccatcaactaaggaacttcacagttttttaaatgacaaaaaagggttagtagttcatttttcaggatgcccgaaaggtattggtcccgggaaagaattatttcctgatgaccttaaagatattttatccgggaaaatcactggggcattatcatgctcagtagttatacccggtgacttctattcaccagaacctgacaaaggacatgcaacagggactatcggggtaatcttaaatgttgaagattcaaacttatccgctgtaggtcatcgcgatgctggtagttatgttgatgacgatggtaatcgccacgtaccagaaaaagccattacaataaatgacctagaagactctttgtccagtcggattacttataatgaatggatcgtaaaaccgtatggcataaaaggcatttttatttttcatcctgatcatatcattataagagcaatggtggaaatacctgattatgaaggatttattgaagatgatgtgcagatcgatcttcatgaagtatgtagtcatttccccgcatgcgaaattttcaccttcacaaaaaataaaatttccaaactagaccgtaataccaacaaattcattgtccaaacagaaaaattttacgggtaa

SEQ ID NO: 187296 - DNA, 1533 bp, Klebsiella oxytoca
atgtctcaaccctatcctagccctatacagctttgggcaatgcaaccacacctttttaatgagtggcgtgcaaacaatgatctaccgcaactctttgaattcttgagggatactctgccaggatttaacgactggttgaatgggcttccttttgatatggacgtggcgctaagaattgtgccgactggcgatattttcaaaggcgataaaaagagagtcgttataaaaagagatggtgaatttccagggacgtttgtatatgagtgtagagaagggacagcagaagaagctaccgaatggtggaagataaggtatgctgatatttcgattcttggtgaaatagagccgtacttcaaatgggcggaaagggtgctagggcggaaacgtttttccatgtggaaaaaaaagaatagaccctattccgatagattgctttatggctcttgggtaggattgaatgaaggcggatgtgttaccaaagcaaatctctttggtgattttaccgttctaaagctaggtcaagtagagcttgagcgtggagcagtaattggacacaaaaatctagatttttgtgatttggattttctaacaattaaggctggttggcatggatatggctcaagctggaagacaatcaactatagctcttgcagagaaatttcgtttgtagaaactgaagtggctttttatgagttctatagttgtgctgccactaaatttacaatcacaaatacaaagtttcaggatttgtattttgagagaacggatgttcaagagctaaggttgttgaactcatttctgtttaaggttgggattaaagattctagtgtaaccccatttattcaaaattgtgaaattagagaattgagttacctccccaaagtgggtgccccacatttggagacatcaacgacctataggttactaagagccgctttccaaagcagcggactcaggcaggaggcatcgaatttttactacaaggaaagagtatatgaaaggaagtcatattttcaccctcagttaatagatagaaagatatttcagggacttgatcacggcggtcaaatttccatattgaaagatttatatgatcgagggtttttcgaaaaaaaagatttgcccaaagagattcgtaaggttcttgtttcaaaagtcaagatgcatgttattccgaagtacttgtttcctttgatgaaatcaagatttaagtggtttgtctctttgtttgaatctattctttgggggtatggtgaaagaccatcaagaatcatcttggttgctctagccactgtcactttctactctggaatttatagctattttgattggctggatgaaaaaggaaatccatatcatctaagtctactggatagttcatatttttcggttgttacattcaccactcttggttatggtgacataacaccaaagaccgaaattttgaaattgttagcaggttctgaagcattattgggggcttttacaatgggactgatagttgcaggtttttcaaacagaagtcggtactaa

SEQ ID NO: 187297 - DNA, 1458 bp, Klebsiella oxytoca
atggaaccaacattgtcattaaccgtgatgttctgtgctgcagtgggtgcttcagtatcagaatcgctgtcggaatccgagtcactgtctgaatccgagtcgctgtcagagtccgaatcgctgtcggaatccgaatcgctgtcggaatccgagtcactgtcggagtcagaatcgctgtcggagtcagaatcgctgtcagagtccgagtcactgtcggaatccgagtcactgtcggaatccgaatcgctgtctgaatccgagtcgctgtcagagtcggaatcgctgtctgaatccgagtcgctgtcggagtccgagtcgctgtcagagtccgaatcgctgtcggagtccgagtcgctgtcagagtccgaatcgctgtcggagtccgagtcgctgtcagagtccgaatcgctgtcggagtccgagtcgctgtcagagtccgaatcgctgtcggagtccgagtcgctgtcagagtccgaatcgctgtcggagtccgagtcgctgtcggagtccgagtcgctgtcagagtccgaatcgctgtctgagtccgagtcactgtcggaatccgaatcgctgtctgaatcggagtcgctgtcagagtcggaatcgctgtccgaatccgagtcgctgtcggaatccgaatcgctgtcagagtccgagtcactgtcggaatccgaatcgctgtctgaatccgaatcgctgtccgaatccgagtcgctgtctgaatccgagtcgctgtctgaatcggagtcgctgtccgaatccgagtcgctgtccgaatccgaatcgctgtcagagtcagaatcgctgtctgaatctgaatcgctgtccgaatccgaatcgctgtcagagtcagaatcgctgtcgctatccgagtcactgtccgaatcggaatcgctgtcggaatccgagtcgctgtcagagtcagagtcgctgtccgaatccgagtcactatcagaatcggaatcgctgtcagagtcagaatcactgtcagaatccgaatcgctgtcggaatccgaatcgctgtcgctatccgagtcactgtcggaatccgaatcactatcggagtccgaatcactgtcagagtccgaatcgctgtcggaatccgagtcgctgtcggaatccgagtcgctgtcggaatccgaatcgctgtcggaatccgaatcgctgtcagagtcagagtcgctgtccgaatcggaatcgctgtcagaatccgagtcgctatcagaatccgagtcactatcagaatccgagtcactatcagaatccgagtcactatcagaatccgagtcactatcagaatccgaatcgctgtcagagtccgagtcactgtctgaatcggaatcgctgtcggaatcagaatcgctgtcgctatccgagtcgctgtcagcatccgagtcactatcggagtccgaatcactgtccgcatctgagtcagtttctgaaatcgaagagtggtga

SEQ ID NO: 187298 - DNA, 1878 bp, Klebsiella oxytoca
gtgattcggactctgacagtgactcggattctgacagcgactctgactccgacagcgactcggactccgacagcgattctgactctgacagcgattccgactctgacagtgactcggattcggacagcgactcggactctgacagtgattctgactctgacagcgattccgactccgacagcgactcggattctgacagtgattctgactctgacagcgattccgattctgacagtgactcggattctgacagcgattccgattctgacagtgactcggactctgacagcgattcggattctgacagcgattccgactccgacagcgactcagatagcgacagcgattcggactctgacagtgactcggattcggacagcgattcggattctgacagcgattcggactctgacagtgactcggattctgacagcgactcggactctgacagcgattcggattccgacagtgactctgactccgacagcgattcggattccgacagcgactccgacagcgactcggactctgacagtgattccgattccgacagcgactcggatagcgacagcgattcggattccgacagcgactcggattctgacagcgattctgactccgacagcgattccgactctgacagtgattcggactccgacagcgattcggatagcgacagcgattcggactctgacagcgactcggattcggacagcgattccgattccgacagcgatgccgactctgacagtgattccgactccgacagcgattcggactctgacagtgactccgactccgacagcgattcggactctgacagtgattcggattctgacagcgactcggactctgacagcgattccgattctgacagcgactcggattccgacagcgattcggactctgacagcgactcggactctgacagcgactcggactctgacagtgactcggattctgacagcgactctgactccgacagcgactcggactctgacagcgattccgattctgacagcgattccgactctgacagcgactcggatgctgacagcgattctgattcggacagcgactccgattccgacagcgactccgattccgacagcgattctgactccgacagcgattcggactctgacagtgactcggattccgacagcgattcggattctgacagcgattccgattctgacagcgattcggactccgacagcgattccgattccgacagcgattccgattctgactctgactccgacagcgattcggattccgacagtgactcggatagcgacagcgactcggattcagacagcgatgccgactcagacagtgactccgattccgacagcgactcggattcggacagcgattcggatagcgacagcgattctgactctgacagtgattcggactctgacagcgattctgactctgacagtgactcggactctgacagcgattctgactctgacagtgactcggattctgacagtgattccgattccgacagcgactcggatagcgacagcgattcggattccgacagcgactcggattctgacagcgattctgactccgacagcgattccgactctgacagtgattcggactccgacagcgattcggatagcgacagcgattcggactctgacagcgactcggattcggacagcgattccgattccgacagcgattctgactctgacagtgattccgactccgacagcgattcggactctgacagtgactcggactccgacagcgattcggactcagacagcgactctgactccgacagcgattcggattcggattcggatagcgactcggatatcccgcaagccaacgcggataccaataccgctctga

SEQ ID NO: 187299 - DNA, 888 bp, Klebsiella oxytoca
ttggcccagatttttgccgacgccgaggttaaaggcgcggtagcggtccgccagctgggtaccgccgtacagggtccagcccgccgggagaccgtgcaacaaagttccctggaagaacttcggtttttcctgctgattgctgccgctgcggtactccccggcggtgacggcatagcgggtatggccctcgcgctggagcaccggcacggacgagtaagggacggtgaaaacctggctgctgccgtcggcctctttgatggtcacctgcaggtcgccgccgttgccggcggagtagagatcgttgatggtgaacgggccggggggcaccgtgctctggtagatctcatagccgttctgcttcaccgacacctgagcggtgccgcgggcaatcccgtggataaccggggcaaatcccttctggctgtccggcagcatgttgtcatcggaggcgagctgcgcgccgcggaagttaatgccgtcgaagacgtcgccgttggtgtagctgtcgcccagggtcagacgcgagcgcagcgcggtgatgtcgcgctccagccaggtattgacgtgctgccacttgttttcactggtcgacgaactgccgctgctgctgtagctccaggtggtgttatcgcgcagacgccaggcgccgagattcagcccgctctgcaggttcaggtacgcgtagttgctgctgccgccgatgtcgttatggacgttgttgccggtgaagttgtagttcagcagcccggcgttaatcccgtggtcccagagttcgggcggaatatagccgcgggcgcggttgcccataaacgcctggggtacggtcaggtacagccgctgcaggccgacatcgaagcgggtagtggcgtccttgatggtttcggttaa

SEQ ID NO: 187300 - DNA, 1194 bp, Klebsiella oxytoca
atgcctgcctgccgagtatgtcagaatttcttccgggatgctttagctccgtttcacaaataccgacaaaatgcccttcttgacgccacgcttgccttaatcaacggcgcgtcactgacgctgaccagtatcggacgttatttacccggcgctgctcaggtcaaaaacaaaatcaaacgagttgatcgtctactgggcaataaatcactccatcaggatattcctctgattttcaatggcattatcaccatgctgacacggaaattatcgctgtgtgttattgcggttgactggagtggctatccgtctcaggaatatcatgtgctccgcgccagtctgctttgcgatgggcgttcgcttccgctgttaagctggatagtcccgtcagaaaagcagcagaatggacagatacaaaaggccttccttgatgcccttgccggggcggtgaacccgacggccagagtcatcatcgttaccgatgcgggcttccagaatgcctggttccggcatatccggtcgctcggatgggattttattggccgtgtcaggggtaatatccagatgcgcctgaacagcaaaggtgaatcctggttcagacgtcaggaattacaggccagcagtaaaccagaatatctggggccaggcacgcttgcacgggcggaatatgcccggtgtgagggacatttttatctgcacaggaaagaaccaaaaggccggaaacaccggcactcacggtgtcgtataaaacgcaaatctcaggttcgcgacgggcgctcttcagcaaaagagccgtggctcatcttcagcagcacagacgactttaagccacgtgaaatcatgaagttatacagtcgccgaatgcagatagagcagaacttccgcgatgagaaaagcgaacggttcgggttcggtctgcgggccagttacagccgttcagcgggaagaatgctggtgctgagcctgctggcaacgctgagcacaatagtcctgtggcttattggttatcatgcagaaagtaaaggattacatgtaaggtatcaggccaatagtgttaaatcgcggcgggtaatctcttatctgacgttagcggagaatgtcctgcgacactccccgctaatattaaggcgaacggtgctgagcaccgttcttaaccacctcgccagagcctaccgaagtatggtgctggtttattag

SEQ ID NO: 187301 - DNA, 612 bp, Klebsiella oxytoca
atgtattgccttattactctttttttcattttaaccggtttgtcggctaatttaagttccagaaactgggctggtcggttgtctattggctatccaaccatggacagtttcgtaataatcgttgcaattatatttacgattttctttattagaaacaaaaagcaaaaaacgatttataacatcattttcatcgtagtgctcatcatgcaaaacactgcaacgggttacataatgttggccggattgggtggattaatgatgctgtcgttaaaaggtacatataaaacaattcctgtctttttaggagctatagcaatttatattggatatcttgtctatgattctctatggatgtacatgggacgctttggtattttatttgtcgacaaaattaatggtttcatattcggtgcggatacaagctctatagatttaagacaaacacaaattgctattctattaaaagatatggaaagttactttctatatgtactctttggtaaaggtggcaatgaagcgtatttagttgaaagtacatattatgcgttctatggtttttgtggtttgtttggtcttgctctttttgtattctgcaagttttatgttggataa

SEQ ID NO: 187302 - DNA, 924 bp, Klebsiella oxytoca
atgcctttagccattgaacaactcgatgtgtctaaacataatattattctttcaagctgccatgcagtctccaaaggagttattactgggcctgatcagcttcatatctgctatgtgcactcaccgatacgttatgcgtgggatctacagcatcaatatcttaaagaagcaggcttaaataaaggattgaaagggctactagctaaatggcttttacataaaattcgaatgtgggattatcggacagctaatggcgtcgatcattttattgcaaactcacattttatagcaagacggatcaaaaaagtatatggtcgcaattctacagtaatatatcctccagttgatgttaatcgattttcactatgtgaagataaagaagattactatttcactgcttcccggatggtgccctacaaacgaatggatcttattgttgaagcttttagtttgatgcccgagaaacagcttatagttataggtgatggctcagaaatggataaaattaaatcaaaggccacgtccaatgtgaaaattttaggctatcaatcaaataaagttatgcaagagcatatgcaaaaagctaaagcatttgtttttgctgcagaagaagatttcggtatcaccccagtggaggctcaagcctgtggaactcctgtaatagccttcggcaagggaggatctctggaaacagtccgtccttatggtgtagataaacctacggggattttcttcgagaaacaagaagttaaatctttaattgatgccatatctgtgtttgaatcaaatattcaggcttttattcctaataattgtcgcgataatgcgttgcggttttctgttgaacggtttcaaaatgaaatctcagcttttatagaaagcaaatggaatgaatttcaaaatgataagaagatcgtttattaa

SEQ ID NO: 187303 - DNA, 435 bp, Klebsiella oxytoca; identical to SEQ ID NO: 177477

SEQ ID NO: 187304 - DNA, 1770 bp, Klebsiella oxytoca
atgtctgcatatgttacaatcccaagaaatacacttcttcccgcgaaacacaatgtcatgaatcgtccacgcttatattcgtatatccgttactccagcgaacggcaaggcaaaggtaactcgcttgaacgtcaaaaaagctacattgctaagatggcgaaacagatcgccgaagaatacaagttggaggttttcgaggagtatcaggatttaggcgtatccgcgtacaagggtaaaaaccttcaagaaggcgcgttatccgatttcatagcccaagtgaaatccggtgtgataccaaaggggtctttccttttgattgaatctcttgaccgcttctcgcgtcagaacgcaatgcaagcggttaatttgttcaccggtttactgcttaatggcatcacggttatcaccgggattgacagacaggtttacaagcatactgatgcaaataacgatacatttcagcaactgatgtttagtgtgatgttgttcagtcgtgcaaatgaagagagttcaaccaaatcgcaacgaaccattgctagtgcgctatccaagatagaacgtcaccagcaacggaaaccgggtgatcctgtaatcgcaataaaagagttaggatcggataaatggtggacagattcgagtagtggctatgttaacccgcatccggtactgttccccatagcaaaagaaattatccagttgaaacaagatggttggtctaaccggatgatccttcagcacctaaaaaacagctacgatgggccgattattggcaacaaaaaatcaaaaggtatatggaatatgcagcattgctccagaatccttgaaccggctatttatgggcgaaaagtgattacgataaacaatgcagaatacattctggacgattattaccctgcgattatcagcaaagatgaatacgaagcattaaaacttcaagtaggaaacaaagggtttgcccctaatcgtgagagtaacccagaaataccgttactttccggtattggtattctgtactgcgcacactgctcatgctatatggttaaagccaaatcaacccttaaaaaccatccacatgcttaccgttaccagtgtgcatccagggatttacatcaagattgtaataagtggggattcagagcaagcacccttgaacggacaattttacaactgatagctgaccgagttttcttgccgacaaaatctcaaccatctggtttagaaggtaaaatagcagatatacaatcacaaattgagaactatgtattagctataggttcagctaaaagtccagaaatcattaacaacatcacttcgaaaattgatcaactggaacaagaaaaacaaagactggtagtggcaaaaagattatacgatgaatcaatcgtgcaaatgaacactgaagggtgggacaagttcagggagtttgacattaatgacgccctagcccctttacgagcaaaaataagggcaagcattaagaccgttgttatgcgcgttgattgcttcagaatagataagaaacacaatttgtttaccatcacataccgcgatcagcagaaacaacgcgttgttatcgaaaacaactcaggctggaggaagggtaaggtttatgttgaggtgcagactatcaacaacactcaacttattgaatctgaaggtttcatactgcacgaccatattgacatattaatcaaccgagataagttcatgatggaagtgaaaaaacgactcgagaatcctagaaccctgatcgatgaactgacagaataa

SEQ ID NO: 187305 - DNA, 864 bp, Klebsiella oxytoca
atgaaaccgttaaaatcttttaaaatcattatgttgctatcaattactctcccagcagcagcactagcaactccaagtagcttcaatggtttccatgatattggttctatagatgaattaatggcccttccacgagaggagctttgttcgaacggcgggccgtcgcgaagtgaaatcgatctaatactccttgatgggccactagccctgcctatgtatcaaaatgatccaaatgcagctcgcttgcttctcaaagaacaatcccaaaatatcagagccaagattaagcaaaaatgttcagccaaagatagtgtccccctacgaaaactgacgaaggcaatgcttagtaatgaggaagaaatgtgcaaagccggtgcgccaactaaagacgaactcaaggtttttataaaggaatcgaacgaaattgatattgatgagcaactaagaaaaatgccttatgagggacgccttcttatggaggaggccgcaaaattgaacggaactacattccgtgaaatgttcatagacgatgtgactaacgctgcggcaaaaaattgggaaaaagcctgttcagaaaaatcatatcttaaaaagagtaaaaagaaaggcagtgatagtaaaaatgatgacacagaaccaaatttcgaaagcgaagacaaggctgatttcagcaaagaatataatgttagtgatcaaaaattaaacgacgcatggcaaaatttaaataaagaaacccgtaagagtttgttaccagcacaaagacaatggataaaatcaaagtctgcctgcaatggcaactgggaatgtctcactaatatgacgaacgagcgtattcttgaactggaagctgaaaatggaaaataa

SEQ ID NO: 187306 - DNA, 351 bp, Klebsiella oxytoca
atggaaaataatggactagttagagtattgaaaaacgaatggttgcagtcatctcctgatagttcctactccgggaaacatatagttggacgatttcatctaacagatacgttcatcgtaaaatatatgatgctggtacatgaagtcgatataccggattcgtgggttagtaatagcttcactaacataccagatatcgacacccgcaaggttatgtatatggaatgcagtgatatgttatcgaatgacacaatgaacgagatccgtaacgcgattaaatccccaccagaaaacatgagattatatcgaaatagcgatcaagtaattagtatagaaatcatggaagaatga

SEQ ID NO: 187307 - DNA, 354 bp, Klebsiella oxytoca
atgagtaagacaattagaattgatgatgaagtttatgctcggttaggtgcgctaagtacggattttgactcaccgagtgaaactataagaaaaatcgttcttcagtacgaaaccacgcttgccgcagaccttatacggcctgttattgaaggaaaaaaagaaaaccttattgctgaagagaagttaggcttaaaaaaatgcagttttacagtgcttcatcattttgatgtagaagcagttaaatcagtgatggaaagtatcaaaagtgaactctcggctccaggtgagtttgaggttacttatgattgttcaattaatgcgcttactggtgaagtacagaaaaaggaaaagtag

SEQ ID NO: 187308 - DNA, 615 bp, Klebsiella oxytoca
atgaatgtccgtatctattgccgcgcatctacagaaggccaacatgccgatcgtgcactgattagcctgcgcgaatttgcgcaaagcaagaactggcagattgccgaagagtacattgagaatgccagcggtgcgaagctggatcgcgtagagctaatgcgcctacttgcggaagctcaaccgggtgatctgcttcttattgaagcgattgaccgtctcagccgtcttaaacatgaagaatgggctgaacttaaagctacgctgaatagtaaagggctggttattgtatcaatagatttgccaaccagttggcagatggttgaaatgtccgggaatgaccttaccagtggcattctgcgtgcagtgaatgcaatgctgatcgatatcctagcgacaatggcacgacaagattatgagacccggcgtaaacgccaggcgcaggggatcgcgaaagcaaaacaggcaggtttgtacacggggaaagaaaaagatctggaagcccgtgagacagttcgcgaaatgctagcgcagaacgttaaaccagctcacatcatgaaagcggcgggtatcagtcgcgccacgttttaccgaatcaagaaggagttagtgagctaa

SEQ ID NO: 187309 - DNA, 594 bp, Klebsiella oxytoca
ttgagcgctaaattcgaagttacaggtctcttttacgagtcgaatggtttcaaattacgaaggtatctcgatataaagcgagccaacattactctcgatgagcctgatctcatggttgtaatgatgaaccctggttcatcttaccctttgaatggtattgataatagctccttaccatcagaggcacatccagatactacacaaaaacagattatgagagttatggatgcggtggggtttgattatgcaagaattctgaatttgtcagatcttcgcacgtccgattcaagcgagctgtatcgtttcttgaaatccgatgaatgtagtttagtagagcactccattttttcgcccaatcgtcagtctgagctagagcagctttttgtcgaaggtataccggttatttttggctggggtgtaaaccaagctttagttcctctagccaagctggcaatagaagctttgcgtattagtaaccctctcggaattttaaagccaaacactagatactcgtactttcaccccctgccaaaaatctacgcaaagcaacttgagtgggttcagcatgtaataagccaaagcactcggacatag

SEQ ID NO: 187310 - DNA, 687 bp, Klebsiella oxytoca
atgtttcccaggggagaaatactacggaacaaagtttacgaaagtatttattcaactttaaaatataccatcatccaattagatttgcaatgtttttttcattgcatcccgaaatacaccgttgaaggtatggaggccgctatagttttcggcgttaacgcaacttggttgttcaatagcgtatatagaaaactcgattatacctattacacttcagtgaacaccgacggcaacgttatcgactttgtggtattcggcattctgcacggtctgtccaccaagtggtacatggtaccggtggttgcggccatctggtttgcggtttactacggtatcttccgtttcgcgatctcccgctttaacctgaaaacgccgggacgcgatattgaaacaacgagcgcatttgagaaggctgtcaccggcgtgaccggcaaatcagggtataacgttccggcgattctggccgcgctcggcggcgcggaaaatatcgtttcgctcgataactgcattacccgcctgcgtctgtcggttaacgatatgagcaaagtcgacagcgccgcgctgaaagcgaatcgcgccatcggcgtggttcagctcaaccagcataacctgcaggtagtgattggcccgcaggtgcagtcggtaaaagatgaaatggctgtcctgatgaataccgtcgaggcataa

SEQ ID NO: 187311 - DNA, 1212 bp, Klebsiella oxytoca
atgacatggcaacaattcaaacagacgtggctgattaaattctggtcacccgttcccgccgttatcgccgcggggattctctcaacctactacttcggcattaccggcactttttgggccgtcaccggcgaatttacccgctggggcggacaattgctgcaacttatcggcgtgcacagcgaagagtgggggtactacaaactcattcatcttgagggcaccccgctcactcgcatcgacggcatgatgatcatcggcatgttcggcggctgtttcgccgctgcgctgtgggcgaataacgtgaagctgcgttttcctcgcagccgggtgcgtattctgcaggccgtcgccggaggcatcattgccggcttcggcgcccgtctggcgatgggctgtaacctggccgccttcttcaccggtatcccgcagttttctctgcacgcctggttctttgccatcgcgacggctatcggcacctggttcggcgcgcgttttaccttgctgcccatcttccgtattccggttacgatgcaaaaagtgtcgcaggcgtcgccgctgacgcaaaaacctgaccaggcgcgacgccggttccgtctcgggatggtggtcttttttgccatgatcgcctggggtctgctcaccgcggctaaccagccgaagctcggcctggcgctgctgtttggcgtcgggtttggcctgcttatcgaacgcgcgcagatctgctttacctctgcctttcgcgatatgtggatcaccggacgcaccaatatggcgaaggcaatcattttcggtatggcggccagcgccatcgggatcttcagctacgtgcagcttggcatggaaccaaaaattatgtgggccggccccaacgcggtcatcggcggtctgctgtttggctttggaatcgtcctggcgggcggctgcgaaaccggctggatgtaccgcgcggtggaaggccaggtgcacttctggtgggttgggctgggcaacgtgataggttcaacgatcctggcatactactgggacggactctccccggcgctggctacaagctgggataaaatcaacctgctggcgacattcgggcctttcggcggcctgctggtgacctatctcctgctgctgatcgcgctgggtttggttattggctgggaaaaacgctttttccgccgcaaatctctcgccacctcaacggttaaggaaagcgcatga

SEQ ID NO: 187312 - DNA, 699 bp, Klebsiella oxytoca
atgaaagcattcctttttttatctttatttttggcttcagtctcagttagcactagcagcgttgcagctgtttctgtcgggggcactcgtctggtttttaacggcaatgaaaaagaggcttccattactgtcagtaactcaaacaaagggattccggtacttattcagtcctgggtagaccggggggagcatgacaaatctaaagctccatttacgatcacgccaccattgtttcgcctggaaccagggcaggataataccttacgcgctatttacagcggcgaacgactcccggatgatcgcgaatctttattctggctcaatattaaaagcatcccgtcaattaaaaaagaggacatgcgcgaaaacactttacagctggcgattaaaaaaaggctgaaatttatttaccgccccgcatcaattaagagtataccggaagaaagcgccagcctgcttagctggaaaagagtaggtaatcagattcaggttactaacccaacgccgttttatatgaactttgggatgatcaaggtaggaggtcagatgtttaagcctgtgctccctgaacaaacctatgtagcgcccaaatcagagctgttaattactattccatccggtgcggccagcaatagtgttgactggaaaataattaatgactacggaacgagtggcaaagagtttcacgccacatattaa

SEQ ID NO: 187313 - DNA, 123 bp, Klebsiella oxytoca
atgcatggatggatcgtcgccgcgaaaacagcgagaagccttacgggacaaggcttagagccggacaagccgtttctgcacggctggtcgggaaatgagatttttttgagatttatgcgatga

SEQ ID NO: 187314 - DNA, 735 bp, Klebsiella oxytoca
atgacggataaacatccaactaaagatgaaaaactcggatgcgctggttttcatactcgtttgcgaacgattattgaaaaatttaaaagcaataacgcatttgctacagcatcaggcatctcgccgtcagggctgaacagactgctggatggtggataccctacgcttcccatccttatcgcattagctaaagctggagaggtatcagttgagtggctatcaacaggtggtgaaccgttaaacaccatagaaatcactactaaggcgaatgggctggtgcctataacggacgtcaaaggaaatgaggttgatcttgatgagtttgtatttgtgcctcgatacaacatatctgctgcagcaggacatggtgcttggaatgacgacgaaacgcccatgtttacagtatctttcaggcgttactggataactaatcatcttaaagcggaccctgcaaagctatcagtgattagtgtctatggggattcaatggaaggagtattaaatgataaagatataatattgataaatcacggggattgcgaaccaagagaagggatctatgtcttacggattgatggccaacttatcgttaaacgcgttcaacgccttccaggctcaattttacgagtgaccagcaccaatccagcgtacgaaccattctcagtgaatttaaacagcttacagggagattttgccgttgtaggcaaagttgtgtggtacggaagagtcatttaa

SEQ ID NO: 187315 - DNA, 168 bp, Klebsiella oxytoca
atgaaaatatcagctgaaagatttattgaccgtctgatgatgaccacacatctgcgggcgatcgtctggttgttttgcgttttcttttgcatcgctgtgtggggcttaggcattcactacagcctgaaaatgattgaactgttattaaccgtatttaagggggcttaa

SEQ ID NO: 187316 - DNA, 264 bp, Klebsiella oxytoca
atgaatatcaaacctccaaagcaactttataaatgggataaagcacgggtgaaactcgccagacccgcatcaaacatgatggcatcccttccgacaggtacaaccggaacagtaatgaaaatggggagaggtcttgagtttacctccgatgcttgccagtgctgcggtgttcagattcgtataacgagaatgggtcccgataatttcgaacttattgaattaggaccgctgcccggagggaacaatgaagagcctcctgcgtaa

SEQ ID NO: 187317 - DNA, 435 bp, Klebsiella oxytoca
atgaatctgcaacaggtaacagagctactgcccccggtagtcatccagatagctgacctcatcggcttcccggccaccgagcggctgctgtctgcgttcggtggcactacctttccgatcggaaaaggtctccgcgctttcggcggtcaacgtgccgctctcctccgcgataccattggcgaccacaataccaagttgttgttccagaaatttacgggtgaacctctgtatctccctcgttgtgagcgagccttacgcgagttgcgcaatgttcgtttccttgctgaatttgatgaagttaaccagagcggcacttcttcgctgatggccatgacgttactgtgtccgaagtacgggttcagcgatcgtactggctggcatcttctggcgcagcgtaaaaactcatctgagcataatcaaggtgcattattttaa

SEQ ID NO: 187318 - DNA, 528 bp, Klebsiella oxytoca
atgcttttcaaaacaatatctttgggggttttgatatcttttatttcttttcagtcgttcgcggtggatggctacaagggtgtaaaattcggggctgatgttaactccgttcttgcagcaaaatggtgcaattttcaaaagtacaaaggtagtggtatcaagggattgcaatcgtattactgtgaaaactttaagttttctggttcagatacattggcgatggctatctttcttgatggaaagtttgagaggatcgctataagtcttaattcagggattgcccccttaaccgctgctcttgagaagaagtatggtaaaccatcatccactacaactcctgaagaaggtcaaaaagtaatggcgcaaggtgggtctctttatattcgatatgataaagatacagtacttttagtcggtaccagagacatatccagcgggcaggacatgagtcagttgatctactcttctgcagattatgataaaaaattagctaacttacaggcgcaaaacctagaaggcgacctataa

SEQ ID NO: 187319 - DNA, 1272 bp, Klebsiella oxytoca
atgcctgacagcgttgaccttagctatgcgatcggcctgaaacccgctcaggccatcgagtatttccagtccaagggctacaccataggctttaactggcatgaggtggaggcgcgggcgcacgcgacggcgttcaccgtcgctggcatccttcgccaggatattttgcaggacgtgcgtgccggcctgcaggattcactggataacgggctgacgctggaacagttccgccggcagatgacgcagaaactcacgcagaaaggctggctggccgataaggcgaagctggtcgccgatgaggatggcgtactggagggcaagcagttaaccccgcgccggctacgcaccatctttgaaaccaatatgcagtcgtcttacggtgccggccgctacgcccagcagatggagaatgccgccgaccgcccgtactggacgcgcgtggcggtcatggacctgcgcacacggcccgcacacgcggcgctgaacggactgacggcccgctatgacgatcccatctggcagtttgcctatccgcccgacggctggggatgccgctgccgcgtccgggcacgttcgcaaagcgatatcgacaacaagagtatcaccgtctggtcgagcgaggggcatctggaaaccgtgcagcaggcatgggggccgcaggatacccgcgaggtgcaggcattccgctacaacggccagctctataccccggatgccgggtttggccacaatccgggtcagggctggctggcgggtctcggtcagcgcctgatggaccgttccgccaccgcgccgccgaaaatggccgcgctggccgtggagcacacccttgcggagccgcagctgcgtgacgcgatcacctctgatatgcgccgcttcgtgaaccagtcgctgctgcgcgagccggccagaaccttccgtcatgccggcgcactcagtacccgcacgctcgatgcgctgggtcgtagcgggacgctgcctgactcagcagtactgactgtcactgatagcgcggtggtacagtctcccgggccgctctgggagctgctgccggaacagctgcgccagcctgcagcggttctggctgatggtgacgatctgctttatgtcatccgcaatggcgagtcactccaccaggtgcgggccgttcccgggcagaacgctgccggttacgagctgcagttaccgggcggcggcgaggccctgacgccggcctccctgcagtcgctggcggagttaccgttactggagggcgcgttaaatggcttataa

SEQ ID NO: 187320 - DNA, 453 bp, Klebsiella oxytoca
atgcctgaaattacgattactgcaaagcgcgacgggttccgtcgctgtggggtggcacaccgtgacgtgccggtgacctggccggatggcagttttaccaaagagcagatcgccatcctgcgagccgagccgtcgctggttgtccatatcggcgcactcagcggcgatgacgacaagctgaaggccgcgcagggacgcattcaggagctggaaaccgtcgccctgcagctcaaagaggactcggttggtctgatgcaacaactgcttgaggtgaccgctgaccgcgaccgcctgcaggctgagctgacggtatcaggcagcgtgcctgtcccggaggtcaaggataacgccgctgacggtacggcaggcagtgcgtcagctccggaggcgaaggatagagccgctgtagatgatgcagccgctgcggacacctcagccaaagcgaaaaagtaa

SEQ ID NO: 187321 - DNA, 429 bp, Klebsiella oxytoca
atgtacgccacccgggaagatatggtcaggcagtttggtgaaacggaatgtatcgcgctttccgatcgtgactttaccggtgagattgacgacgacgtgctgaacggtggccttgagcgggccaccgccactatcgacagctatctcgccggccgttatccggtgccatggaccgataccccggggatcctgacgggtaaatgctgcgacatcgcacggtacgaactgaccggcgcgcagacgcagaacacggaggagatacgtcaacgttatgaagacgcaatcaggtatctggagcgtgttgctgatggccgcatcacgctgggccgtctgccagatggttcagtcgctcagggcggtcgtcagtcccgcttttcctcggctggccgggagttcgggcgcgataaaacgggcggaggtgcattttga

SEQ ID NO: 187322 - DNA, 375 bp, Klebsiella oxytoca
atggcacttgaagaatacgtcggcgcgatcgttctttactgggatggtctggaaattgaagtgaccgacatccgtccccagacgaacaccggccgcaagctggtcaagaccatgaaccggaccggccgcgccaaaggttacgcgaaaggtatcgctgagcatcagatgcagatcaccgttgttatcccgaaaaacggcaccgagcctgactgggatgacatggtgggtggcaagctgacgacaactgaccttgatggtaacccgttgaccagttacctggactgctttaccacccagacgggtgaacagtacagcgttgatagtgaagcccgtcgggatgtcactatccaggcactgcgtaaggtgaaaggttaa

SEQ ID NO: 187323 - DNA, 123 bp, Klebsiella oxytoca
atgacgctgggcgagctgcagtcctggcttgacgatctggcgcggctgcaggggaaaaaacctgcagcccgttcccctcatatcaaatcccgcagggcctccaggaaaaagggaaaaaggtaa

SEQ ID NO: 187324 - DNA, 2223 bp, Klebsiella oxytoca
atgcgtgacttaaagcttgccatgaccctgcttgcgcgggatcagggctcaaaagccttacggcaggcgctgaccgatatttttcgtcagacgaacgccaacaagaaagccgaagacgatgccgcccgtgcgcgggagcaatcctcccgtgaaggtattcgtgcatcacgaaccctccagcaggaatatcagcgagcggcgagcgcccgttccacgctgggtattcgttcagaaaaagatatccagcgtgaaatcatgcaaacgcaggcggcgtataaccgactgctgcgctccggcaccatgagtgcgaacgaacagacccgggcattcagggcaatgactagccaggtctctcagctccgtactgagctgaacggtgcgggccagtccatgtcaaaaatggagcggatgcgtaactggggcggtaatgcgacagcgattgccggtggtgttacagcagctgcggccgtgctacgtgaacctgttcgcaatcagatgagctatgaacaacgtctggccatgatggccaataccgcctttgcagatgagggaatcgcaggtcgtcgttcaggcatgcaatcaatggatcaactgattcgccgggctgtgtccgttggtggcggtaataaagaaagtgctgccgggactctggatgcgttactggcatcaggtgctgttgattttaaatcagcagaacagttgttacctatgcttcaaaaatattcgaccgcaacaggcgctgaccctcaggatctggcgatgattgctatacgtctgaaacagacttttggtgtacagaatgaagacataccaaaggcgttgaatatggcaatcaaagcaggtcaggcaggttcgtttgagctggcagatatggctaaatatctaccggagcagttagctaacgccggtaatgcgggtatgaaaggtcttgatgattttgcaacattgcttggcttaaaccaggccgctgcaatcactgccggcagcagcagccaggcgggtaataatgtcacgcagttccttgccaagataaccagtagggatgcatccacggctgcagaacgtattaagtacaacggaaaaggtatcgatcttcctggttcccttgttaatgcgcaaggcaaaggcatgaactccattgatgctttcagcgcgatcgtcgataaaatagttgccagcaaccccgagtatagcaagcttgaaaaaaggcttgctaactccactgacagcgctgaccagcagcggattatggcttctcaggtaaaaatactcgagggttcatctgttggacaaattatcgctgaccagcaagcgttgatggctttggttgcttatcgctctaaccgcaaatatgcctatggggttcgggatagcgctaatgcgcagagaactcttgctgatggtgcgacagcgggtgacctgaactacgaattaatgtctgatacggcgggttttaaaactaatcagttaggaaaccagtctgacttcgcgcaaatggatgccatccgtccgctgtctgaagtgcttggcacgctctcaaaaaaccttactgactatgctgcagagtatccagggctgaccaccgccgttgcgggagcgaccaccggcattaaagcactggccgctgcggcagcggcgattgccggtatccgttttcttactggtggaggtcttcccgggttcggtaaaaaaggtgccggtggaggctctttcaacccttccgatctggtgacaggtggtggtgcttccggtgccggtgttgtcccggtctatgtgactaactggaaagatattggtggcgatgaaaagaacgggttaatggatgccctcaaggatgttcctggagccgttgggaaatttgcgacctacttcactgcagctgctgctatcaaagggtctctggatgaacagatggacgagatcaataaggaatcgcaagaaaaaggcgtttctcccggtgagttacttaaacaaaagatggatgcccaaaaaacgcctctttttgactgggattttagttcctggtggtcctcacctcagaatgtccgcgtccctgagtcagttaatggcttcccggtgccgccgttcgcgcagggtccggctcagaatttgccgattaacatcactactcaactgcaggttgatggtcgcgtgctggcggaagtcgttaacgaggcgaacagtcagtccgccacccgtggcccgcagggagggccgaactga

SEQ ID NO: 187325 - DNA, 624 bp, Klebsiella oxytoca
atgtctggcgatattaaagcagtatttgatagcgattttattgcaactcaggcgggttccgttcaggtttttcattttgataaaaatacccgtgagtttattggcactgaagatatttatgtccctctcggcgtcggaattcctgcattagcctgcctggatgaaccatcggtacaaaatgaatatcaggttgctgttcgttcggaagataattcgtcatggtctgttactgatgattatcgcggtatcactgtctatgaccttcagacgctggccagtcatattattaccgagcctggccccatacccgattctgtaactacctctacaccgtcaactccatacgacaaatgggatggctctgcctgggtaacggatgcagatgctcagcatgctgctgatgttgctgttgctgacatgcagaaaaaagatctgattactcaggtatcggcggatatatccattcttcaggatgcagtatccctaaatatggctacaaatgaagagaaagctcggttgacttcgctgcagacctatcgggtactgcttaaccgtgttgatacatccttagcccccaatattctttggccgataatgccctcagtggagaacagtaatggctaa

SEQ ID NO: 187326 - DNA, 2973 bp, Klebsiella oxytoca
atggctaatttaccggagatccctgcatgggattcaggaatccatcaacttgaagaatctgacagagctaaagcggggcctggtgggatactaaaccttcaggctaaccagcttgccaatagaacccaatggctaaagagtaatctcctatctattccagattatcgtgaatataccttttatatatcttcaactgacccggacggcaccatttccggacttgctggtacaccggttggaaaaatatttcgcgttgctcaaggatcgaatagtgattcatcgtttatatattacttaaataatgctggcttggctcaggaaattgcaaaggcccccggccagggagctattgagtccattctggcattaattagtgatcttggattgcgtgttagtccacttcaggcttcacccgatgcgctttttgacatcgtttcacgtaatggtctccgtccctttaaaatcgatgacgataatggcgaaatctcattaagtttaatcgctcgcttattaaccggggattccggtctgaatttcagcggtaatatcctcgataataatgcgcctgaggggtggttattcttaatttatgcgaaaaacgggctggttatcgcaggggtgaaagaagatggaacaaaggtcggctggggcggaagtgatagcggtggcgggcaggctggcggcattacccctggcgacacggcagtgggttatgacgatattcgtaactacactggcgacgctacggttcgtgatgttgtgggtgagcgtattggcggcaggttcgtcgttgattcgtctgacacgtcatcgccggatgatggcggcggtgttctggtcggtgttgacggtcgtcgctgggtccgccagtgcgatttcgtttcttacgacatgttcggcgctccccgcataccggaggacacctatcagtcatatgctctgctttccatgcagggaaatgaagcctccgcgcaggcgctgctggccgaccaggcggcagctgatcaggccatgataaattgccatgcttttgcgaataagcacgcgatcccggtcgtccagaatgctggccgctttctctggatcggcgagtatgtgattgttcgcacgtcatcatacctgacaggctgtactgtcgtgacctgtaaccgaagtggtctggcagaaaatcgatggggtaaagttgacggtgttaacgatggcgcgccggacccggtttacatgtaccgcatccaggggaaaaaccgcattgactttacgccttcggaactgaacgagcttaacaccacctacgcgtcttatctccggcggggcagtatgcggcttcccatgcctaagttgtatcagtatcgcgggggatatttcgggtatatatcttccgcagtggaactgtaccgcagtggcggacgcggcaatccccgtcagcacgttcattttcgggattttacccggatcggaaggaacggggcgataactgacgtatttgtgaaaaatacgccagcaggtaccgtgtcagaagcgtggatccagccaaaagaaagcgcctggcttaacttttacccgccaacattcttcgaggctggcgctgaccgccggttcgttaatatgcagattgaacggtcgcaggtgaacatttgcgatttggtgatggagaactgggctacgggcaacattgagtcacgggtggccatcagctcttatggtgtctgcgatctccgcctgcgcaacgctacggctgaatgtatgccaaacgcgaataacggggcctacgtcatctgttttcgcaacagtatcgaagttcatgttgatgcctattacgggctgcatggctggggattccagggccatcacggtgtgaaacgcctctttatcgatcgcagcgtcatgaaccggttcgattttcactcgtttggctatgacgtctttatcgacaatacccgcttcaaggggaagcaggtgaatctccagggcggcggagtattctcaatgcgcaacattgaatttgacgttgtccctggttcaacagcgcagagcggtacaatggaggatcgccttaactacttcatcaacatgcgtgaagattatgccggagactgcgagtgtaacctttccattgatgggctcgtggtcagattcgatcgcacggtcaactggggagggaataacacctttacgtttgatgttgtccgcatgaacgccggaacggctttcgactacggaattgacacaaaagacccgcataccgttattggcaggaatatcgttttcgatctggacgggatgtcagcgatattgccggataatttcgccttctcattctgccggccgcttaaaaatctctacacccctgccgatcgcacgtacctcccgggcctgataaaagttgagaacatgacggcgattcatgtgccggacgataaaaacgcggtgatggcggtcttccgatgtggggatgatatggcgcaaaatccgttcggcagtcgggtgaagcttcgcccaaatggtaccaacgccgacatcatcgctgtggacgttgtcagcgtcatcaataatccggtcgtggctcagaacgccagcccgacagtctatatgccgggtgaggcatcagaatgggatacggttgtggacggctcgacataccggaccagtgaatattcatggcgaccgaaagttacactgcgtaactgctatccatcaatcattaatgcaacaggtgtaaaagcagaatttgatattcacgggggattactcgcccgctacagcatcggcaatacgggaaaccgctgtcgcgtgacaggggctgatattcagcttattccggactccaccggcacactctattttgacgcctcaaatgtcagagcaacaggctgtgactggtttgacccgatgaacggggcgacttacagcggcatacttaacggcaccggcaacgagaaccggggcaccccagcacactcacccaatatttaa

SEQ ID NO: 187327 - DNA, 729 bp, Klebsiella oxytoca
atgtccggaactcgtattttttgcaatcagattatctccgtcaccgactgggatcacgactatgtaaccgtgccttctgtactggaaagccagtctccgctacccacgcttgccagctttgatttactcaaccctctggacaacagcggacatggctatacggtggcccctgggggcgggcaggtgcgtgactggggcctgcattatgaagatggcgctcttccgtcaaaaacggatttttcaaaatcaggacagggcgcagtgtcttttgtcaccgcgtttaaattatctgcgttgaatcgttacacacatatcatcagcaatcgtgttgcaggtggcggatttaacctttacttcaaaaacggtctctacatgtcggtcacttacccatccgggaataccgttatcgtgagtgatggcactgtcagtaagcccgaagtgaacacttggtacgtcgcatcaggaatattcgatccggcaaacaataatgtaagggtccagttcagtgacctgggggtgaggcttggaagcatcggaacggatttcccggcgaacgcctcactgttagcgccattagttatagggggcgatacaacaggcagtacaacctcttcgatgctgggtgatatcgcatttgttgccctgtatgacggcgcatttacccaggcccagcgcgaagcaatggttgttgtaggtcaggatgtgttgcgggaacgcggtctaatctga

SEQ ID NO: 187328 - DNA, 858 bp, Klebsiella oxytoca
ttgaacgaatctgctccactcttaaaaccgcgccacacactacaagttgtgcgtattccttcttcagaagttcagaatttgggttttacttcattttatagctggctcaatagcttagggtatgacacgaccaatcatagtaatcagcgagctgattgggcgagagatggtggctggcacttgaaggcatgtaaaaataaggtcagtaaccaagaagatttctggttaatttcatttgatggaaaaggcggtgttttactttctgaaaagtcccaacaagactaccgaagtgcttatcgtcgcttgattaaagagggctatcagcccgcacgaatcgaagcaatgacgagaggagagctttactcgacttacaacgaggttagaggatcagcgcgaagccaccctcacttaaaacctagtcaggttgatcaagctgatttcgagctacatcccgatcagatacgggatatggtgaatagctcaatgagtaagacctataacacatatagtcgcttcggccaggctcgcttccgtaatgcagtattgctgaattccttgaatgtgtgtgctgtaactggtgttgagtatcgtgccgccttggatgctgcgcatatacacccgcatagtaatggtggtgcgatgaaggtagctaatgggattgctcttcgaaaagatcttcatgctgtttttgatcgcggtgatatggcagtcaatccggaaaccctcacgattcattttagtaagcgagcaattgatagctacctcgattttgaaggacacgtaattcaaacagtgctgtcacttgataaaattgctttggtcgctcgctgggaagagttctgctcttgcgtaaagtaa

SEQ ID NO: 187329 - DNA, 498 bp, Klebsiella oxytoca
atggcgggatcagattttttattaccaatggtggcgggtgtcgcgcttagttgcgtcagctatggatttgttgctcgcattgtttcaaaacgtcagatcagcacgctacgcgcagtttcatggggaattcttggaactctctcattggtgctaggcgtatgtgcattttccgctgtaagcgcagaacaccaggcagcgaaacacaagaccttgtgcttaggtagcgccccggaatgctatgcaaaagcgcaccacaaccccgtcaaagagtgcaagcaggtaatggacaagaaagcagcgtttcgccatgtgtggcaggaaagtgaagcgcggccagttttcgacacttacctttggcacaacgagcaaaagaaaacgattcaagcatttggacaacaggctaaggccattaacagcatgaatatgctgataccattgcaatacttttgtgtttttaacgccaacactggggaagtcatcgcggcttcatttgaatga

SEQ ID NO: 187330 - DNA, 2595 bp, Klebsiella oxytoca
atggatgttttacaggaaatattgaaatggtctagttccgagctacccctctgggcaagagactgcttaaggagacaattggcttctccctcattggaggatagtgattatgaagaattattggaattgataaagattgaaaataaaatattgccctccgataaattagaatctctccccttaaataaggatcatattccggtttcagcggttaatgatcaagtcattaagattaaagaactaagtagtcttgttcacgtgaacaggattgcgtctgaccaaaaaattgcattctgtgataatgggattaccatcatttatggtatgaatggtgcgggaaaatcaggatacgggcgagttctcaagcatgcatgtagagcacgagataaaggtggtgcgatactccctaatgtaaacctgcctggctattcatccaatatacctaacgggaaatttaaaatttctctgaatgggaaagaacacgatttacaatggtcttataattcaccatccccagaattgttgtcctcaattagtgtttttgatactctttgtgcatcatcatatctgaaagaaggcgaggctgcttatttacctcgcggtctcgatattcttgaagaatttgcaaatataataattcctaaattagcagaaaaagttttagccgaggctaaggctatagatgtgaataaagagataactcaagtttttacagatggcactagtgtatctgatatatgtaaagtattagaccataaaacagatgtcgtaaaattaagagatttagccactttaagtgattccgagctaagtagagataaagagctagatagagttctggtagaaaaaaatcctgaggaaaagtataaagaattactaagaagtgtatcgcacataaaagagctttgcgttaggatcaataatcaaagtaagtttataaataacgcggccatgacaaagcttaagtcattgatcgaaggcgttactaatgcagaaaaggcattaaatgagtcagcgcaaaaacttgcggccggagatgatttattgcctaacactggtgaaggtatctggagagatttgtttctgtctgccaaaaaatactcgctcagttgtgcttacccaggccatgattttccctccgttggtcgtgatgcaaaatgcgttttatgccagcaacctatatccgaagcaactgacagaatgttgcgcttcaatgagtttattaatgatgatatatctaaattattagatgaaagaaaatcttctctaaaaacagctagagaaaaaatatatactgctacccttgattttagttttaatgctgcaatacatattgaaattggcaatgagcatagcgaattaattgaaagagttaataagtatcaagaagatattatcaatacaaagactgcgatgctttcaatgattgatagtaagaacttcgcgaatatcgaatttgattataatccaatttcagagctaagacttctggctgctagcaagttacgtgaagcaaggttatataagcaagcatccaaaaaaagaaagattgacgctctaataaaggaaagtaaagaactcaaagcacgaattatgcttgcggaaaaattagaaggcttaatttctttagttggtaggttgaagttatataacactcttaactcaattagcttttcagcattatcaaaaaaagtatcagataaatctaagttgtttgcaaattcaataataagtaatgctttaaaaaaagatttggatgaagaattttctaaattgggtgtttctcatataaaaacagttctcaaaccaagagtttctaaggggaaggttttttatagtttgcttttggatatacctgtctcaaataaggtggatttaattttgagtgaaggggaacagagggctgtatcgttagcatcttttttagctgaattaaaacttgccaaccattcatgtgggatcatttttgatgatccagtatcttctcttgatcatcatagaagaagacgggtagcaacaagattggttgaagaagcaaaaaatcggcaggtaataatcctcacgcatgatatcgcttttttgagcgagttaatatttgctaccgagaaaaataatgtcgatagcttaatacatcacctgcaatggactggagatttttcaggctgcgtttatgatggtttaccttgggacaaggtcagctataaaactagagttgaaaagttaaaacaagaatctcggcaattagatccttggcctgtatatcccagtgctgagcaagataactcgatgcgaagattatatagccgtatgagatcaacggttgagaaaatggttgaagatgtgatattcgctgggattgtggttagattcagtgaaattataggagttggcaatttacataaattaagtgggcttgagcgagagtgttgtattgcgatttctgaactctggtcaaaatgccatcgtattactgatgctcatgatcaacctgcatacaaacagacagcattaccaagccctgatgaatttcgaacagatttagagcttattttagatttagcaaaaaaagcagcagcgactcagattaaaaaatag

SEQ ID NO: 187331 - DNA, 363 bp, Klebsiella oxytoca
atgtctttaaaaatccgtggtgtccaaaacgcaggggaagtagggaaggaaaagttaataatcaaagtcactgcagattgtaacttgattgatttcatggtgatggattgcacctacgacgatgatggacaaagctcaaataaacatcggcacgtctacatgttcccagaaaaggaagttcatgtgggtgaatatatcatcttgtataccggaagcgggacaaataagaccggtgtattaaatagagaagatgcgacggtgactcatcgtttctactgggggctggacacgacggtctggaatggagatggagatgaagccttgattctgcaatacgatatcgtcgataggaagaaagtttaa

SEQ ID NO: 187332 - DNA, 333 bp, Klebsiella oxytoca
ttgagaaccgtcgagatactgcaatacaccttacgcaaaggcaacggcgccacttttcatgccattatgcaggaaatcagcgttcccctacaccgacgccacgggatcaatgttgtttcgtttggcaactcgttgcatgacccggattgctactacctgatccgcgcctttgacagcgctgaaaaaatggctgcggttcttgatgccttttatgcgagtaatgactggcgaaacggcccgcgcgaagacattattcgccgcatcgaaaccagtgttaagacagtgattagcctaccatcggaaaacgtggaagggctgcgggtgcaatcgtag

SEQ ID NO: 187333 - DNA, 1941 bp, Klebsiella oxytoca
atggctcaacgtgataatctgtatcgccgtagcagcggtatttatgttgtccgtattgcagttcccgcccgataccgtctctacacgggacagcgtgagattcacgcttcaacagaaacaaacgacatcagaaaagcgcgagcgattgccgcagtcctattggctgtctggcagcgatgtttgggtgagtatcaaaaattggatagagaaaagttggtgagcagtgcgcctgctttggcgggcgaaggaatgatcagccttgctgaattttgcggtttaacgagtgcttccctgcaacaagttgctcagcgcctgcttgatacgaatatcccgctgttttggcttgctgatgggcgtcctgcttactatgttgaagacctttcactcgttgataaagacgatcctgaggtttctggatttatcatcgatagtgccattaacatcggtatcagaggttctctgagcggttatgttcagcccttggtttcatcacgtatattacgtcagatgatcgctggcgagccgctggatgcagaaaccgcatttaaatccttagaggcttcatccaaagccgcttggttcgttgactttcccggtgtcgaaatctcgcctaattcattgatgattcatcgtgttcaagccgagcgcttacgattattttggctgtcacatagcccctcactagctcctgcaactcctgagaagccaaaagcaatatccactgcgatattgtccccatcattgccggagaatgagtatgtaaatcgtaaatactactcggtgaaaatgagcgagctatgtgaaaaatatattcgctacaagcgcggggggaaattcaccgaaaaggcagagaatcgagttcgggaaggttttagcctattggttgaagtcatgggtgatccaaagcttataaaagtagatcgtgactatctccgtgagtatgagagcttactaaggtcgatacctgcacggcgtgatttagctaaaatccgatacaaaatcaatgacattcatgagctggtggttaaagcaaaagagaacggcgactctctaatgagcgataacaccgttcgtaaatatatgcgggttatcttcgaagctttccggtgggctgatggagaaggtatttttattaagtccccagcgaatcaattctttgcacctgtagaaaatgaaaagatggatcaggacttcaaatctgagttcactgatgaggatttgcacgctatttttaacagcccttggtttaaacgtggaactgtggatagaaatagcgagggacgcttccatcattaccgtgcatttcattactggttgccactcatcggattctttaccggagcaaggattaatgagttatgccaattttatctagatgatattaaacaggatgctaccgggttttatttctttgaaatcagcaacgaacgggccgatcagtcactgaaaacgattaattcacgaagaaaaataccgttgcatccgacattgctcaaacttggattaatccgctattgtgaagcattgaagaaagcaggtcatgagcgtctatttccagagcttccttatcactctgtaaaaggatacggagataaggcttctgactggtttaaccgttcgttgctcaaagaacggttaggttttgaaaaagaaagcaaaaaatctttccattcattccgtcacacgttttctaccaggctcaaacaagctggaatcgacagcgagacgcgtgcgcagtttgttgggcatatccgcggttctggtgagacagagaaccgatatagcaaagatcacccaccagcagccctttttgctgtgcttgagagcgttacgttggggctaccggaagtcgctccatttgtttgcgaagatggtgtcgatgcggtagctgatgcgctacggattaagcagagcaataaatcgcgaaaagaactgcaatag

SEQ ID NO: 187334 - DNA, 645 bp, Klebsiella oxytoca
atggtacctttaaataataaattaatactttctgcattaaaatctctgatatctttaacccatgggaatttttcggatatctctttaattccgcctgttaaattggcgaacactggaatcccactaacagcggcttctgcaacaacacgaccgaaaggttcgttccattttgtaggaaggagaagcacatccacttcagaaaaaagttcatcaataggtataaatccttttaacacaatgccacaattaattgcatccttcctcaaaacatcagaattactagtggatgcaaaatcgcctgctgcaacaaagttaaaattatttttatacttgactgcatactcaataaagacatcaaatcctttttcggttgttaatctgcccaaaaagccaatagttagcttattgcaagctttttttctaatatttactttttctattggattatatatatgtgtatgcgttgctttacccgcaaaaccattttccttatgtaaatcactaatgtatttactgatgccaaccattgcatctattttttggctcttcttctttttataccatgagtatgacttaacgaagctattatttatgtccatattcgctccatttttaaaaagtgtagagttaggatggaataagtaa

SEQ ID NO: 187335 - DNA, 288 bp, Klebsiella oxytoca
atgttcgtacatgacccacatgattttcgccgcgtccatcggggagccgccgcccagggcgataatcacgtccggtttgaaagcgttcgccagctcagcgcctttacggacgatggtcagagtcgggtcagcttccacttcaaaaaaaacttctgtttcaacgccagccgctttcagtacggaagtgatctgatccgcgtagccgttgttaaacaggaagcggtcggtgacgatcagcgcgcgtttgtgaccatcggtgatcacttcgtccaacgcgactggcagtga

SEQ ID NO: 187336 - DNA, 192 bp, Klebsiella oxytoca
atgacgaaacaacagaaaacagcgctgaacatggctaaattcatccagaatcagtctctgctcctgctggagaagcttaacgagcttgatctcgatgtcgaagccgacctttgtgagaaactccacgatgatgcggagcatcttttccgtacactgtcctcgagactggatgcattacaggatggtaactga

SEQ ID NO: 187337 - DNA, 402 bp, Klebsiella oxytoca
atggccagagtgtctattagtgaggctgcccgactgacgggtaagagtagaacgacactgcacaggttaattaaagcaggttacctgtccacctgtagcggtgaacgcaatgcaaaaatggtagatacttcagagcttttacgtgtctttggtccctttgaacaaccgaagggtgaacaccattccggacaggtctctgaacagcgtgatacagcctctgctgaccagagtgaacaggtgattcgtcatctgaaacaggagattgaacacctgaataccttacttttgtccaaggattcgcacattgacagcctgaaacaggccatgctccttcttgaaaatcaccaggcaaaattaacggaatccccggcgccatggtggaaattctggaaaaaatcctga

SEQ ID NO: 187338 - DNA, 843 bp, Klebsiella oxytoca
ttggttaactttatattattcattatattattcacatacacatgtattttttgtttcacccccccgaggagacaatataaatcaatatctctaattcctcaaaaaataaaagcaccattaaatagatatcgtttatacatatattcatctggtgcaatacgacaatcactaatgttaattgttatattatctctctattatacaattacagaaccatttaaatcagaattaattaaaaacttatcctattcattaatcgcaacttttatttttgacaccggcttaaacttcagcaaagaaaatataacaaaaagtatagtatccaggaaatggcacaattctttatactttgcatttgaaagattaagagcaatacatgaaatattcacagcacaaaacaaactagagatcacaaaagaactagccagcgacatggcgtcatccatactaatggaaaatggagctgttatatctaaaaaacacataaaaacaatgtggaacccttcttcaggagaaccacttacgtatcaagacatagtaataaaagaaggggataacttatactttgcgtctatgatgttcatcagagatgattatgaattcctacacagtatttattttgatgaaaatatatttctctccttccctcaactactaaaaccagcccaaagatgttaccgatcactagcaatgatacagcataatataaacagcaaacaaaaatttaacgtcacaaaaaaatcattagaaagagatctaattaattatttagaactgagatctacattattaatgaaaatggaagatgttcttggccactatgaacaaagagcaccacaataa

SEQ ID NO: 187339 - DNA, 834 bp, Klebsiella oxytoca
gtgattcggactctgacagcgactcggattcggacagcgactcggatagcgacagcgattccgactctgacagtgactcggactctgacagtgattcggactctgacagcgactcggattcggacagcgattcggactccgacagcgactccgattctgacagtgactccgattctgacagtgactcggactctgacagtgactcggattccgacagcgattcggattcggacagtgattccgactccgacagcgactcggactcggacagcgattcggatagcgacagcgactcggattcggacagtgattctgactctgacagtgactcggattccgacagcgattctgactctgacagcgattccgattctgacagcgattccgattctgacagcgactcggattcggacagcgattccgactccgacagcgattcggactctgacagcgactcggactctgacagcgattcggactccgacagcgactcggactccgacagcgattcggacagcgattccgacagcgattccgactccgacagcgactcggattcggacagcgactcggattcggacagtgattcagactccgacagcgactcggactctgacagtgactccgactccgacagcgactcggatagcgacagtgattctgattccgacagtgactcggactctgacagtgactcggactctgacagcgattccgacagcgactcggactccgacagcgattctgatactgaagcacccactgcagcacagaacatcacggttaatgacaatgttggttccatcactggtgcgcttcattccggtgatgtga

SEQ ID NO: 187340 - DNA, 600 bp, Klebsiella oxytoca
gtgattccgactccgacagcgactcggactcggacagcgattcggatagcgacagcgactcggattcggacagtgattctgactctgacagtgactcggattccgacagcgattctgactctgacagcgattccgattctgacagcgattccgattctgacagcgactcggattcggacagcgattccgactccgacagcgattcggactctgacagcgactcggactctgacagcgattcggactccgacagcgactcggactccgacagcgattcggacagcgattccgacagcgattccgactccgacagcgactcggattcggacagcgactcggattcggacagtgattcagactccgacagcgactcggactctgacagtgactccgactccgacagcgactcggatagcgacagtgattctgattccgacagtgactcggactctgacagtgactcggactctgacagcgattccgacagcgactcggactccgacagcgattctgatactgaagcacccactgcagcacagaacatcacggttaatgacaatgttggttccatcactggtgcgcttcattccggtgatgtga

SEQ ID NO: 187341 - DNA, 525 bp, Klebsiella oxytoca
ttgattcagtcatgggtggagaatgccgatggcgcgaaggacggtcgctttgtcatcaccccgccgctgttcgccatgcagggaaaaaaagagaataccctgcgcatcattgatgccaccagcaaccagctgccgcaggatcgggagacgctgttctggatgaacgtcaaagcgatcccgtcgatggataaatcaaagctcagcgaaaacacgctacagctggcgatcatcagccgcatcaagctctattaccgcccggcaaagctggcgctgccgccggatcaggctgccgaaaagctgaagttccgtcgcggcgcaggcacgcttacgctgatcaaccccactccctactacctgacggtcaccgaactcaacgccggtacccgggtgctgaaaaatgcgctggttccgccgatgggtgaagccagcgtcagcttacccgccgatgcgggtcgcgagattacataccggacgattaacgactacggcgcgctgaccccgcggatgcagggcgctacgcaataa

SEQ ID NO: 187342 - DNA, 954 bp, Klebsiella oxytoca
atgaccagttatccacgaattttgcgtccttttactttaccgaacggtaccgagcttaaaaaccgcctgttaatggcgccgatgacaacctgtaccggttattttgacggaaccgtaaccagcgaactggtggagtactatcgcgctcgcgccggcagtatcggcaccatcattgttgaatgctgctttatcgatgattacggcctggcgttcccgggcgctatcggcatcgataacgatgaaaaaatatccggactggcgaaaatcgccgccgctatcaaagcggaaggctcaaaagcgattctgcagatttaccacggcggccggatggtcgatccgcagcttatcggtggacgccagccggtcgcgcccagcgccattgccgcgccgcgcgatggcgctgcgacgccgcgcgcgctgagcggtgatgaagttgaaggcatgatcgcgaagtttggcgacggcgtgcgccgcgccattctggccgggttcgacggcgtagaaattcacggcgcgaatacctatctgatccagcaattttattcgccaaactctaaccagcgcgacgacgagtggggcggcagccgcgacaatcgagcgaaattcccgctggcagtgctggatatcactcataaaatggcccgccagtacgccgacgatgcctttatcatcggctatcgtttctccccggaagagatggaagtcccgggcatccgttttgatgacaccctgtatctgctggaaaagctggccgcccgcggcgtggattatctccacttctccgttggcgcaacgctgcgcccgtcgattgtcgatactaccgatcccacgccgctaattgaaaaatattgcgccatgcgctctgaaaccctggctcaggtgccggtgatgggcgtgggcggggtcgttaacgcagccgatgcggagcaggggctggatcaggctatgatctga

SEQ ID NO: 187343 - DNA, 942 bp, Klebsiella oxytoca
gtgtgcgctcatctccccgccgtaaatcgcatcttcctgacgcatccgctctttaatgaacgcgtgcccggtcttcgacatcaccggcgtgccgccgctgcgggtcaccatatccaccgtattccacgtcagccgcgggtcgtgaataatccgggcacccggctgcttctgcaggaacgcttccgccagcaggccaacaatataatagccttcgataaattctgcatcgttatcaaacataaagcagcggtcgaagtcaccgtcaaaggcgatacccatgtccgcgccgtgctcgcgcaccgcatccgcggtgtcctgccggcactccggcagcagcgggttcgggataccgttcgggaagtggccgtccggctggtgatgcaccttgataaaggtcaccggcacgcctgccgccacaaaacgtttctccacttcatcaatcacgtgaccggctgcgccgttgccggagttcaccaccagcttcagcggacgggtgaagctggccaggttcacgtagcccataaggtgatccacgtactcctgcagcaccgatatctgtcgcagggtgccgcgacgggacgcatccaccggcgcaaactggttctcttccgccaggcgctggatatcgcgcagcccggtgtcaccgctgatgggcttcgcgttttcacgcaccagcttcatgccgttgtagttcatcgggttatggctggccgtcacctctatcccgccgtccacgcccaggtggaaggtggcgaagtaaatctcttcggtcccgctcagaccaatatccagcacgtccgttcccgcatccatcaggcctctggccagcgccagcttcagcgactcgctggtcagacgcacatcgccacccaccacgatcgttttcggcttcagaaattcaccgtaggcgcgtccgatacggtaggcgatatcttcgtttaa

SEQ ID NO: 187344 - DNA, 402 bp, Klebsiella oxytoca; identical to SEQ ID NO: 187337

SEQ ID NO: 187345 - DNA, 480 bp, Klebsiella oxytoca
atgagcgccgtggctgcgcaccgcctgcagggcggctttcatattgcgcgggtcgttcatggcgtcgaagacgcggaacacgtccatgccgtttttgacggcgcgctcagtgaagcgctccaccacgtcatcggcgtagtggcggtagccgagcaggttctggccgcggagcagcatctgcaggggggtcttcggcatggcctttttgagctcgcgcaggcggacccaggggtcctcgccgaggaagcggatgcaggcgtcaaaggtggcgccgccccagcattcaagggaccagtagcccgcgtcgtcgagctgagcggcaaccggcagcatatcgtcgaggcgcaggcgggtggcgaaaagggactggtgggcgtcgcgcaggacgacatcggtaatggcaacggtcatggattcctccgagaattaagggttaagtcggcgatggtggtggagagcggcggcaatcaccggctttaa

SEQ ID NO: 187346 - DNA, 150 bp, Klebsiella oxytoca
atgagcatgaccatttattgtattttgtatgatcgcatttggtttaggcagtccagccatatcccacgcaattgccccatattcatgatccacatcaaaaacaaaaccatttataaaatatttattgttatatcctatatatttctttaa

SEQ ID NO: 187347 - DNA, 522 bp, Klebsiella oxytoca
atgctgagattcccccggccaggcgcggatgagcggcgtaaggcggcgtacggtgtcatcgttgccgaaaatacccagcgcggtaaaaccccagttatctttggcggaaccgctgacgatttcccagctctgaaacagatcccaggcaaaatcggccaacgaccgtggcgtacaggcttcctgcacctgaacgatgccggggtagagcgtctcctcgcgcgggaaggcaagcatagtgcagagatggcggatggcatcatcgctaagcgcttttccgttgtgcagtatcgggcgatgccagacctctggagtacaccattcggggagtttagcgattttcagcggatagttatcgagcgggtcggcggccagcatttcgcccagtgctgtcatcacttccggttggttatagcgtcgcgcgacctgttccatcagcggcagatggccggaactgacaagaaagcgcagagtcatccgcgcatctccctgctctttactcgatttgcccagcgccgcgggtag

SEQ ID NO: 187348 - DNA, 156 bp, Klebsiella oxytoca
atgtatcgcgtttttaccattgaccagcccctgagtcagcgcgtaaagggcggcttccgggtatttctttgtaaaagagtccagatggtcagcgtcgctggcatttttatccatcataagcagcgtcatgacctgagggtgattaacttcaactaa

SEQ ID NO: 187349 - DNA, 306 bp, Klebsiella oxytoca
ttgttgcaccgcctgcggatcggtggcgacgatattcaaccactccagctcggggaagtcgttatcaggcgccagttcgagcgccagccgattggcgatttcgggcttttccggcagcagaaaggcgacaagcgggcggcgacgtggggcaatcgatggcagggcggcgatcagtttatcggcacagcgctgccaggtggtcgcatcggcctgcgacaggtgtttacgcaaatgcaagtcgattttgctaaaaccatgctcaaaacgcaggtcggtaatattgtgactcagggtaatagcaactaa

SEQ ID NO: 187350 - DNA, 663 bp, Klebsiella oxytoca
atgtgcctgcgccgccgctggaccgccgaacagttccgcctgttcctcgtcgaccatccgctggtgcgccatctcacccgccgcctggtctggggagtctatagccaggaaaacgtcctgctggcctgcttccgcgtcgccgaagataacagctacagcgatgcagaagataacctgttcagcctgcctgaagggcaaatcggccttccgcacgtgctggaaatctccgcggaagacgccgccgccttcggccagctgtatgccgactatgaactactgccgccgttccgccagctcgatcgcaaccactatcgcctgactgaaagcgaaaaccgggccacagaattaacgcgctggcgcggacgccagtgccaggccgggcgcatcgtcggactggagcgcaaaggctggcagcgaatagaagatggcggcagcatctgcggcatgttcaaacccgccgccagcggcgatattgtgctggaagtggaacctttttcgctgctgtatggagaaaccacctacgacgaactcatcccgttcgagacagtgaaaatcgttaccaaaggcgatattgactacggcaaaccgacctttgctttcgcaacgcttgacgctatcgccgccagcgaatttatcaacgatatcgaatcgctattcgattaa

SEQ ID NO: 187351 - DNA, 1038 bp, Klebsiella oxytoca
atgaatattataggaattcgaatttctgagaatgtaggtgatcgtcatacagatagatatgatacaagagctatcgctaacggtcgattccacattaattcattattagatggtcatagagattatatcaatggccgcattttaaagaatagaattggtgagttaaaagcacaaaacatcttagttgaacgtaacgataactcatggataatgggtagagatcataatcctacttataaaaaaatatctgagcatacagtagctataatcggatgtggctcagtcggttcatctatatcgaggctgttaatacaatctggcattacaaatataatgctctgggatgaagactctatgaaatcagaaaattcttcacgacatctcctggggttcgattctgttaacaaaaataaagcatctgctctcgcatccaaacttcgtttagaatttccaaacaccaatatagagtattttaatgaagaatggtccgaaaacgctgaatcaagtacaagaattactgaggctgaccttatcctaagctgcactgccgattggaataccgagcaacaactgttaagtaaacaatctcagtgtaatttgggagttcttgtttttgcttttgttgaagcccatgcaatggctggacatgtaatagtaaatcaaatagattctggtgcctttaatgcctggcattacacacaaggtgaaaaaataggtgcattgagatatcctgctacatattggaaagaaaatacaaaaaaaagaattgctgcttgtgctggagaatttcagccttatggagcgatacctttagcaaacttacattcacttgctgcaagaacaataattgacttaatattgaatagatttcctgacagttcctttgcatatagctatcttggtagacaagaagaactggtagaacttggtggtcaatggaataattgttggataaataaatttggcaatccaaataaaggcgatcgaatcatttctttgatttatgaaaactcaagctggatgaataacgatgcataa

SEQ ID NO: 187352 - DNA, 501 bp, Klebsiella oxytoca
atgacaaaaatagagatgatgaactcattagaagattcgcagcaagaaaaacagatgacgaaaatagtattggacgattacctattgaaccaaatatcaatgacgatagaaccattatcagaatcgatgatgattctttcggagtcagtcagcatagcattaattcagacgcaggaagtattagagaagacagagaaaacggcttcaaagatatcatcattactaaatctgtcaaggaatatgatagacaaacaaatagacgatttagaaatacaaaacagaaaaatacacaaatactcaacggagttaaaaaacaatacaatcaaaaatcaaacaaaattaataatcaaggtggcttcagtcgttggtgtaataaatatgatggtagttatattaataggatacttgatcatgcagaaacagctaccacagccacaaataactttagactcaaaaaacgtagcaacatcaatagtggagcaactaagatcgaagaaatga

SEQ ID NO: 187353 - DNA, 1128 bp, Klebsiella oxytoca
atgatctcacatctcggacttattcgcaccttccttagtaatctgggcggcatcaaagccaatagcattaccatggttggcaataatttaggttttggcgtacgaaataaaggcgcgattgttgctaactctggcctctccttgactagcttaggttcactcaccaacgaaggctctatcgccagtaatggtatgatgactcaggtattctctgcaggcaattttaaaaatacgggaaatatatcctcgaataatatcgccttactaaacagcctcagttcgataagcaatagtggaaccatttccagcacaggaaatttattagtcaacgcatccggaaatatcgaaaacacgggtaaattcaaagcggcctccacattgagcgtaatgactaacggtaacctgaaaacgacatatggttccaatttactatcagataatcagttgacagtcaccgccgccggtaacattgaaaacggaggctcgaccagaggtaaaaacacaacggtcaccttcggaggagacacgcttaaagtcactggcaatatttttggctacgatactctgctggttcaggcgaaaataaatgaccagataacatccggggaaattaccaacgcgggtaccacctccggcggcaacgtgaccgtaaaaaccaatggtactctggcgttaaccaaaggtagctttatggaagcgactgatacgctgacgacaaaaagctactggcttaaaaatgaaggttatatgggggccgatacgatagctattgataactatgtcacccacaactatggggctattgttggtaaggataatgttggcattaaaacctatcatgagttttataatgaaggcgaaattttaagctcatcaaatatgacgctggatacacaaaatcacggtaatattactaaccgttctcacataggagctggcggcactttaaccatgtcagttaataaagtggttaacggaggataccgctgcggtttcctggggtgggcaacctgtggcaaaggcacgattaccacgaccaatctggttttaaattcctcacataaatacgccagtgaaatgggcggcactcagaagtttaagagcgcgaccattaacaccatcaaataa

SEQ ID NO: 187354 - DNA, 369 bp, Klebsiella oxytoca
atgcacgctaaaggctccggtgcttacggtaaactaacccttacccgcgatatcacccgctatacccgcgcaaaactgtttgccgaaatcggtaaaaccaccgatctgttcctgcgcttctcaaccgtcgccggagaacgcggcgccgctgacgccgagcgcgatattcgtggcttttcgatcaagttttataccgaagaaggcaactgggatctggtgggcaacaatacgccgattttctaccttcgcgacccgctgaagtttcccgaccttaaccacgtcgtgaagcgcgacccgcacaccaacctgcgtaaccccacctggaaatgggactttttcccctgctgccggaaacgctgcatcagttaa

SEQ ID NO: 187355 - DNA, 147 bp, Klebsiella oxytoca
atgcgtcttagtaaccgtcggacaagcccggggctgattttcgaagccgcgaagatagcgcagcacggtggtgctctccggcgtcgccctcagttgcagcgccaggttgaggttatccagaactgtcgcatgggcgaccagcggtga

SEQ ID NO: 187356 - DNA, 321 bp, Klebsiella oxytoca
atggggttcccatcaccggctgcggattacattgaaaccacgttaacagtgaactcactgtgcaacattacagcaaactcgcgagttatctcaaccgaccgtgggtatgttgtactggacttatcgctgaaggttaagcaggggagtattctgcttatacgttctgctggcgaacttcagtttgcaaagctaatgggtagatcgttcattacggtagatggagaatcgattgaaggcgatgccatggatgaggttgaagtgctcggagttgcaacgcacgtgatcaacgatatgaagcaggatgatagtcctataatctaa

SEQ ID NO: 187357 - DNA, 885 bp, Klebsiella oxytoca
atgtccatgacaactaataacaaaccgagtggattcaacagcgcagcaattttcataaagaaaagattaatacgcatatatccaacttattggatctggctatcaattatggttgttctttggttgctagggattgcattgagaagtcatcactattcacttgataagataattagctcttatttgttaatcccttttactgacaccaactcaacaaactttaatcccattctatctcagggttggacactaatatatgagatgctattttactgcatttttgccatacttttattgtttaaactcactgaaaatagaatgataattttgacgctttctgcttttatagttttgaaacaccttggacataatgaatttttctcgaatgactttagccgttttcttgataactgggtgctctttctattccctttggggatgttaatcttcagattagaaggtaggttacgcgcattactctctcatagtgttgtgcgtaacaccatgcatttaataacgatcggtctgttttgcttcgtaatttttagagatagcaactttaacaaagaagtaaataacacgctcacagccatttttatttttacatcactcttcattgtaaaaatagacagtaaaccactatcagtattaggtgatgcttcatactcgatataccttacacatacatttattgtaatgacgtatggaattgtgtctaaaggtcattacttggatcaatgggtgttgctgatactttccattcccgttatgattgcatctgtactttttggtgttgccgcttattatattgtagaacgaaaaatacagaaacttacctcaaatattttctttaataaaaaaataactcactccatatcctcttag

SEQ ID NO: 187358 - DNA, 462 bp, Klebsiella oxytoca
atgctgggatggtgccatgattttggtgaccacatcattttgtcagatgatattcgaaccgggaaaacccaaagttgcctgattgacgcaatgacatacgactttcaggaaataacgttacatgtcaccgagcctctggactggagctatacaaatccccggtgctggatacagtttcagaacagtcgtccatcgtcacggatgctgacgccgcagcggatagatgatttcactcttaccataccttacaacgacgatctgcacccggaagactggattatggacgaccctgatattgatccaccgcgtttgctgttctgcgacagtgaaaaaggtgcccggcatgggatagtccaggaggtcgccccctccggtgacagcaactgtcagattaccgcgccggaatataaagaaattttctacgcctacgacgacgctatctaccccggcgacgtcgcgtaa

SEQ ID NO: 187359 - DNA, 1044 bp, Klebsiella oxytoca
atgcgtattgaagaagatttgaagcttggttttaaagacgttcttatccgcccgaaacgttctaccctcaaaagccgttctgacgtacagctggaacgtgaattcactttcaaacattctggccagacctggtctggtgtgccgatcattgctgctaacatggacaccgttggcacgtttgccatggctaaagccctggcttcatttggcgttttgaccgccgtacataagcattacagcgttgaacagtggcaggcgtttgttcagagcgtatcggcagatgtcgtgcagcacgtcatggtctctaccggaacctccgatgcggattttgaaaaaacaaaacagattctgatccaaaatccgcagcttagctttgtgtgcattgacgtggcgaatggctattcagagcacttcgtgcagtttgtcgcgaaagcccgcgaagcctggccgcagaaaaccattattgcgggcaacgttgtgaccggcgaaatgtgcgaagagctgattctttcgggggctgatatcgttaaggtgggtatcggtccgggctccgtatgtacaacccgcgtgaaaaccggcgtcggctatccgcagctttccgcagtgattgagtgtgccgatgcggcgcacggcttgggcgggcagattatcagcgacggcggatgtactatgccgggcgatgtggctaaagccttcggcggcggcgctgatttcgtgatgcttggcggtatgctggccggtcacgaagagagcggcggtaccgtggttgaagaaaacggcgaaaaattcatgctgttctacggcatgagctcggagtcggcgatgacccgtcacgttggcggcgtagcccagtaccgtgcggctgaaggcaaaaccgttaagctgcctctgcgcggcccggttgaaaacaccgcgcgcgatattcttggcggcctgcgttccgcatgcacctacgtaggtgcttcacggctgaaagaactgactaaacgcacgacttttattcgtgtacaggaacaagagaaccgcgtgttcaacagcctgtaa

SEQ ID NO: 187360 - DNA, 1626 bp, Klebsiella oxytoca
atgccaaaagcaatctcatacattcgattttcctcaagaattcaggcatctggagactcaaccaaacgccagaacaagtacataaatgaatggctcaagaataatccagactatcaattagatgagtcgctcaggtttcaagacctcggcataagtggttactctggcgctaatgctaaatcaggtgcatttggtgaattcttagccgctgtagaatcaggggttattgaggcgggttcagtgttgttagttgaatcactggacagggtaagccgtcaagacattgacactgcaagggaacgtctgcgaaagattttgttagctggtgttgatgtggtcacattggcggataactcatggtacaagaaagagagtcttaatgaccctctcagcttgattaaagctgtgcttatcatgcaacgtgctaatgaagaatctgccacgaaatcaaagcggttaaggtctgcatgggatgcaaaacgagaagaagctgctaagggtaagataatgtcacggcgctgtgtggcgtggctcagagtgtctgatgatatgtctcactttgagctaatacccgataatgtgaaagcggttcagcgtgtcttccagctacgtttagagggattgccttttgtacgaatcgccagacagatgaatgaagaaggtttctatactctgaatcaacacaaacctgtgaaaggcgcttggtctcacactactgttaaagcactcttggataaccgctctgtgattggtttcaaagtgccgtctaattgtacagttacgaaaggcgtaaaggagatacccaactattaccccgctgttattagtgaagaacatttctacgctgtgcagcagttaaaacagggttcaggccgcagaccaacatcagacaaacccttacttactaaccttttcaaaggtgtaatgcgttgtgctgaatgtggttttgtgacaattgttaactgtgcaactgaaaaatggcatggggtctatagatgctcaatgagatatgaggggcgatgtcatgccaaaagtatcaaccgccgattggccgataaagcccttattcaggggcttctgtataacactaaccgtctttccctcaatcgtgataacgggtctgctattggttctcttcaaagtgagttagaacagattcagaaacagcgtgagaggctcattaagctggctatgctggcagatgatacagaatctatggctaaggatttgaaagctctgaacagtcagattaaagacgctgagaatgctatctccctgcttcaccagcgagagcaatcaagccagcttgaaacaataagccatcttgatttaaccgtgaagaaagaccggatagaggctcaaattatcatcaaacggatagtcaaagaaatccggcttaacacggctggaaagaaatgtgatgtcttcttacataacggcttaaagctgctgaatttcccattggatagggtggttgatggcgctcagtggctggaggttttaccgctgattgatggtgatgagttcgactttgaagggttcaccactaagccacaacacatagccttagaagaggctccagagtgggtgaaatatatggaagaacaatctaatcaacccctgtga

SEQ ID NO: 187361 - DNA, 897 bp, Klebsiella oxytoca
atgaactcccccgttttacaattgcaagcactagctgaagacccaaaaacagaaattctagctgtattgcttaaggcaaaatctattgctgtaaaattgaatctgcttgagttaattacgtgggtcgagcatgaaatcaatggctatccgaacaaatcggatgtccctgaatatcgtacagggcatggaattgttaaagggtttaattatgcacaaggaagatatttacctctcgatttaaacggtatgacagcagagatggtagacatgataactacctatactctttatgaatcaatatcatcaatggataagcaggataataaaggtgagatggttaggttgcctcttaacccgcgtcaggttgaaatactattaggggcggggaaaggtggaatggaattatgctggttctttagctctaataagctagagcatattgtcacaactgtgagaaataaaattcttgattggtctctggagttagagaagcaaaacatatttggtgaagacctgcgtttcaatcagcaagaaaaagaggtggctcctgtgacggttaaatatattttcaacgatgtgtttacaaataatggtgtgtttgctcatcaagttgagggtgacgtaaaccagcagaatacgataacatcaggcgatttctcatctctggctgattatctcgaaaagttgggtgttgagaagtccgacatcagggagcttgaggaaattatatctgattcacctgttcctgaatcatctgaaaatttaggtgctggaattggtggttgggtgggtaatatgattggcaaggcttatgctggtggcttaaacatagctggcgctgcggctccggcaattcttacaaatgcaatttgccatttctttaacatacctgtttga

SEQ ID NO: 187362 - DNA, 828 bp, Klebsiella oxytoca
atgagtgaaattactaaagagccagtagaacaggtcaagcaagcatttaaagacaggatttcaagccctttatggggttatgtgtttttctcatggcttggcttcaactggcaaaatattgctaagttatttatgagcaaaagagaggttgaagtaaggattgccgaaataacctctcaggagtggttttttgttcactacatcgtattaccagtgattgttggtgctgctctagctgccgtttccccctatcttcagcaatggctggctgcggcacacaaaaaggcagaagataaaaggaaggctgatactctcacagaagaattgaggttgattgatgtggacatgctcaaaaaggaaaagttaactgaattatctaaggttgctgagcgaactgaacagacagaaaaagagaagcttgagcgtcagaaagcaagaaacgaaagcaggttagctttaattcggttgaaagaggtagccttaactaaagctacagcagacctcgaaaaggcatatgaggatactcaagtaaggttaaacaaactactcaatgaaacgaagaaagttgaagagtcatataacagcaaggtcgaagccttgaacgaagcctcagatgggcttaataaggtggggcagctctatcataagtataataaactggcaactcacgaggactttgtgtcattcttgaacgagcttaataagaaaaaactttttggcttatcccagctagataaagactttaaatcgatgacagaaagagaaattatctataattcaatgagaaaaaatgctcatggcaatgttaattctgatggctccgaataa

SEQ ID NO: 187363 - DNA, 555 bp, Klebsiella oxytoca
atgtcatctgtaatcgcctacgtccgtgtgtcaacttcagaccagactattgagaaccagaagaaacaaatcaatgaggctggctatcaggtaaacaagtggttctctgatgaggctgtatcaggtggcattaaggcaacagagcgtaaagggttcggtgacctgcttaactatgttcgtgaaggggatacgctggtagttattgggattgaccgcttaggccgtaacactattgatgttctctcaacggttgaacttcttcaggccaaaggagtgaagattatcagtctccgtgaaggattcgacctgtctacaccagtgggtaaggctatgctcactatgatggctggattggcttctttagagaaagatttgatagcagagcgcagaacagcagggattaaacgtgcgcagtctgaaggggttcactgtggcagaccgattaaagcaaccgctgaacaggttcaggaactaattggacaggggatgtcgccaaagcaggtacaagatgagttacagattagtaaggcaactttctatcgactgaacaagtaa

SEQ ID NO: 187364 - DNA, 198 bp, Klebsiella oxytoca
atgaagaaaagaaagaaatactttactatcgtagcggaaaagacacatcaattctacatgcagtataagagcctttccgaattaacagggattacacctccctctggttataccccacctcgtatgatgacaaaaaccagaagatacgaagttatcaaggctatctgtcagaaactgaaatcccttgacagaatttaa

SEQ ID NO: 187365 - DNA, 186 bp, Klebsiella oxytoca
atgaatcaattcttcaatgaacatggtcagccagtacgagcaaacgtagttttgaaccttcaccctttttatttgggaaaactggaaaggctggcaaaccgaatcggtgacgggattaagtcagaagaacagcgtctaatactggcaattggtgagatgctacgaaatgtggagactgaacaatga

SEQ ID NO: 187366 - DNA, 222 bp, Klebsiella oxytoca
atgaacctttacgcattcaacccactgaaacaaaatgataagcaagaggtgcttacccccgtagcctttaatttggtcttatcgttacctgagcagctactgaaaaggctggatagggtcagctatgaattggttaagcggtacggtattgcagggtgtagtgataagcagcgacatcacatcgctgttgttcatctgcttgaaaaacatacattgcgatga

SEQ ID NO: 187367 - DNA, 222 bp, Klebsiella oxytoca
atgtcctcttatgattcgcgggttcagttgacgtcaaaaagcagcgttatctataagtttctggttcatgcggataccccacagggggcaagagttaaagtccaaaaccatctgagaaagctgggagattttgatttcagtgaaatttgcatttcgtctatggaggtgaggggtaatgtcttgcttctaaaccctgacggtacaaagtgcctgattttttga

SEQ ID NO: 187368 - DNA, 954 bp, Klebsiella oxytoca
atgaaaactgaacaattggtacctctttgccagcgctatcaggccttgctgctcgatagcaatgaacacaccatcgctatcgccgtggttgacgcccccgccccggagctgctggaagcgttacgtttcgcgacgcagaaaaggattgatatcgagtgctggaaccaggaccagatggacaagcggctgcagacgccgggaatatcaaccctcaccccgcctgttgaagcctcggccagcatcgttgaacaggtaaatagccttctggaacaggccctgcgccagcgcgcatcggatattcatattgaacccggtgacgatcgcctgagaattcgcctgcgggtagatggcgtactccattctcttgcgccgcttgcgccggaactcgccgcccccatcaccgcccgacttaaagtgctcagcaatctggatatcgctgaacaccgggtaccgcaggacggtcagtttaccctcacgctcgcagaccgcccgatctcgtttcggatcgccacgcttccctgccgcggcggggaaaaaatcgtccttcgcttattacaccaggtcgaacaagcgctggacctcgaagcgctgggattatcgtctcagcagcttgccgcctttcgctcggcgcttaaccaacctcaggggctgatgctggtcaccggcccgacgggaagtgggaaaaccgtcacgttgtatagtgcgctgcaggcgcggaatcgcgacgaggtcaatatatgcagcgttgaagatccgcttgagatccccatcgtggggatgaatcagacgcagattaatccgcgggcgggcttaacctttcacagcgtactgcgcgccctactacgccaggatcccgatatcgtgatggtcggagagatacgcgatgcagaaaccgctgaaattgcgataaaagcagcgcaaaccgggcaccttgttctaattacaactctctaa

SEQ ID NO: 187369 - DNA, 909 bp, Klebsiella oxytoca
atggtctcgacaacagcagtagccgctatcaaagaatggcggaaaactaataaatttatttgtcacgttaaactcaactataaaaaggtattgcggaaatgcagagaaatatctttaatcggaggaaaatataaggaatatcagacgttatgtgaaaattacgcttgcgcaaaactaacaggagctaccgaggggctggttaactttgaagataaaccctttaaggcctatttaaataaaaagatgtcaaaaagagcgaagctcaatattgctcatggcgctttgaattttatagagaaaacctttcttcccgaggcgttgccgcagctgtacgatatgaaagcatttggtcgttcgctaatcactattgcgctgaaaaacggtacctgcattgatgtgaagctgctggcatcgccttttcaggaggagggggaattgatgctattaatgttcctgggtgataaacgcgtctatagtatctgtttttcctgcaccgaagacggccgggcctggattggcggcatccagggtgggaaagacattgataatgaagaagtgaaagtgctgaccaaggagctttacggcatccgacctaagaacttaattatcacgctgctgtacggttttttgtcgcatttcaatatcaaggagatctatgcgatcgacagccattaccatgttaaaagcgacagagtaaaaaccagctattctgagctttggctggaaattggcggtgagaagcatcgtcgcggctggtataaattaccgccgaacgagataaagaaaagcctggaagatgttaaaagcaagcaccggagccagtttatcaagcgagaaggcttgaaagagctggcccagctggatatggccgccgcgctacgcgacattagcgtgaatcgtcacggctga

SEQ ID NO: 187370 - DNA, 1002 bp, Klebsiella oxytoca
atgaaacgagtcaacgtcccccttatgctggtaaccctgatcgccagcgcagcccacgcggagaacaactattgtcccagctccccgcccacgccgtttacccagcagcttgcgcagatcgcggtatcgcgcgcgctgccggttggcagcgatattcccggtacgcagcgggtcttcacctttagtggaaactgcagagaccgcagcggttgggcggatgtcaccccggggcaccccattattgcctgctattacggcagcggcgaagaagtcgcgggttttccgggggtctatgaaaccggcgtcgaaggcatcggtattgcgctgcaaaatagcgccggccaaagggtgagtggtatcggtagcgattgcgatacgcgcgcgcaggcgctggggtatatctccagcgacgccagaatgacctttggatatacggtcacactgacgctggtaaaaacgggggatacggcaacgagcggtactctcgatgtcgcgcaaaccaaatttggcatgggggtctatgataccggtctgggcatcggcagtcaggggcagcaaaactatatcggctatgcgggagatattgtttataaagcggtaagctgcatcgtcccctcgacgttaactgtcaacatgggttctgttccggtgggtcaattctctggtccgggcagcaccagcgacgaaaaaaatctgtcaattccagtgcggtgcgacgataaggtcgccgtgaatacgtcaataagcagtcaaggttatctctccccggcgctcggcgtagtggccttaagcaatgaaaccggcgtagcccagggggtcggcgttcaggtgctttataacggctcgcccgttcagttcgatcgtttcttccctgttggcaccatccctgaggctggcgcatcgataaccctgccgctcacctttcgctattaccagaacacgccggagatccatcccggccacgccaacgcggtggccaccttaacgatgatgtacaactga

SEQ ID NO: 187371 - DNA, 2268 bp, Klebsiella oxytoca
atgaccaaaggtacacagcaaagtagtctggataatgtgagtaaaaacactgtcgtcaacggagagcatggccctcaggtttattttcacccgggtagtgcaacgttactttgcgttgatgaaaaagataaccgcttactcatacaggaacagctgaaaatgacagcgttgctggaaaaccagaagaaagcgcagattgctctggatgaactcaatttcgaaatgttgactcaggcaggtaagaaaccacaacgtgcttatgacagcaaacttcagagtacctatcaacaactcaacgacgctaacgaacaattaaaagcagagcttaaagcgttgactgcaaagattcccgagggtgaattgcttgatgaaaactctaaagaatcagctatcggccttatggagctgattccccttcagaagactgcaggattcaagagtacttatgttcgctccgataaaattcgcagtcactggcggaaatacaaactcagtgaagtggacaagaaaagtggtgaagccagcttcattaaatatacagataaagaagttacggatgtcgatgctaatgggaatgaaacgaaaaaaacagttcgatcgggaaagattgatgccgaagagttaataaaacaattaaaagaagcgtcagccagccttaagtttgaagatgaactattagaagacagtaatgttgttcttactgactgggcgaaaaaaatgaataaagggcttacctggcccaaagaaaatgataagcccgacgatgagtctacttatcatcagtacgtcgacatcagcgcacaggcacagctgatgcgctatagccagggggccgggctgtctgctgaatttaaccctttagaagggaaagcctccgcaaagatggaaggccatgcaagctttgctctgggggaggcaaaagcgtcagctgagctatttattcctgatcgacttggtattgcattgttgtttcctgccaaagcaactgcgggtgtagctggtggtgtctgtaatatgggggctatccgctacacgattaatgcggtgttatccggtaatgccggggcaagccttgggattgaattgggtgtagaagctgattttagtggagaaatggcaaagggctatgggattaagggaagcccggcgaaacttacacctccggcacctcctggccaaaggcaggttaatttgaccattccacagccggatgtccaggctggcggagaaattggcgcttttgctggtgttcaggcgggtggcaacattagcggtgctattgaatggtttgatccgcatcctgaaggtgatggcaatattgctcatgatagtaacaagcaaattgtgaataaagagaaaaaattcacagcgattgccaaactgtctcttggtgtaactgctcaggctggggctggtggatctgccgttttttacgtgacgtatattaacagtcgcttcagaatttattgtaaggcagcactttgctggggtgttggtgccaagggttctttaggctttgaagttgacggtaattcgtttgcggcatttatgaaaagttttctttatatgctccgcaatgtggactatcagaagctggaacagatgatgaagggagatgccttccgagcgttgtgcgctattccgttggtcatggctgctcagggcattcaagctattgacgcaatgtataaagaatcttcgaacataattgatgggttaaaattagatcttgaggatgaagattctcgagttaagttaatggaaagcatcctcaataaccctgaccaactgaaatataccccaccagaaacaaagggagccgtaatcgccaccttaatagataacaactgggcggactggattgatcccagaaaccagaataatgattttttctcggttaacagttggaagattggccctttgaaacgccgaaaacaggccgtttttaaggcgttaaagtgggtacaaagccaggcggattacaacaatgttatgcagcacctgaccacttcacctggagagagaaaaggtgataaaggtcttaatgagcaggatgttattaagttccttggtataggcgaacggagcatgtttttctacactaactacggcgaaaaactggcgcacttatatggcaatctgcgcacctctgtcgaccacgacgatccttttgtctctatcccggaccatgaaatggatgagtaccttgcgatggtggatgaacagcacccagagagtaccctcatgaaaaacaccatgatggcgtaa

SEQ ID NO: 187372 - DNA, 894 bp, Klebsiella oxytoca
atgaataagaagctaataactatcgtggtggcagtgtgttttctgactggttgcgatcagggtagtgccgcagccaatacccaggccgcgaaaatccttgcagataagtccatcgcgaacatggtgcccgttcagggtggagagtttctcatgggggactttggtcctttagtgaaagagaagctgccgttcagtattcagcaggatgataagaaactgcataaggtcgttttgagtgactttgcgatatcaaagttcaaggtaacgaatgcggattacacggcttatctgaagtctactggggaaaaaaaaccaccagtcaacatcctggttaaagattatccatccttggcaaaagataattactctgttggcgtaacctggcaacaggctaaggattactgccagtggttgggtaaggtgtcaggtaaaaagatcgacctgccgaccgaagcacagtgggaatatgccgcgaggtccagaggacaatatctcccctttgcaaccaacaatggtaagtttgaggaaggtaagaatatacccagtgaaaatcaactggatgaatacacagatggttacggatttcccatctaccccataggcaaataccccccaaacccgttggggctctacgacatgggcttaagtggttctgaatgggtgaatgactggtacgcatctgactattattctcactcccaagtgaatgaccctcagggtccagagaaaggcacccggaaagtattgcgcggatatgttggtggtgacaggcaatatgcactgacgatgttcagacaatcatctcaaccagtgcctaaattcggggggcgcgacaactatgaaaagtatggggtgagtcctttatacgtattccgttgtgtgatgaataagtag

SEQ ID NO: 187373 - DNA, 894 bp, Klebsiella oxytoca
atgaataagaagctaataactatcgcggcgggagtgtgttttctgaccggttgcgatcagggtagtgccgcagccaatacccaggccgcgaaaatccttgcagataagtccatcgcgaacatggtgcccgttcagggtggagagtttctcatgggggactttggtcctttagtgaaagagaagctgccgttcagtattcagcaggatgataagaaactgcataaggtcgttttgagtgactttgcgatatcaaagttcaaggtaacgaatgcggattacacggcttatctgaagtctactggggaaaaaaaaccaccagtcaacatcctggttaaagattatccatccttggcaaaagataattactctgttggcgtaacctggcaacaggctaaggattactgccagtggttgggtaaggtgtcaggtaaaaagatcgacctgccgaccgaagcgcagtgggaatacgccgcgaggtccagagggcaattccttcccttcgctaccaacaacggggaattcgagaaaggcaagaacattcccggcgaagaacaactggatgaatacactgatggaatggggctgcccatctaccctatcggcaaataccccccaaatccactcgggcttaatgacatgggcctaagcggttccgagtgggtgaacgactggtacgcatcggactattactctcattcaccattgaacgatcctcatgggccagagaatggcactcagaaagtgctgcgaggctacattggtggtgacagccaatatgctcttaccatgttcagacaatcgtcagagcctgtacctaaaatcgacaaagacgataattacgagaagtatggtgttggcccacagtacgtattccgttgtgtgatgaataagtag

SEQ ID NO: 187374 - DNA, 894 bp, Klebsiella oxytoca
atgaataagaagctaatagctatcgcgacgggagtgtgttttctgaccggttgcgatcagggtagtgcagcggccgatactctggccgcgaaaatccttgcagataagtcagtcgcgaacatgatctctgttcagggaggtgagtttctcatgggcgattttggcccactggtaggtgagaaacttccatttagcattaaccaagatgataaaaaatcacatagggttgttttaagtgatttttcaatttcaaaattcaaggtcacgaatgctaattatcttgtctatttgaatgcgactgggaaagaaaaaccaccagttaacatccttgttaaggattatccctctttagctggaggtgattattctgtcagtgtcacttggcaacaggccaaagattattgccaatggttgggccatacggcaggaaagaatattgatttacctacggaagctcaatgggaatatgctgcgagatctcgaggccaatatctaccatttgcaaccaataatggtaagtttgaaaaaggtaagaatataccaagcgatgatgagttagataagtttactgatgggtttggttttccattttatcccataggtaaatatccaccaaatcctcttggtctttatgatatgggactaagtggctctgagtggactaatgattggtattcggctaattattatgaacattctcctgaaagggatccgcaagggccggagaccggaactaaaaaagtgttgagaggggccgttggaagtaacccccaatattcattaacaatgttcagacaatctaaattaccaattccaaagatcaatgctgatgacgattatgagaggtttggcattggtccacagtatgtattccgctgtgtgatgaacaattaa

SEQ ID NO: 187375 - DNA, 1155 bp, Klebsiella oxytoca
atgagctgggagcgtcagaaatcaacggtatccaagaagcctgaagcaccttcctttgttctttggtttatgttgggagttgttgcagttgtagggagtgtgatgctgttcgtcctgcatgctaataagctttcagggcctttacaggcattcaatatttgggtcgtcacagcaagccccatagttatctggtttttcttcctttgcctgcgggcttgggtcttcaatagtgcatttgataagcacgagttcgaggctaatgaggctgattacgcccagcaacaatggactgaatgggccgggagaaacattgcagtgctccatagcagtgtcatttttccggaggctctgacgccatctcgctttttgcaggcctcagcagagcagatgcagcacacaactttgacgcagcattttcatcacccagctccagaaaattccttctcacaactacttgaatgtgcaagtgatgccctggccagggttccatcagacttacccctcagtgtctctttgctgacggattcgcaggaagatcccctgaaactgcaggacgaatttgcgaaggtctggcaggacacagttcctttacgccctgtccctattttgaatatacagaccgcaaagacctttatctggctggaagaaaggatcaaatcgccaacgctggatgtggatcttattctggtgcatcagactcaggggaaagggtgttatagcgacatcctggcctctttgttgctgacatcagatgatgttgccacaaaatatcaacttacacatgatgcccgcctgctacggccaatgtcgttagatatggttgatatcggtcaatcactggatacgtttttctcaacgcagactcaggcctgtgccacagaaaatatcatcggcgatcaggctgcctggggtgatgcatttcctgacctgcttgaagcagctgccgtatacacagggcactggaaacctgaacagctccactggctggaaaaatatgccgggctcagcggccccttttctccatgggtaatggccgcagtcgccagcgatattgtgaatatacaaaaagcagactgtctgatgctttctacagatggtgagcagaaatttattaatacagtgcaaacagggaacagagataatgacaacaggtaa

SEQ ID NO: 187376 - DNA, 3417 bp, Klebsiella oxytoca
atgacaacaggtaattcctcatggcgcggaggctggggaagactgggtttcaccgcgcttttagcaggcgggattgcctggggtatctggcactttggcgatcaaatggggttgcatactccgttacttaaagggttggtcattgccggtgccctgattttattgatgctgttgcgccatggcaaaaccattacacttgccatcaaacagggctggcatcgctttcaggcaaaacgcaaaaatgttctgcccgtcgatgagggccgcgtcaagcagaccgcgccacgcaatgtcaccgtcgacaccatccgtgacgccatgcgtaacctctacggtcgttgctgggggcgtaaaacacgcatcctgctgataaccggtaccgcctctgaggtggagcaactgacccccggtcttacggctcagctctggcaggaagactgcggcacactgttgctgtggggcggcgacctcaatacgccggcagacagtgcctggctgaccgcgctgcgaaaactgcgccgttgtccggtagatgggctggtgtgggtcacttctgtgtttgaccagctctcagcaccagggctggagcagccgctgccggtaccttcagacagcaccatggattcgctctcccacgccatcagcaaccgaatggatatacttggctggaaactcccgctgtatgtctggtccctgcacccgcgcgccggtaagccggaagggcgcattacgcaggcaaccggctgtctgttgcctgccggttgccgtactgaagggctggcagagcaactgtccgccctgacgccagatttgacttcacagggtcttcagcagacctgcggtgaggtgaaacataacttcctgctgacgcttgccgaccagctcattcgtgagccggaaagcgtgaccgtaccgctgtcggtgatgcttaatccgtaccgcccgctgccgctggccggtgtggtgttcagtcagccctctgatggtgccgaacgtgccgtgacgcaccactggggcatggataagcgctgggatgttttgcctgagtctgtccgcacgcttgctgccggactgcgtccgcgcaagccgggcattccatggcgcaaagtgtttgcgtctgtcgtcgccctggcgatggtgagctgggctgcattgatgggcatcgcgtatgtcaccaaccgcagccagattgacggcgcgaatgcccagaccgcacttgccgcccgacagaatcagccgctggagcagcgtctgcacgcgctgtctgaactgcagaaaacgctggcccgactgcagtaccgttcagaacacggcgtgccgtggtacgagcaggccgggctgagccagaacaatgcgctgctggccgcactctggccacgctatcaggacagcgcattgccgctgttgcgggatgcggccgcagagcatctgcagactcagctcactgcctttaatgcgctgccgccgggcaacccgctgcgcgagcagatggcaaaaaacacctatgaccagctcaaactctacctgatgctggcgcgtccggaacatatggacgccgcctggttcagcgctgcattgctgaatgactggccggtgcgtgacggtgtaaaaaacggcgtctggcagggtatggctccgtcgctgctgtcgttctatggcgcacagctggtcacacatcctgagtggaaactgcgagccgatgaaaacatggtcagccaggcgcgctccctgctggttcgcctgatgggcgtgcgtaacagcgaatcgaccctgtaccagaagatgctctcccgggtggcgcacctgtatgtcgatatgcgacttgaagacatgaccggggataccgatgcatcaaggcttttcagcaccacggaaattgtaccaggcatgtttacccgccaggcctgggagcaggccgtgcagcccgccattgagaaagtggtgaaggcgcgccgggacgagcttgactgggtgctgactgacagcaagcgtccggtcagtaagcaggatgatatctcccctgaagcactgaaaaagcgcctgacggagcgttactttgcggacttcggcggggcatggcttgagttcctcaacagcctgcgctggaatcaggccgccacgctgtcggattccattgaccagctcaccctgatggccgacgtgcggcagtcgcctctggtggcgctgatgaacaccctgaacgtgcaggggcgtaccgggcagaccggtgaagccatttcggattcgctggtgaaatcagcgaaaaacctgctcggcggtgacaaggatgccattgaccagagcgccggtgttcacggcccgctggatgcgacctttggtccggtgctggcgctgatggacaagagccgcacgggggggcaggaacaaagcctgcagtcgttcctgacccgcgcgacgcaggtgcgcctgcgcctccagcaggtgaccaatgctgccgacccgcaggcgatgacacagacactggcgcagaccgtatttcagggtaaggcggtcgacctgaccgaaacccgcgactacggcagcctgattgccgccggtctgggccaggagtggagcggttttggccgtaccgtgtttgttcagccgatggagcaggcctggcagcaggtactgaccccggcggcggaaagcctcaatgcccagtggcagcaggcagtggttgctgagtggaacagtgccttcggtggacgctatccgtttactcattccagcagtgatgtatccctgccactgctggctaaatacctcaatgcggattccgggcgtatcgcgcagttcctgcagacccgcctcaggggcgtgctgcacaaagagggcaaccactgggtgccggacagcatcaactcgcaggggctggcgtttaacccggcattcctcaatgccatcaataccctgagccatatctcggatgtggccttcaccgaaggcaatgccgggatgcactttgagctgcgcccgggtacagccgatggcgtgatgcagaccgacatgattatcgacagccagaagctgacgtatgtgaaccagttgcctgcatggaagcgcttcgcctggcctgcggataccgaagcacccggtgcagccttaagctggataagcacgcaggcaggaacccgccagtacgccgatatccctggcgcctggggctggatacgtctgctcgataaagcttcggtcagtgcttatccgggcgttgacagcagttacagtctgagctggaaagcacaggacggacgcacgctcaattacaccctgcgtaccgaggcgggtgaggggccactggcgctgctgaaactgcgtaacttccgtctgccggaaactatcttcagcacctccggtgcagcatcaccagaccaggttgccagtgcaggctatgatacagaggacatatattga

SEQ ID NO: 187377 - DNA, 399 bp, Klebsiella oxytoca
atgaaagccctcgatatccgggcaattgccgatctttctggcataaatccctctgcgctgcgttattacgaaaaaaaaggattaattcagcctgtgggtcgtaacggtttacgacggcaatatcaccaaaatgtgctcaataaactgcagctcattgcgctggggcaggcggcagggtttacgttggatgaacttgccgcgatgtttggtaccgcatcagcgttagcgatagaccgggcgcagctacaccagcgcgcaaaagagattgacgccaccattcgcaagctgcggctgttaagccgcgggctgaagcacgctgcgcgctgcacgcagccggagcataggcattgtgaagagtttaaaagagtggtggcgaaagggttgaggctggttggctga

SEQ ID NO: 187378 - DNA, 1746 bp, Klebsiella oxytoca
ttgttattgcaaaaagatgaactcgacgagtttagttcacgtgcggatgaatacatcatcactggtgatcacgtttcattatctgctttagtcgaaagttttacagaacgggattttacctttactcaccctttatatgaggcacattttctttactgcttaggaaattgttactctaaactgtacgaaacacgtaaaacggagtggtattcagatgatttgatgaaatctgtcatattctaccggaaagctttatatgcattacctaaagcagattggagagaacacgaaaataatatccatgcatataataatcttagatctatgatcgagacaaatttagctaatcacctttcatcacaaggcagaacgctatgtagcattacccattatgataaagctatttctatagataataatcttgttgccattatagcaaaggccagtaatgaaatttttcttggacattcactttatgataacggtcatgcagaatatcattttcttgtagcttataaacttttaaaaaaagcaattgagaatatcagtcagttatctcctgaacaaagagggccgctagaaaaaggcggcagattattcaattttataagatggtttgagggggcattcgaattatcggctttcgattattttaaagattatactgaaataaacatatccagagaacagaaggagtatttagagtggtgtgcaagtaaccgactctttcttaatgacttgaatgattcatgtgaatatccgatcacttatcaggatgttttcgaattaccctcatttgttcaatcgcttaatacttctctcactatgagcgacgaattatcttatcatggtaattatgacgagttaaaaaatgattactgttatgcccggtacttgattttttcttcaaaagatataccagatgataccccgcatatgtttaactcaacatatcaccaaattgaagatatgacttactcaattaataatctaaaggttgctcaatataagtcagcattcaggatagtatattcactttttgataaaatagcatatttaattagtaggttctttgatttaaatgaactgaaatatgataagaaaatcagcatggataatttgttccgtgactttacaggtggtaataaaaagtggaggccacataaaaaacttaaagatagcggcaatcattttatccatgctttattttatatattaaaagatattcgtaaagtcggtgactctgatttagtaacgaaatggttagatccagatgcagtggcatttgcagacattagaaatgctatggaacaccggtcattaaaaatagttgatgattttggctatgaacttgcaacatcgcataataattacaatgatgaagagtttataaaaatgcaggaagaagctagtacactttcagaagaaattagagagattgaattaaatattgatcaagccaaaaaagatggtgattattattcaacccaacagcttgaagggggaattaataataagaagtcaaagctcatagaattaaaatcaaaaatttatgaaaaagaaaagctatcttctcactctcttttaatcccaataagccaatttgaaaaaagacttatgcaactcattggattagcaagaaattcaattatctatttatcattagctatctattttgaagagcgcagtcgtccaaaagatggtatttacctgccaatagatgtgccgttaaagaaatttttatga

SEQ ID NO: 187379 - DNA, 1824 bp, Klebsiella oxytoca
gtgactaaatctaagtttttatctttagatacaaaaatccaacagttaaaaaaaaccactcatggattgaaactccgagatttatgcaataatttatttatggtgctaattaaatttggacgttttaacaaaactgtcgaattgcactcaccctcaagacaaacattatatcttttaggtattttagcatctcaaaaacaaacgaaagaagataagaactgtagtgatgattgcatgaaaaaaataaactcactattaaatgaaattttcgggaaatatctaaatgcatatataccgacagcaaaagaaatggtaggtgagttagaatggttaaaaaatcgagatatctcagcgctcagtttcttaagttatttctttgagtctccaaaaatcgcatccgaacaaattcgtttagaaaacttgaattcatttgaaaaattcaatactgaacttaaagctaaaagcggattgaatatttctgaagctgtagaaatcgcagatgcaataggtgatttgcttcaaaagaatatagatgaaatctcaactataatcaatgaaatcgaagagttacgaattaaagcattcagtcctccgaacatcgaccataatataatagaggaagagttggtttataaatgcaaacctaaaatggcagaagcatttgaaagaatgaattatatctcatgtttcaaattcgatttgttagaagagaaattcacacctgatgtaattcaatcctttaaaaacttgtttgtgattaaaaaaggtgaaaccaatgagatccattatataactgatgaaaatccagttttatctagcccgatccttactgaagataatgaattattttatctgtgctcaatgaattttttacatttagctatacaaatcaacttcgagaatttattaaaacaaagttcaatttcagacaaatttagaaagcatagagacatgcttttagaaaaagatactgctgaaatgttccgaaaattctttccaaaagatgcgttgatattcgaaagtgtatttgaaaataacaaatcaacttatgagcatgatttactaatcatacatgaaagagtggcaattgttattgaggctaaagcatcaccacgaagagaaccactaagggatccagagagagcgtttaaacgtattagcgatgattttaagaaaaagtctggtattcagagcggatacaatcaagcccgaaaccttgagaaattacttgagcgaaaagatatcacaccgttatatacgaagaaaggtgaacttcttgcagaaatagatgggagggagataaatgagatttatagtatttgcataactaaagatgattttggagtattagctacaaaccttacgttattacttgacaaagacgaagaagctaaatacccattagtaataaattttagtgacctaaaatacttattagactgtcttcaatacgttgaaaaagactggtcatttttcgtaacttatcttcgcgaaagacgattagttcacggtaaaattttatcagcagatgagctcgaatttgctggggcatttcttaaatatggcacattgttttttacagaagaaatccatgacagacatacaaaaatagccctagacataaatgaatcgaatatatttgacgatattcactttgctcaattagaaggagttaaattcgaggtaccctctatctctccaccatatgaaatctttaacaaaaacaaattcattaataattttaagcgttcccaaaaggataaagaacacaaaaaagaaaataagaagagatttaaacacgccagaaggaaaaacagaaaatga

SEQ ID NO: 187380 - DNA, 216 bp, Klebsiella oxytoca
atgaaaacattcaatcaaattaaaagcctgatcggattttgccagaccgatgaatttttccttgaatacctgcaaatgcttcaggctgcgggggttattcatcccgatgaaagcgatattgatgccgacagcaaaaccgtcagtgaagatttttatgatcgtcttgccagcgtgtatggcattgaagcagaggaaacactatggcaacaggactga

SEQ ID NO: 187381 - DNA, 246 bp, Klebsiella oxytoca
atgaaaacgtataaaggctcacatggggatcacgttctgcagtattgggtcaagattaaccaattactctgtcgcttgactgaccgttaccccagactaacggcggtacgtgtcgatctgcattatccgaagatagtcgataacggagacaatatatgctgtttccctaatcttgaaccaggggtgatatctcgaatgcgtgagtcccttaaagctaaggaaggtgcgaacaagttcctgatatga

SEQ ID NO: 187382 - DNA, 1416 bp, Klebsiella oxytoca
atgctgattggacgtccatttccagtgcaagtactgccattgattatcagaaatgcggtttatgaggtaactcaaaatacacaggcaccatctgctttagttgctgcatctgcccttggtgctatttcccttgcctgccaaaacgggattgatgtttgcaggtttaatcatttgcgtagtcccgtatccttgtttttgctgacactggctgattctggggaaaggaaaagcagtgtggataaagcgctgatgaagccgctgtacgatctggaggagcaaagatttatacaatacatgagggattatgcagtttgggaaaatgacatgcaggtgtttaatacccaaaaaaaggcgttaacatcaaagttgaaatcggagatccatcgtaatcaagattcctctgtaactgaagcacaactaaaagcccttatggaaaaccgtccggaagagccggtaaggtacaagctgatgtttaatgatgccactccagctgcaattaaagattttctctgtgggcaatggcgggctattggcataatgtctgatgaagcaggtactatatttaatggccatactctaaatgagttacctttcaccaacaaaatgtgggatgactcaacattttcagtggaaaggaaatgtagcccagaaatattcattaaggatgccagacttactctgtctttaatgttgcaacctgttgtttttaaagcgtatcaggagcgtaagggggatatggctaaaggaataggtttttttgcccgctgcctgatctgtcagccggactcaactcaaggttacaggcaaattaccagcccagttacttcaactgaacatcttccagtattccatcaacgattgatggaggtcatcaccgaaaatctggtccgacatgatgaaaataaacgggagtgtctaattttttgtcctgaagcggaacaacgaatgattgagttttataataaagtagaatccgagatggggatgcttggctgtctttcggacttcaaagactatgcttctaaggtcgcagagaatatggcgagaatggctgccttattacactatttcgaggggcgtgggggggatatttcactcattgccgtagaagcagccatacagataatttcatggtacgtggatgagtatttaaggcttttctcacaacaccaggaattaacgcttgtaggctcagaggcaaatgaactttacagctggataaaagaatactgcgttagaaacatgatcccttatctcagaaaaaatacgatattacagtatggccctggtcgctttagaaacagggcaagagtgaacgagttgctcagcacactttactctcagcgtaagatactggctgagaaacggggtaagacgatatttattcaacctgtggagacaactgatttggtttga

SEQ ID NO: 187383 - DNA, 237 bp, Klebsiella oxytoca
atgcacaattcttttactcaacccacacctgaacagcgtttgcaggctttgcagaactatggtgaagcttcagatcggctagttcgtgagcaggagcgccagcgtatcacatcagtgtcgcgttcaacagcatggaagcttgaacgggcaggcctgttccctttgcgaaagtcgattggaccaaaatcttgcgcctggttgctaagtgatctgctgtgttggatcaatattcgatag

SEQ ID NO: 187384 - DNA, 999 bp, Klebsiella oxytoca
atggcaaggcattttcgtcgtttatcggaactgacatccttttctgaggatgaggacgatatgattattcagcaatggatagatggaaagcttcctctgtacgttcaccttgatggtagacatccggtatgtacttttagacgttgcatctccatcgatgaacataaatacgctatcagcgatataatgtatggccgcgatttgtatcaatatccagatagtcccgaaggcaagtggaggctgtttgtgcctgaaacacctttagactcgcaccttaaagtaactcctgaatttcgttatggaggcatggtttacgagtataaatatcgtggaaaggcacatggttattggcatgttaagccatccaattcagccagattctgtcgtggtgattttttgattgcggatgttggattaaaagatctaaaaccagattctctaggggatgttaccattcatgctcatcaagaacgtgattaccttatttttcctgaaccaacttatataaatcgaaagtcattatttgttgatgatggagatattgttaattttgttcaggtgccagaagttagcaaggatttattaataaaacatgcaaggagtgagaagccaggcacgctttacaaagtaccgtcggagcttattgcattatatatattgatgcaggaatgtagtttggataagtccggtgtactgaggccgtctattgtagcaaaacctttgtcgtcattatttggtattgattttgatattgatacagtaaagggatatggtattagacctgagttagaaagggaaaaatcttatcgagttaatgaaaaacaaaggatggctatttcatatcttttgattgaactttgcaagaaaaatggaattgataggtctccaagatcgttatgtgaggaattaaattcactctcgcaattagagcgctattccttgagtttttcatttagcgagtcggagattgagaagtggttggatatttatccagcatga

SEQ ID NO: 187385 - DNA, 933 bp, Klebsiella oxytoca
atgtcggtaattagcagcatagctacttcgttaaaccagagcgagttagaggtgagagcgtatctatctgatgcatcaggtaagtacaaggtctacaggattcccaaacgcactacgggattccggatcattgcgcaacccgctaaggcgcttaaagagtatcaacgcgccttcctccagctttaccgttttccaattcatgaatgcgcaatggcctatcaaaaaggtaaaagcatccgtgacaacgcactagcgcatgcgcataaccgctatttactcaaaacagacctagaagacttttttaattcaatcaccccagatatcttctggcgatgtgttgagttgtcttctgttgatgttcaactgtttctacccgaagacagacgctatgtagatcaaattctcttctggaagcctacaaaacgcagtacacggttggtgctaagcgttggcgcgccttcttccccaattatctcgaatttttgcctttatgaattcgacaagctcatacacgaaatctgtcgaagtttggatattgtctacacacgttatgcggatgatctgacgttttcttgtaacgtccgagatgtacttggctctattccttccatgatcgaaactcttttaaataagcttttcaaaaaaaagttaaggcttaatcgtggaaaaaccattttttcctctatggcacataaccgccatgttacgggcgtcactcttaataacgaaggcaaaatttctttaggccgtgaacgcaagaggttcatcaagcatctcattaaccagtaccgatatggattgatagatgaatctgacaaggcctatcttgttggtctactggcttttgcgaaccatattgagcctgagtttattatcagaatgaacaataaatactcaacagaaacgatggatcgtttaaggaggcatctgtga

SEQ ID NO: 187386 - DNA, 1656 bp, Klebsiella oxytoca
gtgacaaaacaactggaacgtaaagccaaaggtgggagtttactctccgcctttgaactttatcagcaagagaaaaataataaccttcatgacctaaataataaatctgaccaatggttcgagctatgctggaattacctacaacaaccagcccacgatggtaacctcgatatatatcatcctgaaaatcagttttgcctacgttcaatgtcatttacggatttccgccgatttccacaacttgatatcaactttgaagaagacctgaccattatcatcggtaataatggacagggtaaaaccagtattctttatgctattgccaaaactctaagctggttcacagcaaatatcctcaaagaagatagcagcggacaaaggcttaacgaatactcggatatcaggaacgattcagataacaatttctcggatgtcagttctaatttcttttttggaaaaggccttaagaacatttccattagactttcacgctcaactcttggcgcatctgagcgtagagagagcatcatcaaacctgctaaggaggttgctgatgtctggcggattatcaatgagaggagaatggttaatcttcctatttttgcactctactctgttgaacgatcgcatccttttagcaagccagcaaaagagagcattgaaaaacgagaagatcgtttcgatgcatacaatcacgccttgaccggcgctggacgcttcgatcattttgttgaatggttcatctatcttcacaaaagagccgaagctcaaggggcatcggcaatcgaactgcttgaagagcaggttaatcatctgaaacagtcagtggaaaatgggctgacttccatggtaccactcttagaagaaacacaaaaaaaactgcttacggctcagatgagaaaagaatctctccaatcggttaacatgctaactgagacggcccaaatggatattgtgtccagagctattaccactgttgtccccagcataagccgaatctgggttgagaccgcatcaggtgcggacattatcaaagttaccaacgatctccaggatgtcaccattgaacagctatctgatgggcagagggtgtttctggctctggtagctgatctcgcgcggcgcatgattatgcttaatccattgttaaaaaatccacttgaaggcagaggtatcgtcttaattgatgagattgaactgcatcttcatccgaaatggcagcaagaagttatcatcgttttacgcaccgtattccctaatattcagtttgtcatcaccactcatagcccaatagtgttatccactactgagatccgctgtattcgagagttcaagcaaaacagtgaaagtggagaactatttcttgactcacctccaattcagaccaaaggaagtgaaaactcagaaattcttgagcaagttatgggagttttgtcgaccccgccgaacattgcagagtcttatcttgtcagtaactttgagaaatcaattattgatgatagtgaggagttgagtgccgaatcacgtcgcctttacaacaaaatcatttctcattttggtcagcatagttctgaactaaaaaaagcagacagcttgatacgccttcaccgcatgaagaacaaaatcaacaaagccaaacgcgagaaggataattaa

SEQ ID NO: 187387 - DNA, 648 bp, Klebsiella oxytoca
atgaaatcactcaatcgcaccgcaggcccggcgcatttgcatcagtttagggcaggacgcgatccttggatgtctgttgagcaaagcaatatctggccgcatctgttggaaatgcaaggtgaattttgtgcatattgcgagtgcagtctcaatcgaaagcacattgaacactttaggcccagagggaaattccccgcattaacctttgcatggggcaatttattcggatcttgtggcgacagttcaaaaacaggaggttggcaacgttgcgggattttcaaagataatggtgcagggaattacaatccggatcacctcatcaaacctgatgatgataatcctgacgattatcttttatttctgacaacagggcatgtggttccagccaaagatatctccggcaccaaattattaaaagcacaagaaactatccgtgtgtttaatctcaacggagatccttcgctactcggcagcaggaaaaaagcattaaattatattatggaagaggtaatacttcttcatgagtcgtatgaagatcttggggacgaactatggcgtgaaatgcgtgaccaagaagttcaaacgcttgggagcaaagaattcagcactgcattaaaacacgcatggcttcataacagtgaatattaa

SEQ ID NO: 187388 - DNA, 162 bp, Klebsiella oxytoca
atggcacgacgaaccaagccgttaacggatacggaaatcaaagccgccaaacctaaagataccgattaccagctatacgatggtgatgggttgaagctgcttatcaaatccagtggaagcaaactctggcagttccgttatcatcgccccttaacaaagtag

SEQ ID NO: 187389 - DNA, 294 bp, Klebsiella oxytoca
atgagtatggtgatggttgttacggaaaacgtgccgccgcgtctgcgaggacggcttgccatatggttactggagattcgagccggggtgtatgttggcgatatctcaaaacgtgtgcgggagatgatctggcaacaggttacacaattaggaggcgttggaaacgttgtgatggcttgggcaacgaatacagaatcaggttttgagttccaaacatggggtgaaaatcgacgtattccggtagatttggatggtctgagattggtttcttttcttcccattaaaaatcagtag

SEQ ID NO: 187390 - DNA, 873 bp, Klebsiella oxytoca
atgatttttctccagtacgggcagattgacgtactggatggcgcttttgttctgatcgataagaccgggatccgcacgcatattccggttggatcggtggcctgcatcatgttggagccgggaacgcgagtttctcacgcggcggtgaggctggcatctacggtggggactttgctggtgtgggtgggagaggcgggggtacgcgtgtactctgccgggcagcccggtggagcgcgggcggataagctgctttatcaggcgaagctggcgctggatgatggtttacgtctgaaagtggtgcgaaaaatgtacgagctgcgttttcgtgaaccccctccagcgcgacgttctattgagcaactgcgtggtatcgaaggggctcgcgtccgtcagacatactcgttattagctaaacagtatggtgtgaagtggcatggtcgtaattacgatcctaaagattgggaaaagggtgatgtggtgaaccagtgcatcagcgcggcgacctcatgtctttacggaatttcagaagcagcggtgctggcggctggttacgcccccgctatcggttttatccatagcggcaagcctctttcatttgtttatgatatcgcggatatcatcaaatttgagtcagtcgtccctaacgcatttgaaatcgccgctcgcgcacccgctgagcccgatcgagaagtcagactggcctgccgtgatatttttcgcagtactaagctgaccggaaaactcattcctttgattgaagaagtgctcgcagctggtgagattgagccacctcagccagcggcggatatgctgccaccggcaataccagaaccgcagcgacttggcgacggcgggcatcggggaggtgggtga

SEQ ID NO: 187391 - DNA, 645 bp, Klebsiella oxytoca
gtgtacctcgcaaaaataacgctgtataccagccagcttttaccctcacagctattacaactggtggatcgcggagaatatgtgatgcaccagtggctttgggagttatttcccggagggcaggagcggcagtttctttatcgtcgtgaagagatgcagggagcctttcgcttctttgtactttctacacaacctccagtagagagtaatatttttgatatcgaataccgttcgtttgctccagcattaagttcggggcagatactgcgttttaacctgcgtgctaacccaacaatttgtaaggcgggcaaacgtcacgacttgctgatggaggctaagcgtcaggtgagagggcaggttaatggcccggatatctggcagtatcagcagcgggcggcgcaggactggctggtgcgccagggcgagcagaacggatactcactgtgcgaggtgaatgtggatgcctatcgccagctgcaggttgtgcgggcgaaatcgcgccagatgatccagttcagcagcgtggattattctggcgtgctggtggttaacgaacccgggttgtttttgcaacgtttggctcagggatacggtaaaagccgggctttcggctgtgggttgatgttgattaaacctggagactga

SEQ ID NO: 187392 - DNA, 747 bp, Klebsiella oxytoca
atgagccaatatctggtttttcagcttcacgggccgatggcctcctggggtgtagatgcgccaggcgaagtgcgccatagccacgagctgccttcgcgttcggctttgctgggtttactggcggccgcacttggcattcgccgtgatgaagaagagcgcttgaacgcgtttaatcagcactactcttttctgctgtgtgcgagtcaggaaccgcgctgggcgcgagactaccacacggttcagatgccgaaagaggtacgtaaagcccgttatttcagccgtcgtgaagagctgagcgatcctgaactgctcagcgcgctgatctcccggcgggactattacaccgacgcctggtggatggtggggctcgcggtaacgcccgatgcgccctattcgctggagcaactgcgggatgcactacagcgccctgtattccctctgtatctggggcgaaaaagtcatcctctggctttgccacttgcaccattgttgctggaggggaccgcgccggatgtgctgaacgatgcgtatcgccagtattgggagcagtttaaagaaataaacatcccgctagcgaaacttcagtctgagtgctggtgggaaggtgagcatgacggcctgaatgctaataaagtcttacgtcgtcgcgacaggccgatgagccgccagcagtggacgtttggcgagcgtaccgttaatcaaggatcactgttcaacaaggaggaaccgtgtacctcgcaaaaataa

SEQ ID NO: 187393 - DNA, 1059 bp, Klebsiella oxytoca
atgaccacatttattcagttgcatttactgaccgcttatccggccgctaacctgaaccgcgacgataccggttcgccgaaaacggtcgtgcttggcggtgcgacgcgtttgcgcgtctcttcgcaaagcctgaagcgtgcctggcgcacttctgaactttttgaacaggcgctcgctggaaatattggtatccgtagcggacgtattgcccgcgaagcggcgaatattctgatcgaaaaaggtattgagccgaaaaaagcggttgagtgggtagaaagcatcgctaactgctttggtaaagtgaaagccgataagaaagcaaaagatgtgctggctaacgccgagacggaacaactggtgcatatcagcccggtcgagttcgaggcggtaaaagcgctggcgcatcggctggcggaagaaaaacgtgcgccgaaagaagaagaactcgctttattacgtcgcgaccgtatggctgtcgatattgcgatgtttggccgcatgctggccaataagccggaattcaacgttgaagccgcctgtcaggtcgcacacgctttcggcgtcagcgaaacgattgtagaagacgatttctttaccgctgttgatgatcttcgtaagacttcgctagaagatgccggtgccggacacctcggcgaagccggattcggctctgcgctgttttacacctatatctgcatcgacagagacctgttggtgaaaaatctcaacggtgatgaggagttggcgaataaaacgctgcgtgccttcactgaagcggcgctgaaagtctcgccagccggcaagcaaaacagtttcgccagccgcgcctatgcgtcctgggcgctggcggaaaaaggtaccgatcaaccgcgttccctggcagcggcgttttacaatccgatcaacggcaccaatcagcttgatgttgccgtaaaacgtatcaccgaactgcgtgaaaatatgaataaagtctatgggcagcaaacgaagtccatcggttttgatgtgatgcaacagcagggaagtatgaaagacgtactggactttatctgcgcgtaa

SEQ ID NO: 187394 - DNA, 555 bp, Klebsiella oxytoca
atgagtatcgtgacggacgaccataaggccacgctgcgccggtggcatcaagatttacaggaaaaacgcggcctgcgcgccagcctgcggcgcagcaaaacggtgaatgaagcctgcctgtcggaaggatttcgttccctgctgatgcagactcacacgttatggaaagtcgaagggcaggagtggcgttttaccgcgctggcgataactgcggcgctggccgcacatgttaaatctattgatgaacgccaaaagtttgctgcccagctaggccagatgaccggcaataacccggtcatgtccgaactgcgtttttcccggctgtctgcggtgaaaacctctgacgaactgctgcgccagctactccgcgccgttcggttacttaatggctcggttaatcttccctcactggcggaagacgtcttcctctggtgtcgggaaaacgacgaactgcttaaccatacccgccgccgccagcggccgactgaatttatccgtatccgctgggcgctggagtattaccaggccggtgaagccaacaacgacaatcaataa

SEQ ID NO: 187395 - DNA, 1542 bp, Klebsiella oxytoca
atggataatttctcacttttaacaaccccctggctccctgttcatctgaaagacgggtccacgggaaagctggcgccagttaacctggcagatgaaagcgtggtggatatcgccgccgtgcgggcggatttacagggcgcggcctggcagtttctgctggggttattgcagtgcagcatggcgccgaaaaaccattctcgttgggaagatgtctggttcgaagggctgagcgcagatgtgcttcaacgaacgctggaaccgcttgagcctgcattccagtttggcacagatacgccctcttttatgcaggacttcgagcagctaagcggagagaaagtttctatcgcctctctgctaccggaaatccccggcgcgcaaaccactaagtttaataaagatcattttgttaagcgcggcgtcacggagtgcttttgcccgcactgcgcggcgctggcgttattttcgttgcagcttaatgcgccatcgggcggcaaaggttatcgcaccggactgcgaggcggcgggccgatgaccacgcttattgaattgcaggaataccagggcaaccgacaaacgccgctgtggcgcaagctgtggctcaacgttatgccgcaggatagcgcgggaatgcctgtgccagaaaagtatgatgaaaccattttcccatggctggcccctacccgtaccagcgaactggcaagcgcagtcaccactccggagcaggtgaatctcctccaggcctattggggaatgccgcgacgcattcgccttgattttaatactatccattcaggctgctgcgatctctgtgaaacccacagcgatgaactgcttagcgggatgaccgtgaagaactacggcgtcaactatgcgggctggatgcatccgctaacgccttatcgtctgcctctgaaggagggcagcgagcgttattccgtcaagccgcagcccggtgggcttatctggcgcgactggctggggttgaatcaggaaggcgcttcggaaaataacaccgaatttccggcgctggtcgttaaaacatccagcgcgcgtagcctcaaggacataaaagttggattgtggggctttggttatgattttgagaatatgaaagcccgctgctggtatgaacaccatcttccgctgatcttaaccgaaaatattattcctgaactgcgccaggctgcacaaacggcgtcgcgcaaccttagcctgctgcgcagcgcattaaaagaggcctggttttccgatgccaaaggcgcgcgcggcgatttcagctttattgatatcgacttctggcatttgacgcagggtcgctttcttgagcttattcgcgatcttgaaaacggccagaacgcagacgaaaggctgaaacggtggcaaatgaacatctggctgtttactcgcagctactttgatgatcgcgtttttaccaacccttacgagggcgtcgatctcaaacgcattatgctggcgcgtaaaaaatatttcaccaaatcggcggagaagcagagcgcgaaagccgccaaagcgaaaaagtag

SEQ ID NO: 187396 - DNA, 2661 bp, Klebsiella oxytoca
atgttcaattattgggggaaatcccggcgcggagaggatgatggcggtgatgattatcacttgctgtgctggcattcgctggatgttgcagccgttggctattggatggtgcagcataatatccatgacattaatgattatcttaacaaactggggcttcatcataaagttcaggcggcacaattttttgcatggctattatgctggcatgatattggaaagtttgcccactcttttcagcagctttatcgtcatgaagagttaaatgcgcaggacgaatatataaaatattatgaagccatcccgcatgcgactctggggtattggctctggaatgattatttaagcgagtgcgctgaacttttccccgaatcccctctttctgctcgtaagttaaagcgcatcattgcactttggatgcctcttacgacagggcatcatgggcgaccgccttcttcagtaacagaactaagaaattttcgtcagcaggataaagaagcggcccgtgattttcttaccagggttaaatcattatttccactgattgaggttcctgagttttgggatgatgataacggtattgcgctttttaaagatctctcatggtttatttccgctacgatagtactggctgactgggttggttcttcaacccgatatttcccccgaattgcaaaatcgatggaggtcgatgaatactggcaacagcatgcgctggttaaagcgaaagtagccgtaaccgttttccctccttcctctgacgttgcctcttttagcggaataacggcgttatttccctttatccaacagccaaccccattgcagaaaaaaacgcttgagctggatattgataaacaaggtccgcaattatttattcttgaagatgtgactggtgctggaaaaacagaggccgcgttgattttgacacatcgcctgatggctacgggaaaggcgcaggggctctattttggtctgccgacgatggcgacggcgaatgccatgttcgatcgtatgtcggagagctggctggcgttgtatcaacccggttcacggccaagcctggtgctggcgcatagcgcacgtggattaatggatcgcttcaatcagtctctgtggtcgggtgatttatcgggttcagaagaacccgatgagctccagccatccagccagggatgcgccgcctggtttgccgacagtaataaaaaagcgctattggccgaggtgggcgttggcacactcgaccaggcgatgatggcggtgatgccgtttaagcacaataacctacggatgttagggctgaataataaaatcctgctggcggatgagattcatgcctatgacgcctatatgtcgcgggttctggaaagtctgattgaaaaacaggccagcgatggcaataccacgattttactttccgccacgctctcacaacagcagcgagacaggctggttaccgcctttgctaaaggagcgaagagccgggttgaagcgccattattgggctatggcgattatccctggcttacacaggtgacgagttcgtcggtggtttccctgcatgtggaaacccgcaaggaggttgaacgcagcgtcaaagttggttggatgcacagcgaacaggagtgcattgaacacattgagcaggccgtatgcctgggaaaatgcattgcctggatacgcaactctgttgatgacgcgattcgtatttatcgccagctcattatcagagacgttgtaccttccgaaagtctcttgctattccatagccgcttcgccttttacgatcgtcaacgtattgaaaatcaggcgctggcgcagttcggtaaaaaaagcggcacgcagcgttgcggaaaggtgctgattgccacccaggtcattgaacaaagcctggatattgacgtagatgaaatgatctccgatttagcgcctgtagatttgttgattcagcgagccggacgtttacaacgccatattcgagatcgtaatggcttgttgaaagcttctggacaagacgaacgtaacccgccggagctgctgatcttcgcgccggaatgggatgacgtaccgcgtgatgactggctttcaagctcgatgcgtaatagcgcttacgtctaccccgatcatggtcgcctgtggctgacccagcgcgtgctgcgccagcaaggggaaattcggatgccgcagtctgcccggctgcttatcgaatccgtttacggcgaagaggttgatatgcctgtgggatttgcgaagacggaacagttgcaggaaggaaaatactactgcgaccgtgcattcgctaagcaaaacattatcaactttgcgccgggctacagccctgaaagcagtgactatctgtcggagaaactttctacgcgtctggccgaagagtcggtttcattgtggctggcgaaaattatcgatggggcggttaggtcttatgcgccaggcgaacacgcctgggaaatgagcatgctgcgagttcgtgagggctggtggaaaaaacacaaagacgagtttgaaaggctcgagggtgaaaggcttcggcagtggtgcattgaacagcatcagaatcaagagttcgccgtggtgattgtggtgtcggaggttgaaaacagcggttattcagccattgaaggattgattggaaaaatggaggtgtag

SEQ ID NO: 187397 - DNA, 1209 bp, Klebsiella oxytoca
atgttgactgataccaagctgcgcaacctcaagccaaaggacaagctctacaaagtgaatgaccgtgacggcctctacgtggccatcacccctgcgggttcgatttcgttccgctacaactactcgatccacggcaggcaagagaccatcaccttcggccgctatggtgtcggagggatcacgctagcggaagctcgcgaacggctgggcgaagccaagaagatgatcgccgcagggaaatctccagccaaggagaaagcgcgggacaaagcccgcgtcaaggatgctgagacattcggcgcgtgggccgagaagtggttgcgcggctatcaaatggcagattccacccgcgacatgcgccgtggaacatacgagcgagagctaaagccgaaattcagcaacaggaaactgatagaaattacccacgaggacttgcgggcgctgactgacgccatcgtggaacaaggcaggccatcaacggccgtgctttgccgcgaaattatgatgcaggtcttccgctgggctatcgaacgcggacagaaggttgagaacccggccgatttggtgcgcccgtcaactatcgctaagtttgagccgcgagatcgagcactgacgcccgaggaaattggcttgatgtaccagtacatggagcgtatcggcaccacaccttcaattcgagcggctgccaagctgctgttgctaacgatggttcgcaaaagcgaactgaccaacgcaacgtggaacgaaatcaatttcaccgacgcgctctggacaatccccaaggagcggatgaagcgccgcaatccccatttggtgttcctctcgaggcaggcgctggatattttcatcgcgctgaagaccttcgccggcggttcggaatacattctgccatcacgctatgactcagacttgccgatgagcagcgcaacgctcaatcaggtgcttacccttacctatcggctggcccagaaggaagggcattcacttggcaagtttggaccgcacgacttgcggcgcacagccagcacgctgttgcatgaggcgggctataacaccgactggatcgagaagtgccttgcgcacgaacagaagggcgttcgtgccatctacaacaaggccgagtaccgcgatcagcgccgggcgatgctccaagattgggccgacatgatcgacgagtggacaatcaggaagacccgcctcaaggactga

SEQ ID NO: 187398 - DNA, 231 bp, Klebsiella oxytoca; identical to SEQ ID NO: 85382

SEQ ID NO: 187399 - DNA, 744 bp, Klebsiella oxytoca
atgtcggttgcctgtgctgcaaccgttgaaagcagagcggccggtggtgacttggtagggcttgcacctgcgaaagctggccgcgtcgtctattacgccggagaagaccccaagccagcgctgattgggcgaattcactctgttggcaaacacctcggtcaagaagctcgcgaagccatcatagaaaacctcatggtcgtgccgatcatgggaaaactaatggacgtcacgaagaaaaataaacggtcccagataatcaagcaatgcgaaggcgctcggctaatcgttctggacacattgagccgtattcatacccttgatgagaatagcaacggcgatatggcccggcttgtcgccatgcttgaggaaattgcgaccattactaaagcgtcagtgctttatttgcaccatgtcagcaaaggcagcgcccgcgacgggcaggccgatcagcaacaggcagtacgtggtgcgtcggctcttgtcgataatccccgatggtgcggtttcgtcgccaagatgactgaaaaagaagcgctgaaccatactgaccgcgtctacgaccgacagcctatcggggaaaatcgccggaagttctttgttcgttttggtgtcagcaaacagaactatgccgaaattgacgacgatcgctggtatcagcgtcatgacggcggcgttttgctgccggtggagttgttggacgccaagcaggacagcggaagggggcgtcaacgtgagcaagcatga

SEQ ID NO: 187400 - DNA, 897 bp, Klebsiella oxytoca
gtgagcaagcatgacttgactcacgcccggcatgacccggtgcattgtctagcacccggcctgttccgtagccttaagaaaggggagcgcaagcacagcaagctcgacgtggtatatgactacggcaatggcaagcgtatcgagttcagtggcccggaaccattgggagccgacgatctccgcattttgcaaggactcgtagcaatggccgggccttctgggctcgtgctttcccccgacccgcagacagaggccggtcagcagctccggctattccttgagcctaagtgggaagccatccagcaggatgcaatggtggtcaggggcagctatggggcgttggccagtgaagtgggctatgccaacaaaaacgacactgaacgagtacgcgaatgcatcgagaggctatggaaggtctccatcattgcgcaaaacggaaggaagcgacagggctttcgcctgttgtccgagtacgccagcgatgagcaggacggcaagctatacgtggcattgaatccgatgattgctcgcgcaatcatcggcgggcaacacatccgcatagacatggccgaagtgagaaagctacagaccgaccccgcccgcctgatccatcagcgactttgcggctggattgaccccggcaaatcggggcgtgtcgagctaggcacgctttgcagctacgtctggcccgacgaagctacgaacccgaataccatcaaaaagcgctgccagaaagcacgcaaagcgctggtcgagctggtcgccgtgggttggaagctggacgaatatgcgaaagacaaatgggagatcggacgtcccaaggcccacgataacggtacccgccccacgttttcagtacccgacccccacgttaatggtacccaacccccacgttaa

SEQ ID NO: 187401 - DNA, 321 bp, Klebsiella oxytoca
atgtttgacattctgattttcgctggatttgtagtattcgcctcgaccttcgctatcggcatgtgggcgctcggccgatggctacgtagcaagggctacgggccacagctcgataggctggatcgccaatacacggccttacagcttcgggtaagtccgctcgccctgtcagcttcctatcgcatgttttccggggcacaggcgctgaaccgtctaccgctgcttggcagcaagaataacgccgctctaaaccagcaagtgttgatggccatccaagccgcacaggaagctcaaaggcaggagaagcgcgacaatagctga

SEQ ID NO: 187402 - DNA, 1569 bp, Klebsiella oxytoca
atggaacgtcgtctgttgttgttccttgtcctagcgagcgtgcttgtcgccggaaatgctatggctgcgaacgacctgtcccacgccgatacatcggttcagggccttctcgatctcgttctgcagcagtcgcaccaatggtcaggaaaactgtactactacgccattagactgttctggctgctggccaccatccagttcgtatggacgcttatgcctctggtcatgaagcaagctgatttcggcgagattgtcggcgaactgctgcgcttcgtgatggtgatcggtttcttcctcgcagtcatgacttattccgtggagtggtcgacggccattgtcgatagcttccgcgatgcggcagcatcggcaagcggtcttggccgtgcattagaacccggcgacatgctcgcagttgcgctggatttcggccgcaccatggtggaaggcatttcagtgttttctccggccaagggaattctgatcgctgtatgcgctgtgctggtcttggcgtgcttcgccttcatcgcagcgttcatgtttgtgacgctcgtagagtcctacgtgatcatcaacgcatctgtgctgttctttggctttggtggttctcaatggacgcgggactttgcaattgcgcccatgcgttttaccgtcgcaatcggagccaagctgttcgtcttaacgctgattgtcggcctgatcgtacagtcggctaagcagtggctagcggcctacaccaacgacgaagcgtcattgatgacgatggtcggtctggccttggtgtgctgctatctgacgaagaccatccctgatctgatcggcggcatgataagcggcacatcgacgggcggcggctccgccattggcgggatggcggtagccggtgctgccggggcggccgcggcggcggccaccatcgccacggttggcgccgcggctcctgctgctgccggtgcggcgggtgccggagggattggcggcggcggtctggccgccgcaatcaattccagctttgccagtggtggtgcgcccgcagcggccgcaacaggtgggggcggtgcgacctctggtatcggcgcgagcactggcggccaaacggcggtcaagagcgcggcgtcggtaggtgcccgagtgggcggtagcggcgcaccacaaacgccgggcgccgcgccgcagcatcctagcagcggagtgcagcaggcagccaagcaggccggaaaagcggcgcagggcaacgacaacaacgaccagcaagcgacaccaaaagggggagttgtcagctccggcaacgcactttcccaagcggccaatggtggtgcaaagatgctcggcgtaatggcctcgatggcagtgccgggcatggagaacgcgcactctttgtctcttggcgcaggctctccaccacctgttcccggcgatgccaactcgacagccccggccaacggcgcggaaacgatagtcgaggagtctaatgttatccgaccagcttcggacaccagttctactcccggtcgcctcgcttcgctcgacgtgcagggcaccgcttcgaacaacgatcaactggagaaataa

SEQ ID NO: 187403 - DNA, 795 bp, Klebsiella oxytoca
atggaaatggaatcgcaaaaaacgtcgacttatgccgcccaaaaattcggtcgaggtgcggcgctcgctctggctatggcaagcgcaggcctaggtgtaagtctctacatggcaccggctccagcctatgccatctactgctcgaactgctcgacgttctatcagcagatgtacgagtacgccgaagcggtcaacacgcaactaaacaccgcgcagcagttgcagacgcagatccagcagtatcaaaacatggttacgcagggtctgagcttgcccaactccatgttcggcagcatcgcggccgacctgcaaagcgtggtgaatatctacacgaagtcgcaggccttgggccgccaaatccagaacatggattcgcagttcaacacgcagtttccgggcttcgagtcctacctgaatcaagccgcgaactcggcggcagtcccggcgcgggatcgttatcagaagtggtcagagcaggggcgcgacaacgtgaaaacggcgatggaagcggcgaacctcaataccggcactttcgagtctgaggacgcgcagcttgcccgcatggtttcccgttcgcagtcggccgctggccggatgcaggcgattcaggcgggcaacgaaatagcctcgcagaacgtgcagcaactgcaaaagctgcgcgatctggtagccacacaaatcaatatgcagggcaactacatggcccagcaaggcgaccggacggccgctagcgaagccgccgaacaacagtttgaagcgcgtaaaaacacacgcggcggcgttaaggggtactga

SEQ ID NO: 187404 - DNA, 225 bp, Klebsiella oxytoca
atgaagacagctcaccgcatcggcgcattggccaatcaactcaacgaactgcaagcctgccttggccgagccaacgggcggtctggcaaagacgttatcgaagcccagcgcattgcggccgagctagcttcctctctcgaagactggcaccttgaaacgctgcacattccggaaacggagcgtgacctctatcgcgtacagaatccctattacgctgctcactga

SEQ ID NO: 187405 - DNA, 240 bp, Klebsiella oxytoca
atgaccgaccatcaaaatgcaaatactgaacgtcgccctcaacgccgtggccgcgcatcgttcgtggcggtacttgatgaggtgcggaaggagcacgaacgcggggtaccgctggtatggatttatgaggcattcgcggaccggctcgaaatgggatacacccagttcaccaaatacgtcacacgatacatcaagcaaggtcagccaatcctcgctccctacaagcacgatgggaagtga

SEQ ID NO: 187406 - DNA, 381 bp, Klebsiella oxytoca
atggccggtgaaaatgcgattgaggctatcaagccgcattcgcgtgggacacgtccacggcgggagcgaattgaggtttgggtcagcattgatgagaaaaaagagttagccgaaagggccgatcaggcgggattgtcgaatgccgctttccttcgcgctgttgggctgaatctgcctataggttcacgggccgatttggaagctgtccgccagttggcaaaggtgaatggcgacctaggtcgggtggccggattgctgaaattgtggctcgctgagaaacgcggtcaggacgcgcgaccgattgacgtagaagcgatgatgatggatttccgcgcaatccaagaggacatgcgggcgctcatggggaggatttccaaatga

SEQ ID NO: 187407 - DNA, 1953 bp, Klebsiella oxytoca
atgatcgcacatcgcatcaaccgtgaacgcaaggcctcaagcccagcccggttaatcaagtatatggtggcggccaagggcggcattgacccgacgagctgggagcgcacggccgattacattctggattccgccaatggcacgaccgagggcgagaaggtcgccagctaccgcgttaccaactgcggcacggatgatccggcagatgccgcaatcttgatccaagccacgcaagcggctaacaccaggtcgaaggcggaaaagacctaccactttgtctattccttcccgcccggcgagcagccagaccttgagacgctgcacgccatcgaagacgaactatgcgctgccatcggcctcgatgagcaccagcgtgtatcagcggttcatatcgacaccgataacctgcatgtgcatgtggccatcaacaaggttcacccgaccgggttacagaacattgaaccctattacgatcagttccgcctgatggaggcctgtgagcgtcttgaggtagagcatggcttgcaaagaacgtttcatgctctggaggcaaagcagcggcatcagaaccgcgacattgagctgttgccagcgaaagccccagagcagcgcgacagcctattccgtgaacaccttagaaacgcttacgacctcagcatatcgaagcctcctgaagccaaaaccctgaacgggttgcgcaagctgtccgatacccgtctacagagacagtcagcagataaagcggagccagtccgcatcggcgcgaaggtggccagcgtggaggcgcagtccggcatcgagacgctgatcgggtacgcggcccgcgagctggccccggcgatgcgacaggcgacgagctggcaggagctgcacgacgcagcggccgaacacggcctagaggttcgccagcgcggcgctggccttgtcatcggcgagccagattcaggcatttgggcgaaggccagcaacgtcggccgcgacctttccatgaaggccctaactgaccgtcttggcccgttccagccttccgaacggcaggccgaggcgaaggcgaaccgcaagcggtacgagccacgaccccggcggccggataacccgacgacagcgggcctgttcaaccagtaccagcgcgagcgacaggcggccattctggcccgccgtcagggcctcgaccagatcaagcgcgagagtgcggctttcaatgcgcaggttaagcagtggagccagacagagcgaatgcttttgaaggtcgcgggcaaggggccaaccaaacgcctgatgtatggcactatcaaacagcaggccgacgcctcgcgccaaaagaaccggcagagcgcagacgctcgccgtcaggcgctgttcaaacagacgacgatgcccacttgggccgactggctgacgcagcaggccgagcgcggcaacaccgaggcgctggccgtgctgcgcgaccgcgaggaacggacacgccgctggaacggggagctactgaccgccgaccgggccgacaaggccaaggctgttgttctcgacaagctcaagcccaaggcccggaaagacgggacgatggcgtacagcaccatcgacggcggcatggtgatcgaccggaagacgcacgttcaggcgcagaaagccacgaccggcgcggcactggttgcgctcgaactggcgtccaagcggttcgagggccaagcccttatcgtggaaggcacagacgagttccggcttgaagtcgcccagctcgccggtatgcacggccttaaggtcacgttcaccgatccggcgatggagcgtatgcgccgcgagacggccgagtataaggaaatggagaaggcctttcagaccgaggtatacgctccgaaggacaccaaaaagggagaggcgagcgatatgccaggcgtggccccacaacgtaggcagatgcaaccgaaggaccgctctaatggactgatatag

SEQ ID NO: 187408 - DNA, 1008 bp, Klebsiella oxytoca
atgcatctaataatgctcgatacatgtgtttggcttgatatttcgtctcaaaaagctgaattgccgatgcttactgccatagaacatctggtgcaggatgggagtatcaaaatactactgcccgatctgatacgtgccgagtacgaacgaaataaagatagggtgattgaggctacgcgaaaacggctcgccagtgaatttcgagtaattaaaggggtggttgagtcgtttggcggtgaaggtaaagagactgcgctcaaaaccttggatgatgttaatcacaggctgcctattctttccgaagtaaatcaaaacacagtaaatcgtgttaccaaactttttgacatggcccacgaagttgtaatctctgatgtcgcaaaaatcagagcagcagagcgggctatcgctaagaaggcaccgttccataagcagaagaatagtgttgctgacgcagtgttagcagagactttccaagagtttcggatgtcacacgcaagtgagtacgaaacctttagatttgtcactcataatgtcacggatttttccggcaaagaccacaggcagccacacgacgatttcgcagatatttttgacggcagcagctctttattctttaacgccacaagctctgccatcgaggatttgctcgatcttgaagaatttcactatgagaatagctttgcttgggaggacgaaactcgtgggcttcaggaaatcatgtctgcgatggacgagttgttcgataaagtttggtacaaccgccatatgaacatgatgtatcacctagataatggtgacatagaggtcgtccccgctggcacaaaacgctacggcaatgatgtgattcacgaagatatcctcggccaagcagaaattgcagctcaacgggtcagggataaatatgaagatactgggccctggagcgactttgaatgggggatgctgaatgggaagctgtctgccctgcgatgggtcttgggtgatgagtgggacatgctcgacacgtga

SEQ ID NO: 187409 - DNA, 570 bp, Klebsiella oxytoca
atgaatcaacgcattggatacgcccgcctttcgaaggatgaccagtacctagacctgcagcgtgacgcacttaagcaggccgggtgcaacgtgatctacgaggaagtggctaccggcaaaaccgcaccacgcccggagcttgaggagtgccgtaaggcgctacgggccggagacaccctcgtggtgtggcggctggatcgactagggcgcagcctccccgagctggtgcagatcgtggctgatcttgaacattgcggggtcgatttcgtgagcctcactgagaaaatcgagacgggcagtgcagcgggcaagacggttttctatgtgatctcggcgctggccgagttcgagcgcggcttgatccgggagcggtcgcaggccggactagcagcagcccgcgcacgtggccgcgccggtggccgaaaaccgaagctagatgagcagcaggtgcgcgagatcaaagccctgttgcgcgatccagatattcaggtggccgaggtagctcgccgttatggcgtgtcccgaaccaccctttacaaacacgttggcgtaattacgccgcgccaatga

SEQ ID NO: 187410 - DNA, 1470 bp, Klebsiella oxytoca
atgaaccagcagctagacactgcagacagcgtacgccgcgagttagccccccgtaccgcgcagaaacataaagccgaatttgggcagttcatgacgccttcgagcgtggcccgcttcatggcatcattgttcccacctagcacccaacagatctgtcgtctacttgatgcaggagcgggtgtcggcgctctatcctgcgcttttctcgaccgttgggcgacgggtggctttagctttgagtccgtcgaggcgacggcctacgaaatcgacgacaacctgcgcggccaccttacgcaacacttaggtggatacagttgcgtgaggccccgcatcctcgcaggagattacatcgaactcgcaactgctgaggggctgaaggaccgaggctatacccatgtgattctcaatccgccgtacaagaagatcaacagccaatccgctcaccggcttgcattgcgtagtgtcggtatagagactgtgaacctgtattccgcctttctcgcgctggcggtgggcgaggcggcgccgggtgggcagatcgttgctatcatcccgcgcagcttttgcaatggcccgtattaccgaccgtttcgtgatttcatccttgcgcgagcagcgatccgccatatgcacctattcgagtcacgcaacaaggctttcaaggatgacgaggtgctgcaggaaaacatcatcatccgcttggagcgtggtggtcagcagggggcagtaacgatttcgacttccacagatgacagcttttccgacctgaacatccacgaacatccgtttgaccggatcgtgttcccggatgacccggagcggttcattcatgtgccgaccacgactgagaaaagcgccatcgagttatcgcctgtcgtgcgctattcgctggccgacattggcgtgaaggtatcgactgggccggtagttgatttccgcttgaaagaacacttgcgagacatgccagagccgggcaccgtgcccctgatttaccccggccacttgagcatgacgggcaccgtctggcccgtaccgggcttgaagaagtccaacgcgatcatgcgaaataacgagacggaaaaatggctttacccaaacgggttttattgcgtggtgcgccgtttctcatcgaaggaggaaaagcgtcgtgtagtggcaagtctcgttgatcctgctgcctttggcaatcattcggtgctgggcttcgagaaccacatgaacctgtttcacgagaacaaacgcggcttgcccgaggcactggcccgtgggttggccgtgttcctgaatacgaccgcagtagatgagcatttccggcgcttcaacggccatacgcaggtcaatgcaactgacctcaagctgatgaagtacccgagccgtgacaccctgatcgagcttggcgagtgggccatgcagcaaggaacgctcacgcaagacctgatcgatagcaagctggggaccctgaccgcatga

SEQ ID NO: 187411 - DNA, 957 bp, Klebsiella oxytoca
atgaaagataagaacgattacatcgaggctgcgcaacaaatcattatttccctcgggctaccgaaggcacagcataacgagcgttcggccctttgccttttggccctgttggatctcactccgggtaagtcatgggccgacgcaggaaacccgctgatcggcataacgcccatcatggactgggcgcgcgatcacttcgacaaagcttataaaccgaacacccgtgaatcagtacgccgacagacaatgcatcagttttgcgacgctggactcgctctctacaaccctgacaaacccgaccgtcctgtgaatagtccgaaggcggtgtatcaaatcgaaccctccgcattggtcttgctgcgcaccttcggaacccctgcatggcatgacagcctcgttgcttatttggccgagcgtgaaacacttgttgcccgctatgccaaagagcgcgagcagaaccgtatcccggttgagattgcaccgggccagcaaatcactctcagtcccggtgagcacagcgagttgatccgggacatcatcgaggattttgcaccgcgttttgcgccgggtagcgttctgatatatgccggcgacacaggtgacaagtggggttacttcgatgcaccattgctggccggattgggtgttgatgtggattcgcatgggaagatgcccgatgtggtgttgcactttactgagaaaaactggctgctactggtggagtctgtcaccagccacggcccggtcgatggtaagcgccataccgagctggcgaagctattcgccggatcgaccgccgggctagtctatgtgactgccttcccaaaccgggccatcatgggccgctacctgagcgaaatagcttgggaaactgaagtgtgggtggcagatgcaccttcccatttaatccactttaacggcgtgcgtttcctcgggccgtatccggccgaggactga

SEQ ID NO: 187412 - DNA, 567 bp, Klebsiella oxytoca
atggcaaacagccaagtccaccctcaagggtggatttctcttttgatagcaccagaacatgaagagcgggccaagcggatgcgggccgaacgcgatcgccagtatggaaacatctacaccgaggcagccactgatgagcgatgggtgggggacctaggcgagatggttttcaactcatggtttaagcatgaaggcatccaaagccttgagtgggtactggatgatgcggccggtcagcctgatttcgtgacagccctgaacgttcgcatcggcgtcaagacagtgaagcgcaaagtgccgccccgtgaggactacaccgcacaaattacggctcgccatgcggaagaacccatcgaccagttcttcttcatgacctatgaaattgcaaagcgacgcatgtggctgttgggtggtatcagccgcgagtgctttctgcagggagctcgctattacggtgctggtgaatgggtacatgccaactacaagattcgacaggggcatgaaatttttaacattgagatcgctaagctaattccaccaaaggtgtggattaagtcggtgacgtag

SEQ ID NO: 187413 - DNA, 813 bp, Klebsiella oxytoca
atggccgacctgactgcctttgagcgtcgtaagctcgaaaagctgtttggtatggggggcggttatgttttgaatttttcagaccgcacctattccgaattcttcattgattaccgtgtggaaattgatgcagctcagtaccgaacaggtggcgactccaaggccaagcggatgcgcacgttctgggatgttgctcccaaccatacggctggccgtgtgattgatggtttgattgctgttggtattcaagaggactgccttggagatagcaatcctctgctgatcgaggattgtcggaagatcgctcagcgccttcttagtaaccagccagtggctgaactggatgcgttgaccgccattgcggatgagcgagatttcgaggtggtggcggagcacgtccgcgaggcaatcgagaagaatcaacccgagggcgggctggatcggctgcatactttcgtcaacaaattcatccgcgtgacgtgtgaaccgcacggcatcactatcactcgtgataagccgctgcatagtgttttcggagagtacgtcaaggcgctgcgggaaggtggtcatcttgagtcggccatgaccgagcgcatccttaagtccagtatttcagtgctggaagcctttaatgacgtgcgtaacaacaagagtcttgcacacgataacccgatactgaattatgaggaaagcttgttgatatttaatcacgttgcagcatcagttcgttttatcaagtccttggaggccaagataaaagctaaaataacacaggcaaaacacggggggtgggacgaaagcatccctttctag

SEQ ID NO: 187414 - DNA, 198 bp, Klebsiella oxytoca
atgaaagatagatcgcatgatacggcgatggctgatcacttccgcgccgatccgacgtatgcggcggaattgcttgccgaagtccgccgcaagggtactccagccgagctggccattctattgcggcagatggccacggcctcggtagatgctgtgaggtcggaggacgccgatacagggcgcactctacttctctga

SEQ ID NO: 187415 - DNA, 972 bp, Klebsiella oxytoca
atgacgaatatctacgactctaccaatataagcagtcaggaagcggccaggcacttgcctgcggctgctgcaaacagcgcgagcgcggtttcatggggggcgatatttgcaggcgccgccgctgccgcctcgctggcgcttatgctgctcatgcttggcgccggattaggcctcacctcaatctctccctgggaaaatcaaggtcttgctgcgggtaccgtcggtattgccgccatcgcctggctgacgtttacccaaattgtggcgtcaggaatggggggatatctggccggacggcttcggactaaatgggttgatacgcataccaatgaaatctatttccgcgatacggcgcatggctttctgacatgggcggtggcgctgctggtatcagccgttcttttaaccactaccatcagttcactcatcggcggcagcgcaaaaatcgttggttccgttgccgggggcgcgacggcaaccgccgtgaataacgcgggggagggatcatcgatgttatcgaagtcatcgatggaatattttacccgctcgctgttcagggcgagcggctccactccggcaggtaacagcaacgcatcaggcaatgatgctatggccatgaatcagccagtgccgccaaaggcggagtcacccgctcaattagccgaagtgacgggcatttttgctaacagtatttattctggcgcactgccccaggatgatctgacctatgtggcgcagctggtttctcagaataccggcatcagtcagcaagaggccgagcagcgggtacaggcggtttatgataaagcccaggctaatttgaaagaggcaaaagataaagcgcagcaggccgcagacgccgccagaaaaaccaccagctacgtcactctgtggtcatttatttctctgttaattggcgcttttgttgccagtctctgtgccacctatggcggacgtcagcgtgatttataa

SEQ ID NO: 187416 - DNA, 309 bp, Klebsiella oxytoca
atgctgttcgccgttacgttgacatatctaacgcagcacgatgtgatatccgctcaccttgatgcacataagcgctggctggcaaggggccttagtgagaggaggatcatttttgccggccctctcagtaatggtactggcggttacatactttttcatggggacaaagtcagcgacattcataactttctcaaagatgacccctttatcatttacaacattgcaaatgcagaagtcgtgagcgttgagccagcattatgtgcgcaggattttcctgcgagatgggcagatgaggcccgttttatgtga

SEQ ID NO: 187417 - DNA, 225 bp, Klebsiella oxytoca
gtgaattctgggcggggaggtttctatgccggcacggccctggaagatatggattttcaggagcgatttctgcgcaactttctggcttttctgagcatcacatgcgtggaatttgtccgctctgagggcccagcgaaagatgaagagattaagctgcgggaaatttcacgggcaatatcttcaattgttcagatcattaatattgtttctaccactaaggaataa

SEQ ID NO: 187418 - DNA, 780 bp, Klebsiella oxytoca
atgcagatgaaaaaattagtaccgcgcatactgaagaaaagtgcttttattttgttccttctgttttcgcacaactccctgcttatggctgaggagacgggggtaaaaaatatcgttcttgtgcacggtgcctttgctgacggctccagctggtcagcggtcatctccttgctccaggctcagggctatcacgttaccgcagttcaaaatcccctgacctccctgcaggatgatgttgctgcaaccaagcgtgtgctggaacgccagaatggtgacgttctgctcgttggccattcgtgggcaggcgcagttatcactcaggccggcaatgcagtaaacgtaaaggggctggtttatttgtcggcgctggtcccggatagcaatcaatccgtttcggacgcgctgacgcgatttcacgcgccaatggaaggtttggaagcagataaaaacggactcatctggcttgataaacctgaaatttttcatgaagttatggctaacgacatcggtgaaaaacagagccaactgcttgctgctatgcagcagcctatggccgctgcggccttcacagaaaaagttaaagctgctgcatggcgagaaaagccctcctggtacctcctcactgaaaatgacaacgcgctggccccatcagtacaggccgattttgcgcgtgaggctggcgcacgcatcttaaggattcaatcagggcatctgtccatgatctctcatcccgaagccgttgccgcatttattgtaaaggcggcacgcagtattcactga

SEQ ID NO: 187419 - DNA, 1017 bp, Klebsiella oxytoca
atgcgtattgctttacttgcccttccgggcagcatgcgttcggcgcttgcggggatggctgatatgttctggctggcgaatcaggttatcctgtctaacccatcattaaataaggacatttcccgggaaacgccatttttcgacgtcaggatcattaccgcggatggtcagccggtcagggatgtccatggacgaattattgaaagcgacggttcatttaatgaaccgggcgcttttgggctgattattgcgagcggtatgcagttggacgagcagaggtatccggtcgatcgagcagcggtatcatgcgcggccaggtggctgagattgaaatattcagagggaagctgtattgcggcagcctgtgctggcagctttgtgttgggagaggcgggtttactcgatggacggatttgcaccacgacgtggtggttatacccgactttcgctgagcgctttccgctggcgaaacccgtttggggaaaaactctggccgagcaggacaatgtgttaaccacgggtggcccactttcatggatcgatctggttatacacgttgttcgcagtcatgccggtgatgagctggcaaagctgacagctgacatggccgttgctgacagccagcctctgtcacagcaaatttatgcgcccgcaggatttctcaactcaaggcatccactgttggctaaagctgaaaatttggttcgttatcagaatcctgcaatgacggttgaggagctcgctgaagctctgaacatgacaacccgaacgctcaaccgtaaaatgaaagcgctcatccaggaaagtccgaaggaattcatcacgcgggttcgtatcgaaacggcatcagttctgcttgaaagtccgggtaaaaccatctctcagatcgcaaatgcgtgtggttacggcgatgacacggctttcaggcgtgccttcagcgctatcatggggatgtctccaggacgttttcgggagcggctaacacctaagggtaccgcaaactcaagcagtgaatga

SEQ ID NO: 187420 - DNA, 1122 bp, Klebsiella oxytoca
atgagcctttccgaacagttaattcgctggcggcgcgaactgcaccagtaccccgagctctcgctgcaggaggtcgacaccaccgcacgtattggcgactggctgcagagcggcggcatcagcctgctaccttatgaactgaaaaccggcgcggttgctgaagtgggcagcggcgataaggtgatagccctgcgtgccgatatcgatgcgctgcctatcgaagaggcggccagcgtgccgtttcgctcgttgaatgccggcgtgatgcacgcctgcgggcatgatattcataccagcgtgatccttggcgcggccttactgctgaaacaacgcgaagcgcagctggcgggacgcgtccgtattctgttccagccggcggaagagagcttcggcggcgcgaaaaccctgattcgcgccggcgtgctggagggcgtgtccgccattttcggtatgcataatgaaccgggtctgccggtgggcgaattcgccacccgaggcggcgcgttttacgccaacgtcgatcgctttgtgtttaaggtgaccggcaaaggggctcacgccgcccggcctcatgaagggaaggacgccattctgctggccagccagctggtaaccctgctgcaaagcgtcgccagccgcgaagtgaatacccttgattccgtggtgcttagcgtcacgcggattcagggtggcaatacctggaacgtcctgccggaaagcgtcgagctggaaggtacgctgcgcacccacagcagcgcagtccaacagcgggtgaaagcgcgggtaagcgagattgccgccggcttcgccagcgccttcggcgcgcagatcgatgtcttctggtacgccgggccgaccgcgctggtcaatgatgagcgctgggccgctttcgccagcgatgtggccgaacggtccggctaccgcacgcaccaggcggatctccatctcggtggggaggattttgccgtttatcttcagcatattcccggcgcgttcgtcagcatcggcagcgccagcgaatttggtcttcaccatccggcgtttaacccggatgagcgtttaatcgccccagcggcgcactactttgccgatctggcagagcaggcattaaaagcactttaa

SEQ ID NO: 187421 - DNA, 804 bp, Klebsiella oxytoca
atgcatacccaggaaacgattaaggttgtccccgcacgctatccgctgcgggcggtaggcgcggtgctggcgctgctggtgctggcggtggtgattcaatcggtcgcctttaacccgcgctgggagtggcgcgtctttgcccgctggttctttgacccggtgatccttgaaggtctcgggcagacgctgctgctgaccctgctggcgacggcgctgagcgttattctcggcggcctgctggcgctggcccggctctccagttcatggctgctgagcagcctggcctggggctatatctggctgttccgctcgctgccgctgatcgtggtgctgattattctctacaacttctcctatctttacgacacgctagcgataggcattccgttcaccgcgattcgctgggccagctttgagaccatcaacgtgctggggcagttttctaccgccgttgtcgggctgaccctggtgcaaagcgcctacaccgccgaaattatccgcggcggctttctcggggtcgatcacgggcagtatgaagcggcggcggcgctggggcttccggccagccgtcgcaccctgcgcattatcctgccgcaggcgctgcgcaccattttaccggcgggctttaacgaaattatcagcctcgccaaggggacggcgatggtttacgtgctggcgatgccggagctgttttacaccatccagatgatctataaccgcacccaggtgtggggaggtgatcgtttatgcatggatggatcgtcgccgagaaaacaacgagaagccttacggggcgaggcttag

SEQ ID NO: 187422 - DNA, 735 bp, Klebsiella oxytoca
atggcttcaaatcatccatgtaaggaaaatcaactcggatacgaagagtttcactctcgtttacgcataatcctggataaattcaggagtgttaacgcgtttgcgaatgccgcagggatatccccttcagggcttaacaggctgcttgacggcggctatccaacgctcccgatacttgttgcattggcaaaagctggcgacgtttcagttgaatggctgtctacaggcggtgagcaggtgagtgcttcccttcctacaaagatggatagcacttctctaacagtgaccgacgtcaaagggaatgaggtagaccttgatgaattcgtttttgttcctcgctacaacatagctgcagcggcaggttttggggcttggaatgatgatgaaacgccgatgtttactgtttcatttaggagatattgggttaccaatcacctgaaggccgatccttcaaaactatccgtgattagtgtctatggcgattcaatggaaggcgtcttaaatgacaaggacatcatattgataaatcatgatgatagggaacctagggagggtatctatgtcttgcggattgatggccaactcattgttaaacgtgtccagaggcttcctggctccattttacgtatcacaagtaccaaccccgcctatgagcctttctcggttgatatgaataacgtattgggggattttgcagttgtaggcaaagtggtttggtatggaagggttgtttaa

SEQ ID NO: 187423 - DNA, 150 bp, Klebsiella oxytoca
atgaactcaaacctggaaaatgagaagcgaaaactaatggctgaagcctcacagttcagggattcagcagagcgtcgtagtttctggaccttaatcgttatcgcgattatttctacattagctatcgccattcttaactttgttttatag

SEQ ID NO: 187424 - DNA, 258 bp, Klebsiella oxytoca
atggcaatgattacaaaggaacaacgtaagggttttatacggaaaataattgatgaaaccaaaaaaaatggacgtcttactgttcgcgatgcctgtgaaatattaggaatgaatcgtgatgctgttcagcgttatttcaatatggcggcagatagcgggcaagttatccggcataagaaatccggtttatttcctgattatagggcaacaatcaactttgacctacagcggtataccagtaagaaaggagttaagtga

SEQ ID NO: 187425 - DNA, 267 bp, Klebsiella oxytoca
atgaatatcaaacctccaaagcagctttataagtgggataaagcccgagtgaaactgaccagggcggctagaaatatgctcgcttctttaccagtcggaactgaaggtcaggtaacaaaacaaggtcgaggtctcgaatttacttctgatgcatgcaaatgctgcggggttcaggttcgtatatcaagaatgggccgtgatgatttcgaaattattgaattagcggagcaattcagagaaggagaccatcaatggaaaaaattgtga

SEQ ID NO: 187426 - DNA, 291 bp, Klebsiella oxytoca
atggaaaaaattgtgaaaccagaagatccatttgtccttatgacattcgagggtgacgatattcttttcgatgagcgaggcatcgtgatgatgaacgggaaacctaaatggacgggtgttgctcgcctgtattttgagcacgaccttggcgatcataaagctaaatactggtcgcgagatatcatagatgcgcatgtttttaatacaattgatgaggcaataactcagctttgcaagctgaagaatccacacttaatcaaagtgagaaggttagagcgggaggaacaatga

SEQ ID NO: 187427 - DNA, 444 bp, Klebsiella oxytoca
atggacgatgttggaacagacctcaggaagttttttaagctggatgcgatttacccggagggtaaggattctgttccagaacatctgccacaggatattcactccatgtacgttgatgaccttctgcaggcaaccagttcgcccagactcaccctggttagctgccggatgattcttgagtcggcgtgccgcgacaaactggggacggataaaggcaggcttgtcgatctcattcaaaaacttggcgaagcggaagcattgccacgcgttatgcttgactgggccaacacaattcgtcagtttggaaatgaagccgtacatgtttccggttctcccacagtggatgaagcaactgaaatccgttcgtttacggtaacgttactggaatttctctatagccatccggcaagaattgattcattgcgcaaaggcaccccgggctaa

SEQ ID NO: 187428 - DNA, 201 bp, Klebsiella oxytoca
atgagcacacccgataaaaatatcctcattgaactggataatgtatcacgccagcaatgtgaactgtcccaacggcagaaagaactttactgcattttaaaggcatacggagatgatgctttttgctatgcgctcgcctgcctgatgcaggcggatataagatttaaaaacgcagctaaaaagccttttaaaggtcaataa

SEQ ID NO: 187429 - DNA, 357 bp, Klebsiella oxytoca
atgcctgaaattacgattactgcaaaacgcgacgggttccgtcgctgtggtgtggcacaccgtgacgtgccggtgacctggccggatggcagttttaccgatgagcaaatcgccatcctgcgtgccgagtcggcgctggttgtccatatcggcgcactcagcggcgatgacgacaagctgaaggccgcgcagggacgcattcaggagctggaaagccagctggaggaagtgaccactgaccgcgatcgtctgcaggctgcactggcacttcagacagcgagcctgtcaccggcggtggaagataacgccgctgacagtgctgaagcggctgactcttcagccaaagcgaaaaagtaa

SEQ ID NO: 187430 - DNA, 876 bp, Klebsiella oxytoca
atgaagaatatcatgccacctatcgatacgcctgataatgagttcaaagatggtaatccaactactggcgaacttggcactttgatcaatgcattatttatgaacaatcttcagtcatcagttagagatgttcagtcagaactcatgtctgttctttctgcggcaggcattaatcctgatggagatagtgttactcaattattatcttcaattcgtaaattaacgccggggcgattacttgctccacccagggtcgttacaacaagtggaccaataactaaaactccgggtgctacaaagtggcgtatcagagttctaggtggtggcggcggtagttcttctcctgctcccacttcagccaatgaggtttctgtaagttgcggcggcggagccggagcctatgcagaaggtatttatgacgtcagcgaactgaccactgtcatggtgacaattggcgaagggggtactgcaggaacgccatccagtcagaatggtactgatggtggaacaacttcagtcggcacgctgatttcagcgcctggtggtaaagcaggactcccggctggacctgctgtacctccatttcagccagttgctaatacgaacacaaacaatccagttggctggaatataacaggtacaccgggtgccggagctgaaccggcagtagctgtagatgctcagtatgctattggatcacgtggtgcagacagccagttgggtgcgggcggtcatgtccctgcaattaataaccctgcaaatactggcgctggttatggttccggtgcctctggttgttctattggtccttctcatgcttctgtttctggcgctgatggtaatccaggcatcgctattattgaggagttagcatga

SEQ ID NO: 187431 - DNA, 252 bp, Klebsiella oxytoca
gtgtcacaaataacaacattactgaccggaatgagtaatgaacagctaaaggcagcgcttagtcaggcacagcaggcatatatcgacctgtcaacaggtgcaaaaggcatctctttttcgtacacgcaaggtgacgggacccgaacggtaacctaccagcagacaagtcttggtgatttgctggcactgattcaaacgatacaggcaatgcttgggatttccagaaggcgtccaatacgggtgaggtactga

SEQ ID NO: 187432 - DNA, 1653 bp, Klebsiella oxytoca
atgagtgtgcaaatcttaggggctgacggacgtcctttgccgccatctactcagaagatgaagtacggggcgttgtcaggcagcggcagagttccatatgacgcagcggactcctttagcgatcaaatggccaactggcagcctgctctgtggtcaccagataatgaaattaatatctatcgtgatcgcattgtgtctcgaatgcgggacctggcacgtaatgacggatgggcgtcagggacaataacacgcgttctggataatgcggttggtgcgaattatcgaccaatttttaaacccgattatcggatgttgcgtcttattacgagcaataaggcgtttgatgctacctgggcggatgagtacggaaaggtgattgaagcgcactggcgatcatgggcaaatgatcccggacgatattgtgatgttgagcgaaaacaaacagtttctcagatgctacggctaggttttcgtcacaagttgctcgacggcgattcgttattgattcttcagtatcgacgcgaccgtttaggccccggacgcggacagtatgccacgacggtacaggtcgtcgatcctgacagactcagtaacccacagcagaatttcgacatgccgaatattcgtggcggcgtggagattgatgccgatggagcacctgtcgcttaccacatccgtgaagcgcatatcggcgactggtggagtggagcgaaaaccatgacatggcagcgcattcctcgtgaaacatcatggggacgtccgatagtgatccatgattttgatatggaacgggggtcgcaacacaggggggtaggaatactagcacctatagtgcagcgcctgaaaatgctgattaaatatgatgagtctgagcttgaggcggcaattctgaatgccatcttcggtgcctacgttgaatcaccatatgatgcccagatggtgtcttcagcccttggtgatacaggctttggtgatggtgatgaactgagtgcatatcagactcagcgaactgaatattaccaggataagcgccttaatcttcagaatggcgcccgaatcccccatcttttccctaatgaaaaaatagttactctggacgcggctcgtccaaccagtaactttgacggtttcgaaagcgcggtattacggaatatcgccgcagctacaggattatccacccagcaggttactcaggactggtcggatgttaactattcatctgcgcgtgcagccatgttggaagcctggaaaacgttaactcgtcgccgtgacgattttgcaacaggaaccgctcagccagtcgcttcagcatttgtagaagaaatacatagtattgaatcgttgccgttgccttccggagcgccagattttcttgaggccaaagcggcatattgccgtgcgcgatggatggggccgggacggggatgggtggacccggttgctgagaagaaaggcgcgatcctcgggcttgatgccggtctgtccaccctggaaatggaagtggctgaaaacgccggcgaagactgggaggaggtgatggatcagcgcaaacgcgaaatcgatgcctgtctggagcgtggccttccattacccagttgggcgcaggcggatcagttcgccagcgagacaattaaagacccggaggaaaagtga

SEQ ID NO: 187433 - DNA, 870 bp, Klebsiella oxytoca
gtgaatctacctcatctggcgcagcgtttgtttaatacgccgctcgcccttcacccaaataaagccgaggtcattatggctgcggtcatggatcggtttggtatcagcagaattgaatcctctctggcgatggaagacgatgactggtatggctacgacggcaaccgcagtcgggagtcaaagcgtgatcctggatacgacaatgtaggcgggattgcggttatcccggtctgcggcacgctggttcaaaagctggggtgcctgaggccgtacagcggcatgaccggttatgacggcatccgtcagtcctttctgaccgcgctgactgaccctgaggttaacggaatttgtcttgatattgattctcccggtggtgaagttgccgggtgttttgatcttgtagatgaaatctacaacgcacggggaacgaaacccatccatgccattcttacagaaaatgcgtattccgcggcgtatgcgatcgccagcgcagctgaccgtatttccgttcctcgaactggcggtgtgggttcagtcggtgtcatcaccatgcatctggactggacacagcgaattaaagacgacggactgaaggtgacaatcattacgttcggcagccgtaaagcagaaggctcgccattacgtgaactctctgaagaggcgttcaatgccatccagcaggacattaacgctatgggggaattgttcgtgaataccgtcgccaggaatcgagggattagcgcgaaggtgattaaaagtactcaggctgcctgttttatggctgctgatggtgtggaaattggactggctgatgaggtgtgtacgcctgatgctgcgttcagacatttacttgaaaaaacaggagcctga

SEQ ID NO: 187434 - DNA, 594 bp, Klebsiella oxytoca
atggcaaagaaaccatttggttttgcacaccttctcggacgtggcgcgtcggcatccgaagaggaagaggataaaaaggccaaaaaggctaaagcccgtcgcgctgaagaagacaagcgtgacgatgacccggacgcttccgacgatgatccggacgatgacccggatgcttccgacgatgatccggacgatgacccggatgcttccgacgacgatccggacgatgacccggatgcttccgacgatgatggcgataacgaccgcaaagaaagcaaagcggtgaaaagcgcccgcattgctgagcgtaaacgttgcgccactatctttcgtagcaagcatgcggcggcaaatccatcactggccgcgtcgctcgcattcaataccgggatgagctctgccgctgctattgatgttctggcatccacagcgccagcctcacaaccaaaggcaacgcgagggcgctctctcgatcagcgcatgctggaaagccatgatgttcgcctgggccaggatggtgacaacaaagccggcggtaaatcggcactggtgagtaaaatgaccagtctctacaactccactaaaggagagaaataa

SEQ ID NO: 187435 - DNA, 405 bp, Klebsiella oxytoca
atggatcagtttggtcagaatcagttcgccccgggtatgaaaagctcgttgtttttacccgaccagcttattgcaggcacactccagttggttaccgattccggcattattaccggcggtacctataagcgcggaacggtactggggatggtcaccgccagcgggaagtataaactgagtgtgaagacggcaaccgatggtagcgaaacccctgtggcgattctggttgataacgttaatgcttcaacggcggatcagaatggcggcctgtacctgatgggcgaattcaaccagaattacattattttcgatgactcctggaccattcccgcgttgaaaacagcattacggccgctggcgatcttcctgaaagacagcactcaggctcctgtaaccacttcctga

SEQ ID NO: 187436 - DNA, 1050 bp, Klebsiella oxytoca
atggaaaacatttatgataccagcgtactggtaggggtcgtttctaacctcaaaaccagtcaaaactggctgcttgatcgcttcttccagaatgttgtgacttatgaaacggaagaggtggctattgacgtggatgttggtctacgtcgtatggctccctttgtctctccactggtggaaggcaaaatggtcgagtcccgtaagtatcagaccaacacattcaaacctgcctatatcaaagataagcgcgcaccggacctgcgtaagcctatccgtcgccagattggcgagcgtattggtggtgaatacaccgccgcagaacgtgagatgctaaacctgcagtttgagatggcagatcagattgacatgatcaaccggcgtcttgaatggatggcggccagcgcgctggtttccggtaccgtgacagttaccggtgaaggttacgaaactaaagtggtggacttcgggcgatcaccggatctgaccattacactgagcggcactgataaatggccgctaaccgtggctgctggagctaccaatacccagccttctgatgatattgaagcctggcagaccaccttccttaaggaatccggttctgtcgcaacagatctggtgtttaccagtaaatcatggcgcgcgttccgtctggacaccaccatcaaggataatgccatcactttcccggggctgagtccatttggtaaccagattaacgcgggtccgcaggcgatgaaaggtgctgtttataaagggcgctggggtaactttgacctgtggctgtataacgactggtttattgacccactcgataacatcgagaagccaatggttcccgatggagcggtcattatgagtggcgcggatctgatgggaactcgtgcatttggcgttatcctcgatccggcattcaactatggtccgctggcttatgcgccaaaatcatgggtaaaagaagacccggcccaaagactcatcctgatgcaatcttccccgctggttattccgagccgggtaaacgcatccctttgcgcaatggtggtgtga

SEQ ID NO: 187437 - DNA, 381 bp, Klebsiella oxytoca
atggcgaaagaagctaaatcggtgctggtggatgatctgaatgcggggggcgctggagtagaagaccttaacgctgaggatctgaacgcgggagaaggctctcaggacaaccagcagcatagcgatacaaacgctgatggttcatctggtgatgatggtgatggggatgattctgccgacgctgttgcggagcctaaatttgtggttctgaagggaaacagcattcgccataacggtgaagtttaccgtgaaaacatgcatatcccggtaacaggaactgatgccgatcgcctgctgaccgccggcgtgattgcggatgttcaggttctacgtcagcgcgtgctctctgccgcgccagcggtgagcgtcactacggagtaa

SEQ ID NO: 187438 - DNA, 360 bp, Klebsiella oxytoca
atgggagtggactgggatttacaccttttgagtccgctgcacggcgtcttcggcgatgaacatgagtaccgacctaaaaacggtactcctttcacgattaatggcatttttgaccgtgggtatgcccaggctgctgaaaacctcgacggggattcagtcattaacacgtccagtccgatgctcggtgtccgtgatgccgagttcctcaagctggggaaacctcagcctgaggtatcggaccgggtgttgattaaaaccgtcggaggccacgtcattaatcagctattcattgtgtcgaatgtcgagcctgacagccatggcggatcccgccttgttcttaacgtggtgaaagcacgatga

SEQ ID NO: 187439 - DNA, 546 bp, Klebsiella oxytoca
atgaatgcatcagctattcgaaaaatggtggtgacggcgttggttggtcacaccgatgccggcgaccgcgtttattctccgcgggactggccaacctcagcagcgctctatccggcgctgctggtccagaccccgttcgaccataaaaaggcgcagggacggaataccccagcgttcactacggtgaccactgtccgcattactggccgcgtccaggagtatgacggggaagtagatgatgatggcgctatgcgtgccgagaccgcccttgaagatttgcgcgagcaggtagaaagggcggtaatcaacagcttcgaactcacccgaaaaatccagaagtacgcggaagtgcgttcaacgataaatgttgacgctgatggtgaggcacatctgggtcagttgttgttcgaaatcgatatcgaacattatcagggcccagaggacttttatcccgtcaacctgccaccgctcgaagggattgatatcaccgtcgaaatgcctggcggtacgccgcgaccgggaaccagtattaacctgcaggagtaa

SEQ ID NO: 187440 - DNA, 177 bp, Klebsiella oxytoca
atgtttgtaaaaccaaaagacgggctcagcgttcgctgtcccgtccggggcgaagctttgcccaaagaaggctctgaggtgccagataatacattctggcggcgccggctgaaggatggcgacgtgaacctggtgcagaaaggtgtgaagaacaccgctaaaaaagaggacgtttaa

SEQ ID NO: 187441 - DNA, 1512 bp, Klebsiella oxytoca
atgaccgttccgttttcacgcgtacccggtaacctccggacgccgttgttttacgtcgagttcgacaactccatggccaatacggcgacggcgacgcaacgaacattgctgattggccagatgctggctgctggttcgacgcaggtcaatattcccgttaaagtttcctccgccaatggtgttagtgaactgaccggcaagggctcgcagttgcatggcatgatgacggcctatcagaagaatgatacgtccgctgaaatctggatcctgccgctggcggacgactccgggtcaatgacggccgcgaaggggagtattaaggttgcgtcacaggcgtcagagacgggcgtaatctctctctacctcgcggggatccgcgtgcagctcaccgtgctggcaaccgatacaccggcgcaaattgcggcggcactggtggctgctatcgccaaaaaaaccgacctcccggtaaccgctgccgtaaaatctgatgcgacggatacggttgaactgacggctaaaaatgcggggcttctgggtaacgggattgatattcgcttcaactatctggggacgcagggtggtgaagttacgccggccggtctgacgttgacggtgacagccatgacgggtggctccggcgcgccggattttgtggatgcgctgggtaacctgcaggataaaacgttcgatttcatcgtcaatccctacgacgatacggcctctcttgatgccatgaaggcgtttctgaacgacgcttccggccgctgggcgtgggataaacagttgtacgggcacgcctttggcacaacatcgggaacctatgctgagctgggaacgaagggtgaggcgcgtaataaccagcacgaaacattgctgggcgtctatcgttctccaacgccacgttacatctggtcagcggcgctggttggggctattgccccgagtctgcgcaatgatccgggccgcccgctgcagagcctgccggtttatggcgtactggcaccagatctgcaggaccgtttcgaactcactgagcgtaacaacctgctgtacagcggcatttcaacgtacaccgtcgctgatgatggtactgtcaacgtggaaaacgtcatcaccacctatcagaaaaacagctacggcgacgaagacgatagctatcttcaggtagaaacattgttcagcctgatgttcgtcacgcgttatcttcgtaccgccgtgaccagtaaattcgggcgaatgaaactggccgcagatggaacccgttttgcacctgggcagccgattgtcacgcctaatatcatcaaggccgatcagatcgctgaataccagacgttggtgtttaacggctatgcacaggatgccgaagcgttcgcgaaaaatattatcgttgaacaaaacgcatcaaatcccaaccgcgtcgatgtgttgtggccgggaaccctgatcaatcaactgcgtatttttgcgctgcttaaccagttccgcctgcaggctgaatcaacaggagcataa

SEQ ID NO: 187442 - DNA, 369 bp, Klebsiella oxytoca
atgactgatacttctaaccgcattgccggtactgcctatgtcaccgttaacggtgtgtcggtcatggttgaaggctcgttcaaataccagccctcaacggtaaaccgtaccacgctgaccggaatggatggcgtacacggttacaaagaaaagcctgttgcgccgtatatttctgctcgcctgcgcgatagtggcggcacaaatgtgcagggctttaacaaacagaccaatgtcaacgtcatcgcggaactggcaaatagcaaaacaatcattggtcgagggctctggacggtaaacgtccaggaagttgaaagcgaagatgcagtgttcgatgttcgctgggaagggtttgaggtcacggagaactaa

SEQ ID NO: 187443 - DNA, 279 bp, Klebsiella oxytoca
atggctgaattagaacgtacgaaaatcattgttcttacaacgcttcttgaggatacggcacagaaaacgcgctatgagcaacttgagcttaaagcgccgacacttagccaggctgagcagttttacgaaaagcagtcttcttcaacctctcttgcggcaatgcgcttactcatttctctggtatctgacacccgcgaaagcgttttacagccgatggattttatcgacttccgcaagtgcgaggtttatctgctcagttttttgacctggcagccctga

SEQ ID NO: 187444 - DNA, 1875 bp, Klebsiella oxytoca
atgagtaactcttttgattttgaactggtggctggggatcatgtcagcgaagcaatagctcggatagatgaggctgtccgtaatcttgagccacaacttgataagacccgtgaaggtcttcaattaggcggccaggagacgattgatgggctgaatggatataattccaggctggatattatggcccggactgcacgcgataacgttcagtttatcggtgacatgatacctcctatgaaaatagtgggagagctagcgggaaagtttgccggtctgggattagtcggtggagttattggctccattggtggggcggcatatgccacaggaaagctcgcggaaagctatcgggaagcagccagaggggcttatgacctgaacacacatgcacaaaatactgctatgagtgttcaggacttttcccgactttccggggctcttcagctggtaggggcagacagtgatagtgctgcatcctcgatcgagggaatcttcaaatctctcaatgaggcgaatagtggtaaaaatgctggtgtcatggccgccatggctcagattggcgcccagattgaaagaaataatgatggttctgtcaacacgctaagaacgcttgagtccatcgcaaggattttccccaaacttcggccagatcaacaaaaatcgtttgctgatgcgatgggtttaactcctgagatgctcacgcttatgcgtgaaggtgcaaaatatgctggtcttctggcaaaagcggataaggtaggatttacggtggatcccgcccttaaccagcaacttacaagcttcgatgttgcagtgaaggaagcgagcgcttcctgggacggattcaaatcaaagcttgaacgtaaggtttatgccgctcttgataccaatggccttaccgatatggtgaatggctttactgatatgctggcgaataatttcgacaacatttccatggggcggtttgctggacaaaacaaaggcgacgactccgagctgatgcgcagagcgctggcagatcctgaatttcagaagagcctcaacggaaatgagaaaaaccaacttactgctggcgtaatgactgatgagtccaggaagaaatatcgccagtatttttataatcaggatcgctcacagcaattacgtgatgatgtaaacgccattattagaccagaaacctcacgtggccccatcgtctataaccctaatggtaaaaacacccttgggtttagaaatcacaatcctggaaatttgagggatgcctcaaacgcaacaggaagaaataagggtttttctacgttctccagtgatgaggatggtttggcggcgatggctcgtcaactaatgctgtatggtgatcggggtaataatactccgggtggtattcttcatacgtatgccccgcgaactgaaaataaaacgcagcaatatattaacgatgtatcagccaggactggctatgactcccgtcaacgccttgatctgcataaccctgaagtacttaaaaatctgatggctgcaatgattcagcatgaacagggatcacaaccgtacacggaagagcagctgaaaaatgcgatacagtcagccattatggatgaccggtggtcaggcttgcgaagccgcgataatcttacgaaacagcgaagagatatcatctctggtgctggaggtaatgtaaggacgccctccatactggctccaactgatggagtcggtgatactaatgtcatggccgataatattactcgctctctgacggatgctctttctgaacatccattaaagcttgaaataaccatgattaacgataaaggagagagaaaaacctataacgtagaaaataacggaaaaattatcactcctatgaattattaa

SEQ ID NO: 187445 - DNA, 1401 bp, Klebsiella oxytoca
atggcaatcattcaggatgcgatcacatccctgatggggggagatacggttgaagactggcaaagtcagcttcgaccatgctccttccgtggcgtcccctttgccatcatcagtgaagaggggagtcacggacgccgtcaggcagtgcatgaatacccttacagggataccgcctggatagaggatatggggcgaggcacccgtcgttttgtcctcaaagggttcctcgttcaggatagcctcatatacggtggtggagatgtcatatcccagcggatagcattgatcgccgcttgtgaaaccaagggcagcgggacgctaattcatcccactcttggcgagatgaccgtttctgtacctgaaaatggcctaagcctttccggagatatgaagagtgggagagtatttgagttcaccctgacactcattgagtccggcattaaagtatttgctataaccggcagtagtacatcatcaaaaacggttaaaacaaactacctgaaactggtaagtactacggttcttagtaccatcgcacgtgttaaagctgaaacgcgtggggttagccaggcaataaaaacaataaaaagtacgataagcttttgggcaaatatggttaacagcaccattaatgaagtgacaaatatcagtagtgtgctgaagtcaacatttggtaatgagcgatatggtcgatatagcaaaggcactataggcggctcatcatctggattgacgggtggaacatctgcggatgatacggaagatttccaattattatctgatcaggtttctgctcaagccattatggacaggaagggaattactgactcagctactacgctcaataattcaacaactattgatgattttatccagcgcgcagccgacttaattaattatatcctcaactgtaccggtggtgttaacgagcgtattacggcgctggaaaagctggcgaatgcaaccagtaccgaatatcagaattcgacttcaagcgctgacattgcgcaaaccgttaatactctgattatcgtcttatgcagtgccgctatggcttcagcggcatcagattccaaccctaccagccgcgatgaagcggagcaaataacccggcgtgtagctaaccagcttgatgcggcgcttctggttgctggtgacagagccgatgatgatttatacggtgagttgttgctggtcagatcttcatttcttgaggctatgtcagcaatttctggtggtttgagcgagctaatgcaatttaattcagcccagcctcttcccgcgcttactctcgccagtcggctgtatcaggatgcttccagagcggatgagctgaatcaggagtccagcgttccccatccggcatttatgcctgtttcgatgaaggtattacggcaatga

SEQ ID NO: 187446 - DNA, 1080 bp, Klebsiella oxytoca
atgagcgaagatctggatacggttaggttaacggtaggtaataaaataatagagggatgggattcagttcgtgttaccagaagcatagagcgcttcccgtctgattttagtcttgggctaatggactattacccagggactaatgataagcagctggtgcaggaggggcagtcctgtgaagtgcgcatcgggaatgatctggtcctgacgggctatgttgacagctgggagccgtcaattacacgatccagacatgaagtgcaggctaatgggcgcagcaagtgtcaggatctggtggactgctctgcagagtggccaaacaatgtcatcaaccaaagtgatgcgctaagtatcactacccggctttcctcatggtacggcatcaaagtttcatgcgatgttgacgatctggttgatgtgcctcagttcactatcaactggggagaatcaccgcaggaaatcatcgagcgggtcacacgctggtcggcgctgctttattacgacctgccggatggcagtcttctgctgacgcgggtgggaacacggcgggcggccagtggtgtggctgaagggaaaaatatagagcaggcgtactaccgcgctgatatgtcggaaaggttttctgactatgttggcatctcgatgagcgtttcaccaattgctgggttttcacctgatactgcctatgactcagtcactctagccacagcgcgcgatccggaagcagcaaagatgcgctaccggaagcgtatcgttatcgttgaaagcaccctgatggcatctcagcaggcacagcgcgcgattgattgggagatgaacaggcgttatggccgctcaaagcaactaagcgtcacgatagatagctggcgggataaagctgggaagctatgggagccaaatacgctgatacccgtaaatattcccacgctaaagctgcctaaaaccgagttgctgattgccgacgtaacatttatgcgcgacagcgatggcacccatgccaggctaacgctaatgcctccagaagcgtttgccgtccagccctacgccttctaccaacaactcgcaggattcaaccaatga

SEQ ID NO: 187447 - DNA, 588 bp, Klebsiella oxytoca
atgagccagattcggaagtttgcaacccgtattgccagcatgttaggggtagggcgaattactgcgatgacagattctggcagcacccagaccgtgcagtatcaaactccgctggaggtcgctaacgcccacagactggcggagtttgggttttcctctgggttacctgtcggaacagacgttgtgttggcgttcctgggtggcgatcgctcaaacccagtggtcatagcaaccaaccatcaggggtatcgtcattcggatcttaattcaggcgagacagtaatgtacaaccagtggggcctgaacattcttctgacagaagatggagtcttcgttgatgctaagggtaaaaacgtagaggtcaacaatgccactaccgttactatcaatgcctctgattccatccttgccaacacgccgttgtttaagtgtaccggcgacattgtagacaactgcaattcaaacaccaaaaccgtaaaacaactgcgtgacgcctacaacattcacgatcacgacgtgaaagaggttcagtcaggagaaagcactgtcaccagtgaaaaaaccacagagaaggtatctgatgagtga

SEQ ID NO: 187448 - DNA, 450 bp, Klebsiella oxytoca
atgagtgatatttcatccttctggaatattgatgagatgcaggccgactggcaggaaaatttcggcattctcacctctgacaatgatatgcataccgccgtgctgatcagcctttttaccgatggccttgcacgcgcagatgacccctatgaggggacagatcgccgaggatggtggggtgatctgggaaatgaaaagacaatcggttcacgtctgtggttattgcggagagaaaaactgacccgcgacgtagctatgcgagcggagcagtatgctgaagaagcgctgtcatggataaaaagtgacggaatcgccagggaaatacaggcgaccacagaaatcgtttttccaaacaggctgaatcttatcatccgttatcttcccccggacggcgactggcaagaattcaaattcttctggttatgggagcaactgaacaatgccatttaa

SEQ ID NO: 187449 - DNA, 1149 bp, Klebsiella oxytoca
atgccatttaaaagaaaaacgcttagtgagctgagaacagaaaatcaacagttcatgcaggcggagctggagaaggtcggcgcgctgctccggttcggaaatttgaaggtgctagcggatatggacgctggcatggcgcacttgcattacgcctatctggattatattgcccgacaatgcactccttttacatcgacagatgaatggctcgctggatggatggcgcttaaacaggcctaccgtaaagcagccaccgctgctcgatcacctgaagcgcaaatcaaagggacgtcagggaggacgttagatgcgggagcagtaattaatcgagcggatggttatcagtacactactgatgctggtgtaacgatcggcagctctggcacagcaacagttgctgttaccgccgtattacctgacatcgccgatgatgtcactggaggtggcagcatgggaaatgctgatgccggtactatcctgacccttgatgcgaatgtgtctggcattgaaagtacggtcatgctcattcagccggccaccggcggtgctgatattgaggatgaagaggattttcgccagcgcggtcttctgttgtttcaaaatccgcctcaggggggcagcgatactgattatcgtacatgggctctggcagtatccggtgttacacgtgcatgggtccgccgtagaggaatgggcccaggaaccgttgtgatttacatcatgtgtgatggcaacgacaagacaaaccatgggttcccggttggtacggatggcatatcgcagctggaagaatggggcgcagtgaaggcttcaggcgatcagggaagggtagccgattatatgtacccacttacccctgtcacctccctgaattacatctgttcgcctactgagcgggttattaattttgaaataagtggtatctctgatgcgagtagcactacaactgctgctatagctgacgctattgacagcgttttgtttgaatctgctgatcctctcggaacaggaaaaatctatctttcagaccttaaccgtgcgataggggatgtttctaggacagctggttttattctggtttccccatctgcaaatattgagccgggaataggtgagatggccgttcgtggagaggtgaactatacatga

SEQ ID NO: 187450 - DNA, 684 bp, Klebsiella oxytoca
atgagcctcttctcaactgacgactatcttaaagccctacaggcactaatcccgtcaggaagagcctggacaaaagatagaaatgcagtgcagacggcggtgcttcgagcactggcaaggagctatcaacgtagtgataacgactctcagtctctactcagtggtgctttcccgaagacggcaaccatcatgcttactgactgggagaatacgctcggattacctgatgattgctccattggcgaggtcgacacaatcgccaagcgacaaaatgcaatcgtctcaaaattaataagtaccggcgggcagtcaaaaagttatttcatcggtattgccgctgcgatgggctataccatatccatcaaagaatatcggcagggaagagcgggattatccgtatgtggtgatgggattaacggtgatgactggccatttgtttggttggtagaagcagaggacacaacgatatcctacgcgcgggtaggaatcagttattgcggagatccacttcgctcatgggggaatcgccagcttgagtgtcgtataaacgcgctggcaccgtcttatacactggtcaagtttggctatatctatttcggtttcaatgatgaaggggtttatgaagttacccctgaatttgcaacgatatttgatattgcatcaggatatatctcctcaaactaa

SEQ ID NO: 187451 - DNA, 861 bp, Klebsiella oxytoca
atgagaaaagttggaagtacaacagataccgctgatgctaatggcgaatatactaatggcaacgttgctaatgggatatctccgacgattatcaacgctgaaatgcttaatacatttcaaagggaactggttaacctggttgaaggtttaggatacacactaaaccctgatgatgactcacaaatattaaaggcaattaatggcgttattagtggccgcctattgggcgtgccaagagttattaccagcagtggaatgtttacaaaatcatctggtgcaaaaaagtggcgcattcgggtgttaggtgctggggctggtagttctgcagcaccggcgaccggcaatggggaagtttctataagcaatggtggcggcgccggggcgtatgccgaaggtatttatgacgtatctgaattaacgtcagcaatggtaaccattggtactggtggcgcgggcggtacagcggcttcaccatacggaggggatgggggggcaacctcagtaggagcacttatctccgcccctggcggtaaatccgggttgccagcagggccagctaaccctccgtttcagccagttgctaatacgaactcaaatagcccctctgggtggaatatcgtaggtacatctggtgctggttctgagcctgcagttgctgcatcaacaagttatgcagtggggtcacgtggagcaaatagccctcttggggttggcggggcagttccggcaataaatacacctgcaaatactggtggcggttatggttctggggcatcgggttgttcaaatggcccatcccaacctgtgaaagctggcgcggcaggtcgtgacggaatagttattattgaagagtattcgtga

SEQ ID NO: 187452 - DNA, 2196 bp, Klebsiella oxytoca
atgcctcaaagatacaacacaggaaattcacgcccttctaatagtatgaaagatctcaacgacaatgcgttggcctttgatgactatataaatagtgaaagcgatacattcattgaccgtttgggtgccaccaggcgcaccaggttcaaaatggatttagattatgataatcagatggcagtgcatgagtctgttttcgaattagctcaggcagataaagaggatcgtttccagggatttcttaacagctctggttatgtctttcttggtaactatgaaaacggtccgttccagttcagcgcacgcaatcagtacatccgttataacaaccagtattaccgcctgaatgctgctactgatgtcggctttatcacttccggaacgacagcggccagcttcgcaaacgacgtgactcacttcgttctgatggagggcgacactcttcgccaaaacctgggttcaagcgaagggcttggactggtggggcagtgttcaagcctggcggatttaagaggggtcgagttcttatctaccggacagcaaatcttccttcgtgaacacaccgtaggtcagggaatgggcggaggtatctggtattgccattccctgactagcgatagtggttatgtggacgacaatggttgtcagatcataacaaatgctggtcaagttttgcgccgtaaagatgtgcataacctttattcagatatgttcggattagggccaggaggtgattttgactcagtaatccagaacatgttcaaagcctcgcgtacattcaacattgaagaagcatggataacccatgctggccgggcaaatcctaagtacagaagccttggtggtaacgtattcgatctatcagatggaatgagcttctatattcgctgtgttggtctcggtcgttttggtgcaaccatagtgcatgcagggaatagtaaatgcattagatttatccgtaatagacttaccggtcttgaattttgggtaagtggcggtgtggaaggggtgcgcattgtagggcagggggacagcttcacagggacaaatcactatagcggcgccacagcgattgaagtatctgatttatggggcgctacgctcaagagtatattcatttccgggtatactggtaacacaggtggtgcggcaataagcctttacaacgatactggctggactgaaggtaccatcatggaagatattgttgtcagacagtccgtcaacggactatggatgcatcgcaacacggccgcagggaatacagctactgacagttttttcaaaacccaagccaacctggatataaacgccggtgtcagcggaaccaatattaactttatcaggcttggagatggaacatctgcaggtaaatgcttgctatatggtcatgaaattaaacttacagggtggatgagcaacgggtcatggcacaacggaatacttgtcactgactatagctcctgtatcaatgggctaattcattttaatttcgacggttatggattatccagttccgcgaccagtgaggtgcttcacctgatcaggcttggaggcactaatgccattttcgattgtgacgtcaagaatacctctggccagagtgacggctatgggctgagtatgcttacactgataatgaatacttgtctttatcttgacgatccgaatgtgttcaatggcactgttagcagagggcgtccaatcgtccgcgctaagggaatgtgcattaagttctctggaacgtttacccagactgagtgtattgccggtgccacctactcgctatcagccctattgcctgggacaaaattcaggatcagactcacgtcaagacaggaaaattcacagtatcagttgttaacgcaagagtgggaggtgcatgtaagaggcactgattacccttgcatcgtgcgtcccattctaaaccctgcaaacgtgagcagcactagcggccaagcagtaactgtggtttctcccgagactaagagcaactttctaacaagcgtcactctcaatgctgcgcagacacagcaaaacagcttgtttggaacctctttaaccctcaccaatggacaggctaataatgctgttgggttctcagcaaattcaggtagaaagattaattttgtactcccggcggactctgacgctacccagaatatgccttatttcgttgagctggagatgatgtaa

SEQ ID NO: 187453 - DNA, 222 bp, Klebsiella oxytoca
atgaataaagttgacgtggaaaaactggtgcctgtatttctgcttaagatatcaagtattgaagagtatgcagagtctggaaaatgcgttttatcatttgaaccaggtcaggatataaaagaccaaataattgtaagtgaagagtatattaacaagtattctccaaatgttggcgggtattatattatgtgctcgaatggagttggaatgtattctgagtaa

SEQ ID NO: 187454 - DNA, 1179 bp, Klebsiella oxytoca
atgaaaattagcaaggtaaagttaatcgcattttgttcgacgatgctggttagtgttgatttgctttcagtggcagggttgagggttactttattgcctctgttgctttacggaatatatatcatatataaaacgcaagccatagataaatggttcttttatattttattctttgctggcgcatgcgttccatctttgatgttctcttcagaattcactaaatccgctggttatttattatggattttctttaactacatatctctatcaattgtatacaaatatcttattacaaaatcgctagataaaactctatcaggtgtcagggatgcgtacaggttgcagatccttttaggctgcgcgctgtattttacaggtatccagccgcgcgcaagcgtgctgtactatgagccttcatattttgcactttcattaacaccttacgttgttatgatagcaagctcatacataaaatcaaaaggatacatcggtgaggtgataaagagaacatcgctcattgatgtatttttattaatggccgctatatacacaacaaaaagtgcaaacctaattttggtgtgtgggctttccgtgatggtaattgcctttctcgggaaaggtaaaatcaagaaaatattcattacagcagctcttggcgcaatcgcgatcggagggttgtattactattcattaaatagtagcgacctgattgcggtaacaatctataagctgtttaactccccggaccctatcgaggccttacttgaccgaacggggaaccgctggccaagattcaatcttgcttatgacacggcaatgacccacttatggggtgttggtataggtgcatttgaacaatacacacttactcacacattgctggattatatggggctgccgttctacctttcgccgattggctatcctcctataaacatctatctcgaaattgccgccacttgtggttggcctgctctggctgtatggttggtctggcactttaagatgattaagcaggctaactataagacggtcggtggaccggtgatagtctgctctcttatcgtggccatgctggcgctcttcatagagtccagtttcatgcgcccatactactggatgcttataggcatggttatggggcaaatcacgctaaacaagcaagccagagaagagtag

SEQ ID NO: 187455 - DNA, 1482 bp, Klebsiella oxytoca
atggtaactcgtagggatattctgaaaatggctgttcctgctgctgcgacgattcctgtagcggccatggcaatgccggcagcatcaggaagtaatgtttttaggagcgtatcagagttatcatcttatgccggaaatgacggagatatcggctttctcctttctttccatgaaggaaaaatgtcaggcggagggacgctggttcactcaaagagtgccatcaagcctgacatggtccggacatatccttcaaaaaacggaatatggacaagggttcttgattcaagtggatttatagactgctctcacgccgggatgctggcggaaaagggttttgataactcaccttatcacaacactttgttaaaggtagcagatgataacggcctgacaataacctatggttcaggcaattaccaacacttcagtgatgtagtaaaagataaatcattctcatgcccatctttaattggttgtggtggcagatactggactaaaggaacgtttctaaaattccttaatggctctgtattcaaaataaagggcggttcaggttatgtatgcaattcgctgattgaagggatcaccttttctggtgatggtagtactaatggtgtaatgacgatagcagatcagtgtggtatttcagttgaaagatgcttctttgataactgtaaaaccggcgtcttaatgattaacgagagcaagggtggttttaccgagttcaacgttttgactgaatgctatttcacgtcaacctgtattacaggatttgtttaccgaagaattgatggtaatgagtcatttcatgggacgggattaaaggaatgcacattccagcagcaaaagcgggatgacacagcaccacatatagacataggcgacaaatgtatggtctataatgcgccaatgtctgtccacgttttcagagactacacaacatctccaattatcaggcacaacggattcaccaggagcaatgtatatggtgtgataaccattgagaaaaaacctaaaaataccgttaagttagttgatggcaatcagctgtatattctcggtagtatctcatgcttgagcgaaaatctttcaaccagcaatgctattctctgcaacaggttccaggctaattctgatggttcagtaaatttcatcagaaatcctgcgtctttgtctggcgggttcagtaaagaaaaagagcctatcattcatcttaatgccggtgaaagtgcatttgttgacgttagcgttatctcaaatggaactgtcagcagggggttgatatttatcgctgtagactctaatggtaatggtaaaattacagacacagggatgtcacctgtatctgcaaaaataaagcatgataattattttgaattcaataattcaactttatacgtagatagtaatggagatatgtccgcaaaatggatcgctgatatatcatttgttgctagcagatatcaatttacaatgaagtga

SEQ ID NO: 187456 - DNA, 1140 bp, Klebsiella oxytoca
atgaaaataactaataaagcatataaagggattttctctttgttaccggtgtttatgttggccggttgcactatcatgccaggttcaacggtgtctaccttctctaaggataagccggaagttgaagatgctgattttagcattgatgagcgagtagacgtttaccctatgacgccatcccttatcgatcgcatgactcccaaggtcgtacagtcaagagcaaaccatggtctggatatagaaaaaaatagttaccagtacagagttggaatcggtgatgtactgagaatcacagtctacaaccatccagaactgaccaatcctcaaggtgaataccggagtgcaaaggattcgggtaacactgtcaggaatgatggcaatattttctttccatacgttggcaacgtcaaagttgttggcatgactgtagatcaaataaggaaagttttgtctgacaggttggtcaaatacattgagtctcctcaggttgatgtaagtgttgctggattttcctcgcataaaatctacgtatcgggcgccgtaaaaacctctggtaagcaggcattaacagacatacctacaactatcattgacgcagtcaatacagcaggcggcctgacatctgaagcggactgggatcatgccgttctgacccacaaagataaaagcgaaacaatttcattaagagctctacttcagaagggcgacctcatgcagaaccggataatgtattccggcgattctctttatgtgccaaggaacgatgagctgaaagttaccgttatgggcgagacgatatcccaggatacactgaaaatggggatgtatgggatgacactcgcagaagccattaacaacactggtgggctttcgaggacacactccgacgcaacaggagtgttcgttatcaggcctactggaacaatgaacggcaagatagcaaggatttatcaattaaatgcttctgatgccagctctatggtaatggcgtcacaattccagcttgagccaaaagatgttgtttacattacaaccgctccgatcacaagatggaacagggtgataactaaaatcacgccacagatcagcgcattgaatgacgtaataagcacaacgcgttcaataagaacatggccatag

SEQ ID NO: 187457 - DNA, 183 bp, Klebsiella oxytoca
atgcaagtcctgtttgaggacgttaaaatggggcagattttggggcaaaatgtcgtttggggcacgatttggggcgttcaaatgtccgcatttgtccgcatttgtcccgaagcaaaccgcgctatatcgttgaaaataatgcagaacgttgaatttgctaaactatttttttgcatgccataa

SEQ ID NO: 187458 - DNA, 237 bp, Klebsiella oxytoca
atggccgccagcgaaaccctggcgaaacactcgccgctggtaaataacggtgaaggcccggttctgccggagctgaaggatatccagaccgtctcgcgggcgattgccttcgcggtcggcaaagtggcgcaggaacaaggcgtggcggtgaaaacctcagctgaagcgctgctgcaggcgatcgccgataacttctggcagccggagtaccggaactaccgccgcacgtcgatttaa

SEQ ID NO: 187459 - DNA, 1713 bp, Klebsiella oxytoca
atgagcacattactaactgcacaatctcttcatgttgatacggcgtttgccccgctgttcacaaacctctcctttaccctgaaaaaaggcgaccgtattggcctgattggctataacggctgcggaaaaagtaccctgctacaggtgctggacggcacgatcgtgcccagttcgggcagcgtggcgctggccagtcactgtctgatggcgcgtgtggaacagcatctacccgatacgctgttagcgcagcccctgctgcaggtggtactggagaaacttcccgctcctgagcgtgagagtcaacgctggcaagcggagaggctattggcagagatgggctttacgccagatgaggccgcgcagcgggcgtcaaccctgagcggcggtcagcatacccggctgctgcttgccagggcgttgattcaacagccgaacctcctgctgctggacgagccaggaaaccacctcgacctgccgactctcctgtggctggaaagcttcctgcaaacctggcaggggagcttcgttctggtgtcgcatgataatatcttattggatgctgtaactaattccagttggatcctgcgcgacagaacgctgcacgccttctccctgccctgcagcgccgcccgccgggcgctggaagagcaggacgccagcgatgcgcagcgccataaagccgagcaaaaagagatcgaccgggtcgccgccagcgctaaacggctggctatctggggccggacctatgacaacgaagatctctcccgcaaagccaagcagatggagaagcaggttcaacgcctgaaggagagccaaaccgagctgaccatgggccccccctggcggctggcgctccacggcgacatgctgcgggctgaccgactgctggagatggaacagctccccgttccccccgcgcccggtctgccggcactgtttaccgcagccctggctcgcctgaaaagcggcgatcgggtggcggtgatgggccgtaacggcggcggtaagtcttcgctgctgcgtctgctgtggcggcaaatgcagcaggaaacgacggagagcggtttgcgcctgcatccgcggctgaagccgggttattacgaccagaccctgcatcagctggcagatgacgatacccttctcgacgcactggaaccctttgaaccaggcccggatgcgcgcaggcgggcgctgatttccgccggattcagctggccgcgtcacgggcagaaggtcgccaccttaagcggcggcgaacgttcgcgcctgctgttcgtcggcctctcactggcgcgctatagcctgctgctgctggatgagcctaccaaccatttagatatggatggcaaaacggcgctggcggctacgctgcgcgactatcccggcggcctgctgctggtgagccacgatcgcgagctcattaaccgcagctgcaatcgcttctggcttatcgatgagcgcgggctgagcgaatggcacagcagcgaagaagtgtatgagattttgcgcaccgccgttcgtcgtccggtgacgcaggccgcgacggtgaacagtagcgaaccggaggaggaccaggatacgctgctggagcggttagtcacgcttgagcagctgctggcagacgatctggcgcgcaaaccaaaacatcaaaaaccgcagctgcaggcgcagtggcgtaaggagatggcgacgatcaatacgaaattaagctaa

SEQ ID NO: 187460 - DNA, 480 bp, Klebsiella oxytoca
atgtctacacccgcacatttatggctcgaagatgaaaatggttcgccgattgttggcagttgcctaatgccacttcgcctgggttcaatcgaattaaaatcattctctcacggtgtcactattccggttgacccgagctggggaaaacttacaggtacacgcgttcaccgccctataacgatagtgaaagaatttgatcagacaacaccgcttctgtaccgtgcggtctgtgaaggccggaccatgaaaaaggctacaattaagatgtaccgcattctggattcgggcatcgaggccgagtatttcaatatcattcttgaaaacgtcaagttcacaacggtcgcaccattcctgtctcctaacggtatgagtagtactcatcttgaaacgcttgaattgcgttatgaagcaattacctggaagtatacggagggtaatattgtctatcgtgattcatggaacgatcgttgttgtgcctga

SEQ ID NO: 187461 - DNA, 267 bp, Klebsiella oxytoca
atgacctttaatattgcgctcaattttgaagacggcatcacccgctttattcagtgtaacgccggggagaaagttctcgatgccgcctatcgtcagcaggtcaatctgccgatggattgttcggacggcgtttgcggcacctgcaagtgccgctgcgtcagcggcgagtatggcctgggcgatgagtttcttgaagaggcgctcagcgaagaggaagccgcagagcgccaggtgctgacctgccagatggtgccaaccagcgattga

SEQ ID NO: 187462 - DNA, 1311 bp, Klebsiella oxytoca
atgactacccccttaaaacgcagcaacgtgcgttacggcatattactgtttttatttctggctaccgtatttaattatgccgaccgggcaacgctgtccgtcgtcgcgcctattatgagcaaagagctaggctttgatcccgaggcgatggggctggccttttcagtttttggtatctcctacgtcattatgcaaatacccggcggctggctgctggataaatatggttcgcggctggtctacggctgcgcgctgattggctggtcgatcgtcaccatgtttcagggaacgatctatctgttcgccagcccattgatcgtgctggtgattctgcgtttgatgatgggtgcgatagaagcgcccgccttccccgctaacagccgtctcagcgtacagtggtttcctaataaagagcgcgggtttgtcacctcggtctatcaggccgcgcagtatatttccctgggaattattacgccgctaatgaccattattctgcataatttaagctggcactacgtattttattatattggcgctatcggcgtggtgctgggaatattctggctggtaaaagtgagagatccctcttaccatcccaaaattaaccaacaggagctcgactatattcgcgaaggcggcggcgagccggaattaggtacgaaaaaaacgcagcagaaattaaccctcgcgcagattaaaagcgtctgcgtcaatcgcatgatgatcggcgtgtatatcggccagttctgcgtaacgtccattacctggttcttcctgacgtggtttcccacctatctctaccaggctaaaggtatgtcgatcctcaaggtcggttttgtcgccagtatcccggccattgccggatttatcggcggactgctcggtggggtattctcagactggctgctgaaacgcggctacagcctgacgaccgcccgcaagctgccggtgatctgcggcatgctgctctcctgcgtgattgttgtcgccaactacaccacctcggaagtggtggtgatcgccgccatgagcctggccttctttgctaaaggcttcggtaacctcggctggtgcgtgctaagcgacacctcgccgaaggaaatgctgggaattgccggcggggtgttcaacatgtgcggcaacctggcgagtattatcacgccgctggttatcggcgtgatcctcgctaatacccactcctttgattacgccatcctgtacgtcggttccatgggcgtgctgggcctgttctcctatctgtttatcgtcgggccgctggatcgtttgacgctgaccccgcgcgccgcctga

SEQ ID NO: 187463 - DNA, 780 bp, Klebsiella oxytoca
atgtccaactctcgtaacggtcatatctccattaccggcgtcagcaaatactttggtcgccataaagcgctggacgacgtgtcgctggaaatcgaacccggtacggtgacggtgatccttgggccgtccggttcgggaaaatcgacgctgctgcgggcgattaatcatctggagcgcgtggatgaaggctttattcagatcgatggcgactatatcggctatcgccgtaaaggcgacaagctctacgagctgaaagagaaagagatcctccgccagcgggttaacgtcggctacgtatttcagaacttcaacctgtttccgcatctgacggtgctggaaaatctgattgaagcccccatcgcccataagcaggcgacccgcaaagaggctatcgcacgggcgtatgacctgctggacgtggtcggactgcgcaacaaagccgatgcctggtcgcgacacctgtccgggggacagcagcagcgcatcgctattgcccgggcgctggcgcttaatccgcgggtgatgctgttcgatgaaccgacctccgcgctcgaccctgagctggtgggggaagtgctggacgtgattaaaaagctggcgcgctccggcaccacgctggtggtggtcacccatgaaatcggttttgcgaaagaggtggcggaccgggtggtgtttatggtcgacggcaagatagtcgagcagggcagcagcgacgccgtgctgaaccaaccgcagcatccgcgaacgcggcagttcttatcgagggtattagcggcatga

SEQ ID NO: 187464 - DNA, 576 bp, Klebsiella oxytoca
atggcagcggaattgatgactgaaagactgctgctgatccccttgaccgcagacgatgcgccgcaaattcaggttatctttccacagtgggaaatcgtgcgttatcttgccgccggttttccatggccttttccggaggatggcgcgtcgcgctttgtcaataatgtggctttacctgccgcagctaacggtaccggctggttttggaccctccgccttaaaacggcgccggagagggttattggcctgattacgctctctgatgaagtggataacaaccgcgggttctggctggatccgcgctggcatcgccagggattgatgaccgaagcctgccgccgggtgaccgatttttggtttaatacgcttaaccgggaggtgctgcgcgcgccgaaggcctgcgacaatagcgggtcgaaaaagatttcgcaccgtagcggtatgcgcctggttggtgtcgagaaaaagcagttcatctccggcctgctggacgccgaactgtgggaaataaccaaagcggaatggaatgcattggctgcacaagctcccgcgtcatatagggagacaggatgctga

SEQ ID NO: 187465 - DNA, 219 bp, Klebsiella oxytoca
atgctgatatataacgtattcgggcgtcatattggcgtccagcgtcagggcgaacgctggcgggttttccgcgtcgatattaacgagcggaaattttcgccgctagccggggttatcatcccggacgatcttacggaggcggaaattcctggctggttgggggatatttttcatgaagcggcaagcccgcgccatcctgacgtccatcttgtggagtag

SEQ ID NO: 187466 - DNA, 258 bp, Klebsiella oxytoca
atgacgcttaaccaaatacgcatcgccagaccggtctccgatctcttactctgtagcaacatgtactgctgcggccttgggctcgagcaaatcgcacagtttgccgatcgtgatggctttagcgaggtaatgatcggacgccgcgatcttagctgcatcttaaattcacccactgccatcatcattcagtggcgccctttccgggcacctctgttatttttatgccttcctgtgaattcctatatatttttgatttga

SEQ ID NO: 187467 - DNA, 1392 bp, Klebsiella oxytoca
atgttatcaatattaaaaaaggggccgtcggcaaataaagtgccggctgagaaaattcaggcaacttatggccgctaccgcatgcaggcgctgctaagcgtatttctgggttatctggcgtactatattgtgcgcaacaatttcaccttatccacgccttatttgaaagagcagttagatctgagcgccacccagatcggtttgctcagcagctgtatgctcattgcgtacgggatcagcaaaggcgttatgagcagcctggcggataaagccagtccgaaagtctttatggcttgcggcctggtgctgtgcgcgatcgtcaacgtcgggttggggttcagcaccgcgttctggatcttcgctgcgctggtcgttctgaacggtctgtttcaggggatgggcgtcggcccctcttttatcaccatcgctaactggttccctcgccgggagcgcggtcgcgtgggggctttctggaacatttcccataacgtcggcggcgggattgtcgccccgatcgtcggcgccgcatttgcgattctcggtaccgagcactggcagagcgccagctacattgtcccggcctgcgtggcggtggtgttcgccatcagcgtactgacgctcggtaaaggttcgccgcgcgaggaaggactgcctgcgctggaagagatgatgccggaagaaaaggtcgtacttaacgctaaacacgcggtaaaagcgccggagaatatgagcgcattccagatcttctgcacctacgttctgcgcaacaaaaacgcctggtatgtctcccttgtggacgtgtttgtctatatggtgcgtttcggcatgatcagctggctgcctatctatctgctgacggtgaaacatttttccaaagagcagatgagcgtcgcgttcctgttctttgaatgggcggcgattccgtcgaccctgctggcgggctggctctccgacaagctgttcaaaggacggcgcatgccgcttgccatgatctgtatggcgctgatttttgtctgcctgatcggctactggaaaagcgaatccctgctgatggtgacggtgttcgcggcgatcgtgggctgcctgatttacgtgccgcagtttctggcctccgtgcagaccatggaaattgtgcccagctttgccgtcggctccgccgtgggactgcgcggatttatgagctacatctttggcgcatcgttaggcaccagcctgtttggcgtgatggtggataaaatgggctggcacggcgggttctatctgctgatgggcgggatcgtctgctgcattctgttctgctacctctctcatcgcggcgcgctggagcttgagcaacagcgtaagaacacgcaacagcaagaagccgaactggcgctggccgacgcacaataa

SEQ ID NO: 187468 - DNA, 1149 bp, Klebsiella oxytoca
atgacgttaaaaataaaatatatcgcccaagcggtgatgcaggttctatttgcccgccgtcgggtataccgtattattttgccggcaactttatcggcattaccgttatccgcgctggcggacaactattttaacccggcatttttatcggacgacccgaacgcggtggccgatctttcccatttcgaaaagggcgataaccaggccccgggtaaatatcacgtagatatttatctgaataagcagctggtctccacggaagacgtgaactttaaagcggcaaaaggcggccaggatgataccgggctggcgccgtgctttaccaccgcgcgtctggaacagatgggggttaataccaaagccttcccggacctggcgaagctggcgccggagcagtgcgtgccctttgccgccataccggaatcctccaccgagttcgactttgagcatcagcagctgaacatcagcgtgccgcaggcggcgctaaagcagagcgcacgcgggtatattcccccggaagagtgggatcagggggtcaacgcgctgctgctgaactatgacttcaccggcggcaacagcggcggtgatacgaaagaggacagctactatcttaacctgcaaagcggtctgaaccttggcgcctggcgcctgcgcgactactcgacctggaactacaccagcggtgagggcgataccgagaacaagtgggagcatatcagcacctacgtcgagcgcacgattgcgccgctgaaggcggagcttacgctcggggagagctacaccccgtctgatgttttcgacagcctcggctttcgcggcgtccagattgcctccgacgacaacatgctgccggacagcctgaaaggctttgcgccgacggtccgcggtatcgccaagagcaacgccagggtcaccattaagcagaacggctacgttatctaccagacctacgtctcgccgggcgccttcgccattaacgatctctacccgacctcgtcgagcggcgacctgcaggtgacggtaaaagagagcgacgggagcgaaaatacctttaccgtaccgtactccgcggtgccgctgctgcagcgcgaagggcggcttaaatacgccctgaccgccggtaaataccgcagcaccaacgatgactag

SEQ ID NO: 187469 - DNA, 498 bp, Klebsiella oxytoca
atggataaattcgacagaagcattcaacgggaaacgctgcaacttctttatgctgtatacccaaacgaactaactaacgagcaggtcaatgaaatcgccaatctgtaccctgacactgatagtttcatggcaaatttactttacctccaccagcaccagttgatagtgagtggtttaaaaccaagctcagaaggctacgccctggtcaataggcccgccatcactcaccgtggtattgatttcatccgcgacgatggcggactaggcgctattctgaatgtgcaaactgttaagctgcacgacagcacgatcattgccctggaggacataatccgtgtcgcaaacattcctgaagagcagcggaagggattgatttcaaaacttcgcgagcttccggcagacgccataaaacatttgacgcttcaattactgactccggcggttctgcatccgcaggccgtaattcagtcaattgaaaaattcctccagactttgtga

SEQ ID NO: 187470 - DNA, 783 bp, Klebsiella oxytoca
atgaaactggaagcatcgttaaagcatttcagcccgcaggggatgcatatcagcgacgacgtgaaaagcacatcaccgaatcgcctgaacggtacagatatcatgacagggatcggggtgaccagcagccgggcgcggttcgggctggcggcgttcttcggtaagacgggcatcagtaagaccgatgagcagctgacagttcaggcgctggcgcgacatgccattgatacagcccctaaaaacgtgcgaaaggcagcgggtaaggctctggggcgctgctgcctgattctggcgcaatttgcctttgcagagtattcccgctcagctgaaacaaccgggatctgcacggcatgcgagggggctggtttaaccaaatcagttgaggaggttgttaagcaccccggaatatacaaaagcgacggcgaggaaattgtcgccccgattatcaggcaggagatagtattacggcagtgcgttgtatgcggtgggaagggggccattaacgcccgctgccgctgcggtggctctggacaggttctggatcgaaaagagaccaaagagcagggggtgccggtttataaaacctgtgagcgctgttcgggaaatggtttttcaacgatgccgtctacggctgcgtacaaagcgattctgacgctcattccagacctgcacgtcagaacatggacccgtaactggaaacccttctgtgatgcgctggtggacgtatgctggaaggaagagcgccatgctgataaggaatttcaaaaagcgaccgatttttaa

SEQ ID NO: 187471 - DNA, 369 bp, Klebsiella oxytoca
atgaagatttttaacattacaccaatgggcaagccgaggatgacccgggcagacaaatggaaacagcgggaagtggtcatgcgctaccgggcattctgcgatgaggtccgtctgaagaacgttgctatgccggagcagggcggacacataaccttcgtggttcccatgccaaagagctggagccagaagaagcgagtaacgatgaacggacaggcacaccagcagaaaccagacgccgataacatgatcaaagcgctgatggatgctctgtttactgatgacgcacatatctgggactttcgtgtaacaaaagtctggggtgaatccggacaaattttaatttctgatatcggagaagtggccgcatga

SEQ ID NO: 187472 - DNA, 1380 bp, Klebsiella oxytoca
atgacaccagtctggcgtaacgacgaacttgaagaggcggtcatcggcgcattgtttttgcgcggagatgatcctgaggtgctggatgttctctcccgactgcctgcaagcaccttctcagttcgtcagtatcgggaaatttacactggcatctgccgacaggcccgcggtggcggagtaattgatccgttactgctttgcgagtcgttgccggcactccagaccacaattctggcagccacccgtgtcagttgggcgaaatccgcgttgttatcttacgttgatgtgctgcggcgcaatgctggtgtacgtgatgccgaagcagcactggaaaaagtgctggagcaaatcaggagtgccagaaacggagaatcagccctggccgctcttgaagctgcgaagctgactgtatcggcgatcgacatttcagcagataccgtccagcccgttcacatctccgaactgctcaccgcagtggcggacgaagttgaatcgcggagccaggggaaagaagagaccaggtgcctactcactggcattgaggagcttgatgctatgaccggcggcattgaatcgacagatctggtgtttatcgccgcgcggccatccatgggcaaaaccgagcttgcactggatatcatcgacaaggtttccgctcagggccatggcgtgctgtttttcagtatggagatgtcggacacgcagatcaccaagcgcatggtctccgctgcaggcgggatgtcgatgtctcgcctgaaagccgtggataaattcgaggacgaagactgggcgcgattttttaacggcatggagcgaatgtccacctgcaatatctggatcaccgacgccaccggcctgactatcgaccagatacagcaaaccgccacgcgctaccagatagcgcatccggaaatcgcgctggtggtcatcgactacctggcgcttatcaaaattcagagtgctgcgcggtacgatctggccgttggcgaagtatccaaggggcttaaaaacctggctaaatccaataaaacccccgtccttgcgctgagccagctgtcgcgtggtgtcgaatccagaccaaataagcggccaatgaactccgatatgaaaaactcgggggaaattgaggctgatgctgacttgatcctgatgttgtaccgagatgaggtttataacccagaatcgccagcaaagggtattgccgaaatcaacgtgacaaaacagcgtaatggagagctggggaccatctatcgtcgattctacaacggtcatttcctgccaattgatcaggaggaagctcgccaacgctcaacgccgcaaccaaaggcacatcaacgccgttacacgaaagggagccgggctggccatgaagatttttaa

SEQ ID NO: 187473 - DNA, 831 bp, Klebsiella oxytoca
atgagtatggatctcatggttcaggcaatgaaaatcagggttggtaaccccttgcgtaaactcgtcctgctgaagctggcggataatgccagtgatctgggtgagtgctggccgagctaccaacatattgctgatcaatgcgaaatcagtaagcggtcagtgatgaatcacattgaggcgctttgcgaaggaggattgattaaaaaagagcttcgcacagggcctaaaggtaattccagcaacgtttatcaacttaatttacgtagtgcaggagattcaccagggggtagtgcaaatcattcactacctggtgcagcagattcactaggtagtgcaggagattcaccagggggtagtgcaggagctgcacccagaatcagtcactcttttgaaccagtcattgaatcagtcaatgaacctataaaacatactggcgcatcggctgacgcctctgcaccggctcgttctgcaaaacaggattattcccctgaattcgaaacagcctggcaggactaccccaagcgagcaggtggcaattccaaggcggcagcctggaaagcctggaaagcccgcctgaaagacggggttaaccctgaagcgatgctggcaggcgttaagcgctatgcgacctacgcccgtgcaaccggcagtgtcggtacacagtacgtcaagcaggccgctacgttcttcgggcccgatcgtcacttcgaagaatcctggcaggcgccatccgctcccggaggtgggcacaacagcactattgcccgcctgtctggactggggcgcatgtccgacgattttggcgagtctggtgagaacctgaatttttga

SEQ ID NO: 187474 - DNA, 267 bp, Klebsiella oxytoca
atgtcacccgaagacttcattcgcaagcacattactgcggcgttgatggccgaaggcttctctgagagtgccgcagggggggggggggctgagcacggcgtcgattattaccggagaagctcacaggcgagcaggaaaggggcgattttcgatgattgcctctaccgagctcgtcagtgggctctcgggcagacaaccaccgcagaacggaaagcagcaaagaaaaagccggggcgagctggtggagttcatcccggcctgttctga

SEQ ID NO: 187475 - DNA, 210 bp, Klebsiella oxytoca
atgaaaaaactcacattaaaagaatttgcggatcaagaaggccaagtaaaggctgccagcaagctcgggattagacaaagcgcaataagtaaggctttgaggctaaagagaaatatttttgtgcttgttcacccagatgggacgactgaagccgaggaagttaagccattcccaacaaagaagaacgaatttccgattcaagaggtgtga

SEQ ID NO: 187476 - DNA, 699 bp, Klebsiella oxytoca
atgaaaaaaaagccattaactgaagaacaattgcttgatgcacaaagacttaaggctatctatgaccgtaagaaaaaagagcttggcctatcccaagaggttttggctgatcgtcttggtataagtcaaagtgccgttgctcaaatttttgcgggtaaaaacgcactgaatttaaaacgggctgtagagtttgccgaagttcttgatgttaaggtcgaggaatttagttccactctggctgacgaggctcatcagttaaccaaatccaacgttacctatgcaggagcctatcaacccgggcgtaggtacccagttttaagcagcgttcaggccggcgcctggtgcgaggccgtggaggcctattctctgaaagacatagaccactggcttgaatctgacgcccacattcagggaaatgggttctggttgtacgttgaaggtgattcaatgactgccccgctcgggctcagcattcctgaaggcacatacgtcctgtttgatacggggcgtgaggcagtgaacggtagccttgtgattgccaagcttgaagattcaaacgaagcgaccttcaaaaagttagttatcgatggtggtcaacgctatttgaaagggctaaaccctgcatggccactggttccagttaacggaaactgtaggatcattggcgtggctgtacagacaaaaatgatgcttatctaa

SEQ ID NO: 187477 - DNA, 300 bp, Klebsiella oxytoca
atgattaacgcagcgggtgataatgctttcgatatacacgaaaaattaaaaaaacatggcgctaagtggctgtatatgcatgaggagaatagtcatcaaataaatacaaattatgagttctgtacgaactttattggtgagattgaatttgcgatttatgaacgtcatggaaatcattttatcttagtcgatttttttaaatcctacgatgaagcatgtgatgaggcgaaggatattctctatatttatccagagatcagagatctgatattaaaagccacatccatttcatcaccataa

SEQ ID NO: 187478 - DNA, 342 bp, Klebsiella oxytoca
atgtcatatttagcgaccttttctaatattgttcactgtggaaccagtcataacgcaaagctcattgagcagactggtaaagcgaccggcgacatgcttatctgttctggctatcgcagcaaagagcaatgtattgaactcatccctgagttgattggcgtacgcatctgcgtgctgtgctgtcctgagtgctccatttgcttcaatgagtacagggaaatcagtacgcattgttatttcaaggttgtcttttttacgggatgcaatattcattatgctttcctcaaagtgagtgaggcctcagcaattaagccgttttatcaattctggtttttaagttaa

SEQ ID NO: 187479 - DNA, 213 bp, Klebsiella oxytoca
atggctaaattacccccccctattacacacgaaaaagtgcaggtcgttatgacgattgaaaacggcaaggtaatagatacccgcaaagttcgcgataacgaacttatcgcgacgatggacacctttttctggatggcagagaaagcgggctatcggattcaggcccccagagtggaggagtgccgtgtcactgacagcaatacgaattcctga

SEQ ID NO: 187480 - DNA, 582 bp, Klebsiella oxytoca
atggatcacacagcatttaacccggaaccaacgtcaaccggcatccggatatctggaaacaggattattggctactccgccgctattcgagagctggataacggacgctatgacaaacgtctcgccgacggcatgaatattctggcctgcatcatggaagcggtggaaagcgactggctctcgctcactatcgagcagcaaatcatcgtctggcgctggttgctcgccgcggtattcattaccgaagagcgggagaagaacgggactgtcgacattccgaacgacgaaggcggcgttgatacggccgttatctactccggggagcatggcgcaatcagcgtctacccagggccggaacgattttcactcgctaaccatattgaggctggcgccattgagaaatacgggagagaagaagggttgccgctggcgctgcgcatgtatcaggacatggttgtctgtgacgacgaatacgggttcaggctgtcagctatgggccgggagggcttcaacatgctgcacgacggctttatcgagcaaatccacaccgaaggcatgccagacatgccggttatgcactga

SEQ ID NO: 187481 - DNA, 558 bp, Klebsiella oxytoca
atgatcattccatcaaagctgatccgcgccgctctggtgtgcgttgctaaaaacgatgcccgctactacctgtgcggggtgcatatcaccccgaaatatatcgagggtaccaacggacatgtagcgttgcgcatggagcacggcatccggacaaagaaaaatatcattgtccagttcgaaggtaatgtaccagccaaagcggaaacaacagagctggtcttcaacaaggagccgatcgccattcatcgcgaccagcaccagaatcgcctggccaccactggcattaaattgcttaacgggcgcttccctgatttggatcgcgtcatcccgaaaacactggaccttagcgttagcccggttctcctggcggaatacctgagctatccggcaaagatttttggccgggatgagaagtttgttcctgtgcagcttcgtccttcaggtgagctcgctgcggtgcgcatccagtttaatgagcatatcaacagcacgtatggaaaccccgagctggtcgttatgccctgtcgtgatgattatttcaaggtggagggacgctaa

SEQ ID NO: 187482 - DNA, 225 bp, Klebsiella oxytoca
atgaaagtcgaatttaacgatcagggcgccatagcgaccgctaccgtcaccagttcggtattcgagttccgccggcacaatcgcgctgtcgatgtcgccttgtttatgtctcctggtgttcgggctcacagcagcggctttttcatcataaaaacggtgatttccggcaaaacgtcgcacgtgttgcgcgcgtataagtcgcttcagtgggaggcaacgcgatga

SEQ ID NO: 187483 - DNA, 429 bp, Klebsiella oxytoca
atgagtatgaataaatttaccaaaggagaattaaaagttatcgccgaaacagaccacgttcagtgcggagacgcggccgcgatggcgcgaattattcttgatgggatgtacattgagccaacgccgaatgaaatgctttgcgatttttacgaagttgataactggcctgagttggttagagaactggttaagcaagctaatgaaggccgccgcaccgccgtgctcaccgggtcagggacggcagtactggttaacgatgtcaccaccggtaaacggattaccatcaccctgcccgatatcagttcaaaagcgttctggagtggtgccggtaagaccgaagtgttccatccggaaacgtataagcgctgggttaaagaggcgattgagcggcattgcgccattgcccggatcgacgtggaggtgaagtga

SEQ ID NO: 187484 - DNA, 555 bp, Klebsiella oxytoca
atggtttacggatacgctcgcgtctcaacggctcatcaggatactgagctccagttgcttgctctaaaggctgccggttgcgatgaaatcaggcaggaaaaagcgtcaggcagaagcaacaaaagaccagtgcttcgtgcgctactgagagatctaaagcccggggatgagttgatattatggaagattgacagaatcggtcgaaatgtactccatgctctgctctggctctcagagcttcaggaaaagagcgtcaaccttcgttcaattactgatgcggttgatatgcgaacggcgtcaggccgctacaatttcagaaatattctcaatattgcccagtatgaatcggaccttaacagcgaaaggacgctcgccgggttggctgttgcacgaaaaagaggtcggataggcggtcgtagtcgggtaatgacaactcaagttgtggagcgctgccagcgcatgcgggagaacggctcgacacgccagcagatagccgacgagatcggagtaggggtgaagacgatttataaatattttccggctggtaataggtga

SEQ ID NO: 187485 - DNA, 1569 bp, Klebsiella oxytoca
gtgggttcaggcgacgggctaaaatgggttggtggcctcggctatacgaatcctcagaagcacggtgcgataagcaataactctttagtcgataacacggccgccgttatgaatgcgattacggaatccgtattaactggcgtcggactcgatttaagaggaggaccatggcgaataaatcagacggttgatttaaccctggtgaaaaatatcatcaccgattactcagggcggtttctcattaatccggccacgtttattgcaaagcatgacagaaaattcgttgtgacattcggaaaccctgatacagacttccgttcggaccgggcaactcacacaacgatgctgggtaatatggtcgttatttctgatgacaggagtgcagaactcagcggtatttacatcaagggcgcgctgggatgctttggtgcttttcgggtcgtgaatttcaacgggggtggtttcagagcggatgcatggtgggatagcgtctgcttatcgatatccgctgagttatgcgggaatctggcccagttcgccattgatattaaccccagcggagatacatcgaactgtcttaatataggccggttgcagtgtgagagggcttttcacaaacaaatcaacgccaatatcattcgttcaactcttggccccatccacgccgagcgtctgaaaatcctgacgctggatgacgggacgaccggacttaagtcagggctgacctatctgaataccagcattgttctcagtaactgcaccgtagaccagttgattcttgatgccgccacagatgctgaggcgggtacggtgagtaccaccccttcggtcagactgaacctctatgaaagcaaggcgcagagcctgcatctggccacaagtgttgtcacctcaacctacggggaaaggggaagcattgataactcagcattctacaaatattacaaccccggatactcagtgtcgctgaacgcatgcaggatgaccagaaccacaggtgacgggctcctgcaggttggaggggcgggcgtggttgccagcaactgcactattgataccttccagccggaatccggaacaacccgaattttgctgtcagcctgtaccatcaataacgattattctaacccaaaggataatgtatccggcgttatcttcaacagctgcacgctgaacggggatatcggggaaacagggcctacggaagctgcggagcccacgctttttcatcagtgtaaagtgaaaggtactgttcgtggatatttccagaataaattcatcatggaaggcggtcatgcggaagccgttgaactggtcagtcgctcttatgcctgcctgattaatgtcaggggcggaacgttcagccatgctgaaacgggagaccttggctatataacgcgaggttgcgcattcagctcagtcacccggtggggaccgccccggttcggtaactataaagcgggagagcgaacccacagaatgggggaaatgggcagcggttcggttattgaatatgtcaacacagccgcaggagcggcaacttttgttgcggcaattacgttaccctga

SEQ ID NO: 187486 - DNA, 258 bp, Klebsiella oxytoca
atgctggatgtaaataaagttgaatatgttaattcgggcgcgatgtggtttattaaatacagaaaaaacttcacgggcgggcgctacgattctcgcgagacggctgtatatgcggttgaaatgctttcagaaccggatatggagatattatggatggataaagtcgtcaggaaccctgaattagatggcgttgatttattactttccaggaaggacatcgacgccttcctggaaaatgaactcggttcagatggttag

SEQ ID NO: 187487 - DNA, 282 bp, Klebsiella oxytoca
atgagtttcaccataaaaatgaccgtcaggccggttaaggtttaccaccagttgctgggggcagcaattcagggcgaagaagaagttttgagcgccgtttataccattacttctctcgtttctctgaccggaaccaccggcgttgccgagtatacggtcatgcctgaaggggcggaactggcaggggccggcagcatagcgttcgaatactccggcaaaggtaatcctctggatgaggcggaggaagcgctgaaggaaagtctgtcggtactggctggatga

SEQ ID NO: 187488 - DNA, 336 bp, Klebsiella oxytoca
atgctgtcattatcaggaaccgtgtcgctagacctcgacagcgagcgaacgactgacggagccacactggtttacaccgttcctctgaccggtttttcagatggcgcaatcatcaagggcgctgtatctctaaccacatctatggagaaaagctgttcttacgaaatcaccattcacaagcacaacaacattggcggcaaagtgacggtggtcagcggttatgcctacgacagtctgagccttgatttcagcatgacatacacaatgttgacaatcacgcttaacacggccgttgtcggcaatcttaaaatcgcgctttaccagctgaattactga

SEQ ID NO: 187489 - DNA, 1872 bp, Klebsiella oxytoca
atgtcgttttatttaacgggcaatcccgtcccgtcagcaagcatgcctgacgttcatgataatgcgcagaatctggactttgccctgaatgagataacatctacattctggaccgatcgtctggggcgtcggcgaatgtcatggttaggaatagagtcagcgttcacgatgaagctcacggactttgagtcccgatttgatttccgccttgctgaacaagaatcagtttttgctgaatcgctggtggataaggaaaatcgatttcagcagtttcttggtgactctggctatgtcttcctcggtgactatgaagacggcccatttcagttcagcgcccgcaatcaatatattcgctttcagaaccagttttatcgactaaacaaatcaaccgatacaggttttactaccactggcaccgatgaaacaagctttgctaacgatgtaacccacctggttctgatggatggggacacgcttcgccaaaacctgggttcaagcgaaccggggatgggtggcgatctttcggcctggcgacgtcgaaaaatgatgcaggctccagtcacggtttcgggagcgcttgactctcaggctgtcagtatctgggaatttgcaggtaatatcaccgatcggccagatattaacgacccggggacgtgggactggtctcccgcttttcaggctgccgccgacgcttatattgcaccccggcttatctccggcgaaaaatatacaatgcgcagcacggttactattaccgtagatacaacctctccaaccaggtatgtgaaagttccattctgtaacgatggactggctattattgatcactcgtcgttaggtaatgcaggtgaggggtttaatgatgcacttcctgttgacgacccctctcaacccgtacgagtccccgcattcattattgcaggcggtagcggaaccttgcttcagcagcatatggaggggatttattttatcggcaacaagaatacctgttccgtaatactgaaagggtgctgcggagtccgtatcgtaagctgcatttttaacgctaacaggcagggcatcgtgtttagtaatgatgtggctgcgggcgtctttacggaggcttgtgttgcttataactgccggttcagacaggcctgtctggtcgcgataacatacgagaaaggtgccggtgactcttctttccacgggacaggatttgaccagacctatatcacctctccgtcaggctatccgacaatcctgattggtacaggagcgcagccctataatgcgccagtaaacgggaatatctggaccgccggcacagccgtcgccatgatccagaacaaaggactcacctctcatttctacggttctattaagctggagggatcaccgaaagcaattctggcttcagatagcaaggtattcctgtacggggaaatatcaacatggtccattgtcgataaagggacgctggttcaggctgttcgtggcgggcctacaggtccctcggggggaaacctccagttcgcgggtattacttctccggaggtcacccggtgggatgtcgctgccgccggaaccgttgtccccttcgccgccttcaatgaaaaggccattgtcaccgttcgcggctcaaattattacgccacatttgaattcagtaccagcaggcacgcaaccggcaacgcggtcaccactccattgctggtatctgccaataactgtaatccactgacaaaatttaagatcgcaaaaacagcggggggtctttccctgacgacagtggaaaacaacaccattatcaccgcttatcggtgggaaaatatgccggatgagtccagcggaatgaatttccgatcagccggttactggaggaaactgtaa

SEQ ID NO: 187490 - DNA, 816 bp, Klebsiella oxytoca
atgctaaaaataagtgacgtagaaccgctcacatctcttgaggggttgtttactaatggaaaagtcgccagcggaattccaccaacaagactggttgcagaatggtttaatgctgttcagacagagctcgttaatatcgttgaaaattcagatattgaattagatcctcaggactcaactcaggtgcttaaagcgctgaataaactgttcctgacccgccttaatccatttgctgatattgcatctgatggggaagaggcgctttctactgccagggataaccttgggttgggcaattcagccacgcttccggttggtaccgggccagattctgtcgcagctggtaatgattcccgcatcacgggggcagtgcagaaatcacagaatcttgccgatctgccggataaagctgtggcgcgatccagtctggaactgggaaattcagctacccgctctgtggggacatcttccggtacagtcgcagctggtgatgactcccgcattacaggggcgatgcagaaatcacagaatcttgccgatttgccgaataaagcgacatcgcgatctaatttggggctgggggcgatggcaacaaaagacaaccctccatttataaatgaggttggagcgtataccctggcctggtatgacgggtctgtagagtataactctacggttaatggctctgcgttatacccagccactgctgatggaaatcactcctcgagtgcactcaatggtacatggcgctgcatggggcgaacagaaacaattaatgatcagcacagagtaaccctatggcaaaaaatcaactga

SEQ ID NO: 187491 - DNA, 669 bp, Klebsiella oxytoca
atgagcttgtactccgttgacgactatacccgggcgcttttgagcttgatgcctacaggtcttgcgtggacacgagatgtaaatagcgttcagtacgcgacgctccgggctttggggcattcatttgcccgttctgacgctgactcgcaggcgctacttagcggaggttttccgtcaacagcattgatgatgctttctgagtgggaaagcgcacttggtcttcccgatgattgcgcaattggtgagacagggagtatcagtgagcggcagcgatcagtcgtttcaaagcttatcagtactggagggctgaatcgggcttattacatcagtgtggctgctgctcttggctataacatcaccatcaatcagtttcgcccggcaatgtgcggaatgtccgtctgtggcgagccgataaatggtgaagaatggccgtttacctggcagatcaacgttccgggatcatctgtaagatattcatatgcgggctctgccttttgtggtgatgccctgacatcgtggggagataagcagtttgagtgtacaataacaaaaatagcgccgtcccatattaatattattttcgtgtatggtctggacgctgaactgaatacgccagaatatcggatgatattcgatattgccatgaaccgggaatggcccgaacattag

SEQ ID NO: 187492 - DNA, 735 bp, Klebsiella oxytoca
atgaaagctatatacataattgttcttgctgttttttatccactttcggtcttggctgggaggggggatgctgtctgtagggtgatggtaaatcaagggttttggggagacataacaacacctgcgatcaccggaaccttacaggacaaacctgcagacttggcgatatgttttcatggaaaggatttcagtcagaatgtcgcgcggtcaacattaattaaaaagctaccaggggattccctcaaagttgtttcttcatcaaatattgatggttttttagagatgtacgtatctctttataatgaagagcattcagaatctgtaataacaaaggtcgtagtcagtgagcgtggtgaaattggttcatatcctggtggcctaattagcaggcagcaaataaaagggagtgaccctgaaggcatttttatcttcctgccttcatattggaagaatgatgtatatttcaatttcatagaaccaactagaaccaggttgtaccgctttcaccacacgccaggtgacgcaatgagcgtggcagtattaaagaaagtttccgatagctatggcgagtgggttaaaaagaacggtgacataatagtcacaaaagattactttaccaaaaatgatgggcgaaaagtttatggggcaataatatccccaacagataaagaaaaatgcaaatttgatgcatctcaattcgcttgggtgctttcagcattatcagcatgtaattag

SEQ ID NO: 187493 - DNA, 1836 bp, Klebsiella oxytoca
atgagtaacgcattcgatttcgagttgattgcggacgacagggtcagcgccaccattgacgaaatcaacgaggccattaaaaacctgctccctcaactggatgagacgcaggaaaagcttaaccttggcggtgatgagacggttgatagtctggatgatgtcggcggacgactggataaaatggcccgtagtgcacgggataacgtccagttcatcggagatatcattcctccactgaagatcgtcggtgagctggccggtaaaatggctacctttggtgcggctggcgtggtcgggttcggcattcaaaaggttgccgacggttttcgtgacgcagccaaagaggcgtacaacctcgatacccacgcacagaacaccgccatgagcgttaaggagttttcagcgctttccggggccttgcgcattctcggtacggacagtgagactgctgctgcgtctattgaggggattttcaacgcattcaatgaggctgccagcggtaaaaatgccggtgtcatggctgctatggcgcaaatcggcgcccagattgagaagaatagcgacggctcagtaaataccctcaaaacactggagtcgattgcgaaaattttcccgactttgcggcctgaccagcaaaaatcctttgccgatgcggttgggcttactccagatctattgaccctgatgcgcgagggggccaaatatgcaacgctcctggcgaaggccgagaagtttggtctgaccgtggatcctgaatttaataaggaaatgtcagaagccaatcgccagatgaatgagctttatgctcgtgttgccggttttaaaaaggtcgctggcaatgaagcaattaagttatttcgacacgatcccgctattgataaatctctcaatgacgcccaaaaatatgacgggaaggttttttatcacggagatcgtgataaagatattcgctggaaagcattaagagatgatgagtttaaagccagtctgtcagcttctgaaaggctcaattttactcttaacagacctgatcccgaggtggagaaaaagcttaatgcccgatacggagcaatgtggcaggcatacagtctgcaggatgatttatctgcagctttgctacaaaaagttccaggcaatgagaatatgccttataacgatgggggcaacaccgccaatacaataggattcaggaaccacaatcctggaaacttgagaggcgcccctaactcaacaggtaagagcggcggtttctcgacgttctccaatgatcatgatggtcttgcagcaatggctcgtcagttgatgctatatggggatcgtggcaataataccccgagtgggattcttcatacgtatgccccgagttctgaaaacaatacccgggcttatatcgatgatgtgacttccagaactggttttggttcaggccagcgtcttgacctccataaccccgaagtcctgaagaagttgatggcctcaatgattaggcatgagcagggctctcaaccctacacggaagaacaactcaaaaacgcgataagaacggccatcacggatgaccggtggtcaggaaagcgcagtccggagctactctctcagcagcggaacaatatcaactcgatgccgactggtggctatcgcccggaatcaatactggcgccaaagaaaagcaaccttgactcgaataccgtcaccgataacctagcccgctccctcaaggatgctttcacagaacaaccgctaagactggagatcgttatgactaacgataaaggtgaaaggaaaacttacaacgttgaaaacaatggaaaaataattacacctatgaattattag

SEQ ID NO: 187494 - DNA, 591 bp, Klebsiella oxytoca
atggcgaagaaaaagacatttagttttgctcaccttattggccgtggcgcgactgcttccgaagaggaagaggacaaaaaagccaaaaaggcgaaaggccgtcgcgcggaagaggatgagcgcgaagatgatgcaggggacgatgaacgtgaagatgacgcggaagacgacgagcgtgatgatgacgcggaagatgacggcgacgacccggaagcgtcggaagacgatgacgattccgaggatgacggcgacgacgaccgcaaagaaagcaaagcggtgaaaaatgcccgtgccgccgagcgtaaacgttgcgcccgcatcttcggcagtaagcacgccgcggcaaatccgtcactggccgcttcactcgcattcaataccgggatgagttctgccgccgctatcgatgttctggcatccacggcgccagtctcgcaaccacaggcaacgcgcgggcgctctctcgatcagcgcatgcaggaaagccatgatgtccggcttgggcaggatggggataaaccatctggcggtaaagcgacactggtgaacaaaatgaccagtctctacaactccactaaaggagaaaaataa

SEQ ID NO: 187495 - DNA, 2502 bp, Klebsiella oxytoca
atgagcaaagcatttctttcacattcatgggcagataaagaattcgttaggtccgtcgcgattgatttaggaagacagtattgtgtatttgatgagcagatgtttgataatgctgaatcttttaaagattctattgaaaatttcctattggatacgtctatttttgttttatttgccagcaaagcatcactgaaaagcatttgggtagactttgaaataaaagaggctagataccaagtgttattgaaaaacattcagaaggcagtggtttttattattgattcagacataaaacctgaagacttacctgcatggctgaatcgtgctaagatttcatccactaatattccaaaattggtgtctagagaaattagaactcatattgataaagttttaatgatgactcagaagtcttatttcgaggggcgttcagccgatcttgaaaaatttcaaattatgatgactcctattggtttgccagcaccaaaaatttcatcaatatatggtcttcctcatataggacgtcgtacttttttatctcatgcagcaagtctcacattagctttcaacaggctattacctatttctgtttctgatggagatgagctagtagacattacagttaaattctccacgcaattggaaccttactcaactaaagaaggttttgaatttcttattgacacgataagaagagaaagtgaggagcaactggttgaacgtatactaagtcttcttatcactgcagttgcaaataaagaattacctgttttaatcgatgatggtgggctttttacttcagatggctatcacaaacagtcagttcgtactattttaaaaaatataacgtcgaggggtgaaatatatttgtttgttatttccaatagaaaatcaaatgaaatagaaaattcattacaactcgcaccattatcacaggatcatatcaaacggttattatcaaaagtagcagttgacacgaaaattgtattaactgcacctcagataactgaattaagtgaatacgtaaatggtttccctccttctgtttactatgcggttcaattactgaaagaatatggcgttgatgctgtattgtctgataagaatagacttgtgcaattcagaacttcatttttcgttgattttttaaataaatatttttttgattccatagataaacaagtattaagttttctggggaaatatagcccggtgtcaattaacattatagttgaggtgctaaagctagatgtcaagcaagttacggcgagcattataaagttgattgaaaattccttagttgttttaaacgatagaagtttatattatatttcggagcctattttagatgctgtaaataatttatttcgagaggaaaaaggtgtcgatcatttagccacttatcattcattgaaattatatctggcatcacaaaatgaagaattgcctaggttagaattgatgaggttgttgtttagggctgcagcacggagtggtcaaccaattggcgaaatatttcatatgtcaaatgatttgataaggcttgccgaagattattatcatcaacgtgactataagcaatgtatccgatttgctgagttatctcttgcggaagtgagtgataatgaaaatgctaaagagcttctaattagaagctatatacaggatgaacaatgggagctcgcaatggataatataaactcctattcaaaatacgcagttaaaagaaatgtgtcttttctgcttggattttatcatcgaaaaagaggggagttacctgatgcgataaactcatttcatgacgctgagcggagcgggcacaggggggttgctgtaaaacgtgaattagctatgtgctattacttgtataataaaatggcagaagctaaacgttatgttctagaggcaatgagtcgtaatgaaacaaagtatcttattgatctatatattcaaatttttacacgtgaaggtgatgagataaaagccagggaagggttacttaaacttgaaaaaatggatacggtttctttcgttcaacatcgactatcaactgttgagttaaggtttgggaatgtgccagcggcattaaacgcagcaaaatatgcattggaatcggctaaaggagaacgaccaccctttggtatactttcccaactggtaacttgctatactcgggcgggaaagtttgaagaagcagaaggaatattgagcaggttatctagacagtttgacaataagaaaaatgatattaggctggggttggagtgccgtttagaaattgaaaaaggtcgttattctgttgcactaaaaattatttcgcgtataaaaaacaaagagttattggtttataagactatggagagagatgccttggttggtgagttaaaagtaagtgcgctatcagatcaactaagaattgaatattccaaaactgtttcattacttaattctgagcttgataataaagatgtgcttaattcatggatggaattaataatctga

SEQ ID NO: 187496 - DNA, 369 bp, Klebsiella oxytoca
atgatcaaatcggaaaacaaagataccggaaacccgctgtccgttattccgaaatacaccatcaataccctgctcgactggcaggtgaccagcaagttttcggcgaacgtcaactggaccctgtacggtcggcagaaaccgcgggaatatgcggaaattcgtactgaaaacggcgtactggccaccaatgaagtgggctcctattccgtggttggtatcggcggcaactatcagctaatgaaagacctgcgcctgaacgccgggatcagtaacctgttcgataagcaaatttttcgtgaaaacgaaggggcttcgacctataacgaaccgggtcgcgcctattacgctggcgtcacgatctccttctaa

SEQ ID NO: 187497 - DNA, 1128 bp, Klebsiella oxytoca
atgggcagaccacgaaaacataatgtaactataccggggctttccccttattttgattccaggacaaaaaaggtttactggcgttataaacatcctgttactggaaaattccatggcttaggcactgacgaaaaagtcgctaaagaaattgcgatagaagctaacagccgtctagctgaacagcagatgagaaacattcttaaaataaaaagtgaggttaataaacacattggtggttcagcaacagtgtctgaattcacccctcgttatttaaaaatccagcaagagagatatgatcgaggtgaaataaaactcaacactctaaaacagaaatactcacctctaaaagtttttgaagaacaacttggtatgaaacctctcgatcaaattacagtaaaggatattgtaggtatcctggaagaatataaggaaaagggtcataaccgtatggggcaaatattcaggaaggtcgctattgatgtctttgcagaagcccagcaggttggcgacgttcccgtcggcttcaacccagcagaagctgcaaaaaaacctcacgtcaaaattacgcgccaacgattaactttcgaggagtgggagttaatctatactgcggcgaagaaagatcattattttcttcagaaagggatgcttcttgctctggtaacaggtcaacgcctgtctgatatttgcaacatgaaatttaccgatattgaagataaccatctacttgtcgaacaggccaaaacaggtgcaaaaatcgcgataccgctcgccctgcgatgcaaccaactcgatatcagtctgggtgaagttatttctctgtgtagggatcaggtgcttagccagtatttacttcaccatcaccacgccaaaggaaaggcaaagcgtggtgggaaggtgcagccggcaactttaacagtggcattcagtagagcaagagacgaagttgaatatgagtggggaaaaaatggaacccctcccagttttcatgagcaacgatctctgtctgaacgtctttaccgagaacaaggcgtaaacactcagatcctgctcggtcatacgagcaaaacaatgaccgacagatacaatgattcacgcggaaaagagtggaaaaaactggtcatataa

SEQ ID NO: 187498 - DNA, 2202 bp, Klebsiella oxytoca
atgaacaactatgcgtatcttattaaagccaaagcaaaggccacagattctaagaatttattctgctggttcaccgctaaatctgactcacgcgctgaacgcaaaattctggatatcctggaagacgctgaaattaatgttggccgcggtgccgaccaccagctaccgatccgcacaaactggcatatcgttgacgatcttcccgaagaaaatgcccttgatgaaacatggtgcgaccgctatgaacttggcggtgaagacggtttgacctggcagaaaattgccgcaccggtagttgaggaaactattgaagctaccgatgctgaagatgcaacaaatactgaagaaagtgaaaaggtatatgccaatgacgaaaacgctctgtttcctgtatcaacgatgcctttccgcacgcagctactggcgcaatatatggaaagtgaccgtcatgtttaccatatcagcattccgcatcggggccgtcttgaagcgatggaaatggatcaggataacagcgctatccaggatctgattcttgcggcagaaaatgtccccggcattaaaaaatttgatatgccgggtatctggaaattcaccagcgcgttcaaaaaagtatttcctgaaggcaagcgatacgaactcggaaagaaagttcagttcgctaaattgtggtttgcgaccgatcatattgatcggggaattttaacaaaggaatggtctgcaggtaattatatctcatctgtgcaacgtactgataccggcactaatgccggaggcggaaacagaacagaccgtaatcctgaatatacccataccctggatacgctggatgaagagattgcgctggcaacgatgcccatggatttcgatatatataatttcccggtatctattcaccgtcgagccaaagaaatagttcagaagaaagaaagtccattcaaggagtggtcagaagcattacggagcacgccaggtatccttgatttttctcgtgctgccatctttgctctaatcagaacagcctccagcggaataactccattcccagatcgtttgcgtggttatatcaatgcgaccctgactgaatatatacacgataccccaagcgccgaaactctcgagaaagcagggcatatctcatccgctgagctcaccttgaattcgataaaaactgcgatcaatggtgatgaaagcaaacctaatctggaaaatctaacgactgatttccaggtagttggcgccgagttgatgaaagaagctcaaaagaaactccctgatgctaatcggttactcgctgctgaccgtggtgaatacgtcgaaggcatcagcgacccaaacgatccaaaatgggtgcacgaagacctgaccaaaaaggggcagcctgaaatttccagggttactgctggcgtgttctccattgaaggccttatggccactcctgccccaaagagagacaacgaagaggccaccagcgatgtgcagatggaagaagctatcaatgatgaaaccgcgcctgctgatgagatttcagaaagcgaaacagcagatgagacaacttcaggcgactctgaatctggtaatgaagcaaataccttaaataatgattccggtcatcataatattgaagaatcgcgcgctgattatgttcacgtcatggtggatctggaaaccatgggaaaaaaatctgatgcccctatcgtctccattggtgccgtaatattcgacccggaaacaggctttctcggcgaaacattttacaaagttgtcagcctggaatctgcggtctcgtggggggctgagattgatccatcaacggttatatggtggatgaaacaatcgtcagaagcccgctcggaaattgccaacgataacgccattcaactggatgacgccctgctccagtttagcgaattcgttttcgagaatattcccggaggctgtgaaacggcacaaatctggggtaatggcgccactttcgacaataccgttttgcgatcttcatttgaacgagcatgccttgaatgtccgtgggactaccggaacgaccgcgacgtcagaacgatggttgaacttggcaaagctattggcttcgatcctaaaacttctatcccattcgagggggaacagcataacgcgctggcggatgctcaacaccaggcccggtacgtttctgcaatatggcaacgtttgattaaaaattga

SEQ ID NO: 187499 - DNA, 297 bp, Klebsiella oxytoca
atgtcagctaacgatctggcattgaaattcagcaccgcacctgctgagcaactcatcggtgccttgcctgttcttgaggtaaaggaagccctgcatgatgaagttgaagatgagattttgagtgaagtcatgatggagcataaatttgaactggaggccacagaggagattacaaacgcgtttgctaccgcgatgaaactggcgctgacacaacctgcaaaaacagcaaaagcgacgttacgaaaggcgcttaaggaatatccaggctacgggcaggaaccaccagcagccccataa

SEQ ID NO: 187500 - DNA, 123 bp, Klebsiella oxytoca
atggtcgattttaaacgtaaacccgccagacaacaggctgttcgccttaactggattactgcaaggatccgccagctctgctatttcctcgcccaaaaaggcgacccagaggtaaatgcatga

SEQ ID NO: 187501 - DNA, 315 bp, Klebsiella oxytoca
atgtcccgcagaccgataaatgtcttttggtatgaaaatcccgaacactatgaagaattccaaaaaatcctttcggatgcttatgtcttaccctttgactatcacgactggcgtatccgcaccgatagcatggtggagcgctacgaaaacagcggtatccaggttgtgaaggtggtagccagcacttacgagttcatctcctggtgccaaacccatgaatgtgatgtcagtaccaaaagctgcaatgattacgcggtcgccgagtcgggtatccagcgcctgggcgacagagagtttgattggggagacgagtaa

SEQ ID NO: 187502 - DNA, 231 bp, Klebsiella oxytoca
atgaaaaatagcattcaggatttaatgaatcatcagttcgctatgctggaaacggtcaccgaccccaacatcaaaggcgaagtacttcaggaagagttatcgagggcaaaagcggtagtggaaattgtcggagtgatggtcggcacttaccgtgtcgcgctcgatgctcaaaaagcaatttatgacggaaccgcaggtaacgtacctaagatcatggggattgaaaaatga

SEQ ID NO: 187503 - DNA, 618 bp, Klebsiella oxytoca
atgagagagaaatacactccaacccagattctttttctggagcagaatgtaaagggagttacggctcgtgaactaactgaaatgtttaacgcctgttttgagacaagcaaaagcgtcgatgcgatccgccagtatctaagggcgtccggattgagtaagtacctactgagtgcgcctcgctatacggatgagcaactgacgtttatttatgccaataagaatctgacgatcggcgagcttacggagcggtttaaccagcgatttggaacccggaaaatgcctaagcatatcaagtatgccaaaaaggctcgtgggtggcttcgggagcctaaaaactgtagaccgaatcaggctcagcggatccgcgtaaacaaaagaaacatccggctggatgtttacgtctacgagtgcgtccatggcaagctgccaaccggctacaccgttatccatcttgacaatgatttcagtaataacagtatcgacaatttacgcgcagcaccacaggggatacgccatgccttttccatgtctggttatgcaaaaatgccgcaggttcttgctcctgcgctttatgcacaggtgatgctacgccatgcaattaaacggttgtcggtataa

SEQ ID NO: 187504 - DNA, 195 bp, Klebsiella oxytoca
gtggttccttcactggaatatgcctgcaaaagcactcaggaactggaaagccttctgctggtggacgtgcctgaaacagtatggccagttgaagtagcgatgcctctgtcagaagtagaaaacgccggggaactcccggcgcaccaccaacgctactgtcagcgtaatagaaggcactgttcgaacaaggactaa

SEQ ID NO: 187505 - DNA, 2112 bp, Klebsiella oxytoca
atggcacgtcaatatgaaatgcagatatcaaggatgacagtagacaaattgggggtgaaactatatgacagagcttatgctgttatagcagaattagtatcaaacagctatgatgccgatgctacaaaagtaacaataagagcccctatggggcaatacctagctgttaagcaagatggtgttgtgacatcaaaaaatatcaccattgaagtagaagataatggagtcggaatggctcctgatgaattacaaaatttttatttggttgtcggaaaagaaagacgaaaggatcctaaaagaggtgaaacttctaggatatttaaccgtaaggttatggggcgtaaaggtgttggaaaattagccccgtttggtgtttgtaaacgggttgaaattattagtgctggagggagtaaaattagtcatgaggggaaggagggctatgaagtcgcccatatccttttagacaaggaaaaaataatggatgacactgctgtatcttataaaccagaaacaggtagcttagatggtacattgagtgaaactacttatactaaaataatattgagtgattttgaatacagaaaaattagtgaaattaaagatttatcaaggcaactttcacaacgttttggggttaaaagtaaggactggaatgtcaaacttattgacacatccaaaacaagctcaaaccctgactatgaagttgaggtcggtgagtttactgtacctgtaatgcctaactctaaaatagagtttcgctcagcaagcggaagtattgcgactgattcttgtagcgatttaaatgattatgttgctattaatccagacggcactcgttctgcgaatgttatgccagggtttgaacatgaaggaaaagcttatccgattttgggttggattgcttacgcaaaggaaccttataaagatgagttaatggctggtgtgagaatttactgccgaggtaaatttgcggcgcaaactgctgtttttaatagaaaagctgggttcactggggaacattctatacgttcttatttggttggtgagttgcatgcggattggctagacgaaaaagaggatctgattcaaacagatagacgagatattctatggtctgatgatttagggactcaatttcaagattgggggcaggaggtaatcttacacgtaggaaaaataacccgtgatcccctgagaacaaatatgatgaaccagttctttgaattggctcatgtagaagataaggtagaacaagcatatcctggtactagtcagaaggatatgcgtacacaggcaagaaaaatagctaaattattgggtaaatcattgcggggtgatgaattacatgatccggatgcactggataatttagttcaattaagcattatgttggcgccattacaatcattagatgcaaaattaattgaagcgtcaagtaaagcagatacgccacttaatgttcttaatgatattctggcgactgctcaattagcagaaacggttagttttggtcaaaaagtcaaaaaaagacttcaaattattgaaaggcttgagaccctaaaggatgcgaaagatacagctgaggacgaactacaggatctgattgcatcggcaccttggcttgttaatcctcagtgggtgccagtaacagctaacaaagcattgtcaactttaaaaagagagttccaaaaattttacaaaaagaaaaccggagaagatatatttctcatagactttgatcgcaagaaaaaaagacctgattttgttttgtttagccaggatgggaagttgcaaatcattgaaattaagaaaccacaccatcatatatcgaatgatgaaatggatcgaattattaattactttgaaacctttgaggaatttttaaacgatgagaggcacaatgactttaagtctattgcttctgattttcacgttacacttgtaagtgatggggaacgcttgagtggtgcacgtcgtaaagcttatactgcatatattgaagaaaaacgcctgacccctgttgattgggcaggttttttgctgaggacaactcaaactcaccaagagtttttggatgaggctgagcagttgaagtcgggaattaatgagtga

SEQ ID NO: 187506 - DNA, 1086 bp, Klebsiella oxytoca
atggtgactagtttgaatgcagttgacctatttagcggtggtggggggcttaccatgggactaaaaatggccgggtttgatgtcaaagctgctgttgaactggatgcacatgcagccgctaccttccaagcaaatcatcatgatacaaagctctttgtgcaagatattcgatttgttaaaggtggcgacatccttggacttatccctgaacaaaatttggatctgttatctgcatgcccaccgtgtcaagggtttactagccttacagctaagtacaaaagggaagatcctcgcaacttattgatcaacgaaatgttgaggttagtcgaagaaacctctccttcagcagtcatgatggaaaatgttcctggcttggcctcccgtgggaaccatctactttcgcctgttattgagaggctgaaagaactaggctatgtcgtgaactatggtgttttgcaagtagccgactttggtgtacctcaattcaggaaaagatttgtattgttagctggtaaaggcttttcaatccctttacctgaagggtcgcattcaaaggaaggaaatgaaaaacctaaatgggtaacagtgaaagaagctattggcggtatgccaaaacccttaactctttcacaggccaaaaaattaggtaaatttcccttatctagttggcatattgtaagagatctttctgagctcaatataaaacgcttgcaagcggcagttccggggatgtcatgggaatgtatcccagaagaactccgtccagactgccataaaggtgactataaaggattcagtaacgtctatggacgtatggcgtgggatgatgttgctccaacgattaccggcgggtgtacaacgctaagtcgagggcgctatggccatccagaagatactcgtacaatttctgttcgtgaagctgcaaagttacagacttttcctgataactacatcttcgacacagctttgatggaaaaggtttgtgtcattataggaaatgctctcccgtgtaaatttgcagagtatttagctattcactgtaaaaattatattaatgaagcaaaagtaaatgggttgatagcttaa

SEQ ID NO: 187507 - DNA, 543 bp, Klebsiella oxytoca
atgacagcagatcaaattatcgagggaattctcggcaaagaagggggttatgttaacaacccgaatgataaaggtggccctacgcgctggggtatcacgcagaccactgcccgagcatatggctacgccggcgatatgaaggcgttaccacgggatacagccaaagccatttatctgtcgcaatactggactgaaccgaagttcgaccgcattgccgagttgtcgccagccattgcacaggaattgtgtgataccggcgtgaacatggggccacgtgtcgccagtacattcctgcagcgctggttatcggcgctgaatatgcagggcaagctctatccggacctgaagccggacggcgcgatcggcaatatcaccatcgccgccctgaaaagttatctcgctgttcgtggcaaagacggcgaagccacgctgctgaaggcgctgaattgcagccagggtgctcgctatcttgagttggccgaagcgaggccggctaacgaagcgtttctatacggctgggttaaagagcgggtgagcctatga

SEQ ID NO: 187508 - DNA, 339 bp, Klebsiella oxytoca
atgattatttttgccctgctggcgctggtggccgtgctcgttctgttgctactgcgcaaatatacccggctggagtttgttgatcatgcccggttgctgcttaaaacatggtctgtccgcctgggcgctgccggggcgttggtcggtgtatgggcccaatcatttccggacgctgcgcttcatgcctgggcgatgttgccgccggatatcaaagatattctgccgcccaacgttgtggcgatgattagcccggctctggtggttctcgccatcctctctcaatacgtcagacagccaaagctgaaagaaaaagccgatgagcagcaggaggcgcaatga

SEQ ID NO: 187509 - DNA, 276 bp, Klebsiella oxytoca
atgagccttgaatttataagcgggttggtagtcgttctgcttagcttaatcgctggcgcgtttgggttaggccatgcccgcgggaccagcaaggcgaaagccaaagccgaacagcagcgaaccgaagagaacgccgctgctaccgtcgccgcggcagaacgccgggctgatgcaacgaaaggggccagcgatgttgaagagagcgttaagcgtatgggcgatgacgatgttgatcgcgagctgcgcgaaaagtttgcccgccccggtggtcgttga

SEQ ID NO: 187510 - DNA, 198 bp, Klebsiella oxytoca
atgacgatgttgatcgcgagctgcgcgaaaagtttgcccgccccggtggtcgttgatacagggtgcctgtgggcgaaaattatctatctcactgaccgcgatattgacgtgctggataagcagacgaagcgcgacattctggcgcacaacaaagcgtggcaggcgaactgccagaaggaaaccatagcctcgcgatag

SEQ ID NO: 187511 - DNA, 384 bp, Klebsiella oxytoca
atgtttacagttaagactatcatcaacgacgtgacccatatctgcgaacagccgagcgtgacaatcgcacgcgcgggatgtgagcgtttcgacgacattctcttgcagacccatgaccactcaaaccctgatttcgctatctggctaccagcggtctattcagacccacagtgcaaagatgcgctgcaggaagaagagttaatcgtcagtgagcgcgagggtgttctggatgaagatgctattgccatcttggtagaagacttcgatagccctgagcatgcaaagcgcaaggcattcgacggcgttcgataccagttcatctatcccggcgaccaggtgtatgtgatgaactctcacggctcaaccatcgaaacggttaagtaa

SEQ ID NO: 187512 - DNA, 639 bp, Klebsiella oxytoca
atggcaacgattagggatttatcccggcagctgaagcaactgcagaagcaaatccccttcgccacagcgcaggccatgacatctgtagtgagggaaattgccgccgcgcaaaaagtcgcactgggccgaaagctggaatccccgacgcctttcacggttaatgctgtgggctcatcgggggccagaaagaataacctccgcgcgaaagtttatgtgcgtgatatcgccgctgagtatctggagccattcgagtttggcggcgagcataagctgaacagccaggcgctgctcaacccgaagaacatcaagctgaacaaatacggaaacatgccgcgcaataagctttcgcagatgaaagcgaagccgaatgtgttcgtcggtgaggtgaatggcgtcaacgctgtctggcagcgcaggaaaccgaaaaagtcgaagaagaaacgggcaaagcgttcagcgaacggtacgcgcaggccgaagcagaaacagcgttctcctaagctgctggtgaggtttggtgatgcgctgcccgtaacgccagtgctgggctacatgagccgctcacgaacgatggctgaagcattgatgcccggcgcgctgagccgcgccatcgcagaagcgatcaggacagcaaaataa

SEQ ID NO: 187513 - DNA, 273 bp, Klebsiella oxytoca
atgaccaaagagcaactcgatctcatcgtagcaatgcttgccggacaacaaacggcaaccgtgcatctgtcgctgcggttcgctgaacaggctggtatatcaaagggtttggtagccgattcttttcgtcgaacggctgagttactggagcaggacgtaatgaacagagacactattgttacagtgctgaaccagatagcaaaaggtattgacacttctacgactgagcaccagaaaaatatcgaagagataattaagaatgtcctgcattaa

SEQ ID NO: 187514 - DNA, 564 bp, Klebsiella oxytoca
atgaccacgatgaaccagagtcagtacgcacaacattcaggcgtcgaccgcaaaactattggccgctggattaaagcaggccggtttattgtcatggacggtgacctgatagatgttgaagccagcgatgccgcgttgaagaaaaaccgcgatggaaaagacccgcgggcatcaaacgcaaagaagaaaaaagccgcacccccccggaatgatggtgatgatgaaattgacgaaaccgttcgccagataatgcttacagaaggtgctgacctttccagggaagaggctgcacggatccgtgaaaattacatggctctgcaggcaaagcttcagtatgaaaaagacagcggccagacaattgaattggccatcgccgaggaggttcttttcaatgcctttcgccagcagcgtgatgcctggctgaactggccttcacgcgtggcaccgctgatagccgccgatctgaatgtgccggcggacaggatgacagaggtgctgattgaacatgtccacaaacatatctcagtcctcggagaaccagagtttaacccagcggaagattga

SEQ ID NO: 187515 - DNA, 1371 bp, Klebsiella oxytoca
atggcaaaattaaactgttttaaagcttacgatatccgcggcgaactgggtgaagaattaaacgaagatattgcctaccgtatcggacgtgcctatggcgaattcttgaaaccaaaaacgatagtcgtgggcggtgatgtccgtctgaccagcgagtccttgaagctggcactggccaacgggctgatggatgcgggaacggacgttctggacattggtctgagcggaaccgaagagatttacttcgccaccttccacttgggcgtggacggcgggattgaggtgacggccagccataacccgatgaactataatggaatgaagctggtgcgggagaatgcgaaacccatcagtggcgacaccgggctgcgcgacatccagcgtctggcggaagaaaatcagtttgcgccagtggacgcatcccgtcgcggcaccctgcgtcagatatcggtgctgcaggagtacgtggaccacctgatgggctacgtgaacctggccagcttcacccgtccactgaagctggtggtgaactccggcaacggcgctgccggtcacgtgattgatgaagtggagaaacgttttgtggcggcaggcgtgccagtgacctttatcaaggtgcatcaccaggctgacggcaatttcccgaatggaatcccgaacccgctgctgccggagtgccggcaggacaccgcggatgcggtgcgcgagcacggcgcggacatggggatcgcctttgacggtgacttcgaccgctgctttatgtttgataacgatgcagaatttatcgaaggctattatattgttggcttgctggcggaagcgttcctgcagaagcagccgggcgcccggattattcacgacccgcgcctgacgtggaatacggtggatatggtgacccgcagcggcggcacaccggtgatgtcgaaaaccgggcatgcgtttattaaagagcggatgcgtcaggaagatgcgatttacggcggggaaatgagcgcacaccactatttccgcgacttcgcctactgcgacagcgggatgatcccgtggttgctggtggcggagctactgtgtctgaagaacagcccgctgaaggcgctggtggcggaccggcaggcggcgttcccggcgtccggggaaattaaccgcaagctggagaatgcggcggcggcaattgcgcgcattcgtgaacgctatgaaccggatgccgtgaacgtggataccaccgacggcatcagtattgaatatccggagtggcgttttaacctgcgcagctcgaataccgagccggttgtgcgtcttaacgtagagtcaaaaggagacgatgaattaatgaaggctaaaacagaagaaatattagctttaatgaaatag

SEQ ID NO: 187516 - DNA, 1416 bp, Klebsiella oxytoca
atgttacttcctgtgattatggcgggtggcaccggtagccgcctgtggccgatgtcccgtgaactctaccccaaacagtttctccgactgtacgggcagaactccatgttgcaggaaaccatctcgcgcctctccggcctggatattcatgaacccatggttatctgcaatgaagagcatcgctttctagttgctgaacaactaagacagctcaacaagctgtcgaagaatatcattcttgagccggtgggccgcaacacggccccggccatcgccctcgcggcactgcaggccacgcagaatggcgatgacccgctgatgcttgtcctggcagcggaccacattatcaataatcagcaggtcttccacgacgccatccgcgttgctgagcagtatgcgcatgctgaccatctggtcaccttcggtatcgttccgaacaccccggaaactggctacggctatatccagcgcggcgatgcgctgggggaaggggagcatacgccttatcaggtagcccgcttcgtcgagaagcctgacctcgagcgtgcgcaagcctacctggcctccggggaatattactggaacagcggtatgtttatgttccgggcgaaaaagtatctctccgagctggcaaaattccgcccggatattctcgaagtctgcacggctgcggtcaatgcgggcgatagcggcagcgactttatcagcatcccgcatgaggtgttcagcacctgtcccgacgaatccgttgactatgcggtaatggaaaagaccgccgatgcggtggtggtggggctggacgcggactggagcgacgtcggctcatggtcagccctgtgggatgtcagccccaaagatgagcttggcaacgtgctgaacggcgatgcctgggtgcacaacagccagaactgctacatcaacagtgacgaaaagttggtggcggctatcggcgttgaggacttggtgatcgttagtaccaaggatgcggtgctggtgatgaataaaaaccgcgcccaggatgtgaaaaaggtcgtagagtacctgaaggccaaccagcgcagcgaatataaacgacaccgcgaaatctaccgtccttggggccgcagcgacgtggtggttcagactccgcgcttcaatgttaaccgtatcaccgtcaagccgggcggggcgttctccatgcagatgcaccaccaccgcgccgagcactgggtgatcctcgcaggcacggggcagataacggtcaacggtaagcagttcctgctgactgaaaatcagtctacctttattcccattggtgccgaacactgcctggagaatcctggacgtatcccactggaagtgttggagatccagtccggctcctatctgggcgaagacgatattatccgtattaaagaccagtatggtcgttgctaa

SEQ ID NO: 187517 - DNA, 822 bp, Klebsiella oxytoca
atgcgattagccagccgctttggccgtattaatcagatacgccgtgatcggcctttaacccatgaagaactaatgagtcatgtgcccagcgtattcgggagtgacaagcatgagtctcgttcagaccgttacacctacatccctactattaccatcctcgaaagcctgcagcgtgaaggctttgagccgttctttgcctgccagacgaaggtccgtgaccagagcaagcgggagcataccaagcatatgctgcgtctgcgtcgagccgggcaacttaccgggcatcaggtaccggaaatcatcctgctcaacagccatgacggctcctcgagctaccagatgctgccgggactatttcgcggcgtctgtaccaacggcctggtctgcggccagtcattcggagaagtgcgggtaccgcataaaggtaatgtcatcgagaaggtgattgaaggggcttacgaagtgcttggggtctttgaccaagtggatgagaaacgagatgcaatgcagtctctggcgctacctgtacccgcccgtcacgcactggcgaatgctgcactgaagtatcgatttggtgaggaccaccagccggtcacggtatcgcagttgctgactccgcgtcgtcgggaggactacagcgatgacctgtggaccgtataccagcgcgtgcaggagaacctgatgaaaggtggtctgtcagggcgaaccgcacaggggaaaaacagccgcacgcgtgctgttaccggtattgatggcgatgtgaagctcaatcgtgccctgtgggttatggcagaaaacatgctcgagtttttcgggcgttaa

SEQ ID NO: 187518 - DNA, 444 bp, Klebsiella oxytoca
atgaatacacaaaaccttgagtttgctgagcaggaagcaattactgcctcagtggtcccagacgagttacgtatcggcttctggccgcagcactttggctccatcccgcaatggataacccttgaacctcgcattttcgcctggatggatcgcttctgtgacgagtactgcggtggaatctggtccttttacacgctcagtaatggcggtgcgtttatggcccctgatgctgacggtgacgataaatggcatctgttcaacggcatgaacggcaatggtgcggaaataagcggagaggctgccggtattgcgctctgcctgatggcatatagccaccatgcctgtcgcactgaatgcgatggcatgacggatcactattaccgcctgcgggattacgctctgcagcaccctgaatcccacgccattttgcgcattattgattaa

SEQ ID NO: 187519 - DNA, 318 bp, Klebsiella oxytoca
atgagcaacaccacatggggcctgcagcgatatatcacgccgcgcctgggagcacgtctggtgcaggagggcaaccggctgcactatctggctgaccgggccagtattaccggtaaattcagtgaccccgagtgtctcaagctgaatgtagcatttccacattttatcagccagttggagtcgatgcttaccgctggtgaaatgaaccctcgccatgcccactgtgtcaccctgtaccacaacggttttacctgcgaagccgatactcttggcagttgcggctacgtatacatcgccatttaccccactcagcgttaa

SEQ ID NO: 187520 - DNA, 3513 bp, Klebsiella oxytoca
atgaaccgaagctttaatatcgtctggagcgctacacgtaatatgtttgtcgtcgcgccggaatttgccagcagtaatggacgccttctcagccatacccgaatcaacgttctggcggcatcatttttatgcgtgtctggcgtcgccctggcggaagaccgcacttttacaacttataattctggtgaatataaattaagcggaacctatctttccagcaaccacgacaccaatagcagaggagcaactgcaatctcagcatggggttggggtaatgaggaaattgttatcagtgacgagggtgtagtcacgatcaagacctcaggttcgcaaactaatggcatatacattgacggagccaatagtagcctaacatttgataatcagggttggtcaatactcaccgcgggcaatagctcatcggcggtgaccgcagtttcaggagcccagatatccctcagcggcggttcaatcgctacccaaggtgaaaattcgtttgcagtatctacttctgatgttaacagcatagccaccctcaatgatgtcacgattacgacagcaggggaccgggctggcggtctgattgcctatgatggtggaaaaattgcgctgacggacggcagtatcatcactgaaggatattcagcaaccagcgtccttgcatcttcatcagaaagcatcattgacctcgataacgtatctgtttcatcggcaggtgactggagtactgcgctatcagccaacaaaggcgctcatgttacaatgacaggcggtagcgtagccactgcaggaatagattcacatggagtgacatcctataacaacagtgtagttacgctgaaagacgtgacaattttaacctcgggtaacgattctgacggcttgtcagcaagcttcaatggctctatcaatactacaggtggcagtattacaacaacaggtgattatgctaatggtatctattctggggatgtggatagcccaatcgacctgaacagcgtcacaatatctacctcgggtgagtggtcttatggattattctcacgtggaaatatcatcatgagtgatagcagcatacagactagcggaaactactctgatggagtcagaaacagcagcaatattcttttgcaactcagcaatgtcaatatatcaactaaaggtgataacgctttgggactgtttaccaacagtggtgatattcacttagtaaacagtaaagtgaccacgtctggcgatcgtggctatggaattgcgttggataacgcggatgtccatctggataatattgacgtactgactcacggtgaatttgcttatggattagaagctgacaatacaagccaaaccaccataaataattctcacctggaaacatcaggtaacgaggctcatggaacctatgcatattttgccaaaatattacttaatgatgtcgatatattaacttcaggttctattgctgccggaatatactcccgggaaggcagttacattacggtaacgggcggaagcattaaaaccatgggaaataatgctaacggaatcgatgtttaccattcagatgttgaattaaaacagatatcgatagaaactcagggaaaatattcccatggactcagaatcagtgacaaaggaacacttacgggtgatgatctaaatgtgttcagtaatagagcatctggtgtattactggacaaaagctggaattcggcatcggcatcattaaccaatagccagataactggcgatagcgcggcctattatctggattcgtcatatgcttattacgacgatgaggtcaattcgctaaatatcaccggcggcagcgtcaccgccacagcaaaggacgggagtgcattttatgtcaatgcaggtgccgcagatattaccgttgataatctgcaaaacgtcagtgcggcaaatctgctgacggttaatgataacaactggaataacgttatattccgcgccaaaaatgacagtaccctgagcggtgccattcaggccggaaacagcaatgtcacggtcgacctggacaaaaccagccgctggaatgttcgcggtgattccgctatcggcaatcttaccaacgctggcgtcattaatctcaatactgcttcaggttctctttatgcagcgaaattaatgctcaccgacagcagcgtactcaacatacaattggatcgcagcgttggtgaaccggttattgtcacaagctacagcagccttaatggggcgttaaatattagtggcatcggtaatattaaaaattcgttaataaccacgccgtacacatttacgcttattagcgcagaaaatgaaatcaacggagacttcaataatttcaccgttgccggaatagatgcgaaagaaaccgactttttaaccatagatggacgaattaatcctgacaataaagcgcaatatgagttagtcactgcactttcctggtatgcagataaacacaaagccgcaaccgatgcgcacggaacctttacgctaagtgcagcgaacggcgaatttacagtaaataatcatctcgatgatgtcacaaatacgctggcctcaaccaatagcagcggctgggatgggaaatcactgactaaactgggcgacggtacgttgattctctccgcggccaatacctacagcggtgatactcacgttaaagagggcaccttatggctggaaaacagcggaataattggatccgctggaagtaagcaaaaaattaacatcgcatcagcagctcgtttcggcggtagcggcattgttaatggtaatgtctttaatagcggcaatcttgccatgagcaaaagcggagaggttggcaacaacctgaccatcaatggcgactataccggcaataacggcaacctctttttcaatacccggttaggtggcgataactcgttaaccgataaactgacgatctccggtgattcaaacggtaattctaccgtgtatatcactaacgtggatggcaagggtgaattgacgaataaaggtattgaattaattgatatttcaggaaattcaaccggggtcttcacccaaggaaatcaggtccaaattggcttgtatgaataccgtttgtacaaggataccggagactggtatctacgctcgcaatcaaacgcacctgtagatcctaaacctgatgacggcaatgacggcaacgtcgacccggttaaacctgatgacggcaatgacggcaacgtcgacccggttaaacctgatgacggcaacaacggcaacgtcgacccgattaagcctgatgacggcaacaacggcaatatcgacccggtgaaacccgatgagggtaaccatggcgataccatcccatcaggttcgcatcaatatcgcgctgatataggggcatatcttggtaatcagtggatagtacgcaacttgcaaatgcaaacgctttacgatcgcgaaggcagtcagcttcgtaccgctaatggcaatatgtggatgcggtttaaagctggacgtgccgattcctag

SEQ ID NO: 187521 - DNA, 636 bp, Klebsiella oxytoca
atgctcgagcgtggaatgatttttaacgctgagatggtgcgggccattctcgacggacggaagacgcagacacggcgcccagttaggtttccggtattagacaaaaaccttgggtgcgagctggctggcaatgaactggccggggagctgtcggcaggcaactatctgaacagcgcatttggtaaaccaggcgatcgaatttgggtgcgcgagacatttcgtgtccatagccgggctaccgacgtcgccacactggtatacaaagccagcgtgcgaaattactggacggagcaaacccaccgcgtgcctgtatcggtctgcaataaaccggcaacgcctgagaagtggacgccatcgctgcacatgccgcgctgggccagccgcattctgctggaaattaccggtgtgcgcgtggagcgattaaacgctatcagcgaagagaatgcagcatctgaaggcgtggcccagtttcgcggcgggttctggaagcattaccaaccgggctggactcaacaccagcttagcgccaggggctctttcgttactctctggaaatctatctacgatgaagaaagctggcagagcaacccatgggtttgggttattgagttcaaacgatgtggcagcacaaactga

SEQ ID NO: 187522 - DNA, 240 bp, Klebsiella oxytoca
atgaaaatagaatttattgataaaggtgtaatagcaaccgcgattgtcacaagtacggtattcgaattccggctgcacaatcgcgccgttgatactgctttattcctggctccttccgttcgttcaaagcgtagcggattctttattttaaaaacggttatttccgggaaaacaatccatgtattgcgtgcatacaaggctcttcagtcggaggcttcacgatgctcgagcgtggaatga

SEQ ID NO: 187523 - DNA, 1983 bp, Klebsiella oxytoca
atgcgtgaattaattgttgataattttgctggcggcggtggcgcatcgactggtattgaactggcaatagggcgcagtgttgatatcgctattaaccacgatgaaaacgccgttgccatgcatcgcactaaccatcccgacacgcttcactattgcgaaagtgtgtttgatgtatccccattagccgctaccagtagcaagcctgtcggcctggcatggttctcgcctgactgtcgtcacttttctaaagcgaaaggtgctaaaccagtagagaaagctattcgagggctggcatggatcgtcattcgttgggcgctggatgttggcccgcgagtcatgatgctggaaaacgtcaaagagtttaaaacgtggggtccgttactcgcggcagaaatgcgaccggatccggcacgcatcggtgaaactttcaatgcatttgtcgggatgcttaccaccggtatttcagcagatcatcctgcactggtggagtgttgcgagtttctggagttttcaccggatagcgagcaggccaagtgcttaattgccgggctgggttatgtcgtcgattttcgcgagctgcgcgcctgcgattatggcgcgccgaccatccgtaagcggttcttcatggtgatgcgccgggacgggaaaccgatagtctggccggaagccacgcacggggatccgaagtctgccgccgtgctggcgggccagcttgagccgtggcgtacagctgcggaatgcatagactggtcaatccccgcgccgagcatcttcggtcgcaaaaagtcactggcagagaatacgctaaaacggattgcccgcggcattcagcgctttgttatcgaaagtgcttcgccattgattgtgaagtgcaatcacacaacgacacgtggcaaatacgactgtttccggggacaggcgctggacgatccgctacagacgattacgaaaacccacggctacgcaattgcggtacctcatctgacaaaattccgaaccggagctaccgggcaggaagtcaccgatccgttgccgacggtgacggccggtaccgcaaaacgcccgggcgggaatggtcacgctctgggtattgttgaagcagagctggcgccgttcctggctggcaatggcggcagcgagtaccaggctaaaccacgcccgctcgataaacccgctcacaccatcctgaaagaatcgcgcgcctgtgtcgtcgctccggttatcgcccggcagttcggcgccagcatcggacaccgggcggatgagcccagcgcaacaatcacagctggtggcggcggtaaatcgcaactggtgacgcctactctgatccagatgggctacggcgaacgcccagggcaggagccgcgcgtattaaacctgaataacccactgggaactgtaaccgccggcggaaacaaattcgcaacggtgagcgcatttctggcaaaacactacggagggaattatcagggcgccggcgtggggctggatgagccagcgcattcagtaacgactgtcgatcaccatgcattagtcgcttctcatctggttaagctgcgcggaacctgccgcgacggacaacggactgatgtgccgatgccgactatcaccgctggcggccagcacgtcggggaagttgagaccactctcgctgttgatcattacgacgagcagcgcgcgcaacaggtgttagcgttcctgaaagagtattgcggagccgatagcactggactggtggaaatcggcggggtgacttaccgcatcgttgatatcggcatgcgcatgctgcagccgcacgagctctacctggcacagggctttccggagtggtacatcattgaccaggattaccgcggcgtgaaatacgccaaagacaaacaagtcgctaggtgcggcaacgccgtcccaccgccgtttgcagaagcgcttgtgcgggcaaatcttcctgaaatgtgtatttacggtcagcgggaggtggcatga

SEQ ID NO: 187524 - DNA, 1620 bp, Klebsiella oxytoca
atggccaaagcaccaaccaaaaaagccaaagcaaagaaaggctttgaagacacattatgggataccgcgaaccagcttcgtggcagcgttgaatcctccgaatacaagcacgtggtgctgagcctcgtgttcctcaaatttatcagcgataagtttgaagcccgccgtcagaagatgaaagacgagggacagggcgatttccttgagatggaagtcttctatcagcaggacaacatcttctatctgccggaagaggcgcgctggtcgttcatcaagcaaaatgccaagcaggatgacattgcggtacgcattgatactgcgctctcgactattgagaagcgcaacccgacgctgaaaggcgcgctgccggacaactacttcagccgccagaatctggaaaccaagaagttagcgtcgcttatcgacaccatcgacaacatcgaaacgctggcccacgaaaccgacgtcgaagcgctgtcgaaagaagacctggtcggtcgcgtgtacgaatacttcctcggcaagtttgccgccaccgagggcaaaggcggtggcgagttctatacgccaaaatgcgtggtgacgctgctgaccgaaatgctcgaaccgttccagggtaaaatttatgacccgtgctgcggctcagcggggatgtttgttcagtcggtgaagtttgtcgaaagtcatcaggggaaaagccgtgatatcgccctgtacggtcaggaactgacggcgacgacctacaagctggcgaagatgaaccttgccattcgcggcctctccgccaaccttggcgaacgcccggcggacaccttcttcagcgaccagcacccggacctgaaagccgactatattctggccaacccgccgtttaacctgaaggactggcgcaacgacgctgagctgaccaaagacccgcgctttgccggctaccgcacgccgccaaccggcaacgccaactacggctggattctgcatatgctttccaagctgtcggccaacggcaccgccggttttgtgctggcgaacggctcgatgagttccaacaccagcggcgaaggcgagatccgcgcgcagatgatcgaaaacgatctgatcgactgcatgattgccctgcccggccagctgttcttcaccacccagatcccggtgtgcctgtggtttatgaccaggtcgaaggcggccgatccggccaaaggctatcgcaaccgtcagggtgagacgctgtttatcgatgcgcgtaaccttggcaccatgatcaaccgcaccaccaaagagctgacggcggacgatatcgccaccatcgccgatacctaccatgcctggcgcagcacgccggaagagctggccgaacgcattaagcgcggcgacagcaagctggcgcagtacgaagaccaggccgggttctgcaaggttgcgacgattgcagagatgaaggctaacgactatgtgctgaccccgggccgctatgtcggtgccgccgagcaggaagacgacggcgtggcgtttgaaaccaaaatgcgcgagttgtcgcggacgttgtttgcgcagatgaagcaggcggaagaattggataaagccattcgccagaacctggaggcgctgggttatggggagtaa

SEQ ID NO: 187525 - DNA, 1167 bp, Klebsiella oxytoca
atgcgaaattacaaagtcattaccccattgttcccgacctacgaccaggcccgcgccatgatgaaagccgtgtccggctgcccggtaaaatccgtccgtaatatgatcagcgccattcaagaacagaccggcacgccacagaacccggttgactggtccgaaccggatcactggattaaggaacggctgagcggtgaggatgccaaaattgcctggcaaatctggaacatagacaaccatattctcaaccctcgccacagctacggctgctatatgtttatcaataatccgctattcgatctgatgcaaagcaacgaggatggcggctggtacccaagcgaacagggacgcttattcctcgctcacgatgaagcgacgctgcgtaaactggacgatatcgaaggcatgctacagctactagaattgctcgccgggcgcgaacaggcccggcgcgccgatctgcttccggaatggcaggctttcttgcatcagcactctaaattcgcttcccccagttcggttaaaacaacgctctacgcccggctgtataacctggttgaacgtgaactggtggcccgcgaagggatgagctacaaaattaccgataccggtagaaaatggcttggtaaagcgctgcctgaacgccgaagcgacccgcgcaaagagttgctggatgcagtaaaacgttataacgagcagcaaaaagaggttttacgcgaacagatctccactatgaatccctacaagtttgagcatctggtcggccagttgctggaagcaatgggttatgaacaggtcgaagtgaccaaagcctccggcgataaaggcgtggatgtggtcggtaaagtgcaagttggcatcaccaccattactgaagtcgtgcaggtaaagcgaatgcaaaacaccattacccgcccgtttatcgaccagctgcgcggtgcattgccctaccacaaagccattcgcggcacgctgatcaccaccggaaaatttgcggcgaaatgtgcagaagccgcactattccccggagccgcgccgattacgctaatcgacggcgatcgcctgctggagctgttgattgaaaataacgtcgggatcagacgcagtaatgccgttgaattactcgacgtggatttacagctgtttgatgagctggagattgagtag

SEQ ID NO: 187526 - DNA, 141 bp, Klebsiella oxytoca
atgtactattttcgtaaaagtagggaagacagctttatgaaattaaccgtagggaatatccgcctgtttattttattagcaactctttttttctggactgccgcgatcgggctaatttcccttattgtctcctggttttaa

SEQ ID NO: 187527 - DNA, 354 bp, Klebsiella oxytoca
atgcatccggattttcgccaactgcgcaactttgtcgcgttagttgaatacggcagttttaatcgcgcggcggaggcggtgtgcctgtcgcagtcggcgttcaggcgctggagcagagcgtcggccatccgttattcgatcgccagagcaagctaccgacgctcaccctgcacgggcaaaagctgctgcccggcccccgccgtgaggcggattccgaccgccatcggcgagtttcaccgtcttttgccgcaggcgagggtgcgctttcagattgataactggctggctctgcatcaggatctggcgactacggcgggctggcgtgtgccggtccgccgtttatctggcggataa

SEQ ID NO: 187528 - DNA, 879 bp, Klebsiella oxytoca
atggatctgcgtcgattcattacgtttaaaacgattgttgaagagggatctttcgctcaagccgcacgtaagctatgctgcactcagtcaaccgtgacctttcagattcaacagcttgaacaggaactctcttacccagtctttgaaaaagtgggcaggcggatggcgctcacaccggctggaaaattactcttaccgcaagtacgcgagctgacgcgcgtaatggaaggaatacgccagatttccaccagtgaagagatcgttgctggtgacttgcgagtgatggttggagagacattactggcatacaaaatgcccgaggttttaagactgttcaggttaaaagcgccgaaggtacgcttgtcactgcaatctgttaattgctatgtgatcagagattcgctgcttaacgataataccgatctgggcgtgttttatcgtgtgggacatgatgaagcattgcagatggagtatttcggacaacaggaattagtacttgttgcatccccgcaattcccagatttcgattttacccagattgaacagcatattccggtaagcttcattatcaatgagcctcagtgtgttttcaggcagattttcgaatccacccttcgtgaaagaaagatcacattagacaacacgattgaactgtggagtattgagagcataaaaaaatgcgtagccggaaatcttggcatttcatttttgccgcgatttagcgtgttgcgcgaactcgaatccggtgaactgaaagagcttcctttctcaactccctcattgtcaattactgctctttgcgctcaccatgctggcagaacattaagcccggcgatgaaaattttcattgactgtatgcgggaatgtctgggtcgttag

SEQ ID NO: 187529 - DNA, 588 bp, Klebsiella oxytoca
gtgacaccaacaatcattagtggttttttgacatatacattgattaccgcgttaacacccggaccgaataacatcctggcgcttagctcagtgaatcaatatggttttcggaatagccttcgtacattggcaggaatgagtgcaggttttttggcgcttatgctggtctgcggcgcctttacctttagtttgatcagcatactgccgtcagcaacccgctggctggtgtgggcaggtgctgcgtatatcctttggctcgcatggcgcattgctaacagttcatcagacagctctgagaacgcaactcaaccactcagtttttgggtgagtttctggcttcagtttgccaacgttaaaattattctttatggcattaccgccctgtctgcatttgttttgccgtatacgcagaatgttttatgggttactgccgttagtatcctacttgccatcataggttgcttagggaatctggtctgggctctggctggtcatatgttccagtcactgtttcgcaaacatggccggttagttaatcgcattctggcgcttttactggtttattgcgctgtcaggatgttcttctga

SEQ ID NO: 187530 - DNA, 219 bp, Klebsiella oxytoca
atgaaactacgtgtcacaagagcaatcggcctcagcaagttctcgccacgttgggttaaggttatctgtttacgattgactaaaaacgatattgagcgctccctcaatgcacttctggccacaattgatgaatctgagctctctccggagcaagtcaaagcattaagggaatgtgttgacagaattaacctggcaagaggaaaggggtttcaggcgtga

SEQ ID NO: 187531 - DNA, 318 bp, Klebsiella oxytoca
atggaaaaggacttaaagccagaacaaatcgaaatcgtaaaccgtattgtctttgagcagatagacaagatgcaggctagggtagccgagattgttgctgagacggagagagttgcgcatcagcagttgcaggatcacgggattgacttgacccacttttatccggctaataaagattttttgatgatgactattattcaatatttgatagatcaagtacatggtggcgatatggttcttgcccaaaagatgatcaccatggaagcaaaacgccttaatgttaacgtacatattgaggccaataaaacgaaagattaa

SEQ ID NO: 187532 - DNA, 387 bp, Klebsiella oxytoca
atgacggatagcaccattaaaatttacaacgcccgctatagtaagctgatgaagctactggattttattgccgtcaacttgttcattttcgcttatttaaaatactttttcgtcgaaccctcaacggcctctctgttcctgggcataatatattcactgatttttatcagagccaatgaacactttcagctatattctggtcaatttaaaggccagtatttaaaaaaattaactaaattgtttttcagcgtcagcataagcggcttgttatcatttttattgtttgtaagcgccgaattattactgaacaatcacgccagcacaaacgcggtgcgattagggaaggtgcgaataagcaggtcatttcttcccaagctgactcgctga

SEQ ID NO: 187533 - DNA, 339 bp, Klebsiella oxytoca; identical to SEQ ID NO: 101410

SEQ ID NO: 187534 - DNA, 270 bp, Klebsiella oxytoca; identical to SEQ ID NO: 101411

SEQ ID NO: 187535 - DNA, 693 bp, Klebsiella oxytoca
atgacaatatctgaacctgtcaggtctgttgatacacatgaactggtgcctggcgatatttatccgcatcctgctgtgggggagacttattccctgtcacaccgcgaggtctgttctctcttcagtgaccacatcatgtatttttgcagcgcgttggttattctcgtccttgttttcatcgcaggtgtcttttttcgaaaattaatgacgtcttcctcgggacgtaagcgaggcacggtgtcagttattcccgatgcaaagccagaagcgcagagcaaaccggaatatttccatctttccatatgtgtggaaggcccggccagcacggatgattctgtcctgtcctctctcgcctcccgtgttgtgcgcgaagctgaagatttgtatatccccggcgtcaatcgccgcgacagcactgacgacgtgtttgcctggtccgtgcagactcagtttccttctgacaggctctgcagtacccggcttttcccgggggcaggctggtttgaacgtccggatatcattaaacatcccgtgaagtatttctgcgtctgcctgcagtacacggctgaaacatcgccatccacactgcatgccctggtcgatgaggccgggcggcaggtggcgaagccgtatattaaaggcggacattgcctgggctctgagggctataccttctgtatcaccactgaataa

SEQ ID NO: 187536 - DNA, 612 bp, Klebsiella oxytoca
atgaaaatatcaaacatgtatgattgtgaccctgtaaatgaattcgcttatgttcgtgagaggttaaatggcatttttcttcgcctctcggaagaaccctttatccgactgagtaaaacaagaatcatgcaacgccatctctcggacatacagtggatgttgaaccacaaccattaccctacaccaggacaggtcgatttttttatcagcctgttgcgggatgataaattcagtgtggtcagagaggaagggcgatacacaaaaggtgcagcagatattcagctgatgatcgatgcactaaaggatatccgggattttttaaaactgattacccggtatgaaacagagggggatattatcaggctcacatcgtgttcagcctggaaaaatacagcgttatatctctgtcttgctgctttctttgctttgtttatagctcaggttgttatattttcaggctattcccccctggctgtttactttagtggttttgccttgttttttataacatctctggctctcgaaaatgaagtgctgatattttctttcatcggtctggttgtctttactctgtgtatccttttggcatggacaggtcattatcccggataa

SEQ ID NO: 187537 - DNA, 543 bp, Klebsiella oxytoca
atgttgaaggactatgcgtttgtgaaaacgtcgatacatacagtcggtatgaccctgaagtctccccctctggcatcgataccgggtatatccgacgcctctcaggcatgtgataaaatctctgccaggctgcgttatggcatcattccccgaccgggtgggatcaaccgtctgaatgccatattgtggcttgcaggaatgcgagaggtcgagattcatgggcagtcatcagcgacggcacatgaacttcggcggctgaatgctttgctcgggcaggtcagcggtgtgctcaaagcatgctggatttaccggggatgggaggcctcgcgtgcatcgactatagtgtccattctgctgattatccctgcattcctggtattttggctggcgctatatgtcgggggggcgattctggtctgttctgtcagtatggcgttgtttcttggtgttggcgtcgtggttaacgtatggatcaaagatcctgtggggctgttctggtcgctgtacagctatatccctttatatgccatcatctatatgtga

SEQ ID NO: 187538 - DNA, 180 bp, Klebsiella oxytoca
atgatggaaaaagaacagaaacaatacgactcacaaccggctcagtctcagaagacttctccatgtacatcacgggtcactttcagcatggaagaaaaggtactaacggctgagcaatacagagactggcaattcattggcgaaaccctcagagataaaatcagccgatacgcggaataa

SEQ ID NO: 187539 - DNA, 285 bp, Klebsiella oxytoca
atggatgaattattcaaatggctgcttgctcttgctttttcagtatatctattgctgtttgctttcagtaatgaccctgtaccagaagcgctagcacaccactggacttatgactgccacttgctggagaggaatattgataaaggtttattctctcccacgcaaaaccggcttcagtgtggtgatgtcattgaaaatgtcagtacagatgagtatgaacaggcgataagcgggaaaaagccggtcaccttacaggagttaatcgaagggatgttcagtcgttaa

SEQ ID NO: 187540 - DNA, 411 bp, Klebsiella oxytoca
atgactgactcaataaaatatctatggctgcttttgcgcgaagattcgtcatatatttttatgttgatgttgattgttggcactgccgtagtaatgtctttctttttgcagaggttgtttgtgtcatggtggggtaagtcaatcattctgataatgtgtattgtcgtcgcgattacagaagtttttggctttcttgagcctgagtcaacatataaacagattcaaaccagaaaacaggatgtcatctatacgctgaaaaactgcagaatctccgcatttgaagcgcagcaggcagggtttctggctaaagcgaaagatggctggtcttgtccggatggcgtaacacggtatatggatgtgagatacagagataaggcagaggttaataaacttagcgcggagggtaagtaa

SEQ ID NO: 187541 - DNA, 948 bp, Klebsiella oxytoca
atgattgatcattttaacattaagatcaaaaaaactctgctggcgctcctggtctgctttatcgcaattccgctgtcccgatttatttccccacaaaccattattgacggaaatcaaatttatctggcgtggctaccgctgagcttaatgtattccgtactttttatttttggccgctacgccgttgcgccattgattatcgcgtttgcgatcactaatgcctggataatcgatctgacgctaacccaggcgctgatcctgctattttgccagctcttctcggttttcttgtcctgcgcgattgttcgctttcagcttggaaggcgctggcgcgctgggctgacggcaaaacatatgggcgcaaggattttttggggcggcttttttgcaccgctccttttgaaggtcaccatgtatctggcggggcgtttttttgcttttccgttggcaatatccagctatttcggcagtatgtcggttatttacaccattatcgatatacaaagcctgattagcgccgcattaattttcacgacattcttttattatccgttgcggatgattatcagtccacgttatgcgcgagcattctggcgcaatctttgccactcatggcgggcgcgcgagcagcgggtatttacgttgtattggtttgtggccctggcggcaatattactggtgctgtgtacgccttatgattctgtttttattgccggttatttagtcccgcttattttcattttatacttcattggtattagccgcctggggcatacgctgattcgcatttcatggtccgtttcagcctttttactcgtggcgtataaccagaatttttacacggcgtacaaactgaatattcgctgtcgtttgtcctttcggtactcatttgtttcactatctgcctgttttatatggcggatatctacgctcgcagtgaaagaatga

SEQ ID NO: 187542 - DNA, 1170 bp, Klebsiella oxytoca
gtggccctcagcgacaccaaacttcgcagcatcaacggtaagccctacagcggcacgccagaagtcacagatggtgacggattaagtgtgcgcataactcccactggaacgattacgtttcaattccgctatcgttggaatgccaagcctgtgcgcctttccataggccgctatcccgcaatgactctcaaagatgcccgtgtgatagtcggcgagatgcgcgaattgtacctcaagggactaaaccctaaaaattattttgccaaagaagacggagaactgacgataaaggagtgcctggatcagtggtggaccaagtatgttgagacgctgaagcctaatactcagacgctctataagtcagttgtgtacaacaccatgtacacagaattcccggatgctccggtagtaaacattcctgtttctgcatgggtgcgtttctttgacaagcaggaaaagaagaacagcaaaaaggccagggtgcttcttctacagctacgttctgtcatgaactggtgtatcagccgccagttgatcccatcgtgcgaagtcctgaagcttagcgttaagaccattggcaaaaaacctgatgtgggtagccgtgttctgacttataccgaactggctaagatttggctagctcttgaaaacaacaagatcgttacctcaaacaaggtgcttcatcaacttctgatgctttggggggccaggttgtcagaactgcgcttggctaccgccagtgagttcaacatggacgatctgatttggacgactccatcagagcattccaagatgggtaacgtaattcgtaggcctatattcgaccaggtaaaacctttcgttgataggctgctcaatgctggaaacaatgtgctctttccaggccaggaactggacaagcctatagatcgctcgtcagctaatctctatatgaaaaaattaagggataaaattgagataccggagtggcgaacacatgacttcaggcgctcgctggtgacgaatttatcaggggaaggggttatgccccatgtcaccgaaaagatgctggggcatgaactgggaggagtgatggcggtgtataacaagcacgattggctggtggaacagaaagaagcgtatgagctgtacgccgataagattttttggcatgttaaacagctcgattaa

SEQ ID NO: 187543 - DNA, 726 bp, Klebsiella oxytoca
atgaccaataaccagtttacagatgagcaaattgctcagtggttgggtgatgcgtgcatggtgattggcgataggttcgcgactgttgacgaactgagtgcagcgaaggcaatcagggcgttagctgtggagctacaggaacgccgcaatgccgagagggacagcgagccggtggcgtggactgacgtcgaggaattaagcgacctgaaacgcgacggatatgccgcaatgctttccttggccagaaaggattgtgagcacgccgatccccgacgtcagattctgttattcacacatccagcgccagcgcgtcaacgcgaccaggtacgccgtgagcacgccgagtggtcacaggcaactttcggcaatgtcggcccggttggcccgctgaaacacttggccaaagaggctatggaggccgcagcggaaccagacgatctttcagagtgggctgacattcaattcctgatgtgggatgcccagcggcgtgccggtatcaccgacgaacagattacccaagcgatgattgaaaagctggcagtgaacaaacagcgcgaatggcctgagcctaaagatggtgagccgcgtctgcacatcaaaggacagccagtgcaggtggtactggagaaaatcgaacaatctcgtaaaaaaatcgaccgctgtgatgtttgtactgaaggtgctcgcggcgggtgtgggacatgtgcttttaacggtaatctttaa

SEQ ID NO: 187544 - DNA, 1080 bp, Klebsiella oxytoca
atgagcgaaatcggcgattatttctttgagtttccggcgtcacgtggtgttcagggaggagcaattgtcctgatgatgacagtgccagcacgaaccctggcgcgagtcctcgcaagcgataattacggtgataccttagaacgttctcagcgcgaaattaatccagcgagagcgaagaaattttatgaatacttattgaatgctcatgagaataaagagccattcattatcccgccactggtaggtaattgtaactcggagattgagtttcaggagttcggtaataccaacgttggtgttgtgcgtttccctatggatgcagaaataaaactttttgacggccagcatcgagctgctggaatcgccgagttctgccgtaccgttggcgaaccaatccacgtgccattaatgctgactcataagctttcgctgaagacgcgtcagcagttcttctccgacattaacaacaatgtttcgaaaccttctgcggctatcaatatggcctataacggtcgtgataagaacgcgcaggagatggtcagttttatcagttcacacagcgtcttttctgaaatcaccgattttgagcataacgttgttcccgcgaaaagtgataagtgggtgagcttcaaggcccttagtgatgccactgcaaaattttcaggttcatgttcgcaagatgatctggaggggttgtggaatgcctggctgatgctgactggtttagatgatattcgccgaggtacgagccaggccgaatacaaacgcgagtatatccagttccatgccgtgatgattaatgccttcggctacgcagtgcagaggttaagcgaaggtcggggagttcgcggggtcacgctgatgattgaggacctggtaatgaataccggcattgccgatcgtgaagattttttcctcatttcatcttgggatggtatttgcgccagctgcgagaaatccaggccaacggtaattgcgaatgtctcatctcagaaagctgcagcatcacgccttatcgatgccatcgtgaataaaaacttgtctgttagtagctgtaaggagtcagacaatgaccaataa

SEQ ID NO: 187545 - DNA, 129 bp, Klebsiella oxytoca
atgaactcagaatccctcagcaagcgccctcttaggaaggcgttaattctgaacggtatagcgctgatcgcaattatcgttctttcagcattgggtatctggctggttaacgaatgggtgatgttatga

SEQ ID NO: 187546 - DNA, 861 bp, Klebsiella oxytoca
atgcccagcttaggccagctctataacgataaagacgccgggttaactacccgaaaaacctataacgtccctgtcgcttccatttatgcggaggaaggctacaacgtccgcgaacttaatcaggcgcatgttgaagaattccgcgacgcattcattgccggggaatatatcccgccgctggcagtagaggttaccgaacgcggagtgaaagtgatcgacggtcaccaccgttatcacggcgccctggcagctatcgctatgggtcacgatatagtgcggcttgagtgcaaagattttgtcggtagtgaagcggataaaatcgccttcatggtcaccagctcgcaagggctggcgctaacacctcttgaacgtggcgctgcatatcatcggctgcaaaatcaggggtggagcccgtcagaaattgccggaaaggttaagcgctcagagtccgatatccttcaacatctccagcttcatgaatgcaccccgtatatcaaaaagctggtacgcgatgggtcaatgaactacgccatcgcgatcagcatttctcgtgaacatggtgtttacgctgatcgtgaagcttccaggctgatgaaaaaagcagaagcagccgggaagaagaaggtaacaaaaagcatcgccaaaccacaattcaacgcaggaaaggcgcggaagtttctggagatcatcgcgtcatgccaggagacaaccagcggcagtctgatctttgaagttccaccagccatgcaagctgaagtgctgtcgattcttcaggaattccgatacgaaacatccgtgcctgctgattgtgaacagtcaaatgatcatggcgcttcatctgaagaaagtgacgccgcatga

SEQ ID NO: 187547 - DNA, 813 bp, Klebsiella oxytoca
atgtctcaaattgaaggctctaccgtgcttgatattcgtgatcttgttgctgcaacgctgaaaactgacactgatatcccgtctgtcgtcgtgccggatggctttgatgtcaaatcgcttgaaagcctccagattgctccgtctcgcattcgtcagattaccaacctgatttctcccggttcgttgatcgcttatatccagcgattccgtgatgctcgttctgttgttttcgctgataagaccaaaacacggatcgtcgcggtgctggacttccaccagaacgccgatagcccgcactggggaacgcacaaagcggtttatgactgccctttctctgatgaatggaaagcctggtctgctgctgatgggaacaaaatggaccagattaatttcgctgagttcctggaaaacaacatccagaatgttgcgccggtcggtgataactactcgggtccgtctggtactgaactgctggaaatggttctcgcgtttcaggaaacccgtaaatctgagttcaagtcagtgaaacggctcaccgatggtacttgtcagttccagtacagcgatgagaaatccggttcaggtaacacaaaaatgccggaaaaaatcagcctggcaatttcaccattccataacggttcaccgtaccaggttgatgcccgaattcgttaccgcctgcgtgatggccagttgatcctctggtatgagctgatcgaaccgaagaaagttgttgagcatgccttccaagagattgtgaccgatatggaaaaccaactcggtgaagaactgcctatctacgaaggctccatctaa

SEQ ID NO: 187548 - DNA, 360 bp, Klebsiella oxytoca
atgtccgaaaccaaaaacaccacgccgtttagccagcagttggcgtacatcaacaaaggcaccctcgatgccgaactgaccgaagcgctggcagaggtcgtcaaagcagtgcgagaaacacggaaaaaaggcgcggtaacgttgactctgaattgttcaatgctgaacggacgggatgaaaacgtgatgaaggtgacccctaaagtgacaaggtcaattcctgagctggaacgcgccgatactattatgttctcaactcacgatggctctttgttacgcgatgatccagaccaacatcagcttgatttaaaagttatcgaccaggcaccacaaacagcgccaattaagctggctcagtaa

SEQ ID NO: 187549 - DNA, 513 bp, Klebsiella oxytoca
atggtaagcaaagatagttttcttaagaaattataccggaattccgaagcgcggctttcagatgaacaaaaaatagaagccgcaaagagagaaatgatagataaagccacgcatgactcaagtttttacgcatcggaagtaaagagtctagtttctaatgtggaaaaatggatctctgagtcatcaatacaaatagtaaaacaagagatagttgtaagtgagtttttgaaggataacatcacgccggtaagttatagagttttacaatttgctcttgtttatgaaggtttaaatttaatctttactccccaaggttgtctcagatttcaaaatagtggattaattgatatttgtgttgactccccgaacctaaccaaagtatatgaaaatatagctttgttagttgattcggaatttaagtatcagtggttcttttctgatgataaaaatacttttattgtgaatggagatacatttagggattttgtgctcaaaacaattgggattgagtga

SEQ ID NO: 187550 - DNA, 654 bp, Klebsiella oxytoca
atgatgaacatgagcgaccgtatccgccaaaggcggaaagaacttaagttgacgcagcaggcactagcggagatggctggtgtgaatcgtgtcacggttacgggatgggaaaaggacgactatcaaccgaacggcgcaaaccttcagtcactagctaaggcgcttcaatgcgacccgctctggcttgtatcaggtaaaggtgatccaaaacctaagctcaacctgaaacctgaaatatttaatgtaaaagaagttccgctaatatcgtgggtgcaagccggttcatggacaagaactgatccgggaattcgagctgacgatgcaaaggaatgggtttttacaactgcgttagtttctgatggtgcctttgctttacgggtacgtggcgattcaatgacaaacccatcaggtgcgccatcaataccagaggattcggtgatcatcgtagagccagatatcatggatattgaggctctgaatggaaaaatagttgtcgcttatcttgatggtggtcatgaagcaactttgaaaaagtttgtcgaggactggccccatagatacctggtaccactaaacccaaactacaaagccatagaatgtggtgaaaattgcacaatcgtaggtttggttaaacaagtcataatggatttctaa

SEQ ID NO: 187551 - DNA, 198 bp, Klebsiella oxytoca
atgaggaaatccgaagttattaattatttcggaggtgtctgtaaaaccgcattagctcttgggattaagcatccgtctgtatccgaatggccggaaataattcccgaagttagggcttatcaggttgaaaaaatcaccaacgggcgtttgaagtttgaccagtcgctttatcaaaattctactgattcagccgcgtaa

SEQ ID NO: 187552 - DNA, 402 bp, Klebsiella oxytoca
atggctggtgctcttgggatgacggtcactcagttcaataacaacctgtacgagaaaaacgggtgccggttctttgaggtcgcggaactggaagcaatggaagacatttcaggaacagctgaactggctgattacttcgctaaaaggcgcggcgcattgctggtggatgtacccaagctcgaagacctggatcaggtcgaacttttcaataaagccatgaagacagccgccatgcgtggtcatgtggatcaagtcatcaatcttgctctggaagatggggtgattgatgaagctgaagcggacgaaatcaggcactaccacaggaaacacctctcagcacgagaggaagaagtgaagtccattcttgctgtctttggtcgacgaaaaccaaagcgagagtaa

SEQ ID NO: 187553 - DNA, 276 bp, Klebsiella oxytoca
atgatttattcagacgttaacgaaaaatgggtcccggttccggttgagccatattccaaagcctatgaagttagcaacctcggacgggtccgaagtgttccgcgcctggctaactctgaatattttattcgacacattcacggcggttttctgaaaggccgccagcgcaaagacgggaccaaaaccgttacgttgtcggttcagcgtcagcgcactaagtttgtcatcgccgagttggtggctatggctttcggggaggttactgctaatgcttaa

SEQ ID NO: 187554 - DNA, 1527 bp, Klebsiella oxytoca
atgcttaacatccagccccgcgaaaaacagatcgtcgcgttaaacatgctgcgcagcgcctggaaacagaataactcattcatgctctacgctcctgtaggtttcggcaaaacagcaatagccgcgctcatcactgatggctttgtcagccgtgaaatgcgcgtaatgtttgtggctccgtatacggttctgctggaccagaccgcagcccgatttatggaatacggccttcctggcgaagaaatcagttatgtctggcgtgatcacccgtcatacaaccccaacgctctgatccagattgccagtgcagatacgctgattcgccgtgagttcccggacaatatcgacctgttgatcgttgatgaagcccacctgaagcgcaaaaaactgctggaggttatcgacaatctcactcgcaacacagcaacgaaggtgatcggcctttccggtacgcctttcgctaaattcctgggcaattactaccagcgtctgattaagccaacgacgatgaaggaactgatcgccattggtgcattgagcaaatatgagttctatgcaccgtcgcatcctgatctgtccaaagtggaaacgtcatacacagcaggctatggcagcgactacaaagaaaaccaactcagccaggtgatgagcgaagccaagctggtaggcgacatcgtgaaaaactggcttgagaacggcgaagaccgcccgacgatttgtttttgcgtcgatgtcgctcacgccaactttgtcacggttgaatttgccagcgctggcgtgacggttgaagttatgacggccagcacaccacacgacgaacgccagctgacgatccgccgtttcgagcagggcattaccaaaataatcatcaatgttggtgtactggtcgccgggtttgatagcgatgttcgctgcatcatcttcgccaggccgaccaaaagcgaaatgcgctggatacagacgctgggccgtggcttgcgtgccgcccctggtaaagatcactgcctcatcttcgatcacacaggcacggttaataagctgggttatcccgacgacattgaatacgactatctcccttcaacatctgatggcatggaagaagcaccgctgagagccgtgaaaaccgatgaagcggagaagttgccgaaagaatgcagccagtgccacttcgtcaaaccagccggaatctatatctgcccgaaatgcggttttaaacccctagccggggaagacgtggaaacagataaatcccgtgggctgaaaaaggtcagcaaagcggaagtcaaacacaccccagagcagaagcaatcctggtggtctcagattctgttttatcagcgaacccgcgcagctcagggacgcccggtcagtgatggctggtgcgcacatacctacaaacagaaatttggcgtatggccaagagggttacaccacaccccgcagcaaatcacacctgaagtaatgaatttcatcaaatcaaaactgatcgcctttgcgaagagaaaagagaaaggagaagccgcatga

SEQ ID NO: 187555 - DNA, 972 bp, Klebsiella oxytoca
atgaataccaaacaagctgctattggtcgctgggcggaaatctataaatactatggcctccctggcattaccgggaaaaaccatctgaaaggcgaatgccctctttgtggtcgtacagggaaattccgctgtgatgataaagacggcaccgggtcatatatctgcgtatgcggctccggtgatggatgggcgctgcttacagctaagacaggcaaagagtttaaaatactggccactgaaattgacaggctgatcgggaatacctacacctcggatcgcaccagagtaaatccggtacgtacatcgctggcgcaacaacgtgagaaagtcagccggaagtttgcaaagctcaccacgctgcgcggtacaggcgcagatagttacctcaaagggaggggcatcaactctttacctgctgagagcgtcagatactgcgacaaacagccagtagacgggaaaaaccttcaggcaatttacgcgctggcaactgatgaccgtggcgaactgtgttacttgcatcgcaccctgctggatggagaggcaaaagcgcaaacaggcggcgcagccaagaagatgatgaaacttcaggaggacagttatttagagttcgccaaatccgtagctatccgcatgttccccatatcctcaacgcttggaattgccgaagggatagaaacggctctggcctgtcatcagatcacaaagtgcaacacctgggcgacgatgaataccgccttcatgaagaaattccgtgttcctgccggggtaaagaacctcatcatttttgctgactcagacgccaacggtgcaggtcatgccgctgcttttgaatgtgctgcagcaaatctccacgctaagaacgatctggaaagtgtctccgttcgctggcctgcgcagggtgattttaacgatctgctgcttaacggctcagaagtattcgagtgggtatttcaccgggggatgaaacagtga

SEQ ID NO: 187556 - DNA, 438 bp, Klebsiella oxytoca
atgcgcaaaaaagcgctactgacgcgcggtgactatatcaagaaagctcagaccgccttcaatgcttttatccgcgaacgcgatgagggtaaaccatgcccgtcctgcggtacctatcatccgcctatggtctttggtggccagtgggattgtggtcatttcatgggggttggtgcccgtcctgaactgcgctttgaagagaagaacgcctatcggcagtgcaaagcctgtaacggtggttcaggtcgtttcgctgcgaagaatgccacggtacacgctcgctacagggaaacgctgatcgagtggtttgggttgtcgctggtggaatggctggaaggcccacacgaggcgaagcattactcaaaagaagacctggaagaaatagcggctaaataccgccgtaaaacccgcgaactgaaaaagcagagggcagcatga

SEQ ID NO: 187557 - DNA, 243 bp, Klebsiella oxytoca
atgacaagagaatacgtgaaaaaaataatttacccatgccagacggcggcaatctttcaggatgtcatctacgtcatgcgtcctgccagtgcatctgaattgcttgcagaagcagataaggcgactgagttctattcgaattacttcccattcgcgacgctggaggatatcagggaaggcattttgtatagctttggtggcctctacctgaacgatttccagcttatccgggaggctgcatga

SEQ ID NO: 187558 - DNA, 642 bp, Klebsiella oxytoca
atgaattacgatcttatctactgtgatccgccgtgggaatacggcaatcgaatcagcaacggcgcagcctgtaatcattacagcacgatgagcattgatgacctgaagtttctacctgttcgaaagctggctgctgataacgccgtactggcgatgtggtatacggggacccataaccgcgaggctgtagaactggctgaatcatggggtttccgggtcagaacaatgaaaggctttacttgggtaaaactgaatcagaacgccgctgaccgcttcaacaaggcgctaagcgccggagagctggtggacttcaatgatctgcttgagatgctggaccgtgagacgcgcatgaacggtggcaatcatacccggagcaatacagaagacgtcctgatagcgaccaggggaaccggactaacccgcgccagcgcatcggtgaaacaggtcgttcatacctgtcttggtgaacacagcgctaaaccgtgggaggtaaggaaccgactggagcaattatacggcgatgtgaaacggatcgaactatttgctcgggaagagtggaaaggatgggaccgctggggaaacgaatgtaacaacagcattgaattgatcacgggccagataaaaggggtgaatatccaatga

SEQ ID NO: 187559 - DNA, 579 bp, Klebsiella oxytoca
atgattaatccgtctgaaattgggaaaaaaggtgaaatggttcgcctccgcactctggaaagcatctggatacagggaaagctgcgtatgtggggccgctggtcgtatatcggcggtggtagcggcggcaatatgtttaaccatttactggcatccgggaaggtaactaaaacggctatcaatgaggcactacgccgaatgaagaagtctggcctaaccaaaccagagcttgaggcgttctttaaagagattctcagcagtaaaaacaaaagcggtcttgcgttctgctctgacgaagaggggttaaaaattgatggtgttattgccggggttctcatgaatgaggactatcggtcactctatggtgtgattgttgatcgccatcgcttacgcaaaagtaaacttcagatggctaaagagctgctggaaaaacatcctaactggacactgattacttgccgcagaagaattgatacatgggtaagtttggcagaatcgatactttacgcaccattatgtgacgcgttcggcacaaatagcgacagattttacttgcaaagtgagcaggaaagtgcttga

SEQ ID NO: 187560 - DNA, 540 bp, Klebsiella oxytoca; identical to SEQ ID NO: 106771

SEQ ID NO: 187561 - DNA, 255 bp, Klebsiella oxytoca
atgcggaccctcagaaaagcaaaaacccgccaaatggcgggtttcaaaaagcaccagctaggatcatgctgccttgcgacgacgtggcttaccctgctgttctttacccgagacaatagcatgggtaaacgcattaggcgcagccttcatcagcacttcaacagcagcacccattcctgcgaatgctttcatagtgtcgaattttacttctggcttggttgctttttgagctttcataaatacctcggagactga

SEQ ID NO: 187562 - DNA, 396 bp, Klebsiella oxytoca
atgtccgatcctgtttctgccacaacgatagcggctggtggtctgttcggcgccagtctattcggcctggcaactggcattgattacggcgtggtgtttggtgcgtttgctggtgcggtgttctatgtcgcaacggcggttaatattagccgtattaagctggtgggctacttcatcacgtcattcatcttcggcgttatcggcgcgcctctcctcggttcatacttctcaaaatggacggggtatagcgacaggccacttgatgcgctcggcgccgtaatcgttgccgccatagctattaagctgctgactttcgtaaacagccaggacctgggtagcctgtttgggattctctctcgcttacgtggaggagggacaagcaatggtaacaagtga

SEQ ID NO: 187563 - DNA, 282 bp, Klebsiella oxytoca
atggtaacaagtgatccgagcgcaatcatcaatgcggtgacatgcgctgtaattgttgttgcgctgatgttctaccggcgcgacgggtcaagacatcgccccatgatatcgctgatggcttacttcactgtgctggtttatgccagcatccctttccgtttcctgtttggcctgtacgagtcatcacactggctggtggtactagcgaacattcttatctgcggcgcggttctctggttcagggggaatgtggcgcgtctggttgatgcactgaggcactga

SEQ ID NO: 187564 - DNA, 630 bp, Klebsiella oxytoca
atgaacaaatcacaattccagaaggcggctggtataagcgccgggttagctgcgcgctggtttccgcacattgatgctgcgatgaaagaattcggcatcactgctccactcgaccaggcgatgttcatcgcgcagatggggcatgaatccgatggttatacaacgttggtggaaagcctgaactatgccgccgacagacttgttcctacgttcggcaaacaccgtatcaccgcccagcaggccgcagcactcggcagaacggcaacacaaccagcaaatcagcgagctatcgctaacctggtgtatgggggcgagtggggtaaaaagaacctcggaaatcaggttgccggtgatggctggaaatatcgcggtcgcggcctgaaacaagttacgggcttgagcaactatcgcagctgcggacaggcgctgaagcttgaccttgttacccagcctgagctgctggagcgagatgattacgctgcacgttcggccgcatggttttatgtctcccacggttgcctgcttcattccggtgatgttgagcgcgtaacgctgcttatcaatggtggccgcagtggtctggataaacgccgagcgctgtttaaccaggctaaatcagtactggtgtga

SEQ ID NO: 187565 - DNA, 558 bp, Klebsiella oxytoca
atgaaatatacacagcaagaaaaacttcaaaccttgatgctttgtgaaatcttcaaagcattaaaaatcaaagactcttttgacccagatttaatctccaaagccgtacagtccgatcagtattgggttctggactgggaatacccggacttagattctcacgaagataccccagaagaagtcacgttatttactgacaccttcgatatgtatgaaatcctcaattatacatacgataactttaatgaggctgacaaggcggaggttgctgcttcgatcaggtattttaatggtaaaaactctctatccttcccaggatttgatggaaacaatgaaactaaatatataaccatcgggcgtcttttaaaatccatggggcgctttaatggaagtgatgatttaataaaaaactctcatatgccttcagttggaatttacaaacgaatgctggatgtattccttgatgctcgagccaacaattgggtgcatggagcaggaatatcaaagcaatcttttattgatacactaaatgctcgagttcacccggacaatcgttaa

SEQ ID NO: 187566 - DNA, 774 bp, Klebsiella oxytoca
atgaaattaaatagccgagcgcaatctgcacagaatccgcacaataatccccctatcgtcctggtccacggcctttttggcagcctggataatcttgggatcctcgcccgcgatctggttcacgatcgcgatattttacaggtcgacatgcgaaaccacggtctttcgccgcgctcgccggaaatgacctattccgcgatggcccaggatctgcttgatactctcaatgaatcacagattgagaaagctacctttattggtcactccatgggcggtaaagcggtgatggcgctgagcgcgctggcgccggagcgcatcgcgggcctggtcgccattgatatcgccccggtggattatcacgttcgccgtcatgatgaaatcttcgccgccatcaacgccgtcaccgacgcgggagccgcaacgcgtcaacaggcggcggcagtcatgcgtcagcaccttaacgaagagggcgtaattcagtttctgctgaagtccttcgtagacggccagtggcggtttaacgtaccggtgctgtgggagcagtacgataatatcgtcggctggcaaaccgttccgccctggccgcatccggcgctgtttatcccgggcggcaactccccctacgtcaccgatgcctaccgcgaaactttattagatcagtttccccaggcgcgcgcgcacgttatcgccggcgccgggcactgggtgcatgcagaaaaaccggaggccgttatccgcgcgatccgtcgttatttgacctctaccgccgcgtaa

SEQ ID NO: 187567 - DNA, 435 bp, Klebsiella oxytoca
atggaaaataatttggaaaacctgaccattggcgtttttgccaaggcggccggggtcaacgtggagacaatccgcttctatcagcgcaagggcctgttgccggaaccggacaagccttacggcagcatccgccgctatggggaggcggacgtggttcgggtgaaattcgtgaaatcggcacagcggctggggttcagtctggacgagattgccgagctgttgcggctcgacgatggcacccactgcgaggaggccagcagcctggccgaacacaagctcaaggacgtgcgcgagaagatggccgacttggcgcgcatggaaaccgtgctgtctgaactcgtgtgcgcctgccatgcacgaaaggggaatgtttcctgcccgttgatcgcgtcactacagggcgaagcaggcctggcaaggtcagctatgccttag

SEQ ID NO: 187568 - DNA, 351 bp, Klebsiella oxytoca; identical to SEQ ID NO: 10325

SEQ ID NO: 187569 - DNA, 276 bp, Klebsiella oxytoca; identical to SEQ ID NO: 10326

SEQ ID NO: 187570 - DNA, 423 bp, Klebsiella oxytoca; identical to SEQ ID NO: 10327

SEQ ID NO: 187571 - DNA, 363 bp, Klebsiella oxytoca; identical to SEQ ID NO: 39670

SEQ ID NO: 187572 - DNA, 237 bp, Klebsiella oxytoca; identical to SEQ ID NO: 10330

SEQ ID NO: 187573 - DNA, 396 bp, Klebsiella oxytoca
atgacgagttcgcagcccgccggatggacggcggccgagttggcgcaggcggcggcgcgcggacagcttgacctgcattaccagccgctggtcgatctgcgcgatcaccggatcgctggcgcggaagcgttgatgcgctggcggcatccgaggcttggcctgttgccgcccggccagttcctgccgctggccgagtcgttcggcctgatgccggaaataggcgcgtgggtgctgggcgaggcctgtcgccagatgcacaagtggcaaggaccggcatggcaaccgttccgtcttgccgtcaatgtgtccgccagccaggttgggccaacgttcgacgacgaggtaaagcgggtgctggccgatatggccctgcccgccgagcttctggagatctaa

SEQ ID NO: 187574 - DNA, 522 bp, Klebsiella oxytoca
gtgcgcttcgccgccgacgacttcggcaccggctattcctgcctgcaacatctgaaatgctgccccatcaccacattgaaaatcgaccaatcctttgtcgccaggctcccggatgatgcccgtgaccaaactatcgtgcgggcggtgatccagctcgcgcacgggctgggcatggaggtggtagccgagggtgtggaaacacccgactgccttgcgtggttgcggcaggcgggttgcgacacggtgcagggtttcctgttcgccaggccgatgccggcggcggccttcgtcggcttcgtcaaccaatggaggaacaccaccatgaacgccaatgaaccgagcaccagttgctgcgtgtgctgcaaggaaatcccgctcgatgccgccttcacgccggaaggggccgagtacgtggagcatttctgcgggctggagtgctatcagcgcttccaggcgcgggccagcactgcgaccgaaaccagcgtcaaaccggacgcttgtgattcgccgccgtcaggttga

SEQ ID NO: 187575 - DNA, 561 bp, Klebsiella oxytoca
atgactggacagcgcattgggtatatcagggtcagcaccttcgaccagaacccggaacggcaactggaaggcgtcaaggttgatcgcgcttttagcgacaaggcatccggcaaggatgtcaagcgtccgcaactggaagcgctgataagcttcgcccgcaccggcgacaccgtggtggtgcatagcatggatcgcctggcgcgcaatctcgatgatttgcgccggatcgtgcaaacgctgacacaacgcggcgtgcatatcgaattcgtcaaggaacacctcagttttactggcgaagactctccgatggcgaacctgatgctctcggtgatgggcgcgttcgccgagttcgagcgcgccctgatccgcgagcgtcagcgcgagggtattgcgctcgccaagcaacgcggggcttaccgtggcaggaagaaatccctgtcgtctgagcgtattgccgaactgcgccaacgtgtcgaggctggcgagcaaaaggccaagcttgctcgtgaattcggaatcagtcgcgaaaccctgtatcaatacttgagaacggatcagtaa

SEQ ID NO: 187576 - DNA, 2967 bp, Klebsiella oxytoca
atgccacgtcgttccatcctgtccgccgccgagcgggaaagcctgctggcgttgccggactccaaggacgacctgatccgacattacacattcaacgataccgacctctcgatcatccgacagcggcgcgggccagccaatcggctgggcttcgcggtgcagctctgttacctgcgctttcccggcgtcatcctgggcgtcgatgaactaccgttcccgcccttgttgaagctggtcgccgaccagctcaaggtcggcgtcgaaagctggaacgagtacggccagcgggagcagacccggcgcgagcacctgagcgagctgcaaaccgtgttcggtttccggcccttcaccatgagccattaccggcaggccgtccagatgctgaccgagctggcgatgcaaaccgacaaaggcatcgtgctggccagcgccttgatcgggcacctgcggcggcagtcggtcattctgcccgccctcaacgccgtcgagcgggcgagtgccgaggcgatcacccgtgctaaccggcgcatctacgacgccttggccgaaccactggcggacgcgcatcgccgccgcctcgacgatctgctcaagcgccgggacaacggcaagacgacctggttggcttggttgcgccagtctccggccaagccaaattcgcggcatatgctggaacacatcgaacgcctcaaggcatggcaggcactcgatctgcctaccggcatcgagcggctggttcaccagaaccgcctgctcaagattgcccgcgagggcggccagatgacacccgccgacctggccaaattcgagccgcaacggcgctacgccactctcgtggcgctggccaccgagggcatggccaccgtcaccgacgaaatcatcgacctgcacgaccgcatcctgggtaagctgtttaacgctgccaagaataagcatcagcagcagttccaggcgtcaggcaaggccatcaacgccaaggtacgtctgtacgggcgcatcggtcaggcgctgatcgacgccaagcaatcaggccgcgatgcgtttgccgccatcgaggccgtcatgtcctgggattcctttgccgagagcgtcaccgaggcgcagaagctcgcgcaacccgatgacttcgatttcctgcatcgcatcggcgagagctacgccaccctgcgccgctatgcaccggaattccttgccgtgctcaagctgcgggccgcgcccgccgccaaaaacgtgcttgatgccattgaggtgctgcgcggcatgaacaccgacaacgcccgcaagctgccagccgatgcaccgaccggcttcatcaagccgcgctggcagaaactggtgatgaccgacgccggcatcgaccggcgctactacgaactgtgcgcgctgtccgagttgaagaactccctgcgctcgggcgacatctgggtgcagggttcacgccagttcaaggacttcgaggactacctggtaccgcccgagaagttcaccagcctcaagcagtccagcgaattgccgctggccgtggccaccgactgcgaacaatatctgcatgagcggctgacgctgctggaagcacaacttgccaccgtcaaccacatggcggcagccaacgacctgccggatgccatcatcaccgagtcgggcttgaagatcacgccgctggatgcggcggtgcccgacaccgcgcaggcgctgatagaccagacagccatggtcctgccgcacgtcaagatcaccgaactgctgctcgaagtcgatgagtggacgggcttcacccggcacttcacgcacttgaaatcgggcgatctggccaaggacaagaacctgttgttgaccacgatcctggccgacgcgatcaacctgggcctgaccaagatggccgagtcctgccccggcacgacctacgcgaagctcgcttggctgcaagcctggcatacccgcgacgaaacgtactcgacagcgttggctgaactggtcaacgctcagtttcggcatccctttgccgggcactggggcgatggcaccacatcatcatcggacggacagaatttccgaaccgctagcaaggcaaagagcacggggcacatcaacccaaaatatggcagcagcccaggacggactttctacacccacatctccgaccaatacgcgccattccacaccaaggtggtcaatgtcggcctgcgcgactcaacctacgtgctcgacggcctgctgtaccacgaatccgacctgcggatcgaggagcactacaccgacacggcgggcttcaccgatcacgtcttcgccctgatgcacctcttgggcttccgcttcgcgccgcgcatccgcgacctgggcgacaccaagctctacatcccgaagggcgatgccgcctatgacgcgctcaagccgatgatcggcggcacgctcaacatcaagcacgtccgcgcccattgggacgaaatcctgcggctggccacctcgatcaagcagggcacggtgacggcctcgctgatgctcaggaaactcggcagctacccgcgccagaacggcttggccgtcgcgctgcgcgagttgggccgcatcgagcgcacgctgttcatcctcgactggctgcaaagcgtcgagctacgccgccgcgtgcatgccgggctgaacaagggcgaggcgcgcaatgcgctggcccgtgccgtgttcttcaaccgccttggtgaaatccgtgaccgcagtttcgagcagcagcgctaccgggccagcggcctcaacctggtgacggcggccatcgtgctgtggaacacggtctacctggagcgtgcggcgcatgcgttgcgcggcaatggtcatgccgtcgatgactcgctattgcagtacctgtcgccactcggctgggagcacatcaacctgaccggtgattacctatggcgcagcagcgccaagatcggcgcggggaagttcaggccgctacggcctctgcaaccggcttag

SEQ ID NO: 187577 - DNA, 135 bp, Klebsiella oxytoca
atgaccaaaaaaacattgtgtatggactctttcattattattcatttcgcttataaaaaaaacgctcccggacgggagcgtaagccagtgacttcggcgtcaaatgagggtctgacaagtggagctgcgggttaa

SEQ ID NO: 187578 - DNA, 843 bp, Klebsiella oxytoca
atgagttattaccatattgttgttgaaaccattgacagggatgcaaataaaagatttataaaactaatagagtatgatagaagagaccttgaagaaattaagtctgaagtaataaccccatattctaaaaaagaagaggtttatattgatggtgcatatttaaagcctgctaatattcgctcacttaaaatcaaaaaatcagaaataagttctgcggaactgaccacgaaagcaaataatgaaattccagaaggtttcattacttttattaccaatgaaaatgtaatttcaggtgatggttatactacagatataactagggatttaatcagggaagtcactgaaaaaaaatctatttcttccagagaagttgctactcctttgagcctccatgctgacaacaaaaaggttttcgtggtacacggacaggataatgcaattaagtctgagatggctaggttccttgataaagcgggtctggagcccatcatactgcacgagcaggctagttcaagcaacacaataattgagaaaatagaagcacatagtgatattggttatgcggtagtgctctatacaccctgcgatataggggcaaaaaaagtagataaccctgaacttaaatcaagagcaaggcagaacgtagtatttgagcatggttattttattggccgcttaggtaggtccagagtttctgctttgctagtggaaggtgtagaagcgcctaatgatattagcggtgttgtatatattgacttagacacccgaggcgcatggaaacttgatctggttaaagagttgaaagccgcaggatacgatatcaaccctaaagcatttatgtag

SEQ ID NO: 187579 - DNA, 855 bp, Klebsiella oxytoca
atgctcacgcaacaggagtttggcgcattgagtgcatataggcaattctgtcttgtaaatcatctgacactgtccgagcacggtctttattgcccctgcgtgggcagtgccaccgataatcttgtcatctcctcctcgggtggtgtaaccggtgattttattgttcctatggaaatggcgttaaaccgctttaaatcggagttttcactcgcccgccatctctattttgattacctttatcctcaggatacggatgctatcaaagaagaatgccattttctggagttacataatgacgagatcttaggcattgatattgagaagatcagaacggcatttcgtctctgctttggtattctcgataagattgcggtatgtatctgtgaacttcacaaagtttatccacctgcaaagaagggtgggttacagaaaaatatctattttcaaagtttctggcagttagacgttgataacagaagacaacggtttgaagatataaagtcacctggacttttagcattgtacagcattgctactgacctgaataaaaataaaggtggcgaattggctttttataaagagtggcgcaatggtctagaacataaatttttggtggtacacaaaagtgataaagcagaagatctttaccaatcttataaattgattaaagatattctttttatcaaagaggatgagtttattcaccatttcggtcaattgattcagataacccgttcagcaatattttcatttgcttttatggttagacatgaaggtaagaaacaaaaaaaagagaatattccttatattaccaatgaactgcatatgaaaaagtattcgtcagaacctaagtaa

SEQ ID NO: 187580 - DNA, 243 bp, Klebsiella oxytoca
atgaaaattaactttcataaatatcctgccgtcgattttttagtgagattactgctgacaataatcattatctcccctgtgctgtatttctcatgggatgccgtcagagggacgtcaggtagtgattatattgagagtgtggtttttattctcatggtcggttttttctggctggtgagttacctgtttttttctgctctggcgggactgataaaaaccagtcgtaaggagaaaaaaagatga

SEQ ID NO: 187581 - DNA, 612 bp, Klebsiella oxytoca
atgaacagactggtcaggtccaccatttttttgttttttattctaataatgccattttcaaacgccgcaagcagagaggaactcgagaagctgtattcaatgcagatgcccggcactgtcattcagtgtaagagaacagatgaaacgttttttacaaaaataagaatgatttcccggtatacggttacggagcaaagtgaaaataaaacaaaaatggatgggtgggttgccatgtacgccaccggtctgaaagcgttacgatttgaagctgaatttaaagctacccggacaatgctggatgctcgtgatatgtgggaggtcgaccccgactcactggttatgaaagtatcaggtgaggatgcaaaacgctttaaaaataagggaggggttgattttttcagggataatagcaggttaaactatgacgatcactctgatattcgatttactacctatcccgattatattatcggggaggatgaccccggattctttacatcaaaaggcgcagaggaatgtaccactcgctttgctgacagttttcccgcggggaaagccgggctgaaggggaaggaggataacagtaataaggaacacaaccatgaaaattaa

SEQ ID NO: 187582 - DNA, 300 bp, Klebsiella oxytoca
atgaaatcagatgaggcgagctggtttaaacatgctcttaatttgtctgcagcaatcatttttgcaggattcctgttttatcctgtttacacgaattacagagataacaaaatggcgactgaacaacagttgctgaaaatttctcaaggaacaccctgtgcgggagaggcttttcggaaggtgcttcttaataattcggagacgttaacccttcgctcagcgaataaaattgcctcagagtgtgacgagagggataagcaacttcaggtattaagtaaaacacgctccgatgaggggtga

SEQ ID NO: 187583 - DNA, 435 bp, Klebsiella oxytoca
atgacatcacaggaactgtatgaccacgcggtgtcactactggcaaggcgggattacgcatccggtgagttggcccggacactgagtaagatgacggaaaacagagaaaagatcgacaaggcgttgtcgaggctggttgagtgtggttatctggatgataaccgactgataacgcacatgattgataaacatgttcgaaaaaaacatggcccggccagaatcaaacaggagatcaggcaaaaaggtttttctccggagttggtcgagcagatgctggagaaagtggatgtggactggtatgccatggcaagggaactgaaagtcagtaaatttggtgatgcggtggcatcagaagccaaagaaaaaaacaaacagatccgctacctccagtacaaggggttttcgatggacatgatatttgaggcgttaagctga

SEQ ID NO: 187584 - DNA, 1395 bp, Klebsiella oxytoca
atggcaccgttaacaaaaaaacaaaccgcacagctttcagagatgagtcatgacgtgctggtcaatattatttatgacctgatacaggataataagcaggccaggaccacactggtgaatgggtatctgctatcggcagcagaggtacttaaagccgtcgagaaggagtatgccagacgagccaaaagcaaacgtttttatgattactatgatgccgatgccttttttgacgagctgacacgcagtatagcgaccccccttgtgggtatcgcccacgagctccccgagcaagcggaaagtctgagcgtaaaaatgatgcttgagttcgaaaaattcaccgggaacgtggacacttccagcggaagctggatgagctactataccattctgttggatgcgtggatgaaatcactggaagcacaaaaaaacaacgatccagtatccattgctaaaaaaatattcaccgttgttgaaagagaattctattttggaattgagatatttaaaaaataccggacattactcggcacggatattttacgtgtaatccgtgatatgtattatcaaaaacaatccctccgggaagctcttggtctcagcatgataataaaagaccttgattttctgacgatggcgtttaaaaacgatgaattttgccattccacccattattttgattatgtcagattacttatggaagacctgcggtccgacgatgcactcgctgtattaaacagccagaggattgacgatgaggagatcacagataacataatatggaatgaactcttcattcaggccctgattgaagaagggagaaaagaggaagcgaaagcccactgtattacagcattcacttttcaatgcgatacacgtttttatcatctgtacacaaaagccgctgaaaaagatgtcgatcacagccctgcattcctgaaaatagcaaaagatacagggttagcgccgtatgtctgctttgcgtcagacatcgaacggtatgatttaatcgacgcctgtattatggccatgccaaaaaacaacctcaccgactcgctggcttatatcacccattcatttttacggacattatccagcaccctgtataaacacggctatgcgcatacggcgaccctgttgcgtcgctttttggtggaggacaacattcagcaatcaaaaagcaagtattacagctatgccgcctcagacatgaaaaaagccatcgattacggcgaaggtctggaagattgccctcagcttccggaaacagaggactacctcagaacgctctacgaacaacataaacgtaaaaccgcactctggccgttgatggcagataaaatcaaaggattatcagtaggaaaggacggtatccgttataacggagatgcctcatga

SEQ ID NO: 187585 - DNA, 585 bp, Klebsiella oxytoca
atgtcacgagtttttgcttactgccgtgtatccaccctggaacagaccactgaaaaccagcgccgggaaattgaagccgccggttttgccgtcagacctcagcgactggtcgaagaacatatcagcggttcagtggccgccagcgaacgccccggtttcgccagactacttgaccgtatggaaaatggcgacgtactgattgtcaccaaacttgaccgtctgggacgcaatgcgatggacgtacgaaagaccgtggaacagctggcaaagtcagacattcgggttcactgcctggcgctgggcggtgttgatcttaccagcccggcggggaaaatgaccatgcaggtgatttcggcggtggccgaattcgaacgtgacttgcttcttgaacgtactcattctggtattgccagggcaaaggcagcaggaaaacgcttcgggcgtccacctgcattgaatgaagaacaacggcaggcggtgatcatccgtctgaaagccggagacagcatcagtgctgttgcccgtcagttcagtacgacgcggcaaactattcacagaataaaggcggcaagttcatcctgttaa

SEQ ID NO: 187586 - DNA, 597 bp, Klebsiella oxytoca
atgaatcccgattacttcggtggccgttcgctggccgatactctgtcaacactggtgcatgaaatggtgcacgtgtggcagcattacgcccccgttaaaaaatgccggggcggctatcatgatcgtgtatggggcgcgaagatggaggaagtcgggcttatgccatcaaataccggcttacctggcgggaaaaagaacgggcagcagatgacgcactacattatccgtggtggccgctttcagaaagccgtgtatgacctgcttaaaaatggcttctctatctcctggtatgaccgctggtctgacggagcaatcgttacctcaaagattaacagcgatatcctcgatgactggctggccgtcaccgatgaaaacgatactgaccttatcaatcggctatcactgaccgtcagcaaatcccgcccggaactcattccagacgatgacgatctcagcgtaatgatcaaaccgccagtaaagggtactggcacccgcatgaaatttacctgcccggaatgtgggctgaacgcatgggcgaaaccctccgctgtattgctttgcggtgagtgtcgatgtgagcttatggcggcagaataa

SEQ ID NO: 187587 - DNA, 648 bp, Klebsiella oxytoca
atgaccgctgttatcgcgctggctaacgggaaaggtggggtgaaaaagtcctcgatgtcacgggctatcgccaccgagtatacaaaggcaggatggggggttcttgggctggatatggatatcgatcaggggtctttcctggactgggggcaacgtaggttgcggaatggttttgaacctccggtgacaattcagggatgcggaacggtttcacaggcgaagaaacagattgaatccgggcaatgggatttgattgtcatcgacagtgcggcgtatgcgacgaaatcgttactcagcctgattgatattgtcgatttgctggtactgccgacagggtttagcgtggacgatctacgaacgaccgttacgaccgtaaacgcgctgcgtaacaaaggacatttgacagataaaatggcggtggtgtttgcgggagtaagtgaaagtgagagtgaatatcgcgcggcgctggaatacctgcaaccctgcggcgttcccgttattccgggcgctattccttttctgacatcgttcagccaggcgcaggataaagggcttgctcttacggagtcgcctttccctggcccacggcagaaagctgatgatgttgtgcagggtgtgatcgaccgactgacaacgcttacgcagtag

SEQ ID NO: 187588 - DNA, 234 bp, Klebsiella oxytoca
atggcgaacgtcccagccaaaccgcgcaataccaaaggtgagccgccaagccaggcggatacggagcacggctttaatcctacccggaaaagtgctgatggccgtaaggcacagcttaacttatacattgatatggagctgaaacgtgagttccgctccattgctgcggccaacgatatgaaacatggggagctgttcgaggcgtaccaggaattctggaaaaaacatcattaa

SEQ ID NO: 187589 - DNA, 1278 bp, Klebsiella oxytoca
atgagtgagcagagctatctggaaaagctactggatggggctgaggttgagtggttgcctctcggtcagattgcgaaaaagatttattctggcggtactcccgatacaaaaaaaaatgaatactgggaaaatggtgatattccgtggatgagttctggcgaagtgaacttaaaaatagtatatgaaacagaaaagtttattactgagacaggactaaaaaactccagtgcaaaatttgtacccaaaaactccattgttatggcattggcggggcaaggtaaaactcgcggaaaagttgcaagaacaaggatagacttaactacaaatcaatctcttgcggcaataactttagatgaaaaaactggttgctctgactacatattccactttctagaaactcagtatgaggcattgcgccaattatcatcaggaaacagtggtcgtggtggattgaacttacaaatgatttcggcatacaaggtccccatcccgtgccccaacaacccagagaaatcgctggctatccagtctgaaatcgtgcggattctggataaatttaccacccttaccgctgagcttaccgctgagcttactgcacgaaaaaaacagtacaactactatcgtgaccagttgctgagttttgagggaggtgaggttgagtggaagacgctgggtgatgtaacaaaaaaatggtattcaggtggcactcctactgccggaaatccagaatattacgatggtggtgacattccatggttaagaactcaggaagttaagttttctgatatttgcgaaacagaagttaagataacggcagaagcgttgaaaaaaacatcggctaagtggattccaaaaaattgtgtgatagttgcaatttcaggtgcgactgccggacggtcagctattaataaaatagcattgacgactaatcagcactgtggctgcctagaaatagacagtgaaaaggctttataccgttatgtattccactgggttagtttcaattatgaaaatattaaagcgctaggacagggagcccgaggagaccttaactccacaatcataaaaaatttcaaattgccgattccctatgctaacgagcctgaaaaatctttagcagagcaagccagaattgtggctattctagacaaattcgatagcctgaccaactcccttactgaaggcttaccccgtgaaatcgagcttcgccaacaacagtacgaatactaccgggacttgctgttcagcttcccaaagcctgaagccgtaacagactga

SEQ ID NO: 187590 - DNA, 474 bp, Klebsiella oxytoca
atgaaatttcgatctcgttttcttgtgtttctgcccctgctttttcccgccctttgcctggctgacttttctggccgtgttgttagggtcgtcgatgttgatactgtccaggtactcaccgatggcaaaatgatgaaagttcgccttaacggtatcgatgccccggaatcggggcaaccgttcggccagcgctcgaagcaaaacctgttaaagctggccgtccagaaacagacggaggtcatagccaacaatacagatcgttatggccgctggctgggaacattgatgattaacggtatcaatatcaacgcagagcaggttaaagcgggtatggcgtggacttatcgctatcatggccgtgccagtgacgaaacaatgctacgccttgaagaagaagccaggcggcatagaatcgggctgtggtcgtcatctgaaccagtggagccgtggaaatggcgcaaacagaataaatag

SEQ ID NO: 187591 - DNA, 756 bp, Klebsiella oxytoca
atgcttattcataacgttacagaaaggaaagaagccgcaaacagaaaaatgcttgcattgctgacattccttaaagaagaaacatactccgactttaaaacgctgaaaaaagttgttgggttcaagggtaaaagtcaccgcccaacgtatgcgctactgaataaagcggttgcattggggtttctgataaaacatgaatacccggtaatagccggaaaaaaatcactatggggtatcaccatgcaaggtctggcgatggtggttaaacctgatgataaagtattccccggttattttgagccggggaaactcaaatactggacgctggaacaccgactcctgaatcatcgggtcagaattgcactggaagagaaaggcgggcaaggctggcttaatggtgatcggggggagtttattgcgcgttatccaggagttcgccatcgtcctgacgggattatcacgttagatagcggcgcaatcgtcgccgtcgaaactgagcgctcaatgaaaacccgcgcacgctatatcaacataatcaacagccatctggcggccagcgatgccggacgctggcactacgctatgtatgtcatgccggatgaaaaaaccaaaacatcgttaatccggctatttgactccatcaaaacggtaatgaggaacaacgttccggtgccgttcgacgcgaaaaaccgcgaaatgtttcttttccgcaccattgatgaactggagcaagcagccgccaacggcggccagtga

SEQ ID NO: 187592 - DNA, 1737 bp, Klebsiella oxytoca
atgggttcccacctgatgcaaaggctgaatgcctttgccgatgcattttccttttttctgttatggctgcaaaacagccctgtcatattatccctgctcgcaggtcttacattaccttttatattccaccttccccgcgaggaaagaaagaacgccccattccggttaaagtcggtggcgtgtgtgtccattttcttttttatattcggcaccatatcaccgctaactattcaggggttgagctacttttttaagtcactcgacaacaacatactgtttagagttccgctatggatcatgaccataatatttacggcaacaggattaatatttcatattgcagcccgccgacttttagcaggagaaattgacaacctaaaacatcgaatgattaagaaaagcaagctggagagaaataccagaacggatgtacgcaaagtaaaagagttgttacccgacagcatagaatacaatccactcgattacattgatttaaagaaaggcgtttttattggcttaaacaaagatgaccagccgcaatacataaccataaaagaatttaaaacccaacacgcagcaattatcggaacaacaggttccggaaaaggcgtaactgcgaccgtcctactttatcaggctattcttttaggtgaggctgtttttgtagaagatccaaaagatgatgaatgggcacctcacgtacttagggaagcatgtaaaaaatcaggcaagaaattcacacttataaatttaaataagctaaatttccagcttgatttactggccgatatttctcatgaacaattggaggaattatttaacgctggctttagcctggctaaaaaaggggaggcttcagatttttatcgtatttctgaccgtcgcgcagccagaaatacatctgcaatttatgaaaaaggaatgacacttcgtgatttatttaacactgactttgttcagtcattacgtgaagatgttcccgcattttgtggtgagctggaagaaattgctttagttaactcaattaatgccaccaacggattttctttaaaagaggtttttgatgaaggtggttgttgctacattattggttcaacgcgcaatcaaaagataatttccgcacaaagaatgattcttacacggctgatacaaatagcagagaccagggacagaataaacagcactccgcgtactgttgctattttcctcgacgagttgaaatatcatctctctcgccctgctcttgaaggacttggaacggcacgagataaaggcgtgcatatattcatggcttttcaggcgatagccgatctgcgtgactgcccgtctgatttaaatggcgactcagttattggcgctatcattgaaaacgccaaattcaaattaatttataaaatccaaaaccccgaaacagcagaatgggcggcaaaaatgacaggctctatcctggtcgatgatgaaatgaggaaagtacggactgatttatcattgacggaaaaagttgatacagaccgaatgataagacaggcagaaagttactacgttgacagtaatatgtttttaaatctccctgaaaaagttggttttgtatttacgtcaaccgaactaccaagagcaacaaagatgtttcaggttcaggtcaaaaaagaaaacatcgaacttctttcatttgagtataaacaagccacaccagaaaaaaatgaaagtcaggaacataagccatcaatcaatctgtga

SEQ ID NO: 187593 - DNA, 306 bp, Klebsiella oxytoca
atgataaatgaaaatttattcattaagaatatacactcaaaaaatcaggacagaatatctgtagccctggtatatgacacgttatcaaaagaagcccacagaggttgtgggctgcattacgaaatatacgaaagttgttttatcggtcttttgcgcgatcatctttcagaacttaatgatgttgacgcaaacaaattaatacgctatgccgaaagcaaaggcacaaaaattgatgatgcgtcctacagtgaagcactggaagctgaaagggagtgccgggctgaaatataccgcgagcaaatgtaa

SEQ ID NO: 187594 - DNA, 306 bp, Klebsiella oxytoca
atgaaaaaaaccgttatcgcggcggctgtattatgcctgaccgcaggaacgccgatttattcctttgccgctgacccgtgcgaagttgttctttgcatgtacggaaaagctacaggtaatagtggtgggagtgaatgcagttcagcagaacgcacattttttaaaataaacgcatttaaaaaacaccatcgtttcaatccgggtaaaacattcgatatgcgaaaagaatttttaggggagtgcaaagccgcagaccctgaatcaataagcaaaatcctttcaaaatttggtagagtgaaaggataa

SEQ ID NO: 187595 - DNA, 1251 bp, Klebsiella oxytoca
atgaacgacgaaaacaaagtgcctgtgccgaatgaagcgcaggcatccccggcacacgctgaggatgatattgccacgcttgagcgggaagcccgcgctaaaagggaggccgagcttctcaatgcgcaggacgacgaagagaaagacccggtacaacccgccgttaacaagctgaaaaagcgcaaacggggcaaagcaaccgcctttcttgccattgtcgcggtcgcgcttatcttcctggcatggggtggtaactgggtttatcgcaatatcctgtggcagcctacggaagagaagaaacaggacacagccccgcagacgaacaaaaccgattaccggcagcgtaacgatctcggtatgtccaccgatacagccgaagaagagccagagcaacaggataacggccagagcagcacggggggaacagggcaggcggctccggccgccccgccagaactcaacaaagccagcttccttattcgccgtgacggttcggccaccgcacagaaccaggtaaaaacccggcagcaggaaatgacgctgacatcggcaacgaccaccggacaacaggacagcagcgcggccacaaataccgccgcaccgtcgccgggacaaagccccgcaccagtacggcgcataccctataaccctgacctgtacatcccggaaaatacctcgatcccctgctcactggatcgccgctttgtatctgaccgggcggggaaacttcgctgcacggtcactactgacatctggagcgccagcggcaacacgaagctgatagagaaaggcaccaccgcatcattactttaccgagccatagcggaagaaggtatgaagcacgggcaaggacgggcattcatcattgcgacgaagctacgcacccgccagccgccttatctcgatatcccgttggttgataccagcgcggctggcgagctgggcgaggctggcgttgatggctggatagattcgcatttctgggaacggttcggcggcgcgttaatggtcggcatgatccccgatattggcgcatgggcatccaacagcgcgggtaaaaaagaccgcaatacggactatacggaaaacagccgccaggctatggcagatatggcgcgtactacgctggagaacagcatcaatattcccccaacgctctataagaatcagggcgagatcatcaacctgatcacaggcgaggatattgatttttccaacatctatacactgaggttgaaaaatgaccgctaa

SEQ ID NO: 187596 - DNA, 906 bp, Klebsiella oxytoca
atgaaaaagttaacgtttaccgcactggcactgatgatgtgtggcgcggcatggggtgcgtccataccgcagacaagccgatatgactcccgtgttcagcaggttatctataacccgcagaacgtcaccgttgttaacaccaaacccggatttatgacaacgctggtctttgataacgatgaggcggtcataagcgccaaacccggctttgatgaggcgtgggaagccacgccggatgcaaaccgggtcaacgttcgcccggttgcgctcacgcagggagcgcccggagaagatggcaacacaacgcaggtcgtgatccccccgaacagccgggactggcataccaatatgctggttgtcaccagtaagcgcctgtacaacgtcgagctgaacgtcatcgatgataaatcggcgcagcagcccgctttccaggtgagctatcgctatccgggcgaagaacgggacaaagcgagccgggaggcgacggccagacagcgcgagtgggagcagaagcagcaacaggccagcgtccagaaagcgctgaactcggcgcagacgccccgcaactggagttacacccaatatccgggcaaaggcagtttcaacattgttcccgattttgcttacgacgatggccgctttacgttcgtgggcttctccccgtctaagtccattccttccgtcaccaaagagctgaacggcaaagagcatgtggttaacagcagtatccagaagaaaggcgacttcaccgtactggtgattcaggaggtgacgccacgcctggtactgcgttccggtaatgccgttgtgggtctggaaaatagcggatttggcaaggtgcacgccgccgatggttccaccgtatcccggcaggtggaaagagtggaaaaaccggaatccaattaa

SEQ ID NO: 187597 - DNA, 684 bp, Klebsiella oxytoca
atgagtgaacagaaattaatagctgaatcccgcacctttgagcagcaaatgattgagcgggataaacgcgccacaaaagccggttttgtggttggcggtgtgggtctgctgattgcggtgctggcgctcgtcgccgtggtcgtaatgttgccgctgaaacagacggacgttgagctgtataccgtggattaccacacaggacgggtggaacatgttacccggacatcgaaaaccagcctgaccgcaacagaagcctatcaaaaggcgatggccgcaaactacgtcaaagtgcgtgagcggtatgtctatccctctttgcaggacgactacgagacggtacaggtctacaacgctccccaggtaaacgatgactatctggcgctttacgccggaaaaaacgccccggacaaggtttataagaacggggcacacaccgtgaaagtggagatcctttcaaaccagatcaccgatggtacagcccccgataaagtcgccactgttcgctacaagaagattatccgccgtctggctgataacagcacccgcaacgagtattgggatgcccggttcacgttccactctgaccctgacaaggaaatgagcgatgcggaacgcgagatcaactacttcggctttaccgtcaccagttggcagaccgaccacgaaatccggggaggtgaatga

SEQ ID NO: 187598 - DNA, 138 bp, Klebsiella oxytoca
atgaaacgcttgattgcgctggctttgctgtgcgcgctttctggctgcgcccagaacacgcctccctctgcctttagcggtaagggagaacccgtaaacacacctcaaattatggcggagttaaacagtcatgagtga

SEQ ID NO: 187599 - DNA, 1074 bp, Klebsiella oxytoca
atgagtggcggtctttttgttggggttgagaaatacctgataggaggaataacagacgccacaaagggattgatgatgtcgtactcttctatgatgatggggctggcagcagcgtcagctaccatctacatcatgtggcgtggataccagactttggctggtaagctctctacgcctatggaagacacgatgtgggacatcatgaggatggcgatcatcctgtcctttgtggctaatttaggcggctacctcgatggcgttatcgatgccataaacggaataaaggagggtttttctggtagtgataatatatggcagttattagacaccctatggaataaggctaaagtgttagggaaaacgctacatgacatggataattctacatatgtaaaagatgaggggatgaccgctcaattttgtgtatggcttggaatattcgcgcttatgattctagcgggctttgtttcaatggttgccgaagtaatgattctactattaggaatcactgcgcctatttttatattctgccttatgtatggcttcctccgccccatgtttaataactggttgcaaaatatatttgcaggaatattaacaattctatttgccgctctctcattgagaattgtagtgaattacttgaacctcgttcttaataaggcgacgaaggtagcagacagttcaacaattgttgagcttggtgctcaagtctgccttgcaggtattttcgctgcaatactggtgtatatctccgctaaagtagcctcagcactggccggggcaagtgctaccgtatccatgcaggggctggccgctgtaggtatcggtgctgctgcttttggtgccgggaagctggccgggggagctgttaaagaaaccaaacgttccgcccaggacaacattcagggctggaaggatgcaaatgcaggtaagcccggcaagcccggaggtgaattaggctataacgcgtctaaagcgcgtaaatacgcgattgagcagatgatagcccggaacgaagcgcggaggctggcacagtcgagagaatccgcggttaagaagttcaacagctag

SEQ ID NO: 187600 - DNA, 243 bp, Klebsiella oxytoca
atgttatcaaaaaaaattattttaatttcgacactcaccctgtgcttttctatcgttggatgcaaagaggaagctaaaacaacaaaatggtatagggatcaccctgacgaattaaaaatagtttatgaaaagtgccaaaagagtggtgacgcttctgaaaactgcaagaatgcaaatgaagcccactatcaaatcaagcagctaaacgcaccaactccagacttaaataatttagaggagtaa

SEQ ID NO: 187601 - DNA, 708 bp, Klebsiella oxytoca
atgaaaactcgctttcgtactcttattctggcttgcgtcattgcaagcccactggctcatgctggtattcccgtcgctgttgatgctgaccctatgcgggacgtgcagtgggcgcaggagttaaagcgctggatggaaacagccagacactaccagtcacaaatacaggcatataaagaccaactggcgacggccactggcgttcgtgatattgctgattttgtagatcaggccaaaggcctgaaagctgatcttgaaaagctgcgtaaacccggacaggcactgaatgatttgcttctctccggcggttcctccgggcagttcgatgcattgtacgagaagtataaaattttcgacacctgcaacacggcacaatcgggaagttatgccaacgtatgcaagcagcaggtcatcaacaaggctatccagcttgagcaaaccgacgaggttcagaatcaggtaagccagaccctgggggaaatcaacagcctctccaacagggtagcgttagccaaagattcgaaagaatctcaagaccttgcaaacagtattcagctaaaatctgtcatgctgaatacgcttaccacccaatgggaaatgagtgtgaaagcagcagagaagcgcgaaaatgcgcttgaggcggagcgtgttaaacagtggaatcagcagcagctaaacgcaccaactgctgaccttaataatttatga

SEQ ID NO: 187602 - DNA, 444 bp, Klebsiella oxytoca
ttggctctcaaaccccataacaagctgaaaaccattcgtaagctgaacgggatgctggtcgtcggtactcaatccccggctgagatcatcaaagatgatatcgccccggcagtgattgagcagtgcgggacacagattctggcggcgaaccccaacgctgaccgcgcacactatgttgacggcatgaagtttgagccggaagtattcgacgtggtgaaagggcttgacccgcaagcccgccagtatgttgtagtgaaaaatcagttcaagcgcggcgataccaaacgttttgccgctcgtgtcacgctcgacctgtcgggtatcggcagatacaccaaagtcatgagcggcgatgcccccaacctcgaaatattcgaatcgatttaccgggaaggaatgcagcctcatgaatggctcgatacctacctggctaaagcgctctga

SEQ ID NO: 187603 - DNA, 264 bp, Klebsiella oxytoca
atgacccataaaactatcgttagtgtcgctagctatgttcaacagctggcaaaagataacaatgttactgctaaccgtgatggcatgagccgcgttgctgtgacaattaccgcacttgccgatgactctgtcgagctggataacgttgagcaattactggtaaaccttaaaaagaaaggtgtactcagtaaagctgaaattttacagcttcagggacgttacttccgcgaacaaaagcactttcataaaaaagccactgcatga

SEQ ID NO: 187604 - DNA, 729 bp, Klebsiella oxytoca
atgagttttgatccatttggcgatttcgataccgcaggctatcttcaaaatgcccttcagcttaaggagcctgaagaggtcaaacgggcagaacatcttgcttttgaagcaagtattgaaatcgcattcaactacttagctcaaacagaaattatagattaccaggctgtacttaaagtccatgagatccttttctccgatttttatccctgggcaggaaaagaccgtaacgaactcgttccccatcttgccgtcttcaaaggttctcaggataacccccgtcacacggtcttcgagcgacctgactccatccgtatggctgtcgaatacgccctttatttggccaataacaagcaacgtttccgggaaaggccaggggaagtcatggggcaattagcctttgcacatcctttcctcgatggtaatgggcgtactattttgcttgtgtttatggaactcgccattcgagccggttttgccattgactggtcacagacaagcaagaatgactatttgaaggcactcagcgacgaaatcggagaaccatctaaaaagcaccttgatcattacctggaaccattcgtagtgaacatcacaaaccgggatgcctggccggctattattggcgggattaaggggctagatggtttagataaagagaacatctcttatgaaagcctggatgaccccgaagtacaaaagatttatatgacttaccgctcagaatga

SEQ ID NO: 187605 - DNA, 891 bp, Klebsiella oxytoca
atgtcaacagatcttcactctcatctttcggcggtggcccctgtggtcactgccgctttcgcgtgggggcttcacggcaaaactcatctgtgcagtgacggccagccgggtctgccgcggcattaccgttacccgattgacgttagctacaatttgtattacatttatataaatacaaattgtattcatgctgatagcgagattaaacccatgccagatctgaaagaaattttaaaaaatagtctttttaatcaaatcgatgatagcgtttctgcgcctatatctatccgccttccgaccattttaaacaacgagttggacgaactatctttaagttttgatcgctctaagagctcgctaatcagcgaattcatcaaggccggagtagtgactgcgaatgaactactaaaggagcactctctgattagtgctgaaatgaaagagcagctagttgatcagcgtgaagacagcgcagccagcttccttgataggaaagccttcatgttgaatacgaactacaacaacgatgtagaaacgcatttcgatatggttaaaaaccaagaggctgcggctttttgcgaaggttggaaggagtacatctgccagctttctaaaggtgataaggtctatctgtatcagagtggcgtaggcatcattgcttctggtgttgtagatggtgagcttgtgaaaagcgaacattacggtgtagctgatgataaatatgctaagccactcaaagattttaaaaccggcttcaaagctatctccgcgcgtcgctttaaagagttaaccgggggcggggctaatttccgtagaacgatgattgaactcacttctatgcaggctaatgctattgctcaagagattgagaaattaacagctaagcagtga

SEQ ID NO: 187606 - DNA, 906 bp, Klebsiella oxytoca
atgaccaacagtataaaaataattatcaatacatttcttttcgctttattcttaatgggcgatgctgcaagagcaatatattccacttatgctctgtatgaggaagtaagtcctgccttaactattttcgcagcatcgctcctctcgtttctggttacgatcacagtaaatttgattagcagaaaaaaaactgataaaaatccatttacaaacaatgtactacgactttatttctggctgaatgttttcacctgtatcagttgggtttctggttatctggctatttattatatcgttccggcggtcatgtccagttttgccgtttcaattggaccaatactgtaccttgtgtttttcaagaaaaatgcatccatgctggagtggtgtatagcgatagctattctggcgatatccgctaccttttcaggaatgaattctgtcgtaatcacactccacagcaataataagtatgctctgctatttggcgtattcctttctctgttatgtggtatttctatttttatcaatacgtcgctatcaaggaaactaagcaaggcgaaagaaagtcctgttaacattaacacctttcgctcattactggttcttacaggcgcactcattgtatgtgtctggcaacacgaatttgatatttccttcacccagggatatcacctgctgatcttcagcttctggtttgtcctgatcccacaactggctcttcagggttgcattaaaaatctgggaaccagcataacaactatcggtattgcactgtcgccactgtgctctatcttcgtacagatagtggtgttcaatataccaataagcccaccagcgatcgtcttactgacgttaaatgtcttactgcttattatgttaatggtcagacaaaagaaatctgcataa

SEQ ID NO: 187607 - DNA, 1020 bp, Klebsiella oxytoca
atgataaaaaacccttcaatgcctgataaagcagtttcctttctgctttttagaaatatagccagccgcttgtggagtagttaccaacatatccttgatgtcacaggaaataataactcaaaactggcttctcttgtaaataaacacgctaaagataagaagccttctccgttctttgttgctgcccatcatttattggtgcaatattatgtcaacaaaaccccattgattaatccatcacttattgaagaactactggaaatagaggattatacccaccataatgaaatggatatccttcctttttacgaagagagttcatctactcaagacagagtttgtcgatgggcactcatctctgaccagtcagatacctacccaagttatattcacaaccatgattacttattaaccccctgctcaaataaacgctcttactgtgtttcaaaaaatttactccagtatgccatacagattatcgagcttgcagataagaaactctacgaagaaaccagatttattgtggatgaaatcaggctatttgatgcggtcaatgttcgtgctggaacaggctttaacaccctgggtctggtatacattggcgagataaaagatggtgataatgtatcccggtacattgaacatgttgtccatgaagcagcacataatcttctatatgcacattgggccaacacccctctccttatcaacgaaacagatgacctttatttcacaccttttcgaaaagatcatcgacctatgagtgctatttatcacgcgatgtttgttctatgccgaaccatatatgcatttgacaaaatttataaaacggataaagctcttattgatttcagtgcgatcagaagcaactataatgaacaagggaatgatacgcctttcaagattaaattctttcaaacggttgatgtaataaaaaaacatgccaaattatcaaaagcagggaaaaacatactggaaggatgcattgatatggtaagtaaaaccacactggagatatga

SEQ ID NO: 187608 - DNA, 897 bp, Klebsiella oxytoca
atggcaaggaaaattaaaatcccctgtttcttctctcatttccagaaagaacaatctttcgctatagacattgacgaacaagaggacatttcatttagaacactggataatcttggatataatgatgagcttgacaaggagttcgatgaactaaaccctttatcaggcccattccttttaaaaaatgccattagaggtgatttaatcgaggttacgataaaaaatatccatatcacgcgagatataggcttgtcatcctgtgggatacttccaaagtatttaaagaaaaataatgccttacctattttaggtgaagaggtcgttttttggaaagtagaagataaagcatgcactccttttatatgcaagaaaataacaaatcaatcaattaagttaaccccatcaatcggatgcatccgttgttccggagatgaaaatgataaaataattagctcgcttgaatgcgatgaatatggaggaaatctggatttcataaaactaaatgagaatgcaaaaatttatctacctgtactgacaaataatgcctggttttatattggtgatgttcatgcagctcaaagtgaagcagagattggtggtagtggcatagaagtctccgcagaagtgactcttagcgtgtcagtagttaaaaatggtttatctaaaaaaatgcacttattagaaaataataatatccatttttttggtttcggaaataacttatctcattcattaaaatctgcttttgatgaagcattgtcttgtcttcggaaaaaaaatggtaatgacgctttatccagattattgataagccagtcagctaaaattaatgtaataaaactggaatctcctgttatcgtcagtatctcacttgaacaatcactctattttaaataa

SEQ ID NO: 187609 - DNA, 918 bp, Klebsiella oxytoca
atggaactctttagctttagcgacacaggtaaatctgttgttattcttgatattggggcgagaatcatacatgacgatccccctatttatgattccctcattcagaatactcattgtgaggtcattgctgtagacgcagattctgatgcctgtaagcaacaaataaaatctatgcaagacaatgtatttttaataaagaatattgctttgggagatggtaagcctcactcttttaacaaatgttcactgcccccttgttcatccatattggaaccaaacaggcatgttcttacccagtattcaggaatgatgcccttttatgaagttgagtctattgaacaggttaatacattaactctggattcagagtttagggatatctttcccgatctgcttaaaattgatgtccaggggtatgagcttaatatattgcagaatggtaaaaatgtgttggagtctacaagtgcaatccatattgaagtaggttttattgagaaatataaagatcagcctttattcagagacattgatcattttttaagtgaacagggatttcaattccattgttttaccggatatgggacaagaacacctgctggcatttatgcaaacaacgatcctatttcaggtgtgaatcagtggctatggtctgatgcagtctattatcatcgcctggatgacattgagtggtggctcagggaggacaggttattacgtatggcattagtattccattatgtatggcaatcttatgattacgcagctcactgcttgaaaacatatgataaagcaaataaaactgaatatctctcacgctacatattatcattaaatgaaaacacaaccatagatctacatatcagcacaggaattgatgagaacaaaattctgtcagattttatagcacaacagaactga

SEQ ID NO: 187610 - DNA, 2070 bp, Klebsiella oxytoca
atgaaacgcgccccctttctctgtaagcagtctccggaccgcacgctcgaagtggtgatccttgccggaagcctggcatgggaaacctcacgcgcctggcgaaaagatcccgaccgggaagatgatgttcctccggtggtactcggcccggatgaactggccgatctggataacctgaccataatcagacctgacgcgctctacgtccgggtacttcgcacaggcgatatccgcgaagaggagttgctgaaaatcgccgtaaaactggcacatgcggatgtgcagatggcccggctgatgagccccgacggtgagctgctggaggactggagcggtcagcttgcacgcctgcggcaggaaaggccttctgacatcctgccggatcacttccgcctcgatgaagaggcactgtggtttgacaagctgaccgagcgacgcgacggcgaaagcgacatacaaccccagcgcatctgctcccctctgcacgttaccgctatcacctgcgacagccatgacggcagctatggccgcctgctggaatggcacaccaccaccgggcagttacggcgctgggccatgccaatggcaatgctcagcggcaacggcgaggagctgcggcgcatcctgctggagaacggcctgacctatatctccacccgccccgccctgcgcagcctgctgtgcgagtacatctcgcggtcactccccggacgccgggtcacctgcgtggagaaaaccggctggcactgcggggtgtacgtgctgccggatgaggttatcggtcccggtggcaacaatgtcatccttcagggcagccactatctgaccggcggctttgcacaggctggtacgctggcggaatggcaggagcaggtcgccgcactctgtgctggcaactcacggctggtctttgccctctgctgtgcgctggccgccccgctgctgcgcctgaccggaacgggcggcgggggttttcacctgcgcggtgagtccaccgacggtaaaaccacggtgatgaaagtggccgcttccgtctgtggcgggacggattactggcactcctggcgggccaccgggaatgcgctggagggaattgccagccgccacaacgatgctctgctgccgcttgatgaactccgcgaagtggacccgcgtgaagccgggatgattgcctatatgctggcgaacggccagggcaaggggcgcgcccgcaccgacggcgaagtacgcaaccgtaggcactggacgctgctgctgttctccaccggggagctgtcgctggcggaacacaccgaacgcgccggggagcgcctctacgccggaatggacgtgcgcatggtacaaatccccagcgacaccgggcagcatggcgcgtttgagcagctacacggctttgccagcggccagcagttcgccgatgccctctgcgaccgggtggcccgtttccacggcactgcttttcgtgcctggctggccttcctcaccggcgacctggacgccagcaccacgctggcaagagagctacttcgccactaccagaccgccctgatgccggagaatgccggaaaccaggtgcaacgcatcgtggcccgctttgcgctgctggcggtggccggagagatagcgacgctgcagggcatcacgggctggcaggaaggcacggcgtatgaggcggtgcagatctgcctgcacgcctggctgaacgaacgcggccatattgctaaccaggaggatgaaggcgtgctggcgcagatcaagcggttcattaccgcgcaccagtacagccgttttgcctcgtgggacggcccggaccgcccgctgaatatggtgggctttcgccgggtggaaaaagatccgctgacgggtgaagagcacacactgtttcacatcctgccggagggctggcgggaaatgtgccggggattcagtcccgccaaagcgtccagattatgtctggaagcggaatgcctgctgcccggcagcgacgggaaataccagtcgcaggttcgcctgccggagatcggcaaagccagggtctaccggctcacctcccgcatcctcagtatctga

SEQ ID NO: 187611 - DNA, 411 bp, Klebsiella oxytoca
atgctttcagaatccgacaaagatctgataaggctcgccaaatcattattagatgatttagaacaacatgacttagataattttgtagaggaagactattacctccaagatgaacacaaggactatgtaacttttaatagcgaaattgacatattcaaccatcatttcatcgattatgaagagctgaaagatgctgtatctcatgatagaaggctggtgctaagagctccccttatagaagaagctatcgattactttgagaataacgaggcgatattgctttatatgttcaatcatgcttttaattggattaagggcgaccgaactccaaatcaaatactgccccaaacattgagtcgtgaaattagacggcagacaaaagattgggtttatcacatgacgggttattaa

SEQ ID NO: 187612 - DNA, 453 bp, Klebsiella oxytoca
atgcgtactcgtccagcctctcgattgatagttctgtcacctgaaaatcacgttctgctctttaggttctgccataaagatgatgttctggagggaaaaacgtattgggcaacgccagggggaggagttgagcacaacgagtcttttgagcaggcggcattacgtgaattatttgaagaaacgggtctggcaagaaaaactgcgggtccacaaatagcatccagaacctttactatgatgctgccaagtggtgagaatgttcttgctgaagaacgtttctttattattaatgcggataaatcagatattgaccgctcaggttggactaacaacgaaaaggaagtcattcacgatcactactggtggaccttagaagagctcagacaaaccaacgaaatcatcttcccactcgatttgataattaacatacttgaaggtctcccaagcacttaa

SEQ ID NO: 187613 - DNA, 2475 bp, Klebsiella oxytoca
atgctaaacaggcaagtcaggcaaatctatcctcgacaggataaagatatccaaacggtggtatttagtgattattctcactttccgaacattgttctgcttggtgatcctggcgctggaaaaacgcacctcttcaaacagtttgcggcattacaagaggcaaaatatctgacagtacgtcatttcttaagtggcgtaccgattgataatcagaaaacgttattcatcgatgcattagatgagaagaggagtgccagtaacagtagtgatgttgtagatgacatcgtccgtaggcttttttcccaaacgccacaaaatgtcagaatttcttgccgctctcaagattggttaggcgaatcagacttgtcagcatttttaccctattttgagcagacgggaggctatgttgttttacatttgcagtcgctctcaaaagaagagcagattgtgattctacaagctaatggtgtagaacaccctgaagcgtttctggctgaagcagaaaaacatgccgccagcgaatttctttacaacccacaaaatctgctaatgctggctgaagcagttaaagaaggaaattggccccgtacaaggtctgaacttttccactctgcgacacagttccttttaactgaacatagccaagagcatacgcggctaacttcaggaatttatacctacgacgaattagagtatcctgctggatctatttgcgcgttgtgcatattgagtgatgtttccggggtttctctgcttccgaacgatatccgaacagaataccccagttacagaaccatctcgttcttctcacatgaaaaaattagagcggcgttatcgaggcgggttttttctgccggagatgagcttgagactgttgggtacagccacaggacaattgctgagtatttagcggcaaaatggttagccgggctcgttgacaaagggctacccatgggacgtttgagaagtatgctgggatttgagggatatccgtcttcagaattgagaggtttacacgcatggctagcggtctttttaccgcaatacgcccaagtcttcattgaagctgatccttacggcgttctgacctatggcgatgcagcttcattaccgacagtggaaaaacaaaatttactggtggcgttgtcaaaactttcagaacgtgatccctggtttagaaatcacggtctcaattcatatctgaatggcttcgtgacagtagaaatggaaactctgttgcgacagatagtccgcgatcctcattcgtcattttctctgcgcatgatcgttttggaatccttatcggtaacaacaccgatagtcgcactgagtgatgacttaattaatattgcaaaatcgaaggattcctcgtatgcggaaaaagaggaagcaataacggcattaatccattttggagtgtctggtcagaaattttcggtacgtttttttgcggaattaaaagaccaaaatcacgatagcatccggttgcgtaaccatattattcagttgctctatcaagattactttgtaccgcaggatatagcaaaattgctggttgatacattaaatataaccaacgaacgattaccgataggatcattatggcgactgaatgatattgtaccgacagctgatctgctcgctatctttgagcatctcgatcggtaccacaccgctcacagtaatgactggtattcttcagctaaaaattactctgagattgtgcattttctggaagctggattattgcagatactaagcgagaagagtggttacagcgcatctcagatatggttgtgcctaaaagtgttctatagctactcccataatcaccactatcgcagttatgacaatgtgcagaaatctatcgttcaggagataaaaaatcgtagctggcaatatgaagatattatagacgccgccattatctcatttacacgctatgatactcgatacttattcttacatgaattttctgaaagcaccttccatcttgtccctgatgagcttttgctggctcgttttatccactatttatcccatgcccaaagtgattcagaaaaaatcgaatgtatttatcgactggcatttgcaactctttatcgttgtaacacgcccccccaagatacgtttgattttctttctgcgtattgccattcaaatgagcagttacttactgtgtttgacacttccatcatctgcgaaattgacgattggcgaataaaacagaaccgcagccgaatagaaaataagaaaaaacaggaagaggttcgttgtgaagatagactcaattttgagttatgtcgtcaagaaattgtgtcgggccaacatttggagtggctcaaacatatttcctatatttactattcaaaatacagcgatgttgatgacaaattgacgccagtgcagcgctgtgcagacatattagggaaggtgcgaataagcaggtcatttcttcccaagctgactcgctga

SEQ ID NO: 187614 - DNA, 528 bp, Klebsiella oxytoca
atgttaacccataaaataatacaaagtgaaatcgaggagttaaaacaaatcctggttcataaggatttagagattccatcattctggcgctgcatctggcctggcctggtatgcatggtgtggtttttactatcatcctatctctcgtactggttgagtgattatgcttctggtcttgagaaaatagctgtcatggtttttgctggcgcaataggtgttttttctattgttataatagcgaatactcgttcgcatttcctttctctgcctgagtcattcaggagggaatcaaaattttttaattatctaacggttaagtgtaaggcttatggcgtttttatcttaattatatttccatgcttggcattctatttttcatctattcatctcaatgccatcgtttttagtgttataacattcttcagtatattagtgacaatgatggtaatgaacattgatcttggtcgctatcagttggcaacacttacgtccgttatcgaatctgtaaaaagtaaagaagttaagtaa

SEQ ID NO: 187615 - DNA, 2295 bp, Klebsiella oxytoca
atgagttttaatgccaaagatatgacacaaggtggtcagattgccaatatgcgttttcgcatgttcggtcagattgccaatattatattttatgtgctgtttattttattctgggtgttatgcgggctgatgctgatgtaccggctcagctggcaaacttttgtgaacggctgcgtttactggtggtgtaccacgctggcgcccatgcgcgatattattcgctctcagccggtctatacgattagctattacggaaagtctctggaatataatgcggaacaaattcttgccgataaatatactatctggtgcggtgagcagctgtggacggcatttgtttttgccgccattgtgtcgctgacaatctgcgtggtgacgttctttgtcgccagctgggtgctgggccgccaggggaaactgcagagtgaggatgaaaataccggggggcgccagctttccgataatcccaaagatgtggcccgccagatgaaacgcgatggagcggcctccgatattaaaattggcgacctgcctattcttaagaattctgaaatccagaatttctgcctccacggaaccgtgggctccggtaaatccgaagtcatccgccggctgctgaactacgtccgcgcccggggcgatatggccatcatctacgacaggtcctgtgagtttgtcaaaagctattacgacccgtcactggataaaatcctcaacccgctggattcgcgctgtgcggcctgggatttgtggaaagagtgcctgacgctgccggatttcgacaacatctccaacacccttatcccgatgggcacgaaggaagatccgttctggcagggttccggtcgcaccatctttgccgaaggtgcctacctgatgcgcggggacaaggaccgcagttacgaaaagctggttgataccatgctgtccatcaaaatcgataagctgcgtgcgtacctgcagaacaccccggccgccaacctggtcgaggagaaaattgagaagacagccatctccatacgtgccgtgctgaccaactatgtcaaggccatccgctacctgcaggggattgaaaagaatggcgagccgttcacgatccgcgactggatgcgcggcgtacgtgaagaccagcctaatggctggctgtttatctcctcgaatgccgatacgcacgcctccctgaagccggttatctcgatgtggctgtcgattgccatccgcggtctgctggcgatgggggagaaccgtaaccggcgtgtatggattttcgctgacgaactgcccacgctgcacaagctgccagacctggttgaaattctgccggaagcccgtaagtttggtggctgttatgtgttcggtatccagtcttacgcccagctggaagatatttacggcgtgaagcctgccgccacgctgtttgacgtgatgaacacaagagccttcttccgttccccgagtaaggagattgccgagttcgccgccggcgaaatcggtgagaaagaaatcctcaaggccagcgagcagtattcctacggggctgacccggtgcgtgatggtgtgtcgaccgggaaggaaaaagagcgggaaacccttgtcagctactccgacatccagacgctgcctgacctgtcctgctatgtcaccctgccggggccgtatccggccgtgaagctggccctgaaatacaatccccgaccgaaaatcgccgagggctttattcagcgccgtctcgatactcgcatcgatgaaagactcagtgctcagctggaagcccgggaagccgaggggagtctggttcgggcattgttcacgccggatgagcctgtgtctgagccagccgaagagaaagccggtgttcagcctgagcagactaaacctgctaaagacagcgtactgcctgtgccggtaaaaacctcgtcgatggcagcagagggtgccggtaagacgccagccgtcccgttatctggtgctcccgtcacgagagtgaaaaccgttccattaatccggcctaaacctgctgcttcggtgaccggcactgctgcagcggcatccactgccgcggtgagtgcgactgcgggcgggacggagcaggaactggcgcagcagcctgtcgaggcggaccaggatatgttgccggccggaatgaacgaggatggcgtaattgaagacatgcaggcttatgacgcctggctggaaggtgaacagatacagcgggatatgcagcgacgcgaagaggtcaatatcaaccacagccgcagtgagcaggatgatatcgaaatcggaggaaacttctga

SEQ ID NO: 187616 - DNA, 5259 bp, Klebsiella oxytoca
atgatgtcgattggttcggtaaagtcggcggggagcgccagcaattactatacagacaaggataactattacgttatcggatctatggatgaacgctggcagggaaagggcgcggaggcgctgggccttgacgggaaggtggacaagcaggtgttcactgacctgctgaaaggaaagctgccggacggcagtgacctgacccggatgcaggatggcgtgaacaaacaccggccaggttatgacctgaccttttccgcccctaagagcgtgtctgtcatggccatgatcggtggggataagcggctgattgatgcccataatcaggccgtcacagaagccgtaaaacaggtggaaacgctggcggcgacccgggtcatgacggacggaaaaagcgaaaccgtgctgaccggcaatctcattgtggcgaaatttaatcacgacacaaaccgcaatcaggagccccagttgcacacccatgccgtggtcatcaatgcgacgcagaacggcggcaagtggcagtctcttggcaccgatacggtgggtaaaacgggctttatcgagaatgtgtacgcaaatcagatagccttcggaaaactctaccgggaggtgctcaaacctctcgttgagaaactcggctatgagacggaagtgacaggcaaacacggcatgtgggagatgaaagatgtgccggttgagccgttttccacccgcagtcaggaggtcagggaggctgcaggccctgatgcctccctgaagtcccgcgatgtggccacactggatacccgtaaatcgaaagaaaccctcgatccggcagaaaaaatggtggagtgggtgaacaccctcaaagagagcggtttcgatattcacagctatcgcgaggatgccgataagcgcgctgcagaaatcaaccgtgcgcccgtcagtccggcgaaaaccgacggcccggatatcagcgacgtggtcacaaaagccattgccggtctcagcgaccgcaaagtgcagtttacctatgccgacatgttggcccgcacggttagccagctggaggcgaagccgggggtatttgaactggccagaacgggcattgatgcggctattgagcgcgaacagcttatcccgctcgatcgcgagaaaggtctgttcacctcaaacatccacgtccttgacgaattgtccgttaaagcgctgagccaggaggttcagcgccagaatcatgtctccgtcacgccagatgcctctgttgtgcgtcatgcacctttcagcgatgcggtcagcgtgctggcgcaggaccggccggcgatggggattgtttacggacagggaggggccacggggcagcgggagcgggtggctgagctgacgctgatggcccgggagcaggggcgcgatgtgcatatccttgctgcagataaccggtctcgtgattttctcgccggggatgcccgtctggtgggggagacggtcaccggcaagtctgccctgcaggacggaaccgcgtttatccctggcgggacgctcattgtggatcaggcagagaagctgagtctgaaagagaccctttccctgctcgatggcgccatgcgccataacgtgcaggttctgctctccgacagcggcaagcgtagcggaaccggaagcgcgctgacagtgctgaaagagagcggggtgaatacgtatcgctggcagggtggaaatcagacgacggcagacatcatcagtgaaccagacaagggcgcccgctacagccgtctggcgcaggagtttgctgtcagtgtgcgtgaggggcaggaaagcgtggcacaaatcagcggggtgcgagaacagggcgtactcaatggcattatccgtgaagtcctgaaaaatgaaggtacgctgggggcgaaggagatgacagtcactaccctgacgccggtgtggctggacagcaaaagccggggcgtgcgcgactattaccgcgaagggatggtgatggagcggtgggacccggagacacggaagcatgaccggtttttgatagaccgggtgactgcgagcagcaatatgctgaccctcagggacaaagagggggaacgtctggacctgaaagtttcggctgtcgacagccagtggtcgttgttccgggccgataagctaccggtagcgagcggagaacgtctgtcggtgctggggaaaattcctgagacgcggctgaaaggcggcgagagcatcacggtgctgaacgcggaggccgggcagctgacggtgcagcgtcccgggcagaaaaccacccagaccctggcggtgggcgccgggccgttcgacgggattaaagtcgggcacggatgggtggaaagtcccggccgttcggtcagcgaaacagcgaccgtttttgcctccctgacgcaacgcgagctggataatgccacgctgaatcagctggcgcagagcggaagccatatccggctgtactctgcacaggatgcggcccgcacaacagagaagctggccaggcataccgccttcagcgtggtgtctgagcagctgaaggcccgttcaggcgagacagacctggatgcggccatcgcattacagaaagccgggctgcacaccccggcagagcaggtcattcacctttccattcctttgctggaaagtgaggagctgactttcacgcgcccgcaactgttggccaccgcgctggaaaccggcggaggtaaggttccgatgacggagatagacgcgaccattcaggcgcagattaaggctggcagtctgctgaatgtgcctgtggccccaggccacggtaatgacctgctgatttcccgccagacctgggatgcagagaaaagcattctgacaaaggtgctggaaggaaaagaggccgttgcacccctgatggacagtgtaccgggaagcctgatgacggacctgacgtcagggcagcgtgcttccacccggatgatactggagactacggatcggttcacggtggttcagggctatgccggggtggggaaaaccacccagctccgggcggtgacgggagccatcagcctgctgccggaagcgacccggcctcgggtcatcggtctggggccgacacaccgcgccgtgggggaaatgcagagcgccggcgtggatgcgcagactaccgcctcgttcctgcatgacacgcagctcctgcagcgtaatggtcagacaccggatttcagcaacacgctgttcctgctcgacgagagctcaatggtggggctggccgataccgcgaaggcgctctccctgattgcggccgggggaggacgggcggtgctcagcggcgataccgaccagctgcagtccattgcgccgggccagccgttccggctgatgcagcagcgcagtgccgccgacgtcgccattatgaaagagattgtgcgccaggtacctgagttgcgaccggcggtctacagcctgattgaccgggacgtgaaccgcgcgctggcgacgattgagcagattacaccggaacaggtgccgcgaaaagacggggcctgggtgcccgaaaactccgtggtggagttcacccccgcacaggaggagacgatacagaaagcgctgaacaagggtgaaagtgtgccggcaggtcagcccaccacgctgtatgaggcactggtgaaggactatgccgaccgtaccccggaggcgcagtcacagacgctgattatcacccatctgaatgatgaccggcgggtgctgaacagtctgattcatgacgcgaggcgggacaatggtgaagtgggcagagaggaagtcactctgccggtactggtgacgagcaacatccgtgacggagagctgcgcagactgtcgacctggacggctcataagggggccgtggccctggtcgacaatgtctaccaccgtatcgggagcgtggataaggagaaccagcttatcacgctgatggatggtgaagggaaagaacggcttatttcaccccgggaggcgttggctgaaggtgtcacgctctaccgtgagcaagagattacagtgtctcagggggacaaaatgcgcttcagcaagagtgacacggaacgcggctatgtggccaacagtgtgtgggaggtgaaatccgtttcaggtgacagtgtcacgctatctgacggcaaaaccacccgcacgctgaacccgaaggctgatcaagcgcagcaacatgtcgaccttgcctacgccatcaccgcgcatggtgctcagggggccagtgaaccgtttgccatcgcactggagggcgtggcgggtggtcgggaacggatggccagctttgaatcctcctatgtcgggttatcacgtatgaaacagcatgttcagttgtataccgacaaccgtgagggctggataaaggccataaatcattcaccagagaaagcgacagcccacgatattctggagccgcgtaacgaccgggccgtgaaaacggccggccagctgttcagccgggcacgagcgctggatgaggcggctgcaggccgggccgccctgcagcagtccggcctggcgcgcgggcagtctccggggaaattcatttcgccgggcaaaaagtacccgcagccacacgtggcgctgccggcgttcgacaaaaacgggaaagacgccggcatctggctcagtccgctgacggataacgacggacgtttgcaggtgatcggcggtgaggggcgcgtcatgggcaatgaagaagcccggtttgtggcgctgcagaacagtcgcaacggcgaaagtctgctggccgggaatatgggcgaaggcgtcaggattgcacgcgataaccccgacagcggggtggtggtccggcttgccggagatgaccgcccctggaacccggaggccatcaccggcggtcgcatctgggctgatcccctgccgaatcctccgatcaatgataccggtactgacatcccgctcccgccagaggttctggcacagcgggccgcagaagaggcacagcgccgggagatggaaagacagacggagcaggcgacccgggaagtgtccggagaggagaagaaagtgggcgagccgggcgagcggataaaagaggttatcggggacgtcattcggggtctcgaacgtgaccggccaggagaggagaaaacggtgctgccagatgacccgcagacccggcgtcaggaagcggccgttcagcaggtggccacagagagcctgcagcgcgaccgtctgcagcagatggaacgggatatggttcgtgatctcagtcgtgaaaaaacgctcgggggcgactga

SEQ ID NO: 187617 - DNA, 720 bp, Klebsiella oxytoca; identical to SEQ ID NO: 181313

SEQ ID NO: 187618 - DNA, 231 bp, Klebsiella oxytoca
atggctcgcacaacaacggaacgggccttaaatccccacggtcacgtatacttactggatggattgaccaaactccatatttgcaagatttgcggaacctgtgagcgccgaaacggacaatattggtgggctggtaagtggagtaagacagagccgccgtgcggcctcaatacggaggaacagcgggactggcataacaatgcaaaccccgacaacgaagacgaaccataa

SEQ ID NO: 187619 - DNA, 141 bp, Klebsiella oxytoca
atgcactctacgaaaaacagcgaatcgcagcgcaacggcagcgcgaacgtcagaagaccaagctggctgacccagcttatcggcaacatcaacaggaaaaacgccaggcggcagcacaacgatccgccgaaaaacgattag

SEQ ID NO: 187620 - DNA, 498 bp, Klebsiella oxytoca
atgctgcgacaacaatccccctcggccgagacggggataaaacagactcagcagcagctggcgcagcttttacagctaaaaccggactgggctttgagttatggcactcatctggcgcagcaggcgctgacactatggccagaacaggcgaaaccgctggcgcaacaatggcaacagcaggtcagcgccgccgcgcttcccgtggagaatctcagcggctggcaccagggaatgacgcagctacagcagttgacgaaccggcttaacgcgctggatgaacagaaggggcggtatatcacggtgagtgagctgaagtcagcggtgtttgccataacgcagtcgctcagccgtaccgttccggcggaagagcagctgcggcaactctccgcacagctgcacaatcagccaaggtctgcggcacagcagaaccagacggagcagcatctgcaacaactgattgcccgctatgctgtgctgaaacaaaaaacggcggaataa

SEQ ID NO: 187621 - DNA, 456 bp, Klebsiella oxytoca
atgatggacgatgtgcgcggtctggatacgtacatttttgccgacagccagcttaactaccagtttgacgtgcgcctgccgtacagcgagccatcggggttgtttgacggcgcgtcagagtcggtctggggcctgccatacaccgaacgttactgtttccgcctggcggaaatcgtgcgtccggaaattcacggcacgcttccggcccggggtgagagccgggagaaaaacgatatctacgctcatcgggacgagcagggccgctaccgggtgaagctcgacttcgaccgggaggggacggaacccggttacgggtatctgtggctgcggatggcgaaaccgtatgccggtgaaacgctgggctggcatacgccgctcatcgatggcaccgaagtggcgattgcgtacagcaacggtgatattgacctgccgtaccggatgttgacagccagctag

SEQ ID NO: 187622 - DNA, 378 bp, Klebsiella oxytoca
atgggcaaaccggatagtgaaattaaaccgggcaacggccatggattcttcttcagagccaaaggcatcctgcaaagtcacccattcttcacgataacgaagcggccggtctggagtgacgccttcctgttccacgttggcaacacctggctgcatgtgaggcagtgcgataacgacggttaccgcatcacgacctgccagctggccggcatctcactcacgtggtgccggaggcagatcgctcctttgcgcgtcaatcagcgaaccatcttccagccagagacgtcactgcgtaatctgaatcagaccggacgaaagaagagtgtcattaaactcaatcttttccacgccccaggggaatggggatgccagtgctga

SEQ ID NO: 187623 - DNA, 318 bp, Klebsiella oxytoca
atggggttcccgtcaccggctgcggattacattgaaagtacgttaacagtgagctcactgtgcaacatcacagcaaactcgcgagttatctcaaccgaccgcggatatgttgtgctggacttgtctctaaaggttaagcagggaagtattctgcttatacgttctgctggcgaacttcagtttgcaaagctaatgggtagatcgttcatcacagccgaaggcgagagcatcgaaggtgaggcgctggaagacgttgaagcactcggagtcgcaacccatgcgattaatgacttgagacaggatacatgtcctgtttga

SEQ ID NO: 187624 - DNA, 1284 bp, Klebsiella oxytoca
atgcttactgaaaataaaaacacatcacccgcctttggcgtttattcagaggtcggtaaattaaaaaaagttatggtatgttcaccggggatggcgcatgaacgccttactccggggaactgtgaccgtatgttgtttgacgatgttctgtgggtagcgaacgccaaacgcgatcacttcgattttatgaataaaatgcgtgagcgcgaggttgaggttgttgagttccatcaattgctggaagaaacggtaaaaaatcctctggcgcgaaaatggattctggatttacaagtggtacctgatgaagtccccttgagtctgatagatgaaacacgagactttctcgataatatttccgcccgcgaactcgcgcagactctacttggcggcctttcaacgctggaactgctacacgcttcaggcggaaaatacgataaagaagaatgcagacttctccacgccgctatcgcacagagtcagtacctgcttcctcctttacctaacgcgctttacacccgcgataccacctgctggatcaatggcggcgttactcttaatcccctctactggccagcccgtcatgaagagacggtgcttgcaacttccgtttaccggttccatcctgatttcgctggcaaggttaacgtatggtacggcgatccaacggtccaccacggtacggctacccttgaaggtggtgacgtcatgccgattggtaataaaacagtgttaattggcatgagcgagcgcacctcttaccaggcgatagcacagcttgcgcaagcgctctttgctaatccgcattcggggattgagagggtgatgattgccgccatgccgaagctacgagccgcgatgcatcttgataccgtttttaccttctgcgaccgggacctcgtcacgctttatccacctattgttaatcaaatcaaaacgttttcattgcgacctgatgaaagctcgccccacggaatacgcttaaccagggatgaagataattttgtagacgcggtagcccacgcgctaaatctcaaacaattaagagttgtggaaacagccggtaatgactacgacatggaacgtcagcagtgggatagcggcgcgaatatggttgcccttgagcctggcgtggtcgtggcctatgaccgaaataccaagactaatgcacaactgcggaaaagcggcgttgaggtgatcaccattgttggcagcgaactaggtcgcggtcgcggcggcggtcactgcatgacctgccccattattcgcgagcccattgataattaa

SEQ ID NO: 187625 - DNA, 690 bp, Klebsiella oxytoca
atgagccagcaacaaccgacactcccttctcagccaccttccggcttggtaattggattattaagacttgtaagttatgcattggtaattattattgagggagtctttttacatctgttgctgacattatttctatattttttatggccgcaagacgatgttgagcatatttcgcgtgcagtgctacacgaacaggcagcgctggagcaggatctacgtaggcatccgttgaaaactcatattctgggtttactacaatataaccaaatagtgttgagacatactgaagaaatagtactcagtctcttcaaacaacgtgaactgacatcttcactgagtcctgtaatccgcagcataacgtacactatgttttattcgatgcaaagtgttatgatgcaggtgctcagattgattataacttttccactatttttattttgtatgacaatgggaatgattgagggattggttctgcgagatctgcgacgatttggtgcgggttatgagtcaacgttgattcttaaccggctaacttccataatggaaaaaacatgtaagtatataattattataactctctcagttccaaatgtttttccctcactaaaaatagattatttatcattcctatctgcaggggttatgatttactatcttcttttgtgtatgaatatccgaggaaggttataa

SEQ ID NO: 187626 - DNA, 936 bp, Klebsiella oxytoca
atgataatcagtgccagtagacgaacagatatccctgctttttaccatgactggtttatgaatcgaattaaagaagggtttctgttgatacgaaatccctataactaccatcaagtaaaaaggatatctttgcttcccgaagatatcgatgctatcgttttctggacgagaaaccccggtaagatgctatctgatctggatcttcttaaggagtttaaatattattttcagtataccataacaggttatccgaaaatactggatgctcatggattaaaccctcatcgtgcaatatcaacttttttagcgctaagcaagaaaattggccgtaataaagtaatatggcgctatgatccgataattatttcaagtgcaacgccagtttctgagcataaacggcttttccagaagatagcctctaatctggttggtcatactgaccgtgtagtgattagtttcgcagatttgtatcaaaaaacaaagcgaaacctcaatcttatccctgattttacatatagggatattactcatttccatgaggaactttatgatttatgctctttttttgcagatgtcgctcgggaatacgatatgcaaatatcaacatgtgcggaatcgcttgatcttgaacaggttggaatcgttaagggtaaatgtattgatgataggttgctgaaggagttattcggactacatgtttcaggtataaaagattcagggcagcgagaagcatgtggatgtatcaaaagcattgatatcggacagtataatacttgtttacatggttgtaggtattgttatgcaacatttaatgaaaatatagtgaaagctaatatgaaaaaacataatccaatcagcccatttcttttaggtgatgcttctgatgtggataatgatcttttgaaaaatgtaattgttcaacaaaagctattttaa

SEQ ID NO: 187627 - DNA, 798 bp, Klebsiella oxytoca
atggatggtttaattaaaaattgtcatgataggattgaaggggacaaacatctcaaatgtgatgcttccttaggtgatgattgtcttcaatgtagcagtaatatgtattttgatggcaatgatgtgaattacgaatgtgataataaaaggtatatctatattgcgcggtatttgcctgttcattcttctgagatttctaatgcgcttgatcatttggcgatgagtttttatgatgagcttaaggataaagaaaaaatagtattcgcaagttttggtgctggtccaggaatagatacatatgcttttcatcgttggcttgataagcatcgtaatgatttatcctgcaaaaatattactgcatttaggatcgaatgttgcgatgagtggactgagttagctaaagaagttatgttttcaaatagccctcagggttttgagcgaaaatattatagaaatattgtggatgtcacgacggaggatgttaatatttctgaaaggttcgatattgcaacattatcatatattgtttctgaactcgatgagtctggtattaataaattaattgaaaacattaaaaataataaaagtgaatgttcatacattgtaattaatgaccgaaatgaacctctcgtcaaagagaagataattaaaataatgactgcggtagcagatgcaggttatcgtgattatcattatgatagtgaacattgtggtttctcctatcctgatgatatatactcaagtattagtcctaaagtttttcgtaaatctgtatattttgtaggtaaattgaaatga

SEQ ID NO: 187628 - DNA, 309 bp, Klebsiella oxytoca
atgcagcatcatatacttctatcactgattcttcttagcttcggagggccagtctacgcctcccctgaatccacccagctcgccctcgcgctgaagcaactcgacggcgtaaaaaactcgctggagcgcgcccggaacagcgccagtgccgactcacagtcgcgctatttcttcgactacttacaggcgcagcaggatctcaccaccgttgaacaaggcatccagcactaccttgccccggcaagagcgcagccgcgcgccgttcagcccctgagcgccagctatcagcgggagaaccccgatgactga

SEQ ID NO: 187629 - DNA, 381 bp, Klebsiella oxytoca
atggcacgattagtcagaaaaaattatccgcaactgggggaagttaacgctccttatgttcatgcagttgcacaccaggggacgctatatatatcgggtctgacagcttttggttctgaggcgcagagtggtgatgttgttgcgcaggcaagtgaaatattcaggcaacttaaggtgatagcaacagcggaggggattacgcttgataatctgatgaaagtgacgatttttgttacttcaattggttcgctgaaagcattgcgtcaggtattgtatgcaaactatggcgagagcctgcccgccagttctcttgtcgaagttagtgcactgttctccccggatcttcatattgaaattgaagcagtgcctgcactgcaatga

SEQ ID NO: 187630 - DNA, 348 bp, Klebsiella oxytoca
atggctgtatggcggcgtaatccccaaaaacaggtgctggttcattcggatcagggcagtcagtacacaagccatgagtggcagtcgttcctgaaatcacacggcctggaaggcagcatgagccgtcgcggtaactgccatgataatgcggttgcagaaagctttttccagttgttgaaacgcgaacggataaagaaaaagatctacggaacgcgggaagaagcccgcagtgatatttttgattacatcgaaatgttttataacagtaagcgtcggcatggttctagcgatcatatgtcaccgacagaatatgaaaaccagtattatcaacggctcggaagtgtctag

SEQ ID NO: 187631 - DNA, 249 bp, Klebsiella oxytoca
atgcctgaactcactgaactgcctgatggatcgtttacgcgccagcaggcagaggtggttgcggctcaatattccaacgttgcgatagaggacgaccagggtacgcatttccgtctggttatccgtcatgagcgttgcatgatctggcgagcctggaactttgagccggatgacggttactggctgaaccggtatatcgatcgttatggcctctatgagacgacaataactcagtccgcctggtgctga

SEQ ID NO: 187632 - DNA, 3315 bp, Klebsiella oxytoca
atgagcacagcacgtcgcaatgtgaacagagttcggctatttatcggagagcgtatagaacacgcctcggatcgcgatgttttggtcaccgtttgcgatgctttagaaaagggctccgagtgggcctacatattcgccaatttcaacgttaacggtcgtcaggttgatgttgcggtcttttccgccacaactacgcttgttattgaagccaagggatatacacaacccatcaaaggcagtgtcaacggccgttggacccaggccggagcgtatggcagtcgacagctacgcaacgggtacactcaagccctaggcgccaagaatgcgttgcgtgacgcgatggccgcgctattcagcgatcttaccggctatcccaatgctttgctggccattacacctgtgattccttcaggctcctcattgccaccgagtgatttcaaggtagtcactggcggactggatgcgatcaagatttctctcagttcaaggtcaggagccttactaaatgaagtgcaatgccaagcgctcgcagcccatttgagccttgaacgcatatcggaaagagatgcagcaattcatgaaactgtgctcatatcggagcaaacagtgtcgagttataaatccgctttcttggagtatcatgggccaactggtgcacgactggtagaggaccaatacctccttgatgacaaactgatctcggcatctaagattcttgagatggctctgtcgtcgcaatctgcacttctgatcaggggaccgtcaggatgtggaaagtccttgctaagtgcgcgtatcgccacagaatgtatgcaggctggtgtgctgcctatccacatccaaggcaaagacttcgagggcaagcttcagaaaataattgatgccgagcttagactactcggtgcttccgtgcgcgatatattaagagcaagtcgtctccttttaaagcatattgtactgtttctcgacggctataacgaatgcccagagcatttgcgaattactttaacgcgaagccttcaagtattttcactacgctatggtgcaggccttgtgattacctcacaaggcatcatggccaggcaagagcttctgtcagtaaaagaggctcttgtcagcccgccgcaatccgcattgaagtcacagctcgcaaaacttagcaaagaagatgaaaacttcacaaactgccagtctctccttgaaatagcactctctgggcttgaagctgaactcattgggcaggcagcagcttcactgcccgctggggcaagtacgttcgttctattcgacacggttactcgcatgcgcctcggcaacttcgcaacggcgggaattcgcgctctttccgggtttgcagaagaactgatctctcaaactgcatttagtgtgtccattcgagagtttgacagattttgcgatgcggcaagtgtgactgacgcggcacggtacgcgatccttgagtcgcggcttgtgtcacagcgtggtgacagacttagcttctctcatgaaatgtttttctatttcttcatggcggaatctgtaatccgggtagcgcgtaaagattctgagcgaatacaagctattctgcgatctccacggtttcatggctctaaggctcttattctcggtgcggtggaggacgattcgacactaaaggatattttggaaaaaaccactgataagggcatcctggagtcttgcgtccgaggagagtgtggagaagccgcaagacgtaccgtcaaagcaaagtttgacgtgctactcgccgaaatggtcgcagagacttctgaactgcgcttcctgatcaatggcgagggatggcatagctgttcgattgaaactgcctatcatcggccaaccctctcgaagtttgaagtttttcttcctgctattggctggcttctaatgcagggggtccatttagaacaaatcatgacggcatgtcgcgtcatggaaggaaaaattgccgaagccaatcgggagctttataaggaagcaagggccaaaaaggtaccacttctgcacgagacatttagccaagcctatgtgttcaatcgtaagatcgcgctttcgcagcttgtgtccttcgtccatagtggtggcctaagttttcgccatagtccagggagcgaatttggtgaagctctgaaaaaatcatggaaggaagcgagcacacatagcgaattctacgtccttctcggaatcaccaagttcacgaagtacgctccgtgggcagcgccatgtgtgctgaatcttcttgagagactgcagagcttgccctaccaccttcagctagacacgctggacttttgtgtacacttgagaaatgtggatgatgccgtaaaagcaaagatgatcgcggcgcttgaggactccatggacaaattgggcgtgtttatgaattccatgatttttgatgcactgaagggtttaggtggattagaaaccgaagaagaaaactacagaacggtggtcttagaggagatcgaaagtgtgtgctccgagacgggaccgcaggccgataccgaagcatggaatatcttctctcgacaatttgatcatccgtatgacggcatttattgggaagagataaataatctcgccagcgctcagaagcggcagttccttttcaaggcactcaaaggggcaagcaccgagtatgtttcgtttgtcgatattctgattcgtcagctcgcagatttcggtgactcatcagtttctgaggctattgaaccttggcttaggctgccagccaaaaagtcggttatgccacaagatacaatcgaggtgtttttcgcagcacacgaagcgatggggattttagacctcccacttcctgccactgtgacatcgactatcgatgttgatgaaactatgcgggcctgcggggaattagcttactgggcttgccggttaagcatttgcgaactcgagtcttcacctcagactctcggtgcacggactacattactggattactcctcttcggcaagtgccggagcactgtggtcttcaacatctcgaatgttgtctacggatggtacaagaattaacgttgcagcgcgctatccgaaaacagccctagctatctgccgcgatgcattgaccaaccatgggtcgcagaagacgtaccacgaacacgggttaatgaatgatcaggcgcgcatagcttccttttccattcaagtgattgggcagtttggtgacgccgatgacctaggacgtttacgcagtctttgcgacgaagaggaactaggtcatgaagcacttaacgcgatccataagattgaagaccgtattcgttatcgaaaataa

SEQ ID NO: 187633 - DNA, 447 bp, Klebsiella oxytoca
ttgggaagaaatgacctgcttattcgcaccttccctaaattggaagctgaccgtattcgtaagaagcgtgaaggtaagcgtatttaccgttgccctttatttattatgtgggctaaagagtattccgaatcgggtaaatgccactaccacatttgcctattgttcaacaaagacgcttactaccacctcggggactacgaacgggaagacaacctgagagggatgattacaggtgcatggtatagcgccctagcgttgcaacgggatgattgccctgacctggtgacattccctgataactgtcgctacgtactagataacgaagacactggcttcgaggatcattaccaggcgctgctaactcgattggactacctaaccaaagtcgaatcgaaagtgtttggtgaaggggatcgtaacttcggttgcagccaaatcgatctgtaa

SEQ ID NO: 187634 - DNA, 855 bp, Klebsiella oxytoca
atggaattgatgccattcaattttgacagattgcctaatggacgggtttttataagcaacctcgcaggctttcatcacttcattaatgagcaagagctgcttgatctttctgatgagcaaatcagtgcggagcaatcaaacccactagaaagcaagctgttcataaccaacgaaagctcatcagctattgctccctatgctttaagttctgcttttgcaaaaagattgatgagtgaactggcgatcaggccaattttcatgattgtgcccacattgcgttgcgaccatacctgcaagtattgtcaggtcagtagagcttcagtgaacgcctctggttatgatctagatcccgatctcatccctcatatcatttcgactatcaaaaaactatcgataccaccttacaagatagagatacagggtggagagccactcttgcggttcgatttaattcagtctatctatgagcaatgtactgaaacgttgggaagctccgattttgagatggtgatagcatcaagcctgtctgtcttgaatgaggatatgcttcaatggtcgagaggcaggaacataacgttctctgtttcgcttgatggtgaggaggttgttcacaacagtaatcgaattcttggtcatgggcttgcttacagtagaacagtatcaggagtagaggctatcaaacggtctttaggcgctggtcgcgttgcaacggttactacagttactaaagatcttatcaggcatcctgaatcgattgtccaggctcacttgtctcttggcctcaagggtaatgctgtcaacctgttgatgactattttaatctgtagtcattcaatccttgtaacatcaggatga

SEQ ID NO: 187635 - DNA, 162 bp, Klebsiella oxytoca
atgttacgtggatccgaaagagaaaccgctttatcaaaacttaaaaaagcaactgaccgttatgagattcaggcaaaagggacgcaggaagagattacaaatctattccttttgcgtcagaaatgcagtgaaaacttattacacacgtcgaaaactatgtga

SEQ ID NO: 187636 - DNA, 141 bp, Klebsiella oxytoca; identical to SEQ ID NO: 36145

SEQ ID NO: 187637 - DNA, 354 bp, Klebsiella oxytoca
atggcgaagactaaatcagttcgcccaccgtttgtcgtgggcggcgttgatacgcataaggacctgcacgttgctgcagtagttgatgaaaacaaccgcgttttaggcagtgattttttcgcgacaacccggcagggatatcggcagatgctgacatggatggcatcttttggaacggttgcccgcatcggagttgaatgtaccggttcttacggcgctggcttgctacgccacctgcaaaatgccggcatcaccgtgctggaagtgactgctccggataaaatggaacgccgcaggcgtggaaaagtgacacaattgatgctgaaagtgccgcccacgcagctttctcattga

SEQ ID NO: 187638 - DNA, 696 bp, Klebsiella oxytoca
atgattgaagcactccgcgttctgaaagtctgccgaaaaacagccgttgcagcacgtcgtattgcgctgcaaatgatccagatgaatatcgtttcatctccggatgaactacgtgatcaattacgtaatctgacccggatgcagctgattcgaaccctggccgcatggcggccggatgtgacggcgtatcgtaatgttcaggatgcttatcgtattgccctgaaatcgctggctcgacgatatcttgaacttcacgatgaaatagcagacctggatatcatgatcgcgtcaatcgttgatgagctggcacctgagctgatcaagcgtaacgctatcggctatgaatccgcttctcagctgctcatcactgcgggtgataaccctcaacggctgcagtctgagcctggcttcgcggccttatgcggagtcagtcccgttcccgtctcatcaggaaaaacaaatcgccacagactgaaccgtggtggagatcgcgcagcaaatagcgccctgcatatcatcgctataggccggttacgtacagatacgaaaacgcaggagtatgtcgcgaaaagagtcgcggaagggcactcaaaaatggaagcgctgcgctgcctgaaacgttatatcgcacgcgaggtcttcacactgcttcgcaatcaaaatcggcagattaacagcactcaaataacgacttga

SEQ ID NO: 187639 - DNA, 279 bp, Klebsiella oxytoca
atgagcggtaagcgttatcccgaagagtttaaaactgaagcagtcaaacaggttgttgatcgcggttattctgttgccagcgttgcaacacgtctcgatatcaccacccacagcctttacgcctggataaagaagtacggtccggattcttccacaaataaagaacagtcagatgctcaggccgagatccgccgtctccagaaagagctgaagcgggttaccgacgaacgggacatattaaaaaaagccgcggcgtacttcgcaaagctgtccgactga

SEQ ID NO: 187640 - DNA, 1317 bp, Klebsiella oxytoca
atgtctgtaacacgtataagagtgaaagaacgcgacgctattattcagtcacttaagtcaggtgtaacgccaaggataggcattcagcatatccaggttggccgcgtgaatgagatcaccgctctccatcaggatattgagaggattgctgacggtggtgcaagcttcagacttatcatcggtgaatatggttctggtaaaacgttctttctgagtgttgtgcgctctattgcgctggagaagaagttggtgtcagtcagtgctgacctttctcctgacagacgtattcactcatcgggaggtcaggctcgtaatctttattctgagctcatgaaaaacatgtccaccagaaacaagccggatggtaatgcgttacttagcgttgttgaaaggttcgttacggaggcaaggaaggaagctgacacggacggctccgaggtttcatcagttattcataaacgcctggcagcactatcagatatggtcggtggatatgactttgcgaaggtcattgatgcattctggcgggggcatgagcaggataacgaaacgctaaaatccaatgccattcgctggttgcgtggagagtacactactaaaactgatgcccgtcacgatctcgacgttcggactattatctcagacgcatcattctatgattctttgaagctgatgagcctttttgtccgccaggcaggctatgccggtcttttggtcagcctcgacgaaatggtgaacctcttgaagctgaataatacgcaagcaagaacagcgaactacgaacagattttgaggatcctgaatgactgcctgcaaggctcagccgagaacattggttttatcctcgggggtacgccagagtttcttttcgatccgcgtaaaggtctttacagctatgaggcgctccagtcgcgtctggcggaaaaccggttcgcgcaaaaagcaggagtgattgactactcatcccccactttgcatcttgccagcctcacccctgaggaactgtatattttgctgagaaatcttcgtcatgtttatgccggtggagatccagagaattatctggtaccagatgaggcactgactggattcctgcatcactgtagtaaaaccattggagacgcttacttccgtaccccccgtaataccataaaaggtttcctggacatgctggccgtgctggaacaaaacagaacgatgaactggcaaacactaatcgagggtgtggcgattgaagaggaccggcccagcgatatggatgacaccactacggaggaaagcgatgacgacgacggactggcgaacttcaaactatga

SEQ ID NO: 187641 - DNA, 141 bp, Klebsiella oxytoca; identical to SEQ ID NO: 36145

SEQ ID NO: 187642 - DNA, 192 bp, Klebsiella oxytoca
atgctgacgaacttcagcgcggaacaggaagccattcccggaagggaacacaaccttaaagccgtatacgccgtcattatcgtaagcagtacgcagcgtatcctgcgccgggttgcggtaaaagttaccggagagcgacatctcagacggtgccgggagcccgttgatattctccgtttcttcggagcatag

SEQ ID NO: 187643 - DNA, 192 bp, Klebsiella oxytoca
atggaatggatcaacgttggagagcaggtgcctcgaccatttgaaatggttattctcgataccgacaaagggattgctattggctgcttcgatgtttttgggaagcccaaacaagctatttttggttttactggtaccgtagcgcactcacagttcgaagtgttgcgatggatgccattgcctacaaagtga

SEQ ID NO: 187644 - DNA, 174 bp, Klebsiella oxytoca
atgacctgcttattcgcaccttccttagaaggttattggacgaaaggacaacttaacaataacgaaaatgaacagttaaccgccctccgcgacaccctgctccccaaacttatctccggcgagctgtccctggaggatctcccggatttagtgaaccaaaccgaacccgcataa

SEQ ID NO: 187645 - DNA, 3261 bp, Klebsiella oxytoca
atgagtctctcattcagtgaagcgaagttagaacaagccattatcgaactgctacaggatcagggctatcagcatctgatcggcgataatgtgccgcgttccagcttcgatcaggtgattatcgaagacgatctgcgccattacctcgccgcacgctatcaggccgaaggcatcaccgaagcggaaatccagcggctgatcaaacagttcaccaccctgcccgcctccgatctctacgaaagcaacaaaaccttctgtgcctggctggccaacggtttcctgtttaaacgcgacgatcgccagcagaaagatctctatatcgaactgctcgacacccgacatctgcccgccgcgctgcgtgaactgttcgataccgaagaggtcccgctgcaacaggccgcggaaacgccggcaagttatcatcttactcagccgctgaaccgggtaaaaatcgttaatcagctgaccatcaccggcaaagaaaaccagccgcgcattccggatgcgattctgtatatcaacggcctgccgttagtggtgtttgaatttaaaagcgcggtgcgcgagcaggaagccaatattggcgatgcgtataagcagctctgcacccgctaccgtcgcgatattccgcagctgtttgtctataacgcgctgtgcattatcagcgacggcgtcaataaccgcatgggcaacctgtttgcgccatacgagtatttctactcctggcgcaaaatcaccggcaatgaaaaccgcgagcaggacggcatcccttccctgcactcgatgattcaggggctgtttcatccggtccgcctgctggacgtgatcaaaaactttatctacttcccggataaagccaaacacgaagtgaaaatctgctgccgctacccgcagtactatgcggcacgcaagctgtactacagcatcgaacgggcgcgtaaacctttcggcgacggcaagggcggcacctactttggcgcgaccggctgcggcaagagttacaccatgcagttcttaacccgtctgctgatgaaaagcgtcgagttcgccagcccgacgatcgtgctaatcaccgaccgcaccgatctggacgatcagctctcggcgcagatgtgcaatgccaaaaactatatcggcgacgacaccgtggtgcccgtcaccagccgcgacgatctgcgggaaaaactggccggtcgcaacagcggcggcgtcttcctgaccaccatccacaaatttaccgaagataccgaactgctctccgggcgcagcaatatcatctgtatttccgacgaagcgcaccgcagccaggtcaacctcgatcagaaagtgatcgtcgataaagagagcggcagggtgcgcaaaacctggggtttcgctaaatatctgcacgactccctgccgcaggccacctacgtcggttttaccggcacccctatcgacgccacgatggaagtctttggcaacatcgtcgacagctataccatgaccgaatccgtgcaggatgaaatcaccgtgcgcatcgtctacgaaggccgcgcggcgaaggtcatcctcgatgctggtaagctggaagaggtggaaaagtactacgaagagtgcgctaacgccggtaccaatgaatggcaaatcgacgaaagtaaaaaagccagcgccaccatgaacgccattctcggcgacgatgatcgccttgaagcactggcggaagactttgctaaacattatgaaaaacgtgtcaacgaaggctccacggtgaaaggcaaggcgatgtttgtctgcgccagccgcgagattgcctgggatttctatcgtcagctgaaagactttcgtccggcatggtttgaggttaagcaggccccggatggggttgaactgaccgagcaagaggcaaaagagctgccgccgtccgaaatggtcaaaatggttatgacgcgcggcaaagatgatgacgcgaaactgtacgagctgctgggcagtaaagagtatcgcaaagagctggataaacaattcaaaaatgcgaagtcgaatttcaaaatcgccatcgtggtggacatgtggttgaccggttttgatgtgccggagctggacactatttatatcgataagccgttgcaaaagcacaacctgatccagaccatctcccgcgttaaccgcaagctggaaggcaaaagcaaagggctggtcgtcgactatatcggtattaagcgccagatgaaccaggcgctggcgatgtattcccgcattgatgcaacgaactttgaagatatccaacagtcagtgattgaggtgaaaaatcatctcgatctgctggcgcaggttttacacgatttcgatagccgaccttacttcagcggagaaccgcaggcgcagctggcgtgcctgaatcaggcggcagagtttgttatgcgtactcagaagacagagcgccggtttatggggctggtgaagcgcctgaaagcggcctatgacgtctgctgcggcagcgaagcgctttcgcaggcggagcgcgatcgtatccatttttacctcgcggtacgttcgatcgtcttcaagctcactaaaggcgacgcgcctgatgtgacgcagatgaacgcccgggtgcgagagatgattgccgatgcgttaaaggccgacggcgtggaagagctgtttttccttggcgacaagaaagcggagtcgatcgatatctttgatgaagattacctggcgcgcattaataagatcaaactcccggcgaccaaaattcagctattgcaaaaactgctggaaaaagccatcagcgactttaaaaagatcaaccagctgcaggggatcaacttcacccgccgtttccagtcgattatggataaatataacgaacgccgggaagatgatgtgctcaatggtgaggaattcgattccttcagccaggagatgaccgatattatctacgatattaaaaccgaaatgggtacctatgccgaaatggggattgatatcgaagagaaagctttctacgacattctggcgcatatgcgcgataagtatcagttcacctatgaagacgacaagatgctggcgctggcgaaagagatgaaggcggtggtcgataacacgtcaaagtacccggactggagcaagcgtgatgatattaaagccaagctgaaggtggaactgattctgctgctgcacaaacataaattcccaccggtggcgaatgatgatgtgtatatgggcgtgctggcgcaggcagagaattttaagtcgaacatcacaacatcatga

SEQ ID NO: 187646 - DNA, 771 bp, Klebsiella oxytoca
atgcaactaaatttaccaagtaatagattatacggaaatcaacaactcattgaatttgagaagatcacagctcttattggagaaaatggcgcaggtaaatcctcaatcctccaatccatttttgttaaccgcctggcaaaatcaatactttctgataaaaaagttgtttgcttctcttctggccaaaatgaaaaattttccgagcatttctctaactacttaaatcaagaaagaaatgctaatagagggctaagtttagactgttgttattatgataaaacatggtcaaaattattgatttttctctcaactattagtaacgataggggattagttcgttcatttcttgtgagaaagaattacgttgaattatcagaaaacaatctcaccgatatttcaagcactctcactttttctgttcaagttagtcgagcctatgtcaatagagtacaaaaggcgttacaagatgaagaagatggagaaatggacacactacgttcgacgagttatcatcgtacacttgaaagttttataaatacaatagttgaccatgaatatgattttagttctccaatggaatctaaatcaatacagttagatttccaaaagtttaataatccatcatatattaacactgctgaagattattttgaccctataatttccttttatacacaagctgcagacaacgattattttatatcaaaaccatctatgaagttgacctttaaagatgatttggaattaaggaaggtgcgaacaagttcctga

SEQ ID NO: 187647 - DNA, 1392 bp, Klebsiella oxytoca
atgacatatgcaacgatcaatcccttcacgggagagctcatcaaagaatttcccaatgccactgatgccgaagtcacagaggcaattgaatcggcccaccaggcctttttgagttggcgcaatacctcttttgccaacaaggctgaaatactcaatcgggctgcagccctgctcagagacagcaagcgccgctatgcagagctgctgaccctagagatgggtaaagtcattggagaggccgaggccgaagtagaactgtcggcgcagatcctcgaatactatgccgagcatgccgagagactgctggcaccgcagaaactgcctgtggccgatcccgccgaaggggaagcgctgctggtcaatgaacctcttggggtcttgctggccattgaaccctggaacttcccctattaccagatagccaggatcttggctccgcaactttctgccggcaacaccctgctgctgaaacacgcttccaatgtgcctcagtgcgccgccgcttttgagagcctgatgcgggatgccggactgccacagggcgccttccagaacctgtatgctacccgggatcaagtcgagcagatcatcaactcacccaaggtacatggcgtggctctgaccggctctgaaggtgcaggcgccgttattgcctctcaggccggtaaggcgctgaaaaaatccactctggagctgggcggctctgacgcctttatcgtgctggaagatgccgagcttgagaaaaccatagattgggcggtattcggccgtcactggaatgccggtcaggtatgtgtttcatccaaacggatgatcctggtggaagccatttatgacaagtttatggaaggctataccaaaggcgtagccgcgcttaaagccggtgaccctatggatccgaacacgactctggcgcccctgtcttcccagggtgctgccgatgaagtgaagcagaaaattcgtgaagcggttgagcatggtgccacagctaccgaagttggtcccaaagtgccggagcaaggcgcttttgtacagccgaccatacttaccaatgtgaccccggacaacccggcttactattgggagttcttcggccctgtctccatgatcctcaaggcaaaggatgaacaggaagcgattgccattgccaacgattcgcccttcggcctcggtggctctgtgttcaccgccgatgaacagcgcggtctggcggtagccaagcaagtctctaccgggatgatgtttgtcaaccaccccaccatggttaaggctgatttgccctttggcggcatccgccgctccggctatggtcgtgaactgatcgacttaggcctgaaagagttcgtcaaccacaagttgatcaacgtggtggatatcaacgctcccttctga

SEQ ID NO: 187648 - DNA, 363 bp, Klebsiella oxytoca
gtgaaccacaaaggggggattatgaagaaaatactaattatgattgtttgcattcctttaattaatgcatgcaagccatctgaaaaagattttatttctattggggaagccgttgttagagaatcactgaaagatcctgatagcgctaagtttgaatctttttatcacaaggttggcgacaatgatggatacgtatgtgggaatgttaatgcaagaaattcttatggtggatatacaggaagaaaagaatactttgtatttatagaaacggaaagcggtaagcttaaaaataacgggccagtaaccatcgtaagtgatagcgatagtaacgcattagaaaaatataaacttttctgtcaataa

SEQ ID NO: 187649 - DNA, 651 bp, Klebsiella oxytoca
atgactggatcatcgaatgattcagggcttttgcacgcccataccatctgtgtagtgggtggatgcgggttatcggtacggtcccgtaataacccgtattgcgagaagcactacatgcgtgttaggcgtcatggctctacagagaaacttagcaccaggaaggatggcaagctggagcacactggagggtatctcctagtgtatgcgccagatcatcccttagcatgcggcagttcacgggtgtatgagcatcgcaaggtttattacgacaaatatggcgctggtccattcagttgccactggtgcgctaagactgtgggctgggacactcttcacatagaccacctcgatgactgcaagaccaacaacgagcctgacaatcttgtgccaagttgccccgtgtgtaaccagaagcgaggcgtagacaagatgagaagggcaatgcgagagaactcaagtcgcagatataccgctcatggcaagacgatgtgtcttaacgaatgggctgactatctggggatttcccggaactctattgagtaccgactcagggcgggctgggatattaacaaggtcttcagccctcgaattggtaacagcggtcccccaagccgcaagttggcgaaaatcgtgcacgaagctgtcaaatga

SEQ ID NO: 187650 - DNA, 498 bp, Klebsiella oxytoca
atgtctggaccgccgaaaaccccgacacatctacgtctggtgaggggtaacccatcaaagcgagcgatcaacaaaaacgaaccagagccacccaaaggggtacccccaacgccgaagcatttcgacaagcaggggaagtactggtttaagcggatggctgaggaactggacgctatcggtgttatgtcccagcttgacgcgcgggcgctggaattgctcgttgaagcctatacagaataccgccatcactgtgaaacccttgatcgtgagggatatacctacgcggtttacagcgaggatgatcctgatgaagggaaagaacgtgaaatcagaatgattaagccgcacccggcggcaatgatgaaagcggatgcatggaaacgtatgcgtgcaatgttgggcgagttcggcatgaccccttcaagccggtcgaaagtcaaccgagaaacgacacctgacgatgacctgatcagcaaattccttaattcgagagactaa

SEQ ID NO: 187651 - DNA, 1758 bp, Klebsiella oxytoca
atggctaaagttgcagatggcatacgctacgcggagcgcgtcgtggcgggaaatatcattgcctgcgaatttgttcgcctcgcttgccagcgcttccttgatgatctgaaattcggcgaggaacgtggcgtttacttcagcgaaccgcgtgcgcagcatatccttaatttttacaagtttgtgcctcacgttaaaggcgctcttgctggtcagccgattgaattaatggactggcatattttcattttgataaacatcttcggttttgttattccgctggtaaatgaagaaaccggcgaaatagtgctgcgcaatgacggcagcggaaggccggtaatggttcgccgcttccggacagcctataacgaagtggcccgcaaaaatgccaagtctactttatcttctggcgttggcctgtatatgaccggcgctgacagcgagggtggggcggaggtctattccgctgcgacgacgagagatcaggcgcggatcgtgtttgaagatgcaaaaaacatggtcaaaaaggccaggccaacgttgggcaaactgtttgagttcaataaactcgcaatttatcaggagcaaaccgcttccaaatttgagccgctgtcttccgatgcaaataaccttgacggcctgaatatccattgcgccattattgacgagttgcatgcgcataaaacgcgtgatgtatgggacgttctggagactgcaacgggggcacgcctgcaatctttgctgtttggcatcacgacagccggtttcaacaaagagggtatttgttacgaacagcgtgattatgccatcaaagtattacgtggctacaacagcgacgtggaaggcgcggtaaaggatgacacctattttgccataatctttaccctcgataaggatgatgatccgtttgatgaaacggtatggcagaaggcaaatcccggactgggtatctgcaagcgctgggatgaccttcgacgcctggctaagaaagcgaaagagcaggtttccgcaagggttaactttttcaccaaacatatgaatatctgggtaacggctgagtctgcctggatggacatgatgaagtgggagaaatgcgagtatatcgctccccggcatgagcttaaaacctaccccatgtgggctggcgttgacctggctcataaaattgatatttgcgcagctgtaaagctctggcgtgctgataacggacacgcccatgctgactttaaattctggctacctgaaggacggctggaaaaatgttctgcgcagatggcgcagatgtatcgcaaatgggccgagctaggaaaacttgagcttaccgatggtgacgttatcgatcatgcccagattaaagcggattttctggaatggattaacggcgagaacctgaaagaaactggattcgacccgtggagcgcaacgcagttcagcctggcgctggcagaagaaggcgtaccgctggtggaggtccctcaaaccgtcagaaacttttctgaatccatgaaagaggttgaatcgctggtctacggagggcgtttccaccacagcaatcacccggtaatgaactggatgatgtcaaacgtcaccgttaagccggataaaaatgacaacattttccctaacaaatccacgcctgaggccaaaattgacggtcccgctgcgctgtttaccgcaatgagtcgaatgctggttaatggcggggaacctgaggtaagcctttctgaccacctggaaagttacggcgtccgttcactttaa

SEQ ID NO: 187652 - DNA, 186 bp, Klebsiella oxytoca
atgatcctgatgattcttgccccgctgatcggggtgatcggtgctgctttgttttcatatggtgcatggctggtattcccgcccgcaggatttattactgctggtgttctgtgtcttttctggtcatgggctgtatcaaaatatttgtccgcgccacgtaatgtttataacgaaggcggtgactga

SEQ ID NO: 187653 - DNA, 831 bp, Klebsiella oxytoca
atgataagtatcaaccttactacaacgcatagccgattagatttatgttctgcgacattgtggtctttaatacatcaaaatttattaccagagagaatcaatctttggatatcgtatacgccatttatggccgataaaggcattacttcattaccgaattggattaatgaattgaatcatatccatgatattatccgagttcactatgttgataatactggtccttatcgaaaggttatccctgcattgcgttcggctacagatgaagatataattgtttatgttgatgatgacgtaatatatgccagcacttggtttgaaggattagtaaatacttttgaaaaattcgaacgaaaatatgttgtggcctcgcgtgttagagtgaagaaatacaattttttgaggagacttcaaagttataatatgtttcatgtctgctctaaacaacaactttttttctcggactttattattaccggtgttggtggttgtattttaatgaggaagcatataaaagaggagttccttgaccttaacgattttcgagagctaatccctaagactgatgatatttggattagtaagataattgaattgtcaacctctcaggtttattgtaatcccctcctactaccctttgtccaggaaatcgaacatactaataatgctttaaatcagacaaataatacaatgtattctggtgctttattgcaaaagatttattttaaggcgcgtaataaaattcttggttatttaggtaggccattatcaaataatgataaatctattgaaattgtagaaagttttttcgagtccagggctgataagtaa

SEQ ID NO: 187654 - DNA, 825 bp, Klebsiella oxytoca
atgagaattaaagttgtatctttgccgtttgataaagaacgccgtgctaaaatcgagagtgattttatttcgaataatttggagttttctttctctgatgctgtttatggtaaagatattccagcacatattaagaataatcttccactcggcagttttttaaaacgtaaaaataagaaaccaactgatggtgaaattggttgtaccttaagccacatagaagtgtacaaaagtttacttgaaactgctgatgaatggatatgtattcttgaagatgatgctattattgataataaattcaagatatttattcagacgttggattacactagtcttcaaccaggtgtggtttatatcttaggcgggcaagatggccttagtaatcgtcataaagttgtgcgtgcaataaatgggaataaatatattggacagcaacagtttcaccgtattgtctccggtgagcaatatgtttttagaacctgctgttatatattacacagaataacagccgaaaaaatgatttcagaattccaggaagctttcttcgtggctgatgaatgggcctattttaaaagaaaaggtattattgatgatatttgcttggcttcatttattcagcatcctttagatttaagtaatagctggattgaaaaagagagaaccattaataacggtaattcgcagcatgacaatgctatttcattttttgcaaaaatcaaactcttttttaagaacaaatatacactagcagttaaaaagaaaatgacattagctttttggaatgtgcgtaattatgtcgtagctttaactaagtttcgttcataa

SEQ ID NO: 187655 - DNA, 279 bp, Klebsiella oxytoca; identical to SEQ ID NO: 179516

SEQ ID NO: 187656 - DNA, 1407 bp, Klebsiella oxytoca
atgtccaagcaacagatcggggttgtcggtatggcagtgatggggcgtaaccttgcgctcaacatcgagagccgtggttataccgtctccgttttcaaccgctcccgtgaaaagaccgaagaagtgattgccgagaatcccggcaagaagctggtcccacattatacagtgcaagagtttgttgagtcgctcgaaactccacgccgtatcctgttaatggtgaaggcgggcgcaggcactgatagtgccatcgactctctgaagccttacctggacaagggtgacatcatcatcgatggtggtaataccttcttccaggatacgattcgtcgtaatcgtgagctttctgctgatggttttaacttcattggcaccggcgtatccggcggtgaagagggcgcgcttaaaggaccttcaatcatgcctggcggtcagaaggaagcttatgaactggttgctccaattcttaagcagattgcagctgtcgccgaagacggtgagccgtgcgtaacctatatcggtgctgatggtgctggtcattatgtcaaaatggttcacaacggtattgaatacggcgatatgcagcttattgcagaagcctacgctttactgaaaggtggtctcgcgctttctaatgaagagctggcccaaacctttaccgaatggaatgaaggtgagctcagcagctatctcattgacatcacaaaagacatcttcaccaaaaaggatgaagagggtaaatatctggtcgatgtgatcctcgatgaagcggcaaacaaaggtaccggtaaatggaccagccaaagctctcttgaccttggtgaaccgctgtcgctcatcactgaatctgtattcgctcgctacatctcttctctgaaagatcagcgtgtagctgcttcgaaagttcttaccggaccgcaggcgaagagtgctggcgataaagcggagttcgttgagaaagttcgccgggctctgtatctgggcaaaatcgtctcatacgctcaaggcttctcccagctgcgcgcggcttctgatgaatatcattgggatcttaactacggtgagatcgcgaaaatcttccgcgccggctgtatcattcgtgctcagttcctgcaaaagattactgatgcctatgagcagaacgctggaattgccaacctgctgctagcgccttacttcaaacagatcgctgatgattatcagcaagccctgcgcgatgtggttgcatacgcagtacagaatggtattccggttccgacgttctctgcggccatcgcctactacgatagttaccgttccgcagtcttgcctgctaacctgattcaggcgcagcgtgactattttggtgcgcatacctataagcgtaccgataaagaaggagtgttccacaccgagtggatggattaa

SEQ ID NO: 187657 - DNA, 1773 bp, Klebsiella oxytoca
atgctgccggacagccagaaggggttcgccccggtcattcacgggattgcccgcggcacggcccaggtatcggtcaaacagaacggctatgagatctaccagagcacggtgccgcccggcccgtttaccatcaacgatctctacgccgcaggcaacggcggggacctgcaggtaaccatcaaagaggccgacggcagcagccaggtgttcaccgtcccctactcgtccgttccggtgctccagcgcgagggccatacccgctatgccgttaccgccggcgagtaccgcagcggcagcaatcagcaggaaaaaccgaaatttttccagggtaccttgctccacggcctcccggcgggctggacgctgtacggcggcacccagctggcggaccgctacaattcctttaacctcggcgtggggaaaaacatgggcaagctgggggcactgtcgctggatgtcacccaggccaacgccaccctgcccgatgacagcgatcgtcaggggcagtcggtgcgcttcctctataacaagtcgctgacggataccggcaccaacattcagctggtgggctaccgctactcgacgcgcggctacttcagcttcgccgataccacctacagccggatgagcggctacaacgtcgcgacccaggacggggtgattgaagtgaagccaaagttcaccgactactacaacctcgcttacaacaagcgcggcaaagtacaggccagcatcacccaacagctggggcgtactgcgaccctctacctgaacggcagccaccagacctactggggaacaggcaaggccgatcagcagctccaggcaggactgaacgccgccgtcgacgatatcaactggacgctcagctacagcctgaccaaaaacgcctggcagcaggggcgcgaccagatgctggcggtcaacgtcaatattccgttcagccactggctgcgctccgacagcaaatcggtctggcggcacgccagcgccagcgccagcatgtccaacgatctgaacggcagaaccaccagccttgccgggctgtacggcacgttgctggaggacaacaacctgagctacagcatgcagaccggctacgccggcggcggtgagggcaacagcggcagcaccggctacgcggcgctgaactaccgcggcggctacggcaacgccaacgtcggctacagccgcagcgacggcatcaaacagctgtactacggcctgagcggcggcgtgctggcccacgccgacggcgtcacgctgagccagccgatgaacgacacggtggtgctgatcaaagcccccggcgcaggcaacgtcaaagtggaaaaccagaccggggttcagaccgactggcgcggctacgccgtgctgccctacgccaccgaataccgggaaaaccgggtggcgctggacaccaacagcctggccgataacgtcgacctggacgatgcggtggccagcgtggtgccgacccacggcgccattgttcgtgcggaatttaaggcccacgtcgggctcaagctgctgatgtctctcatctacaacggtaagccggttcccttcggcgcgctggtgacttctgacggcagccaggccagcagcatcgttgccgataacggccaggtctacctgagcgggatgccgctgatgggcaaggtgcgggcgaaatggggcgaaggtccgaacgccagctgcgaggctgactacagcctgccgccggaaagcaagaaccaggcattgagccagctgtcggcagtctgccgctaa

SEQ ID NO: 187658 - DNA, 555 bp, Klebsiella oxytoca
atgagtgggaattactgtgcattttatgttgctgagccttttcatgagggcgctctgggagctcatgctacgaaagacttcgtttattacaacacactgagaatgtggaaaggagcggactccggtttcccttttaccaattcacacgatacaacttataacgttcgtgatggcagtaactgggagcaaactttaatgcctcgcctcagacagcgtctgcggaattctaagaatattattctattcctgagtgatcgaactataaattctcgcgctctacgagaagaaattgattacggtattaattccttggggcttcctgtaattgtaatataccctgactatgacacaaaagaaagtttgctagttaacaacattttaaagcagcaaatacaaaatttatggtctaagattcccgcattcagagattcaatgcatttagttcccacgttgcatatcccaatgaataaagctcttatcagacaatcactggcagatagtaagtttatggtgaaaaccaaaaccgttccagatgtatatagatatagcgcataa

SEQ ID NO: 187659 - DNA, 837 bp, Klebsiella oxytoca; identical to SEQ ID NO: 159021

SEQ ID NO: 187660 - DNA, 549 bp, Klebsiella oxytoca
atgcgcttttgtattaaagcattaactgcaggcatttttacggtagccagtttcagctgcggagtttcagcagctccgacttcagatttaacgccacagatggcctatgaagatatatcacgctccttagctgagctggagcccgttaccttccaggcaaaagctgaaaagcataaattattagtttttgttgaaaatcagtgtgtttattgcagctatgttgtgaaaaatatcaaaaagtacacggatgcagggctcactatgtcatttgtgactgtggtgccgtcatccatcaaagactctgtcatagaagatatggggagagtctggtgtgcatccgatcgccagaaaagttttcaaaatgcgatggccggttttttgccagacaacaccagttcagaaaaatgtaaaaatctggtgattaaacagtctgagcttgcagaccgtctcggggttaccgccacgcctgcgatggttgtgctggagccgtctgtccatactttccttggtagtgtttctccggaaaaaattctcgcagaactccagtag

SEQ ID NO: 187661 - DNA, 408 bp, Klebsiella oxytoca
atgaaggcgttaccacgggatacagccaaagcaatttacctgtcgcaatactggacagaaccgaagtttgaccgcatcgccgagttgtcgccatccattgcgcaggagttatgtgataccggcgtgaacatggggccgcgtgtcgcaagtacattcctgcagcgctggttatcggctctgaatatgcagggcaagctctatccggacctgaagccggacggtgcaatcggcaatctcaccatcgccgccctgaaaagttatctcgccgttcgtggcaaagacggcgaagccacgctgctaaaggcgctgaattgcagccagggggctcgctatcttgaattggccgaagcgaagccggcgaacgaagcgtttctatacggctgggttaaagagcgggtgagcctatga

SEQ ID NO: 187662 - DNA, 339 bp, Klebsiella oxytoca
atgattattttcgctctgctggcgctggtggccgtgctcgttctgttgctattgcgcaaatattcccggctggagtttgttggtcatgcccggttactgcttaaaacatggtctgtccgcttaggcgctgccggcgcgttggtcggtgtatgggcccaatcatttccggacgctgctcttcatgcctgggcgatgctgccgccggatatcaaagatattctgcctgccaacattgtggcgatgattggcccggctctggtggtgctcgccatcctctctcaatacgtcagacagccaaagctgaaagaaaaagccgatgagcagcaggaggtgcaatga

SEQ ID NO: 187663 - DNA, 276 bp, Klebsiella oxytoca
atgagccttgaatttataagcgggttggtagtcgttctgcttggattaatcgtaggcgcatttggcattggtcatgctcgcggaaccagcaaggcggaagccaaagccgagcagcagcgcactgaagaaaacgccgctgctaccgtcgccgtggcagaacgccgggctgatgcaacgaaaggggccagcgatgttgaagagagcgttaagcgtatgcctgatgacgatgttgatcgcgagctgcgcgaaagatttacccgccccggtggttgttga

SEQ ID NO: 187664 - DNA, 294 bp, Klebsiella oxytoca
atgagtgaagcaaaactgcaggacggcaccacagtaaagggctaccgcacattaaccacgggcgacattgagcgcatgaaccgcctcaaaggtgtcagccggcatttttgcagtctactcgatacagagcgaggtgaattgttggctgtccgtaatggcccggcaatgttaagtgctgagcaggctcgggagattgatgaagctatgcgcagcctggcaatcgcccgcaccaaaatgcaggaagcctgtatgtgggcctgccgtgcagtcgcccgtcctgatgcagattgctaa

SEQ ID NO: 187665 - DNA, 1164 bp, Klebsiella oxytoca
atgcaaggttcccgccatgaactggcggcgatggtgagctctgtcggggctttctcattttatgcagggcctgccggaacgggcgactgtatcatcgaatggtatgcgatgttcacgcataaatcgcagaaccctgcaggatggcatccgtctctgtggacgcagagttccctgccgtcatacacctacaattctgatgagatggatatcgttgagggtaccagtcagttcgcaacatcaaactataacatctggggaagtgatggcagccggacgggaggcggttcgcttgggcctgaaaaagatattttcgatggcaggtatcacaaggtcactgcaattctcaatcagagccaggtcaggatttatatcgatgatgtcctgagcagcaccaccgcgattgatgcgaatgccgtgcgtgagccaggctatctgctgatgagcagccatgtctacaacggcaccttccacggtgaggcatattctgcgctggcgtgggaacaactctggaaaggagcaacgataaacgtggactggtgccgtatctggcgcaaaaccggattgagtcatatcaaaccgctcgttgctgttccttctgtcaacattgattacggtaacagcggcaccatttcactcccggctaaatcgtcgctgtgggggcgagaggatgtactggaaaacgttcaggttgtcatgacggaagagaatgagcctggcggcagtcactccgttccttacaacactttgcctccattcgttacctacgacgcagtagcgagaaccatcaccatcggcaacgggtacacgaaagcggggcgtctgaacttcgttatctatggttatctgcaggatggttcaagctgcgaacccgcccgcacctgggcgaatatcggcccacattacaccggagcatcattgtctctgtcctccggacagagcacagacctttatcccttgtgggattgtggcgtgctggtcacggacggcgtgaaatgcacgaaaactattggctgttactcacttccggacggcgtcgtattcgattcgaaaagtagccgtctgattaatttcggggccgctgcaggcagctacgtaattaactctgcctgccgaaacagtgtcggccaggttgccagtcaaaaaattaatctcactctgaattaa

SEQ ID NO: 187666 - DNA, 870 bp, Klebsiella oxytoca
gtgattctgattcggacagcgactcggactcggactccgacagcgactcggattctgacagcgattctgactctgacagcgattcggactctgacagcgattccgactccgacagtgactccgattcagacagcgactcggattctgacagcgattcggactccgacagcgactcggattccgacagcgactcggattccgacagcgactcggactccgacagcgactccgattccgacagtgattctgattcggacagcgactcggactctgacagcgactcggattcggacagcgactcggattctgacagcgattcggactccgacagcgactccgattcagacagcgactcggattccgacagcgatgctgactctgatagcgacagtgattccgactctgacagcgattcggactccgacagtgactccgattccgacagcgattcggactccgacagcgactccgacagcgattcggattctgacagcgattccgactctgacagcgactcggactccgacagcgattcggactctgacagcgattcggattcggacagcgactcggactccgacagcgattcggactccgacagcgactcggattcggacagtgattcggactctgacagcgattcggactcggacagcgactcggattccgacagcgactctgactcagacagtgattcggattctgacagtgactcggattccgacagcgattcggactctgacagcgattcggattccgacagcgactcggattccgacagcgattcggactctgacagcgacagcgattcggactcggacagcgactcggatatcccgcaggccaatgcggataccaataccgcgctga

SEQ ID NO: 187667 - DNA, 486 bp, Klebsiella oxytoca
atggctcaggaatcccggactgaacagtctcgcgcttacttttaccgcaactttaagtacacaatcgaacatctgacccgggattatcaggctgaactgcagcgttattctgatgattcgtgggaactgcctcagcgagccgcacgcctcagcgcagcagttaagcgctataaaacgtaccggatgctgagttttatttttgagatagctgacagcatcgatctggacttaaccccgcttattgtaaagcgcctttgtatgcgccttttcggccgctcgggtagccaggacataattgttgccacttttgggcagaagggtcgccagcaccgcagccgcgataatacgcctgccatcctggatgaaatagcttcccgctaccgtcttgccgcatactcctgtcaggcctccaccctgagtgatattgcaagtgtgaaaaagcactatcagacaggcatccgtgcagcacggaacagggaaaaataa

SEQ ID NO: 187668 - DNA, 864 bp, Klebsiella oxytoca
ttgggaagaaatgacctgcttattcgcaccttccctaactcagcaaacaattgggagtatgctgattttatcaaaagattgattgatgacgtttcttctttttcctcacacgatgccggtgaagtatttgaacgtttattattactgccagaatgtacaagttatcgggattatctcttgcacgcccaaagcaaccagaaggtgcggtatcgggaatcacagtttcaacacactaactggaagcaagcgttgaatacgctgaaaaatcagaccccagctaatgtaatggatctctatgcgttattgttagatcatttgcgggatgtcgctaatcgaattacttatgaaaataccgatatttataaacagttctggaatgagaatggcaatggtcaaattttagtgcctaagcctgaagagagctgtcggaatttttttctggagttgcttagagcacgactccatccgttacaaataacctgtgagccagaaggccacatggtttcgggtaaaagggctgatatcatcatttcacttccaggaataaagatccccattgagataaagcgtgattatcaccgggacgtctggagcgcgcttaacgagcaactggaaaaactttatactaccaatcccgatgccgcaggctacggcatttatctggtcttctggtttggtgcttctcgaccaaacgctatccctcgcccggcgaaagacacgccacccccagtagacgccacgacaatggaggacattcttaatgaagctgtgccaatggttaagcgagaccgcctgtctgcgatagtaattgacgtatcaggtgaggctaattcgactgttgaaacgcaaaaatcatctaagtaa

SEQ ID NO: 187669 - DNA, 597 bp, Klebsiella oxytoca
atgattacaaaagaacttgtagatgaaagtctcaatattcaccgactggttgattgtggcgattttgacctggcataccagcaatccgttgtattcctggaaaaactggaaaaaataacggtcaagggtgaaaattattttatagtgctggggaatgtggctggcggtcttgttgatattgggcaaatgagcaaccataaaaatgcagcagagcttggttttaagctgatggatgataacaaggaagcattagcgcatgtacaaggagagagccatttttattataattatgctaattctttgtctaatttgataactgtcaataaccctcatgatcatacctttcaatcaatagaagaactcgtttcgttaaaaaacatctattggcgagccttcaacctctcttcacaggagagcgaagaattccaagctgaactgtcagttaatctggccaattcactaagaagccaatttaggatgagtgaagcactgagatactatgatctcactaatcgcaagggattagatataccacagtcttgggtcaatcgttctgccgcgctcattgagctagggaaggtgcgaacaagttcctga

SEQ ID NO: 187670 - DNA, 366 bp, Klebsiella oxytoca; identical to SEQ ID NO: 101526

SEQ ID NO: 187671 - DNA, 702 bp, Klebsiella oxytoca; identical to SEQ ID NO: 25799

SEQ ID NO: 187672 - DNA, 981 bp, Klebsiella oxytoca
atgagccagcaactgacttttgccgacagtgagttttccagtaaacgccgccagacccgcaaagaagttttccttggcagaatggatgacttgcttccctgggacaaattacttggcgttatcgagcctgtgtatcccaaggccggtaatggtcgcaggccctatccgctggaaaccatgctgcgtattcactgcatgcagcaatggtacaacctgagcgatgaggccatggaagatgccctctatgaaatcgcctccatgcgccaatttgctcgcctgtcactggataaagccattccagaccgcactaccatcatgaatttccggcatttgctggagcagcatgaactggcccgcaaaatcttcagtaccgttaatcactggctagcagagtgtggcgttctaatgacccagggcaccttggtggatgccaccatcattcaagcccccagctctaccaaaaacaaacacaacagccgtgatgaagacatgcaccagaccaagaaaggtaaccagtggtacttcggcatgaaagcgcacattggcgtggacgccaaaagtggcctgacccacagtctggtgaccacggcggctaacgagcacgacctcaatcaggttggcaagttactgcatggcgatgaagaatttatctcagccgatgctggttatcagggggccgaaaagcgcgatgagctcagcgatgtcagcgcagactggcttatcgccaagcgtcccggcaaagtgaatgcattgaagcaacacccgcgcaagaacaagctggccatccgttacgaatacctgaaagcgagtatccgagcgaaggttgagcatccatttcggatagtaaaatgtcagtttggtttcgtcaaagccaggtacaaggggctggctaaaaatgacagtcaactggcgatgttattcaccctggcgaacctggttcgagttgaccaattgatacgggcacaggcgagatctacctga

SEQ ID NO: 187673 - DNA, 981 bp, Klebsiella oxytoca
atgagccatcaactcaccttcgccgatagtgaattcagcactaagcgccgtcagacccgaaaagagattttcctctcccgcatggagcagattctgccatggcagaatatgaccgctgtcatcgagccgttttatcccaaggcgggcaatggccgacggccctatccgctggagaccatgctgcgtattcactgcatgcagcattggtacaacctgagcgacggtgccatggaagatgccctgtacgaaatcgcctccatgcgcctgtttgcccgattatccctggatagcgccctgccggatcgcaccaccatcatgaatttccgccacctgctcgagcagcatcaactggcccgtcaattgttcaagaccatcaatcgctggctggccgaagcaggcgtcatgatgacccaaggcactttggtggatgccaccatcattgaggcacccagctctaccaagaacaaagagcagcaacgcgatccggagatgcatcagaccaagaaaggcaatcagtggcactttggcatgaaggcccacattggtgtcgatgccaagagtggcctgacccacagcctagtcaccaccgcggccaacgagcatgacctcaatcagctgggtaatctgcttcatggagaggagcaatttgtctcagccgatgccggctaccaaggagcgccacagcgcgaggagctggccgaggtggatgtggactggctgatcgccgagcgtcccggcaaggtaaaaaccttgaagcagcatccgcgcaagaacaaaacggccatcaacatcgaatacatgaaagccagcatccgtgccagggtggagcacccgtttcgcatcatcaagcggcagttcggcttcgtgaaagccagatacaaggggctgctgaaaaacgataaccaactggcgatgttattcaccctggccaacctgtttcgggtggaccaaatgatacgtcagtgggagagatctcagtaa

SEQ ID NO: 187674 - DNA, 351 bp, Klebsiella oxytoca
atgtgctttaatctgccgctcgatattacttacctcctcgcgcagaagctgcgccatacgcttgcaggaactgataatatctgcaggtgtgtctgtcgacaggtatttttccagcctgttctcctcacgcagggcatcacccagcagaacatcccgccgtcgcaggagtgcaccgagatatctgatttcgggagtcggcggctcccagcggtgtggcttcttaaggaatgcgtaacaggccagcatatacgcatccaccttatccgtttttgtcattattcccatgccacgtgcaaactcccgactacggtgagggttggccagagaaacccggaaaccggcatcatgtaa

SEQ ID NO: 187675 - DNA, 237 bp, Klebsiella oxytoca
atgcagcctgtactgtcccagcgatctggacatcagcctcgaatcatgaggctctccgaagcgcataacaacgtcgaacccttcctcgattacgtttacaacccggtcggagaaatgaacatccatttcaactgccggataacgatgcatgaagtcagtcagtgctggcataaccagcataccaaccagaggcaggctgacacgcagtttgcctctgggggcctgctgcgtttctga

SEQ ID NO: 187676 - DNA, 126 bp, Klebsiella oxytoca
atgatgctcagtatgttcgtccagtacggtaacaagctctcctttgtctatcgcctcctgaaccataaagtccggcagacaagctatacccagcccggccctggcaacatccagaagagccgctga

SEQ ID NO: 187677 - DNA, 822 bp, Klebsiella oxytoca
atgtccggtcttttagcgattttaaatcgttcagatctgcccacaattgacgaggtgaattgtgctttgttgaagagggagtattacaaatggtggtatgcggtactggcaggaagcgatgagttatttaaaaaacatcctgatgttacacaatggaacgaagatttgttgacaacgctattggcgctggatgtgatattagcactttccaccaaagacaataatgttgtaagtgattattcattaccgtggaaaagggatgtgatacttaacaaaacagcatttttcatcgaaacctattatcacattatcaatttctgtattaataatcagttgcaagatatccgtgcacttaactatctgttaaatgatacctacattccaatcgactatgccgttcctttagttatgagactagctaaagagcaccctgatgatgttcttcatttacaaaacctgatggggtggttgttagcgcatcctgagagtcatgcagagttgttgcagttatctgagttgatgatagcgcaaccctcaaaacttaaaaagccaacttatcaaatttggctggtatgtgcttatttattcgctccagacaagtgtcaggatctatttttatctgaatcaaaatccacggcggaaatgatagagcttattcgtcaactatctggtaaggcgaaaagaggccgtgggagtagtgagcagcgtttgtcactaacacaattggaagcgatcatcactgtctctgctactcattttcctaatgcagatcgagttgcaagtaacgactctaaggaaggtgcgaacaagttcctgatatga

SEQ ID NO: 187678 - DNA, 381 bp, Klebsiella oxytoca
atgtttgacgctgataaataccgttcagtcacctggctgaaaggcggacgcgtatacccgaaactcgactgttttggcattgtgaatgaaatccggcgtgatcttgagttacccctctggcctgacttcgctggtgtaaccaaagacgacggcggtctcaatcgggaggcgagaaagttgatgctttccttgcaacgctgcgagccctgcgaaggtgctggcgtggcctgctattccggctcaacggttacgcatgtcgggatcgttgtcatgctcgataaccagctgcaggttgcggaatgtaatccaggctcgggggttacgtttctgccactggcgcgattcatacgaaggtttaaccgcgtggagttctggcaatga

SEQ ID NO: 187679 - DNA, 405 bp, Klebsiella oxytoca
atgtcaaaacagaatcttaaagcgctggcactggccccgatggcgggcttccgtaaaaaagaagtcaccgttccggagtgggaaaacgccaaagttatcattcgtgaaccatcggctgaagcctggattcgctggcaggggattgccagcccggaacaaccaaaattaccggaagggcaggaagcgcaagaggtgccagaactgaccccttcagaacgtgctttccgcacgatgcgggcagatgtcacactcttcattgatattctgctggataccgacctgcagtatgttttcaccgtcgatgataccgaacaggttgaagcaatttatggccctgtccattccaggttgctgaaacaggcgcttgatctcattcgtgatgcggatgatgccaaagcaaagtaa

SEQ ID NO: 187680 - DNA, 474 bp, Klebsiella oxytoca
atggcggatattatctatccggatgagtacctgcctatgccgctgatggacgggtatggttttaagcccatatcaccgatactgcgaacggaaatgacgtccggtcgcgctcagcagcgaaggcgatacacctcaacaccgacccaggcatcagttaaatggatttttaaaactgatgcgctggcgcaggtatttgaggcttttttcagggatgcgcttaaagatggccagtcatggttctatctgaaactccagacccccatcggggtaaagccctataaagccaggttcgtggatatttacgaagggccgacgctggttgcgccaaaatactggcagtacagcgcaacgctggaattatgggagcgcccgttaccgccttcaggctggggaaattatccggaatggctggcgggccagtcgttactggatattgcgctaaacagagagtggccgaagcatgacaattcttga

SEQ ID NO: 187681 - DNA, 612 bp, Klebsiella oxytoca
atggattttgctttaaaaaatgcaaagggtgaattttttaaagaacaaagatcggaagatgtatatcctttcgatttgcaggtttctaaaaatggtgaaggcaatatttattcatctggggttattaataacaatacagatgaagaaaaaaacacgcacattactaatattagaatcccattgccattatgtgaagaattaaaaaaagtcagcacaagcagtatgacaaaagatgcaattgttttaattcagtggtctattcgtgaaattaaaaaacaaaaaattgatattatgggaagatttaacgataaaaaggcatacagaggtaatgaagtgatcgatgccgttcccgttcaaataagtgttaagcctggtgaaggtttagttttttcgttaggggttataacaaaagacactaaaacagagaaattaaatcactatacaaatttaagatttccgcttgaaacatggaatgaattaaaatcagtatgcactactaacataacaaaagacattgtaagtttattagcatggggaataaaggaactaaaaaataaaaaaattgatttaatagctcaatttaatgataaaaagacatggaaaaatgattaa

SEQ ID NO: 187682 - DNA, 585 bp, Klebsiella oxytoca
atgacacatattctacgtgctcccccaacaagtctcagtgtaaatagatggtcctcatgtgcgattcgctgtgtaaaaatagcctgggaactgatagctaattcacgtcgaaatacatacgtccatacagctgatgtccaattttctgacgtaaacatatcgtttagaaaagcattacgatcgaagtattctttatcattagaaaatgaaagtttattagcaattttctcaaaagggggcgttgatgatattatttcagagctaaaatatatcatatccggcttggtggctataatactaagaattttacacaagaaatttggactaataatatcatcagcatcaaggaagaaaatgtattcaccaacagctttttctaaccctcgttgtctggccttagctgcaccggaattgtcgaagtcgtataacaagaaattatccaattcgtgggcagcgaggctttcaagaataacattgaaagtattgtctacagatccatcgtttataaaaataacttcaatattgggccgattttgtaatactagcgaattaaaaatattaactatattgctttcgcaattatag

SEQ ID NO: 187683 - DNA, 465 bp, Klebsiella oxytoca
atggtcgaggcgataaagcctttaactacaaaagagagacatgaaatgattacttttactaacaatgctaaaaaacttcgtgcttctatctatgaagcagattttaatgctcttgtagagtttaaagaaaagtttgatgaaatctttgcagagcgaaaagaagaagaagaaacccgtttacaggagacagagaagaagaaagaagttctttctcagatccgtgaacttcttgcagcccagggtatcagtgaaatcaatgctgatgacctggaagagaacgatccacttctggcattacttgaagttaaaggaaccgctaagaaagccccagcagagcctaaatatgagtttaccgatgaagaaggggttaaacagttctggtctggtcgtggtcgtatgccgcttgcattgaaggctaaaatcgatgctggttctaagattgaagaatttttgattgcaaaataa

SEQ ID NO: 187684 - DNA, 318 bp, Klebsiella oxytoca
gtgagcaaactgggtgtgaactggaccggcggtaacctgctggcgggcgcaaccgctaaacagcagggctacctggctaacaccgaagccgccggcgcgcagaatatccagctggttctctccaccgataacgccaccgcgctgaccaacaaaatcatcccgggcgacagcacccagcctaaagcggccggtgatgcctctgccgttcaggatggcgcgcgcttcacttactacgtcggctatgcgaccagcaccccgaccacggttaccaccggtgtggttaacagctacgcgacttacgaaattacttatcagtaa

SEQ ID NO: 187685 - DNA, 318 bp, Klebsiella oxytoca
gtgagcaaactgggcgtgaactggaccggcggtaacctgctggctggcgcaacggctaaacagcagggctacctggccaacaccgaagccgctggcgcgaagaatatccaactggttctctctaccgagaacgctaccgcgctgaccaaaaaaatcatcccgggcgacagcactcagcctaaagcggtcggcgacgcatctgccgttcaggatggcgcgcgcttcacctactacgtcggctacgcgaccagcaccccgacgactgttaccaccggtgtggttaacagctatgcgacttacgaaattacctatcagtaa

SEQ ID NO: 187686 - DNA, 186 bp, Klebsiella oxytoca
atggagcatacaagattaagtgagcaggaatataatctatttgaagaagaaggatttttcattgggtcaattgaagaagttaaaaaattgatggttatgggtgaatacaaagcaattgaagaacaaaaagaaataataaaacaattttctggttgcaatgttaatgctgtgaaaagaagaatttaa

SEQ ID NO: 187687 - DNA, 291 bp, Klebsiella oxytoca
atgatgatctcatatcaggaacttgttcgcaccttccctaacccagtcgaaggtaacgacgataaacaccgcgtattgcaaagcatgaaacgtctgatgatgcgccgtttgcatataagcgagtctgagggcgatgtctggctaacgacgcgtgagattgcaaacgaaatggatattagcatttatagtatgcgctatttattatgccaaatggagatggcgggggccgtagtaagcatcaaaaccgggaaggggcgaagtcatactctacgctggaaactagcaagttag

SEQ ID NO: 187688 - DNA, 480 bp, Klebsiella oxytoca
atgcgtggaggtgcaaagtttgaaacgaaggggtttgaccgcgtaatccgtcagcgcgtgaaggcgctggcagggatttcaataaccgtggggatccatcgaggtaagatgaatgaaggtctggacgttgcgacctatgccgcctggaacaacttcggtacaaaaaatgcgatggggtgggaactcatcccggcgcgacccttcatgaagtattcatctgattatattgctgaatggatgaagtccagacaatacaaagaattaatgagcaatatcctttcagggaggcttactcctaagcaggcaatatcaattattggcgctaaggcagtgcaaattaccagagcgaccattaaagagaaaaatttgtacaaacccaacacgccggaaacgatagcaaggaaaaaagggaaatccacaccattggtagaccacggtgttatgggacaaactgtaacttataaggcgaatgtcagatga

SEQ ID NO: 187689 - DNA, 255 bp, Klebsiella oxytoca
atggatgaattaaagaccgttaatcttaccaataccactgaatctccgattcatattcttgctaaaaatgaagagggtacgattgaaaatgtcgttgtggccccactggatgttgtcgcggtatctgctgccacgcttcaaatcggtggtgttaagcaatttcttgatgagaaaaagctaaagcagattagtgacgccgaagctaaaaaaatcaagaaagagcacgatggtgtgctaactactgacgacgagtaa

SEQ ID NO: 187690 - DNA, 219 bp, Klebsiella oxytoca
atgaccaataaagatggctggagcgcggccgcagcagaacagcggaaaaaattagcagggttggcggaaatgcagcttgaggtcgtagaagggatgttgcgtgaaataatcgctacttaccccgaagagaaggtaagtagcgctcacccgaaatcaggagccatgcagaccatgaagcgcttgcaggggctgaaaaaagaaatggggcagattaaatga

SEQ ID NO: 187691 - DNA, 429 bp, Klebsiella oxytoca
atgaccacgaaaactgatatcgccgaactcacatctgaaaagctggaggaaatccgccagcgctaccgccaaactgaagttcctaaatgccatatttgcggcgctgaaatgacaattcagcgtatgtcggcaagtcgcatcacttatggctgtgctggcgctatctatgacgaaactggttgtcattatgatgaaggccgcagccttgccgatgaccactatgctgaatcacgcataacggtagtcgatgtgagcgaccctgacgttttggcgctggtagaggcgctggagaaggcgcagcgtgccaataactcagcgccagccatattgcgccagcttgccgaagagaaacagaaacgcggcgaagtggcggcagctactgcatttaactatgcagcttcagcacttcaaaaggagttgtcgaaatga

SEQ ID NO: 187692 - DNA, 399 bp, Klebsiella oxytoca
atgatgatgctttttttatgctctctctcagtttactcacatgaagaactatctgaacagatacgtttgggaaaaattagttatttttctatcgggctgaatggttttgctggtaaagaaagcgaaggtgaacttctatatagatcgattctacaaagagataatgccaaagacattttttataatattgcaacaagcgaagatgctacgaatgaatctaagctttatgctgcatgtgcacttcgaaatctaggagtgaaaaatataaatgaaatttttgatcaacctctggatagtgaggttgtggttttaaatggtgacatattaaggagggttaattttaaagataaactattcgcaattataaagcatggttgcggtttaaatgaatctaaataa

SEQ ID NO: 187693 - DNA, 210 bp, Klebsiella oxytoca
atgtatttggatagtgatacaaaagttattatctctggaacggtaatattactggttggaatcattgtctggaaaaaaacaaagcttttttattgctctggtgttttgtgttttgtttatcaaagcgtctatgatgtttttagcgatagttatgctattatcctggggagaaccggcaaattctttttattttatatttcctgttattag

SEQ ID NO: 187694 - DNA, 432 bp, Klebsiella oxytoca
atgaatgccgtcaagctcgttatcagcgatacggttaccggagtaattgtattccccctctatagcaatccctttgtccgtataaagataaatgccgtgtttagtattgccgttgatgtggttgtccttcagaatgccacggttaccagggttccccgcgccgtttgttcccggagagcctttaaacccatattcattgaaacgcaggttattgccgatcgcgatgagaccatctatgccgcagtcagccattcccgcatggttgtactcacacacattcccgaccgcaatcgtgtcgcgggccacacccacgccgcgctggggctcataaaatatgccgtagtttttattgtgtttattcaccgtcagataaacaaagatgggctcactgttaaggaacccggtccccagcccgataccggaggcccctag

SEQ ID NO: 187695 - DNA, 318 bp, Klebsiella oxytoca
atgaaataccagattgcaaggctttatcgaggggatgaattcctgggatatgctattgctgttgacggccagttacttgatggtcaggtatcaaccatcatcagcactgagcccagaagtatcccaacagccaccgtcgtatttaacctggatggcgatcatgccgaaaaccaaatcactattaatttggatcgagatgttccaattcagatgaatggcagccccacagattcagctgtcgaggctatcaaaaaagctgcggctgaaggtgctaagcgtggatatcgtagtgcggttaataagctgcttaaagagtag

SEQ ID NO: 187696 - DNA, 495 bp, Klebsiella oxytoca
atggacacagattctattgcttatgcttctatgctggtatcaaaggaatcagccaactgggccttttggtcaatgatagcagccgcaattgccgcgctagcctcattgattacttcagttgttacaggggtggctgcgatcatagcttttaaaactatggatacatggaagcatcaggaggaaataaaagaaaagaaaattttaaaagccgcattggtagaatacaggaacattcttgtaacaatgccaatagtgatgcacgaaggtgttaaagacagagaaaaaaacagcctattgcttaacgatgtatctaataaaatttatctaccattagtggtattagaagaagatttagataatggtgaattagggaaaagattttctcagttttttaaaatgcatttcgattatttaagtggtgcagtgacacgacaagatttggcaaaagatcttgctgaactgcttggtacgaaaatgatcggcatccggatttaa

SEQ ID NO: 187697 - DNA, 159 bp, Klebsiella oxytoca
atgatcatgttgcgcaggctgtgtttctgggcgctgtttgctgttctgctgctcgtgacctggcgcctggccggcatgctgatggacatggtgctgttggcggttatcgtttccgcgctggtggtgtgccggcgctggccatttaaaagaaaacactaa

SEQ ID NO: 187698 - DNA, 474 bp, Klebsiella oxytoca
atgatgaagttaacactgaggcagcaggaggttctgaacctcctgatcgaataccagcgtaaacatggttttcccccgaccacctacgaactgaccggcatgctggggtgccggtcccccaatgcggcggcaacccacctcaaggcactggagagaaagggtgccatcaagattacccgcggggtttcccgcggtatcagcatcactccttcgcttttaaccagggaggtttcagtaaacctcaacagcatcgtaaaggtaaaactgaatgacaacgccctgagatttatgaaagcccaacacgacgaaaatcgtgctcgcgcaccaggaatatttggtgattttgtgccgccggcgacagacgacgatggctattcagcaatgacgctttggagtctcatgtctgacctggggcaactctgctattgcggtggcgacgtgcctttcgaactaaaaatggttctggaggattaa

SEQ ID NO: 187699 - DNA, 939 bp, Klebsiella oxytoca
gtgaatctggatactcaagaaatggtgacggtagaagagccaacaatccccctgtactgtcaggcgcttaatgatctgcgcaaaatgcctttccacaaactgaaatgggtcggtgaccagtggcgctcgccggatgagctgtactggggtatcaacgcgctatttgggccgtttgtccttgatctgtttgccgaggatgacaacgccaagtgcccggcctggtacacctctgaaattaatgcgctgacacagaattggtcagagcgcctgaaagaactcggcggcgcggcctttgcaaatcctccctatagccgatctcaatatcataaaaaccaggctgtcactggaatgcgaaacatcatggcccacacgttagcaatgcgtgaattgggcggtcggtatgttttcctgatcaaggcggcgactggtgaagtctggtggccagaaggcgcagatcatatcgcatttatccgtggccggatcagcttcgatctgcctgactggtataggccggaaaaaggtcagccgtcggaatcatctgctgggtttggggcggcggttgccgtgtttgataaaacctggcgaggcgagagatttagttatatccaccgctctgacctggaagctaaaggccgggcatttatgagactggcacagtttgctgttggcaatattccagcacaagtaatggcgccgccagcggcagtagaaccacctgcagcacctgtggaattaccggcaacggaatcacgtatctggccactggaagtagggctgttgtttcgacaggttgaaggagccgaaggtatggagttgtcccatcaaaacaaactgaaagcacatattaaccagctctggcttgagcgtatgcccaccagtgaaatcatcgctattgctggtggactggttgaaagcatgcagggggtgagccatgcgtga

SEQ ID NO: 187700 - DNA, 453 bp, Klebsiella oxytoca
atgaaagcggtattcgagtatatcgagaaaaatcctggaaaaatgatgcgagacatcgttgctgccttccctgatagcaaacccatgtctgtgaagagcgcagttcatcgcctgtattacgaggggaaattggcgagcgtccaaatgcagagtggattcctgtatcgcgtggcaggtaacccagaagcagatgaccagattcaatctgacgatgtttctgaggcaactcgccggttggaacaggtagcaaggaatctggagcgccaacgttatttccggcgtgcagcgactgtctggcagcaactgtgcgattcaaattgcagcgttaaaaccagagaacgctatatgcggatgaaaaatcagtgtgtacgcaatgcgaaaatccggacaaatactagcggaatttccatgctggccggtaattactgcggaggtgacctgtgctccgattaa

SEQ ID NO: 187701 - DNA, 201 bp, Klebsiella oxytoca
atgacacatatgaaagtgaaagagttggttgctgcagctaatgctgcggcacctgacctgccaccagcagcagcccaattaatgcgtgatatcgcgtcaaggctggatgtgaccttcgttgcccttaccgaggcgatggatcagaacacagctatggctgctttgctatcaaaccagagcggagcaagcagtaatggctaa

SEQ ID NO: 187702 - DNA, 135 bp, Klebsiella oxytoca
atgaaatttgactctgagaattacagcaaatacacgctgcgtcgttttgctgcagcggcaaatattgtcgcatgggtagcgggagtaattgtggtctggatcatttgcatgattattgagtggtggacggcatga

SEQ ID NO: 187703 - DNA, 630 bp, Klebsiella oxytoca
atgaacgtatacgaaatggaaggcttcctccgtggtaaatgcttacctggtgatctcaaagtcaatgaatcaaacgctgaatacctggtgagaaaactcaatgctgtaagcgaattgaaaggcgagctaacggctgcactggcgactatcgagaaatgccgagagataacaaactgcccgtctggtgtagaccttcagggctggttgaagaagctggctgcggagaatgtggggctgaaggaaagtcgtgcgattttagtagaaaacacacttgaaacatgcaacgaaattgcttcagcaggattcaggcacgaagcaataatgcgcggcttgtataaatcaactggaaatagaaataaacatccaaaaccaataaccacgcttgttgatgaagccttgcgtaagttagaaacccccgccaccgatcgcatcgtagccgggattaaggctgatgcgcagtctgaagtcattgagtggctggatgcggaaattacagccatagacactatgtatcgaggcgatccgagttatgagcgcgacgcgaactggatgaagtcagaggttctcgacgtagttgaattggcaagaaaggcgttttccgcccagttgcgcgagggggccgacaaatga

SEQ ID NO: 187704 - DNA, 207 bp, Klebsiella oxytoca
atgagcaaccgtatccctaacttcggctggaaccgcctgaagctggcaacgctcacctatgagcaactggctcaactggaagagcaagtgaaggccgaacatgcctgcaaaaacggaattcacctgttcgacaaagcaggtcagcgcaaactcgatgcccttagctgggccgtatacaacaagcagaaggcggagcgtgcagcatga

SEQ ID NO: 187705 - DNA, 435 bp, Klebsiella oxytoca
atgactgatatcaccaaactggcgcagatcctgaaagcggcagcagagaaagccactcaggggcgctgggaatattacccgggaaatacgagcattgaatataacgttgactcgatggatgaagaccagggttcaatcgtttatgtcgatagtggcgacttcacgcaggctcaaacagaccgtaatggggagttcatcgccctggctaaccctgccaacatcctcgcactggtagaggcgctggagaaggcgcaggagacgattgcatttcagcaaggagaaattaaagcgcttttgttgtcattggagtcccgcaccgtgaagctgccagagccgttcgagctagctggactatctggcggatcatcttactaccatgccgatgaggtcgatgctacgctgactgccgctggcatcaaggtggaggctgagtga

SEQ ID NO: 187706 - DNA, 888 bp, Klebsiella oxytoca; identical to SEQ ID NO: 97727

SEQ ID NO: 187707 - DNA, 552 bp, Klebsiella oxytoca; identical to SEQ ID NO: 97726

SEQ ID NO: 187708 - DNA, 780 bp, Klebsiella oxytoca
atggatattaatgagttccctccgggagtaatcgaacatcttggttggtatgtatatcgactgattgatcctcgagatggaagtactttttacgtgggtaaggggaaaggtaatcgcgtttttgctcatatgcgcggtgaagtggctgccgctgatgatgatgaacttctcagtaacaaactcaagcaacttcgtgagattagattagctggtctggaggtcatccatgttatccatcggcatggtattgccgatgaaaagactgcttacgaggttgaggctgctctaatcgatgcttatcctggtttaaccaacatcatgaatggtgctggcagtaacgagtatggtgctgcacatatcaaagaattaatcgcaacctaccagcctgagactgtcgagtttaagcacaaagctctgatgatatctgttaacagaagttcaaaagatgttgatctctatgatgcagtgcgcttcagttggcgtgtaagcctcgaacgcgcaagcaaagctgaagttatcctagctacagtaaaaggaattgtcaggggggtatatatagctgatgagtggttaaaatcaacccgtgataactttcctgaaatgcgccaatgggatgaagatgatgagtttgaagctactcaaagttcacgctttggttttcggggacgtgcggcatctcctgaagttatacagctttatcttggtaagaagatccctgatgacctcagaaagaaagggtcaatgtctcctgtgaagtattctccgaattttgattcctga

SEQ ID NO: 187709 - DNA, 639 bp, Klebsiella oxytoca
atggataagaaagaaacacaatttactgcaacgactgttccggctgattactgggttgatgctaaaggtgcattaatcccggagaaactccttaaacccatcgacaaggctcgtgatgctttagttggtgagattgtaactaaagctattgagttgaataaactgatggcggctttcaaggcagtgacttttgcagatattgcggcgtttgttgacctttcggctaatgaatatggcgtgacagttggtggtaaaaaggggaatgtcactctctttacctttgacgggcgttataaaattcagcgggcaatggctgacagaatgcagtttgacgaacgcatccaggcagcaaaagcgttaattgatgcgtgtctcaatgagtggacagagaatgcccgcaaggaaataaaggcgatcattgatcgtgcgttcgatgtcgataaagaagggaaaatcagtgtcagtgctgttctttctctgcgtcgttatgaatttgacgacgagcgctggaaaaaagcaatggtgattatcggcgagtcgttgcaggttctaaacaccagttcatatattcgtatttatgagcgggttggtgataatggccagtacaggccgatttctctggacatggcggcggtgtga

SEQ ID NO: 187710 - DNA, 513 bp, Klebsiella oxytoca
atgaatatcaacagagagcctgattatatccgcaccgtacaaccaacaacggaactagccttcgagcaaaacttccgtgatgcgattgaaggtatcggacatatccgccgtgcgctggaggaaacctttggcgggctgcacggaacgcattgtgagcccgatatcctgatggactgcaagcagttagttgatgctatctatgctgcttacaggtctgccggtaacgccgattctggtaacccgactgacagggtcatcagcatcagacacaaggattatgctcatctggcggatgatctaatgccagctcgcttatggcttgaggcatcgccgcagccttctgacctccagacaagctcgctggtaatgtgggtcaagcgcctttccctgtcacttcgttcggcatgccctgataacaaattacccaaagctgcgatgggttatctgcaaaacaacggtctgatcagcattgctgattgccttcgggggaacaatgaagaacctcctgcgtaa

SEQ ID NO: 187711 - DNA, 435 bp, Klebsiella oxytoca
atgaatctgcaacaggtaacagagctactgcccccggtagtcattcagatagctgacctcatcggcttcccggccactgagcggctgctatctgcgttcggtggcactaccttcccgattggaaaaggtctccgtgccctcggtgctcaacgtgccgctctcctccgcgataccatcggtgacaacaacgcccagatattgtttaaaaactttggtgggttcccgctttatctgccacgttgcgagctggcattacgcgagttacgtaacctgcagttcctggcagacttcgacgaggccagccggaacggtgtttcttcgttaatggccatgacgttactgtgtccgaaatacggatttggtgatcgcaccggttggcgtctactggcgcagcggaaaagtgtggctgaatacaatcaagactcgttgttttaa

SEQ ID NO: 187712 - DNA, 396 bp, Klebsiella oxytoca
atgaaagcatcaggaaaactactttacggcgtgcagatcggtgacgtcatccactatgactacaccgttacgctgcctgtaatgaaacacaccgttaaggctctggcctcgactatggatgcacttggcgaaacggatacgcctgccgcatatgtgcattatcgtgtggcattgctggcagaagtccttgaatcccttggctcactgagtaaagacgacatcactgcggatttccttctggagaatctgatagaagatgatctggatatcctggatgcggaactggccgggcttaaaaaaaagcggatgcctgttcagcaaagcttgccggcctcaggcgggctaccctcatcctcggacgctttggcatcagcgccgaccgcatcgaaggaatga

SEQ ID NO: 187713 - DNA, 123 bp, Klebsiella oxytoca
atgaccgtcagcgagctgacccactggctggatgacctcgacgggctgcatggcaggaagccaacagcccgcgcatctcatatcaaatcccgccgaacccgtaaaaagaaggggaaaaggtaa

SEQ ID NO: 187714 - DNA, 2178 bp, Klebsiella oxytoca
atgcgttctcttcagcttgccatgaccctgctggccagagaccagggctctaaggtactgcgtcaggctctgtcagatatcttaaaacagaccaatgccaacaagaaagccgaggaagacgccggccgcgcccgcgagcagtcggcgcagagtggcatccgtgcatcccgcacgctgcagcaggaatatcagcgggccgcgagtgctcgctcaacattaggcatccgttccgagcgtgatattcagcgtgagatagcgcaaacacagggtgcctacaatcgcctgctacgaaccggcatgctcaccgccaatgaacagacccgcgcctttcgggcgatgaccaatcaggttgcgcaactgcgtactgagcttaacggtgccggtcagtcaatgtcccgaatggaacgtgcccgtatgtggggtggaaatctgacggcgatcgccgggggcgttactgcagcggccatgattattaaagaccccgtacaacggcaaatggcttatgaagataaaaatgctgacattgccaataccggctacaaccaattgcctcccgaagatcgtctgaaaaaagttccggtattaaatgcggccataaggacagccgtcagattcggtggcggtttacctgagcaggctcagggtaccttgcaatcattgtttgccggtggtcaggtaagcaatgaagttgctatgggaattttgccagatgttatgcggtattcaacagcatcaggcgccaatcccgaagacctggctaagattgcttctgcagctatcgctaactttgggatcaagcctgaagaaatcccaatgcttttcgacaagctgatacgttcaggggagaacggtagctatgagctggccgatatggctcgctccatgccaacaactatgaccaaggctaagtcgattggtatgtctggccttgcggacgtcgataaacttgcagcctggtatcaggcgaactcacttacagcgggtgataacagtcaggccgcaacaaacgtcaatgcatttcttgataaaatcaccagcgctgatactcagaacgcgatgaaaaactataaattccgggtgaacggcaaagtaatgaactacaccgattacctggcccaacagcgcatgaatggagtcagtactcctgatgcatttatgggagcagtctcaggaatagtgtcgggcgataaacgggtccagtcgctcagggctgatgcgcaaaagtataaaggtacagacagggaaaaagagattaacgcggcgctggatgtcgtagtcgcttcgatcatcgcgaaaatcgttgctgatcagcaagctcagatgggactcaaaaccagcattctttaccgtgaatttatcaaagaacagcaggatggtactcgggatgcctcaggttctggcgcagcctcatttaaagtgaagtcgtccacgaatgctttcaaatcacaacaacttgagtctgagaaagtgtttgctgaacaggacgctatgaagcccctggcagatctttatggagatttatcaaccaagcttgttgattacgccaaagagtaccctcaattaaccactgccctgtcaggtgccactacaggcattaaagcgatgactgctgctgcggtcgcctttgccacgctcaattttctcaccggtagtaaaatcagcccatcgtcttctccggtaccaccaggcaaattaccgacaggaggttccggtgcatggggatggggggccaaattgctgggcgcgggtatgtcggcaaccgcgatagccacatttaccacgcgagaagaagatgctgaaatcgcgaatggtccggctaagtggtctgccttacgatctcgttatagtcaggaacgtatcgataaagcgagaaagctttatcagccctggtatcagattggcaaggggtatgccagtgagaacgaagagtggttatcccgtctggataaggatgaggctaacggcacggtgccttcctggtggacaccaccaacagatattcgcattccacagtcggcgaacggctacccggtgccgccgttcgcccaaacgccggtacagcagccccccatcaatatcaccaccaaacttgaactggatggccgggtcattgctgaggcggtgaatgaggttaacaaccagtccgccactcgtggcccgcagggaggaccgcactga

SEQ ID NO: 187715 - DNA, 627 bp, Klebsiella oxytoca
atgtctggcgatattaaagcagtatttgatagcaatctgattgcaactcatgcaggtaccgttcaggtatttcattttgatatgacttcccgtgagtttatcggtaccgaggatgtttatattcatttcggtgttggcctgcctgcattttcgtgccttgaagaaccaccggcacaaagtgaatatcaggttgctgttcgttctgaagataattcgtcctggtctgttaccgatgattatcgcggtatcaccgtttatgacattcagacgctggccagccacgttattaccgagcccggccccatacctgacactgtaacgacctctgcaccatcaaccccatacgacaaatgggacggttctgcctgggtaacagatgcagatgcccaacacacggcagctgtcgctgatgctgataaaacaaagtcagaccgcatggcaatagctaccgctgaaattacggtgttacaggacgctgttaatctgaatctggcaacagaatttgaattaaaaaaattaacagcactgcagacgtatcgcgtgttacttaatcgtgtggatacgtctgcagcacctgatatcaagtggccagcgattgtaaatatgtcggaggttgataatggctaa

SEQ ID NO: 187716 - DNA, 1977 bp, Klebsiella oxytoca
atggctaacttatccgaaactccatcatgggaatcaggtgtccttcagcttgaagaagccgaccgggcgaaagctggtgcgggcggagtattaaacataccggcaagtcaactggcaaatcgcacccgatacctgaaggtgcagcttgaggcttacaacgggctgttaaaatcaggtgaactgccttttactgataaacctgccgctcaggaatatattgatgccgggaaagtccctgagggaagtattttttctatacgctcggataatccggattactgggttgacgaatataaaaatcagggaggggttccggtagcaacgggtaaacacctgctttcagcggcatcaattacagccagaattaacacggatgaaaatggcaatctagcattccataaagacgaagatggattaaacctgttagctcttgatgatactggaaatctgtaccttgttggtttaaccggttcggttcaggagcgtcttaacactctgaataaaaatgcatcaccggcgattttacgacttactgaagcggaaaatgccgcctatgcctctgttgatgagtatggcgatttttatgctccggaaatgccctccgggattcagcgattattgctgggaatgaaaaaggatgttgatcggcttcggaagcgcgggatggttcttgatgccagagattgcgggctgaatacgaaaaccggcgaagattcacagcgtgcaatccagcgtggatataactggttatccggtaatggtggcgggcatctgtatgtcccggctggctatttcaagatggcaattcctgtggtgccgcgttcaggcgtcgcattgcacggggccggtatcggtgcgactaattttctgccttatggctatctgtcggcgtttgagtacaccggagaagaaacttatatcgaaaaccttcagtttaccgacttcaccattgatggcgaaaatcagcaactccacccaaccagggggtatattcccaatattaaggggatcctccttcagtattaccggaatactgtttttgaccgtatcaaaatacagaatacgggtgcgacagggttaggcaccgacatgccggataatgtgtctattatgcgggtggccactgaaaactgtggacgtctgggcgttgttggtgatttaggggcttccggtatcgggctggggaccgggttccttaacagcgagcccatctttgtttatcagacggtgaataaatacaataaaaactacggcatattttatgagccccagcgcggcgtgggtgtggcccgcgacacgattgcggtcgggaatgtatgtgagtacaaccatgcgggaatggccgactgcggcatagatggactcatcgcgatcgctaataacctgcgtttcaatgaatatgggtttaaaggctctccgggaacaaacggcgcaggaaaccccggaaaccgtggcattctgaaggacaaccatatcaatggtaatactaaacacggtatttatctttatacggataaagggcttgctatagagggggaatacaattattccggtaaccatatctttgataacgagcttgacggcattcatgttgaatatgctcatacgtctgcgaaattactgaacagtaagtttgcagataatgaaatttatcgtaatggtcgtcacgggcttaactttgtcagcggtaatctcgttaatgttgacattatggataaccggctctggaacaatggacgtacagaagcgggggatgccatcgctggcgcagcggatatggtgaaatgcggtattaccggcaataaaatccgcgacacgcaggacactgcaacccagcgatacccggttaatctctccggagcactgacagataccgatatctcattcaaccattgtgttgggaacggccagaacaccttaaatctcaccgggacacaaacccgcgttaccacgatcaacaacccagggattgcataa

SEQ ID NO: 187717 - DNA, 1419 bp, Klebsiella oxytoca
atggcgactatcgtacaaagtaatatgaagcttaaaggtgatgtgaaattaccttcagttaatgcccctctgccggatggcgctaacttattcgcggatttcgccaccggtcgctatgtcattaaacatgccagcggtaacgttattcgttcggcatcactgacagatattctgtcattcactcgcgccggcattgccacaagggtaggcaagaccgggatgattgagtatctcgccacagatgagccagcgattgattatcaccctgtgacgcatgaatgcctcgggttgcgcgtggagctgtcatccgttaaccgcattgcctggtctcaggatttcaccaaaactgcaagctggacgccatccggtattacgctgacagccaatgatgctgtctctcctgacggtaacaccacagcaaccaaaattatcgaaacggctggttcctcagcggcccccagaacgctcctggcactgacgaccagcgacgccacagtcgctccgtatacgttcagcatctttgccaaagcaaacaccgccggggttattcagttggcggcgcaaggggcggtaacaccggttgccttcgcaaacttcgatcttcgtagtggcaagattggtaaagtgtcttcgggttcatcaacccttggaatgctgcaggtgacgatggaggaatatattaatgggtggtatcgctgcgccattactataactccttcatctgcgacctctcctcagtttacggttgcactggtgaataatgacagcagctctgacgcggttccgtcatatctccccggcacaccgaaatccgtctggatttggggggctcagccggagcgcaaagacggtgcgacatcgtatattcccacggcaggtgcagaggttacccgcaacagcgacatgtgcacaacgccatcgacaacgcagtttatttctgcagccgcaggaacagttctggccagcgttgtacatccgcacagcctgcagcttatcagtggctcctatgggtcattatcctgcgttgtcgtactcgataatacggctgaaggacccaacatccggttttcgtatcgcccgccgtctaaaggtgccgctgagggagctgctcttggggtagcgcctgactcaacagggattgcgcagaaccttgaaattcccagcatggcatcagtaagggacagtgagcagtcatgcatatttgcctttgacggcaccgcgctgacaaccaaactttttgatggctataactggtattccaggtccgttaccgcattcccgccggcgctttcacgcctgtgcattggtcgctcttatatgggggcaacgaattactttaacggtcatatacggaaggtgatctactggcctgcagcgctggggactgacgaaatggaaggtttcctttctcacctttaa

SEQ ID NO: 187718 - DNA, 219 bp, Klebsiella oxytoca
atgagcgcagaaatcatcgatcaggccaacgagttagcggaactccagcgggaagccgccattgcgaaatgtcgcatcaaccatgcggcggtatcggctactaactgccgcgactgcggggaagagataccggctcggcgccgggaactggtggcgggctgtcagcgctgcgctgattgccaagaagaagaggaattacgcggtaagcatcggaggtga

SEQ ID NO: 187719 - DNA, 630 bp, Klebsiella oxytoca
atgaaagaacgcggaatgatattcaacggggagatggtgcgggccattctcgatggccggaagacgcagacccggcggcctatcaaatggaaacagactcggttcactgaaattggtgagcgcgaagacggtagcaaatggccgtggagcgaagatgcagagcatgcttgcgacttctggcacccatgcccgttcggcgccgtcggcgaccgcatctgggtaagagagacgtgggcaagcggtttatccacaaaatctacgcttgcctaccgagcaactcacaaacgtgaagatttggaggatggcttttacgacaccatcaagtggacgccatccatccacatgcctcgctgggccagtcgcattctgctggaaatcaccgacgtgcgggttgaacggctgaacgctatcagcgaagaggatgcggaggcggaaggaatcgacatggaggcactttatgactctcaggactgttacgactgcattgcagaccacaacatgaccggaaggccaacggtaacaggcgcattcaagtacttgtgggaatccatctacggcgaggatggctggaaagccaacccctgggtttgggttatcgagttcaagcgcgttgaaggcggtgctgcatga

SEQ ID NO: 187720 - DNA, 222 bp, Klebsiella oxytoca
atgacgccagaagaaaaagaaaacgctctccgcgcccaggctcgtcgctgcgcagaagagataaccaaagcgatgagcgtaaagcctaaaccgaagtggaacgctgtctgcccccccatccttcgcaagcactacgagaaggtaaagccgatgggtgtcagcctggtgaaatttgtcagtgttattggccgcatgaatgggcggtatggagtggaatcatga

SEQ ID NO: 187721 - DNA, 771 bp, Klebsiella oxytoca
atgagcaaagggactgttatctgcctctgtgatttaaccgggaaaatggctgagccatgggtcgaagcgggttatcgcgccgtcctggtggacccgcagcaccctgaaacttcgatcgacggtcctgttgagcgcatatcggcaaccatccttgaggcgatgccgcggctatctcagatcatccgctctgagaacgtcgtcatcgtcatcggcttcccaccatgcacggacgtggctgtttccgggtcccgctggttcgagtccaagcgcgccaaagacccgcatttccaggccaaggccgcgctggtcgctgagcaatgtcggatgactggtttagcggctggctgcccgtgggcattcgaaaacccggtgagcgtgttcagtagcatattcggctcggccgattacacattccatccgtaccagttcactgggctgtgcacggatgacaactacacgaagcagacatgcctctggacgggtaacggtttcaaggcgccggcagagaatatgcacccgatggttgaagcggctatcgacgccgtgaagctagcctgcggccgcatgatgccgaagaaaaaggcgatcgaagccatatccggaacgtcctttgccgggttggtgactgactggtatccggacaaccgaattcacgaatgtccgcccagcgacgagcgcgccaacattcgcagcgcaacgcctcttggatttgcaaaggcggttttcctttcgaatgcaccccatctcaacaagaagcgggaggcagcatga

SEQ ID NO: 187722 - DNA, 429 bp, Klebsiella oxytoca
atgaaacgcactccattttaccgcaggcccggaaaagcagggaaattctccggccttcgcgagcgcgtgatctggatgattcagacgcgcggccaccctgtaactggcagcgaaatagctgagaaattcggcgtaactctcatcgagtttaaccgggtggccaatggcattacccgaggctccgggcagatagcgcagatagttgaatcggagaaatggctcaatgaggacggcatctgtgaccggacatttagcctcgtgacgaaaccgaaggttgtaacgccgcaaggtaaatcgcggctgttcacccgacgcgccatagagcaatcgcaggaaggcagacagcaggagtgcatagcgcgtgccgcccgccgtcgacgcctgattgccgctggcctctacatcgacgaaatggagtcagtcctatga

SEQ ID NO: 187723 - DNA, 159 bp, Klebsiella oxytoca
atgatgcgtaacgctaaaactggcgccacctggaaggtttctcgcgactacctgaaggacaccttctggttcgagccgcagggtaacttgcgccatatccgccagtgctttgaagcgcgtgagctgctgccaaatctggtgccggccggaacgcactaa

SEQ ID NO: 187724 - DNA, 630 bp, Klebsiella oxytoca
atgacatcagtaagattgacgaatgctttacgcgaacagatcgctaaaaacgcgctggcaaaatcaggggttatcaccgctattgaatcccttgaccttaaacgccaggaagttgcaagagatgctcgcatcgctgcttttggcggcaaagaacaggccgacaaggtcgataagcaatatgaaaagcttgagaaattagaggcagagcttcgcagtgctggcgcttcgcttcacatttccggcaatccgcaaagctcaatcaacattgcaatttccggtcgtcgtcttggatggtgctcatacggaagaaccagcgaaggaaaagaaattctcctggttactccgaatcgcgatctgtgtctctttggcgctgagcatgaaattaccaagcggtttgattcaattatcgacgaagagcagaagctcaattccagaaaaaaagaaattgaggcgactgtttgggctgctctgaaatccgttactaccctgagtcgccttgtagaagtatggcctgaaagcaaagagcttatacctgaaaacgttgacagcgccaaagtggctcttcctgcactgaagattgaggacctcaaccggttaattggtcttccaactgaattggtagaaggctaa

SEQ ID NO: 187725 - DNA, 321 bp, Klebsiella oxytoca
atgcaaagcgcaatagcccgcaacttagaaccgccgatcctcaacccgattgagctggagggggttttactcaatcgcctttcatccatcgggcagaaggcttacgcggagatattgggtatcagtgaatcaacagtcagtcgcagaaagggggaagggcatttcgctgacatagcaaaagagttgtccgtgcttggcctgcaggttgttccgccggaggcggtggtagtttcccgtcactacctgcaatcagtagagacgctggcagatatcggtttacgtgcggagcgttgccggccggggccgctggggtgggattga

SEQ ID NO: 187726 - DNA, 930 bp, Klebsiella oxytoca
atggcaaatactgctgaagtaatcaattttcctgtgcctgacgtggcacttaaggagccgcgcgtggcagatattgacgacggctatacacggattgctaacgaacttctggaacacatagcaagcgctgatttaaccgctcgtcagctaaagctgatgttggcatacattcgtaaaacatacggtttcaacaaaaaaacagatcgcattgctgatgaacagattgcgcagttaacaggtttatccaggcagaacgtaaacaaagcaaaaagggacttgctttcaatgaattgcctggttgttgaagacaataaaatcggtgttaacaaggcggtttctgagtggaaatttagcaggtgtctccaagttagtaatcttgtctctaagccagagacaaagagtgtctctaagttagagacaaatgaagtctctgagttagagacacacaaaagacattctttaaagacaactttaaagacagatcttacccctatagtccccatgggggacgagagtgaaaaaaccgttgctgaagaagttattcaggacgaaccgcaagccgatcctgtcaggaaggttttcacgcactggcaaaaagaacaccaccacctgtctgcaaagctggatgacaaacggcgcaagcgcatcaaggccagattggctgaaggtttcaccgcagatgaactctgccgggcaatatccggggccaaaggtgattcatggctgatgggcaaaaacccttccaaaaaacgttacgacggtatcgacacgcttctgagagacgctgcccaggtcgagcgactccgcgatctttctggtgacgagcacgccatggcagtcgctcagggacagtattcagcaacaaccgcacgcaacctcgaaaccctccagcgctgggctggcggcactgattcaggagagcttttctga

SEQ ID NO: 187727 - DNA, 591 bp, Klebsiella oxytoca
atgaacgaatctgaaagacctaaattcgcccagtccatggcggcgatcggtgaaatctacgggaaggatatttccgaagtgatgatcgggatttactggaacgcgctgaagccgtacccggttgaagacgtaatgcgttctttccaagggcatacacgtgacaccgacaacgggcagtttttcccgaagccggccgatctcttgcgccacattgagggcaacaaagacggtaaagcactgctggcctggtcaaaagcttacaaggccatttgcagctacgggcgccgcaatagcgttgtgttcgacgatccgactatccatgcggtcattgctgacatggggggatggattgagttcgcggggatgagcgaagaggaaatgccgtttcgggctcgcgagttcgaaaaacgttaccgctcttacctaattaccggcgtcagcaaatgcgaaacggtgatgatcggtatggatgatgcgcagaacatgcgcgcgggcttccagcgtgaaccaatgcctttcctgattggtgagaaggataaagccaaacttatccgcagtggacaggcgcttattgagcacaggtggcaatga

SEQ ID NO: 187728 - DNA, 201 bp, Klebsiella oxytoca
atgaaattatttactccagttgaggcgagaagatttgttgccagtacctggtacgaaactacggatctttcaaaaagagaaaagctttatgcgaaagcgcgtgagctgataagtggcgatcgtgcggagattatctgtcaaacagataacccagagtaccgaaagtcagcgcgtgaatggtggaaatatgaccatgtctga

SEQ ID NO: 187729 - DNA, 810 bp, Klebsiella oxytoca
atgaatctcgaatctatcgccaaatacttcgcgcctaaatcaccaatgctgagcgactcgccacgggctactgcatcggatggtctaaccggcactgacatcatggctgctcttgggctggtaaatgccaagtgcggattcggcttcgacctctatctggcaaagatcggggtaagcacacctgaccgagcaatggagctactttatgaatcagcagagcgattatcaatccgctttaacatcgtttcagaactcagccatgacgtacgcaaaagagttctcgaagttctgtgtgcttttgcataccaggattacacacgaagtgctgccagcgttagaaaatgctcttgttgcgctggggctggcttcacagaagctcaagtgttcaccaataaatgctcatatccgtggggtaagccgccttattgggcaaagatgtcccgcgcggttctcccaagtcactgggagtgctggatcgaagcccgcgagattgtcaaagttaaatgctcaacctgtaacggaaagggtgttatcagcaattcgtgtcgctgcaatgggaaaggaaaggtactggataaagaggccagcgagcgcattgggttaccggtaatgaaagtatgcgaacgctgcagcggaagaggttatgcgcgcatgaagttttcgacggttctggaaggggtaagggccgtgactgacattaagaaaacggtagcttatgagcagctgcaaccgttcttcgaggagctggtatccgaatgtcacaaacaggaatcatacgctgatgtcattctctctcgggtgactaaataa

SEQ ID NO: 187730 - DNA, 666 bp, Klebsiella oxytoca
atgaaacaggatgcgaatatcgacgccctgatggctgacgcctggttgacggtgacggaactgcggtgcggggcgagactggccgacggggagggcgaacgcctctggcgacattgcgtagagcatattgaaaaggtcatggcggaactggagaccgcgggtctcagcgaggcgagccgtcggcatattctctacgcctggtgtgcgctgctggatgagacagctaaaggacgtgaaggtgaggatgatgcctgcatcgtctggtatgaccgtccgctgcaggcgaaatacttcggtgccctggacgccggcgatgcgctgtatgagcggatgcgacaggttctgcatgagcccgcgccggatgtggcggtactgacctgcttccatcgcgtgttgatgctgggctttaagggatgttatgccctggatgagccggttcgcgaccagcttatcaacaggctggcggagcgcgtttcgccgtttgaaaccgaccagagccagcctgtactggcgggtatatccgggcgtagcggcctggcggacgggttgcgacgttggccggtttgcctcgggctgtcgctggttgcgatcgccgcgctgtggctggggctaaatcattggcttgattccctgattacaaccctgctgctcggggcggaaaaatga

SEQ ID NO: 187731 - DNA, 606 bp, Klebsiella oxytoca
atgtctggtagccacaatgatagtaacattagtgcacactctggaaatgcgcagaacaaagctgaagttgttaaagcatctttagacataggtagtgcgctattggtcgcaataatcgcagctttagggggaatggccggctcatatctcacgggttcaaagttagttgaaagcacaagagtcccagcactcatcaatgccagaacgatttgtactactgctgttaacgaagatgaatacaaatttcgtgaaaaagcctctgattttttggctgcggtagctgcatttgatgctgataaatctcttttatataaagctaatcataatcaactttaccaaccagcgaaatcagccataactaaagcaatgtcgataagttcttattcttctgaacgtctatcagtactggcagtaaatattgcatcatctataaaacaacttgcaatttctgatatggattatgttatttcagatagtggcgcttataaaaaactatcttcctcaatggaggaatggccagaggcatataatgaatatatgaaaaccttcgatgtcaaacgtgcttcttgcaactccgatgctataagctataaatcagaaaaataa

SEQ ID NO: 187732 - DNA, 3630 bp, Klebsiella oxytoca
atgactacaaggcagtatgcgcaaaaatcaatcttcgatctggaggaaattttcgagcggtcacggaacaatgctagtgaacttgaacggctgttgaacgaactgaccttccgcaatactgccaaggcccgaacgttgaggactaaaatcgagcaagcccgaactgtacttagtggtcactgcgtgatctcaatgtcggattccagtccatcagcgcgtcatcctggctcgtcgtccacacaatcctcccaagttccgccccgtgatgtgcctgcagcggtagtgcaacagcaacccaaggctaatccagctcctgtcatgcaacagcaattcggcgaagaccagatcgacctaggtccactcccatctttctctccgacaggtaagtcgaatgatgcgcgagcaatactggcagcatggacagccctcgaagcactgtcgcctcaaggttataaacgcccagaggatatggcaaccggcgaccgctctagggttgccctattggagcgaggtgtaccatggggaccaaatgcccgcagcaagcccagccataagctttatttcgaggtcgtcctcggctccatcgctctcgacaaggcgacggacgagctggtcaaggtttttggcgaggatgaggagcgttcacgcccggacggtaagaaggcggccatcggctcgatcctgatcgacaaagaaggttatgtgcttgaggacaaaggcgttgccgtttccagttttgcctgggcactcaagccggctctcgacctgaagcttgggagcttagggaattggccgaatgttgagccgcgcattatcgagcatctggatcgaatggttcgccgccacaacgaggatggagaacccataccgatcgatttggatgtcgttcttaacgcttatagatggcttgtgtctcagttcggtgtacccgaacatttggttgagccacccacattcgcgattaaggtgtttcatcatttcaaggccaaggcgccgcctgaaccttcgttactgaattccttctatcttgaagatctcggtgaagcaaccaaattgctcgagacgggcaaagccggagccggtttgcgccgctacatgggaattggcaggcctgaacagaaaatcgacgtgctatcgcccatttccgcagttgagccattcgtcgcaccctcgctcatgccgcaggctcgttggccttcgaaaggcggccatccactggtactgcttcaacaggctgccgtgaatgcggcgcgtgctgagctgaatgatgctccaggtatcatcggcgtcaatgggcctccgggaaccggaaagaccactcttctgcgagatattgtcgtcgggtgcattcttgatcgggccacggcgatgtgcggcttcaataaaccgcaggatgccttttccacaacaggcgagaagctggcattcggctccaatgcattcctgcacttctacaagttacatgcatccttaaagggccatgagatcgttgtagcgtcctccaataacaaagcggtcgagaacgttagtaaagagcttcctctcaaggaagccaatggtcgtcatgaacaaatcgcctattttcggtccatcagcgacctgattgcgaaccccaaacgcgtcggctatttcgaagccgaggccgagggggacatcccctccgacccagtcgaaacctgggggctgatcgccgctgctctcggcaagagcagcaaccgaggcgcgttccagcaaggtttctggtggaatgaagacggtggtttccttacctacctgaaagcagctcgcggcataaatgtcatgcgtgagatcaaggacgaacgaacaggcgaaatcatcgatcgcgtaatgcccagcgtggttgtcaatgagcggcccagcaccaacgaagcggatgctgctgcggcctggctgaaagcgcgaaccgcatttcttaaactcaaggcaacggtagacgccgaaatcgccagcatcgaagagatgcgacgggatatccaggcgctcaagggagcgatcaccgaacttcaaagggctgaagagcgtcgaccgagtctggatggagccgtagaagaggcacaccagattgctgaatcctgccaacgggagcatgagaaggcaaaatcgcagatcgagcaggataagatcatgctcgacagccatcttgctggccgtccaggtttcttctcccgtttgttcgcgactgcggcctggaagtcgtggagatcgacactgcagatgctctcggcgaccttgcagcaatcagtcttacgggcgctggagacagacggtgccctggagcttgcaagggctgagtggagcaatactgagtcccagttacagcaactcgaccaggaaatttccagcaagtgtcaggctgtctcgaaattgaaagcaaccgaggcagaggcacgaaaccgcatgggagacagggtcgttgatgagagattcttcgagcgcgagcacgaggctatccacctgactgcgccatggcttcccgatgaggttcatcgcctgcgggaggatctattcgccgctgccctgactgtgcataaaacgttcatcgatgcttcggccagccgcttgcaacacaaccttgggctattgatgtcgggcatggtggctggtgccttccagtcttccgctcaccgtgaacttctccccgacctttggtcaagccttttcatggtggtgccgaccgtgtccacgacattcgcctctgttcggacgatgttcggggatctgccaccagagagcattggctggcttctggtagatgaagcgggccaggccgttcctcaggcagcagttggagctatcatgcgggcaaagcgctccatcgtggtaggtgacccgttgcaaatcccacctgtagtttcacttcctgaaaagctgaacgtcgaaatctgcaaattcttcgacattgatcagagcgaatggtctgcgcccgcagcatctacgcagacccttgctgatcaggcatcgcgcttcaaatccaccttcgtcatggatgtaggtgatcgagaagtcgggctgccactcctcgttcacaggcgttgccagaacccaatgttcgatgtttctaactccatcgcctatgccgggcagatggtccatgctgtcaggcctaaaagactaggatctatcggctcggctttggggcgatctcgctggttcgacgtcaatggcaatgctgagacgaagtggtgccccgaggagggtgatgcggttgtacgaatgcttaaagagctggccgcatcgggcattacaaatccggacgtctttatcatcacaccattcaagatcgtagagcagaacatgcgtcggcgtctcgacagtgagaccgatctgctgcaagcgctgggagtaaagtggaatgagtggagccgtgatcgtgtaggcacgatccacacgttccagggccgagaggcggacacggtcatcctgctgctgggtgctccgaaagcgagtcagcaaagagcccgtcagtgggcggcaagcccgccaaacattatcaatgtagccgtctcacgcgccaagcaaaacctgtatgtggtcggctcggctgctgcatgggcaggggcgggaacgagcctacaggtcctgcagcgacaattggcgcaatcagcctga

SEQ ID NO: 187733 - DNA, 1029 bp, Klebsiella oxytoca
atggctatggaagttcacgggtttattatttcgtctccgttcgtgttcgtctgcgatggtaaggtttatcgcagccaatcggggaaaaactggacggtcatatttagccgttacggtacgcaagcctgggggaatgatacctatgcttcccagcgcgttgaccgtgcttgcccgccaaatcgtaacgaagaagttcgtttggctttccgtggcgcagttatgcgccacttcaagctgaactacacccaaattgaggcattcttccagcgtcagatcgacgaggacaagcaaatcctggtcgaaggaaattcggttaaacgccatgtgggtggccgcagcagctacagcacaggcagtagcagcacgacgttatctgctcccgcgcccgctccagtcaaaaaggaatccccccatccagcgcttaaacatggttgtccagcaagtcgtttggaagaattcctagcctgggaaaaagcgcaccttgggattttgaatcgtgtcaaaatgccccagcgcgttgccatgttcctgggaacctgggaagaaccgaatgcggtcaaacctgaacccgtggtggccgaagaaccccaggctgaagaacctcgagccgaacggtcgctggctgaagaacgcgaacataaagaagatgtacccttctatggccgtcgccgtcgtgatcaggggaaattccgtgaagatgtgatgcttaactgcggtggccgttgcgtctacacgaatgccattgcggtacgctgcgaagccgcacaccttaaagcccacgctcgcaaaggtggcgcgagctttaaaaacggtctgctgctgcgcgctgatatccacaagctctttgacgcgggactatgtgccatcgatccgcacacgcttaaactctggttcgcgccagacctggtaaaaaaagacgcagatctcgcggccattgatgggataacgatgcgcaaaacgctgctccctatcaacaaagacaacatcgaagaccgctgggatgccttcgttaagatcttgctggcatga

SEQ ID NO: 187734 - DNA, 252 bp, Klebsiella oxytoca
atgacccagcaggaacggttttgtcaggcctgcggaatgccgatgtccgcacctgatgcacacagtgccagcgatcactattgtgcgtactgcagcgacgccgacggtaatctgaaatcctgggaagaggccatttccggcctggcgggctttcttgattcctggcagaaggtcggcgaggacgagtcgcgcaagcgggcaaaacgttatctgacggcgatgccagcctgggcacataaagcggacgagtga

SEQ ID NO: 187735 - DNA, 354 bp, Klebsiella oxytoca
atgatgaataaagttccacaatttctctgtaagagcactgaacgtccagatctagaaacatctttcctggatggaagctccagaaatgcagtgatattactgtcatccgctattggtattgggacatacaatcctggatggcgctggtcgcttcacgccggagctatgacgggtaaaacgtcagaacgtcatattggttttatcatttcaggggagttgatggttcgtgacagctccggaaatgaaagtcttgttcatgccggtgaagcatttgaagttgctgaaaatcacgatgcctgggttgtgggggatgaaccgtgcgttgcattagatttcacgcagttaccacactga

SEQ ID NO: 187736 - DNA, 648 bp, Klebsiella oxytoca
atgacaatgcaggaatttgaagaacaaaagttctcggaaagtcaacttaccggtacgaaggtttcaggcgtgaagttttacgcatgcgacttttcggagacagacctgacagaaacgcaattcattaattgccatttctggcatccggataaacaggttgggggtgacttcagcggagcaaagctgaaggaggccagctttataaactgtgatctgacgatgagcacatttaagaatgcagatctgtttggtattgaaatcagggacagccgcgcaatggggtgcaatttccgtcaggcacgatttatgaaaaaaatcagtccccgactctggatatgtagtgccttcataaccaaaagtaatctgagttatgctgatttttcaggcgcgacgctggaagagtgtgagctgtgggaaaactgctggtatgggaccattgtcaccggtgccaatttcagtggctcagatctgtctggtggagatttcaccaatttcaactggcgctctgctgatgtgacgaactgcgatctgaggggagctgtaacaggagaacttgatatacgacgcaccaatcttgagggggtcaaaattgatgacgagcaggctgtatcattgatggcctacgtcggtatcacagtcactgagtag

SEQ ID NO: 187737 - DNA, 378 bp, Klebsiella oxytoca
atgacagcaccactgaggtttatagccaccggcaggcatatcagcgaatatcctgatcctgtctctttcacacgagggacttatctgacaattcgtgagaagtacgaggggaaggaagggtgggacaactggttctactgcattgctcccggcggtaccggtggctgggtgcctgaacaggttttcatcagatttgaggggacttttcggggtattgcaacggaggattacaccgcccgggaactggaggtaaagaagggggatgaggttgccgggctgagatcgctgaatggctggatgtggtgtgaacggctttctgacgggcagaccgggtgggttcccctggcgctgctgcataagcatgaagcgaaagcctga

SEQ ID NO: 187738 - DNA, 1488 bp, Klebsiella oxytoca
atgatatcagaaaaaaatccctggcttgtgcttgccgtggtatccgccgccctgtttcttgtggtggtggatatgacggtactgaacgttgcccttcccgtgctggcccgtgagctgaacgccaccaatgcggagaagctctggatggtaaatacctactctctggtgctggccggtctgttgccaggctgcggcaccctgtccgaccggatcgggcaccggaaggtattcacggccgggcttgtcattttcggtttagcctcggtaatggcggcttttgccccgtcgtccggctggcttatctctgccaggggcgtactggccgtgggggcggccatgatgctaccggcaaccatatccattattcgtcttgtgttcaccgaagataaagagcgtgccgtcgcaatcggtatctggggagcggtcaccgccagtgcggctgcgctggggcctctcctggggggagcgcttctggcgcatttctggtggggatcggtattccttatcaatgggcctgtggtgctgttaaccctgttgttcacatttgttctgatccccaacattcccggaaatgcaggacgacactgggatttactcaccacggttgtgcttaccattgcactgatatcttccctgtatgcaataaaaagcgtcctgaagagcagcatcaactgggatgaggtggccattgcggtggttgcggggatcgttttctttcgctggtttttacagcgtcagacacgccttccgtctccgctgattgatttcacccttttccgcaacgtacgcttttcagtcggaatggccggggcgttctgtgccagtgtggtagtggtgggtctgcagtttgttctgagtcaggagcttcagcttgtgcggtcattttcgccactgcagaccggcctctttgtcatgccggtcgcggtggggtcctttgtggcggggccactgctgggcgccgttcttttccggtttggtgttgagcgaatgatgtcattcacgctcgggatcgcggcggccgggctgacgctgtatacgctggcatggatgcattcgcttctgctctggcagctggcagcactcggcctgacggggtttggctttggcggcgttatgtcagtaggctccacgcttatcatgatcaatgcgccggaagacaaggcgggtatggccggtgccctggaaggtatttcctacgaactgggagggacgcttggcgtggccgtgatgggaagcgtgatggcatcggtatacacccgttcctttacgccgccggacaatgcttcacttgcgcccgtggcgtgggacagccttgaccagacgtttattgctgtcagcgggctgtcggcaggggttgctgacggggtgatcctcgccggaaaatcagcatttataaacggtgtctcggtaacactctacgcggcagcggcggtcacgatcgtcctgtttattgtcatggccgcccttgccagaaataagcatccatag

SEQ ID NO: 187739 - DNA, 1665 bp, Klebsiella oxytoca
gtggcaaccacctttcagacaggccaggaagaaacgaccatacttttgcgaccggaaaatgccaacaaaaagtatgaagcactatttctcgagattgattccgggcaaataaaactacctatgttccagcgggaattcgtatgggacaaagagcagagcgccagactgattgacagccttttgaaaggctaccccattggtacgtttattttctggaaaacaagagaagccctcagatcggtgaaagatattggtaaccattcattgcctgaaacccccaagagcgactacgcccaatacattctggatggtcagcaacgaattacttctctttatgcgattcgtaaggggctccgtatttcaaaagacgggaaagaaatcaactacaaagacatttatgtcaatcttgactatgacccgctaaacgatgaacaaattgtgacaagccagagggaggacgacaaagcttatgtctcagtgcatgaccttctcactcagaaaatgggggatttgttcagacaggttggtatggacaagtcggatcttgttgaagaatacaagaccaggctgactacatacgattttaccactatcacaatcaaggactatccaatagatattgcttgtgatgttttctccagaatcaacacaggcggcaaaccgctcactctctttgaaatcatggtcgccatgacctatgacgaggcaaagggctttgatctagcattgaaatatgacgaacttctcaacggcagtgatgaaaacgatactagcctgagcaaggcaaaatttgatactgtccctgctgcaactgttctgcaggcagtggcagcgattaccgtagacagtatcagagccaaggatattctgaaaatccgcagggaaaagttcattaccaattgggagcctatggtttcttccatgtttacggcagttgactttattagaaccaagctgcatgttcccgtatcacaactactcccatatgcttctcttcttgttccgttcacatactttttccgcaagaataacaacaaacgaccaacagaaatccaagcaaaactccttagacagtttttctattgggttggcttgaactggcggtacagcggggcaaccgaaaccaaaattgcagaagaccttaagaaaatgaatatgattctgcaggagaaaatgccgaagtacccttcgggtgaactcaatgtatccgctgctgatattagcgaaacttggttcacagccggtaattcaaatataaaagctattctttgcctgtttgcatctcacaaaccacggaatcttgatgatgacagtgatgttattcttgataattcaaatctgaaaattgccacaagcaggaattatcatcacttcttcccaagaaagtatgttgagaggcattgtccttcgatggagcctaatcttatcgctaatataacacttattgatgcggcctctaacaacaaaattagagcaaaagccccgagccgctatattaatgaattaaatacaggaaattcaaaattgaagtcttcacttcgctcccatctaattaacagcccgaaaggttttggaatcatggaagatgactatgaaaaattcattgagaaacgttctgcggcaattgcagaagcgctcaatgaggctttgaaccctaaaatttga

SEQ ID NO: 187740 - DNA, 141 bp, Klebsiella oxytoca
atgttccgcatcaaaaccctgctgagtggtcatctgagcctgcgggactatgatgcgcaggcgggtgaagcgatggcgatggtcaaagcgctgaactggatgactttgttgggtacgccgcacattgtccggatcgcataa

SEQ ID NO: 187741 - DNA, 915 bp, Klebsiella oxytoca
atggttagcacatcctctcagcatgtcgaggatttaagtcttgcccagcgcgagcgacttgcctatatcgatttccggctttacttcttcggtgtgattggccgtcccgacctaatcgaacgtttcggtgtggcacctgcgggggctacacgcgatctagcactgtatagggatatcgctccacagaacatcactttcgacggtagccataaggtttaccgcattgggttggcattttccccgttgtttaagcacgcttcacatcgcgtgctatcggcactggctctaggtttcggtgatggcataaatggtgaatcgcagccaatgttatcttgcgaatcacccactactttgagcacccccaagatggatgtgcttgctccaatctgccgtgcaatctataccaaaaaaccagtagttatccgttaccattcaatgagcagtggtgagtccgaacgggtcatcgtgccattagccttagtagatactggtttacgctggcacgttcgagcctttgatcggaaaagcagcgagttccgtgatttcgtccttacacgtatcgaagcaccgagcttgctcaatgaggaggcgcaggccaatgaacaaccacacaatgacatccaatggatgcgaatcgtcgagctgaacttcgtgccacatccccgccttgagcaccccgaaattatcaaaatggactacgggatgatcgacggttcgatccggatgcggatgcgtgcagcggtagcgggctacatgctgttgcgctggtgtgtagactgttcgcccgactacagcctcaaagaagaacaatatcgcctttggctcagcgatccactggcgctgtatggcgtggagaacgccaagctagcaccgggctatcaaagccctgcagcaaaaacattacgtaaaggataa

SEQ ID NO: 187742 - DNA, 1557 bp, Klebsiella oxytoca
atggcattaaacaataccgtcatgaacggcaacggggacaacctcggcttcgaggcagatcttttcaaggctgccgacaaactacgtggaaatatggagccatccgactacaaacacgtcgcccttggactcatctttctgaaatatatctctgacgccttcgaggccaagcacaaggcgttacttgaggaagatgcgcaggctgccgaggacaaagacgagtatctcgcggacaacgtattctgggtaccgaaggatgcccgctggtctcatcttcaagcctacgctaaagtccccaccatcggaacattgatcgacgacgcgatgcgcgccatcgagaaggataacgaatcgctcaagggcgtgctaccgaaagattatgctcgcccagcgctcaacaaagtgatgcttggggaactgattgacctgatctccggtattgcactcaatgaagaaggcgaccgctccaaggatatcctcgggcgcgtgtacgagtatttccttggccaattcgccggagccgaaggcaagcgtggcggcgagttttacaccccacgttctgttgtgcgcgtcttggtcgaaatgctcgaaccctactcaggccgcgtctatgatccatgctgcggctcgggtgggatgtttgtgcagtctgagaagttcgttcaaaagcacggtggccgcataggtgatatcgcgatttacggtcaagaatcgaactataccacatggcgactggctaagatgaacttagctgtacgtggtatcgactcagacatccgttggaacaacgaaggtagcttccataaagatgaactacgcgacctcaaggccgatttcatcctcgccaacccaccattcaatatctccgattggggaggagatcgtctgcgcgaggatgtgcgttggaagtatggcgccccccccgtaggcaatgccaactacgcttggcttcagcatatctatcaccaccttgcaccaaacggtacagcgggcgtggtgctggccaacggttcgatgagctctaaccagtcaggagaaggagacatacgcaaggcaatgcttgaagccgatacggtggattgcatggtggcgctccccggacagctcttttactccacgcagattcctgcctgcctctggttcttggcccgtaacaagaatcctggtaaaggcctgcatgataggcgcggacaagtgctattcatcgatgcccgtaagctgggcgtactggtggatcgcacccgacgcgagctaaccaatgaggaagtccaaaagatcgtcgatacctatcacgcttggcgtggagaagaaggcctaggtgagtatgccgacatggcgggcttctgcaaatcggcatcgattgatgagatccgtaagcacggatatgtactgactccagggcgctacgtgggcacagcagaacaggaagacgatggcgagccttttgaggaaaagatggcgtgcctttcaaaacagtggcgcgaacaattggcgcaagccgccaagctgaatgcggcgattgaggcgaacctgaaggagcttgggtatggagaatga

SEQ ID NO: 187743 - DNA, 1314 bp, Klebsiella oxytoca
atggagaatgagttagtcattcttccgctggaagattgtcttgatgcactaattgactatcgcgggaagacgccacgcaaaacagatttcggtattccgttaatcaccgcgaaagtagttaagtcaggacgcatcgaaacacccgatgagttcatcgctgaggaagattatggatcatggatgacgcgcggttatccagaaatcggtgacgtcgtgctgaccactgaagctccacttggcgaagttgcacaaataaaattcctgccgatcgcattagcacaacgtatcgtcacgttacgtggcaaacgtgatctgcttgatagcaattatttgctctatttgctccaatcccaagaaatgcaggcaaagctcgtcagtcgtagttctggcaccacggtgatgggtataaagcaaagtgaacttcgcaaaattgaggtggcattgccacctataggagaacaacgcgccatagcccatatcctcagcatgctggacgaaaagatcgaactcaatcgcaagcagaacgaaacacttgaggctatggcccgcgccttgttcaaggcatggtttgtggacttcgaaccagtacgcgccaaacaggaggggcgctggcagcgcggtgtgtcactccccggtctgcctgcccccctctacgatttattcccagaacaacttgtagattcagagttgggggagattccagaggggtggaagatcggtagtttttctgatgttgtcgaaattatcggtggtggcacgccaaaaacttcggttagcgaatactggggtggagacatcccatggttttctgtcgtagatacacctgcatcaagcgacgtgttcgttgtacaaacagaaaaatcgattacccaagcaggtttaaatggaagttcggcgagattgattaacaaaggcacaacaatcatttccgcacgtggaactgttggcaatttggctatcgccgggtgcgatatgacattcaaccaatcgtgctatgcgttgcgaggtaaaaacggttcaggcaactacttcgtatttttatccactcaacgtatgattgaacagcttaaatcaatgtcacacggctcggtgttttcgactataactcggcaaacatttgaagccgtgcaatcagtgcttccacctgaattattgcttcaacaattcgagcgaaatactactgatttgttcgatgcaattctcggcaacgtaagcgattcacgcactcttaccagacttcgcgacaccctgctgcccaaactcatctccggtgagttacgcgtgctggatgcagagcgcattgttggagcctga

SEQ ID NO: 187744 - DNA, 1050 bp, Klebsiella oxytoca
atgaagcttcagcttgatccaaacaattatgaggcttgtccgtcgtacaacgaatggttagatgagcagtactcagaacaatcgggtggcacactcgacatccgtggttatcagccaagaccaagttttgttcttttcaccatgagcccggacacttatgaagcggcattttcggactttacccaagagcgcgaagaaggaataaaagaatccgtatgcaatcaatttccatctccaattgcttactatttctaccgatttgaaaatgggtacgagagtgatctgcaacgtctacaccttcttcgagatacttgggagtcggtaatcgatatccttcatgcgctagccgtagcggaatgccgtcatagaaatattcaggtcgcagatccgctgaggtttaaggatttgttcactgatagcatcgcaaaaaggcttgagaacatcgagaggatcactaaccagctgagtgctgaaggtatttctccctcagtcgcaaaaatttcaccggcagcaacacttgctgcgatgaaggagctcaaccaatctaggaatgctttctctcatagcgcagcgcagtctgaggcgcaggcgcgaaattggatcagcgatgcatatgtagatgtagtggaagttctggcagaccttgatggcctagaagacatccagattgttcggtatttaagtcaggttgatggaacaactctaagatgtgaaatatttagaggacatagctccacaagaacaatccagaatatcaagattagccatcagcaaatgctagattccgccgagaaatattttcgtcctggacagatgcttgtaattgcagacggacttattttcggtcttcgtccgatgatttgctttcgcgaggatggcgttggccatacgactcgtctttgtattttcagaaagacgcgtggtgaagcacctaatcggcggcttgaatacgaaattattggtgaagccgtacgccatgaagaagatcgaaataactttgcaatagaaataaacgaactgcgtagtttgtttggattggaagaggaatag

SEQ ID NO: 187745 - DNA, 3135 bp, Klebsiella oxytoca
atggcatttctttctgaagcagccgtagagcaagcattactggagcagatgcacgttcttgattacagcatcgaacgcgaggacgatatcggtcctgacggacgcagaccggaacgcgaaagtcacgatgaagtcgtgctcaagagacggttcgaggatgccgttgcacgcctgaaccctgacttgccattggaggcgcaccaagatgcggtgcgccgcatgatgcagtccgaactaccatctcttctcgaggaaaaccgtcgtatccacaagttgataacggaaggtgtggatgttgagtactacgccgacgacggcacactgactgcgtgcaagatcgcactcatcgacttcgagcacccagagaagaacgattggttggcagtgagccagttcatggtgatcaatggagagaacaagcggcggcccgatgtggtggttttcgtaaacggattacctataggtgtaatcgaactaaaagcaccaggtaatgccggagcgcatctgttaggggcattcaaccaactccaaacctacaagcaggaaattccttctctattcaacaccaacgcactactggttacatcggacggcattgcagcccgagtgggatcgttgtcggcagatcttgaacgtttcatgccatggcgcactaccgacggcgtggatgttgcaccgaagggagctccagaactttcaacattaatcgagggcgtgttcgaacagcgacgattactggccttaatacgcgatttcacagtctttgccgaaaccggatcagggctcgccaaaatcattgcaggataccaccagttccacgcggtacgacacgcggtcaacagcactgtgaatgcatcctcgccagagggtaatcatcgtgctggcgtcatctggcatacccaaggctccggcaaaagcctgctgatggcattctacgcagggcaactcgtcaagcatccggctatggccaacccaacgctagttgtgctaaccgaccgcaacgatctcgacgaccagcttttctctactttctcgatgtgccgtgatctgatccgacagacgccagttcaagctgagagccgcggggatctacagaaagttctgagccgagcatcaggtggcgtaatcttcacgactttgcaaaaatttggcgagattgatgagcctcttaccattcggcgcaacgtggtcgtaatcgcagatgaagcacaccgaagccaatatggcttcaaggccaaggtggacgtgaagactggcgaaatctcctatggatttgccaagtacatgcgcgatgccctgcctaatgcatccttcatcggttttaccggtacacctatagaagcaggtgatgtaaacaccccggcagtattcggcaattatatcgatatttacgacatcagccgagcagtcgaggatggtgcgactgtgccgatttactatgaatcccgtctggcgcgaatcgagctcgacgaggatgagaaaccgaagatcgacgtagaggtcaacgaattgactgaggaggactcagaagccgatcaggaacgcttaaagaagaaatggtcaacggtagaagccctagttggcagtgataaacgccttcatttagttgccaaggacatggttagccattttgaggagcgcgtggccgcactcaatggcaaggcgatggtggtgtgtatgagccgccgcatctgcgtcaagctatacgacgagatcatcaagctgcgcccagactggcacagcaccgatgacaacgcaggcgcggtcaagattgtaatgacgggggcggcgagcgatccgcaggaatggcaacagcacataggcaacaaggcccgacgtgatctgctggccaagcgagcccgtgatcccaaagatcaactcaagcttgtgatcgtgcgagatatgtggctgaccggatttgatgcgccgtgcatgcacaccatgtacgtggataagcaaatgcaaggccacggattgatgcaggcaattgctcgcgtgaatcgggtgttccgcgacaagcctgcaggactaatcgtcgattacatcggcatcgcacaaagcttgaagtcggccctgcagcaatattcccggaaagatcaggaaaacacaggggttgacgaagcgcaggccatctcggtgatgattgagaagtacgagatcgtacgggacatgtaccacggttacgactatgcctccgcgatggcaggtactccacaagaacgccttgtgatgatggcaggtgccatagagtggattctcgacctccagcaaaagttggcggcgaaagagaacaccaaagagggtaagaagaatgcgcatcgtcgataccaggatgcagtgctagcactgtccaaggcattcgctttggcatcagcatccgacgaggcccgagaaatccgagaggaagtcggtttcttccaggcaatacgtgccgctctagtcaaaagtggtaatggttcaggtgcgacgcagcaagagcgcgaattggcgatccaacagatcgtcagccgagccgtggtctcgaccgagatcgtggacatacttgctgctgcgggtattaagagtccagatatttccatcctctccgacgagtttctcactgaagtacagcacatggagaagaagaatcttgcgttggaagccctgcgtaaacttctcaacgatggaattcgctcacgtagcaaggccaacgtggtacaaaccaaagctttctcggagcgactggaagattcggtggcacgataccacgccaatgctatcaccactgccgaagtgctgcaggaactgatcaagctggccaaggacatccgtgcgtcgcgccaacggggtgaagaacaaggtttgtctgaggatgagattgccttctacgacgcattggctgacaacgaggacgccattcaagttatgggtgacgataaactgaaactcattgctcatgagttgctaatgagcctgcgtgaaaacgtgtccgttgactgggctcatcgcgagtctgcacgtgctcggatgcgagtgctggtgaagcgtattctccgtaagtatggttatccaccagatcttcaggaaacagccgtacaaacagtacttcaacaggctgaggctttgtcatcagggtggtcggtttcacgtggatga

SEQ ID NO: 187746 - DNA, 1875 bp, Klebsiella oxytoca
atgtggcatgacaatgagacaaccgttgattacgttaattttcgcctagtagcaaaagcatgtgcagagctcattcaagataccggtggggagccaatctcgattgggatctcgggaggctggggcgcgggaaaatcgtcacttgtacggatgatcgcatctgagttatcgatggaacagactgtcggagtgggtattgcctctgaggaacgaccaaaacatgtagtgataactttcaatccatggctttaccaaggctttgaggatgcacgcaccgcactactacagacggttggagatgcagtacttgaggcggtagtcgctcagaatagtggacttttaggtaaggcaaaatccctcgtcaagcgcattaattttctacggttggctcaacttggtggagaagttgcagccactttgatcacaggggttccggtcggtcttattggaaaagttgtcgaagctggaaaaggtgcattgcagaatgaatcacttaatgaaggcatcgcagtcgccaaagatgcatcagaagctaccaaaggactcttgaacgaagctaaacccgtttcgctgccaaaagaaatacaatcctttcgggaagccttggaagagctactcgtcgagctgaatatcacgttggtagtctttgtcgatgaccttgatcgatgcctacctaagactgctatttcaacgctcgaggctattcggttgctgctgtttctgcgtcgaagtgcattcgtcatcgccgcggacgatgtgtttattcgtggagccgtccgtgtccactttgctggtactggtttggatgacgatatcgcaaccaattattttgacaagttaattcaagttccattgcgagtaccaagactgggcgctaacgagactaaagcatataccgcgttgctatttttggaacgcgctcaccgcagcggacagctgaaaaccgagagttttgagaaagctaaactcagcgtagaagctcgactgcgagaaacttggacgggaaaaaccgttgatcttgcattcctcgaaacgctggtggaaaaggagaatgctgagttgctcgacctaatggggctagctgagaggttagctccattactttttagtgcaagtacagtccaggccaacccacgactgattaagcgatttcttaataccgtgtttttgcgtaaaacattagctaaaccacaaggcattgatgtggatgtacaaattctggctaagtggcatttgctcgagcggtgtgatgaagctacggcgaatgcattggcagaaaaggtttcggccgaaaacgaaggaagagttagcattcttcatgacgcagagatggctgctaaagacccggataatacgctccccaccctatttggagataaagagtttgttcgtgagtggctgcagcttaaacctctgcttggtgatatggatatgcgacctatattgcacctcagtagagatagcactgttagggattttggtgccgatgatctgaacgtagcaggtaaagcattacgtgatgcgttggtggcagcccgaaattcgaacgaaacattaaaacagcaaataatggatgctggtgaactgcagtctggtcttgccatggctcgtgcctgggaaattcggcgaccaagccgtttatggcaaaaggccgaagaggtcttgatgcttatcgaggtgtctcatattcacccaagtaccggggctcgagccgctgcactcattagtcaggcacctatttctcagctcgccccaggcttggtttcagctttgacagagtgtagctgggcgaaagatgttttatctaagtgggaacgggacgaacagattccgaaacctgttaaacgtgcaattgaaaatgcaaggaagatataa

SEQ ID NO: 187747 - DNA, 873 bp, Klebsiella oxytoca
atgggtacctcgacctcaagcgcaggagccggttctggcgcatcatttgatccaccatggctagatgatgctgaaactggcattgactctagccatgcagacaaaccaatatcaccaaatcccgctccagaagatggctctgatggtgaaaatgacagtgactcggagaatgacaacactacaccgcagcatgtagaaagtccggcggtagcgccagcgggtcgttatcaggaagcacgaagggctctcacgggtttcgtgcaatctggtagtggatctgatttacggcgaggtatttcgagtttcattaaaaaaggtatgggcggctcagtaaaagcggcgagtcgtatgcgcactagcactatagcttctgcttcattagggggctttctggcaacagcccgagatggaactgaccctgatatcgatgcgtgggttgcttcggtaaaacagagaaatctatctgcccatgatactgcgctagaagttgtacaaaagctgctgcccacgggtggaagtattgacgaagagtcagccaagcatgcaatgaatcaggccatctctcatctttatgaagtagatcctactgccgatatcttcaatcttgcggatgaccagattgccaatgtaatggcattcacagtggcgtacgatgtttacaaccgggtacaacttgaactcggaagggtttttgaaaagctaaaatatgtacccagcgtaatacaacagcgattagcacaagtgcttgactacattatggttgttgttaacaaatctatgggaaaggtacgctctggcagtacttcacattccatgcgagaaattgcgacttcggcgttacaagacgcccttacggtgttctctgaatcatga

SEQ ID NO: 187748 - DNA, 1257 bp, Klebsiella oxytoca
atgaaaattctttgctcaagtatcaattcgctaccccaaaatgtgccagtaggcactcgtgcattcaccttcctagaggcatcatcacgacccggaattggacgcattgcctctggttggctgcgtaagctagaaagtgctggctatgccccatcgatcccagtgtgggatttcatgcttttttgttttgctgtttatgcctcagatattgctgttcttcgcaaaaatagtgctgatggttggactcgccaaattgagctcgatattacacttaatgatccagttccttgggaagcaaataaaactattgcagaggaaatgcttcgagttctttctggtgacttttggacgctgcacttcctgcctgggggcccaacaccaccaaaaggcaatcacagggagtgcgaccgagattgcgtgtctctactctctggaggccttgatagcctgataggtggcatagatgcaacagcagcagggcgtaaaccaatttttgtgtcacaacttgcttttgaagattctgctcggcaagttgcctatgctgatgcactaggtggaggcgactggcatcaacagtggagtcataaagtcgtttttagtggtaaaaaagaaacatcgaccagagctcgctcaatggcgttctatggccttgctgtgctcgctacatcattgttgtcggtcaacagagccgaaatattggtaccagaaaatggattcataagtatcaatcctccattgcttccgggtaggatggctagcctcagcacaagaacaacacatccacagttcatgactttccttcaaaaattacttgatgccgttggcgtcaatgcccaattgtgtatgccctatcggttcatgacgaagggagagatgttggcacagtgtgcagatcaaacactgctagcaagatttgcatgtgattcgacaagttgcggtcgtttccgtacctacaaccgaacacactgcggtcgatgcgtgccatgtatggttcgtaaagctgcgattcagcgctggggtatttctgatacgacaagatataaattcaccaatctgtcgttggcaggaaaagcaaatgctgacgatccaatggcagtggcttgtgctgtactcgccgccgaaaaaaaagggattgatgccttcctaggggccacactagcctttgcgtcagctgcggatcgccctcattatcgtcacgttgctgaacagggtctagctgagttagctacattgcttcgaagggacggaataatttga

SEQ ID NO: 187749 - DNA, 735 bp, Klebsiella oxytoca
atggatttccactgccacttagatctttatccggatgccaagaaagtctacattgaagctttgaagcgaaccgaatttgtatggctggttacaactagtccaagagcatacgcagcaacctcgaaagttctggccaccactcagaaatgtttcatttccccaggtctccaccctgagatagcagataaaaaacatagcgaattggaaatgttgctatcacaaatggaggattgcactggtattggcgaaattggtctggatggttcatcgcggtacaggccgtactttgaacttcaaaagaatatatttaaagccattgttgaaaagtgtgtaggactaggtgggcgagttctcagcattcattctcgggctgctgccaaggaagttttagatattcttgatatgaaccctgggtttggcacagcggttcttcactggttcaccgattctccttccgtccttcgaagagcagtcgatgccggttgttggttcagtgttggaccaacaatgatggagtctgctaatggacggaagctggtagcactaatgccacgtgatcgagtggtcccagagagcgatggaccattcgcgaaaatgcatggtgtgcatgtaatgccatgggaggcaaataatgtgacaattaaactcgccgagatatgggatataccgcaagatgaagcttcatttttgctgaaatcaaatggcttacatctaatgcggctgctaaagatctag

SEQ ID NO: 187750 - DNA, 879 bp, Klebsiella oxytoca
atgccgaccctgatgtattcttttgcccaactggaagccttcaccgctgtggttgagtgcaaaagcctggcgaaagcggcgcgccagctgggcaaggaccgcacgacgcttcgcgatttgattgagttccttgaagatggtctggggtatgcgctgtttctgcgtcaaggtcgcagcttgcagctgacgccggagggggaacagctgcagcgtcaggcgcacctgctgatgcgccaggtcaaagcctttgaagcctttgccaaagaagtgccgaatagcgccacgcaggacattacgctggcctacgatccctttacccccagaacgttgttgcaggcgctgattggctccatggcccggcgcaacgttcgtctgagcctgattaacgcctcgcgtgacgaggcggaaaggctgctggcgagtggattggccgacctgggtatctgccaggcgcgacatcgcagcgtgggcaacgctatggagtggcgcgccctggggtcaatcgagatggatttttacgcctccgaagtgctttttcccgccgctaaacaaccgctttctctgctggaactttcgctggcgccgcaggtgattatgcacccggatactgacgagcccgtggcccgccgtctgcagatttcagggcgcaccatttttaccaacgaacaggagatgctgcgcgccctgcttgaacagggctgcggctggggatttttgccgacgcacatgaatgcggcgcggtggaaaaacgtcaaaaaattgccgaccgaagtgggtaatcaggggatcggccaaacgatggtgaccatctggaagcccggcaacgacaggcggacgctggtggctgacgcgctggccttgttgccggaactgtggtga

SEQ ID NO: 187751 - DNA, 747 bp, Klebsiella oxytoca
atgtccagacatccgcgcgttttctttgctatggcgctgttaagcgccagcctgttcaccggtcaggcctttgccgatcgcaccctcaccgaccagctgggccgtgaagtcaccctccccgaccgcgtcacccgcgccgtggtgctccagcaccagaccttaaacctgctggtgcaacttaatgctgctgacgacgtcgtcggcgtcttgagcagctggaaaaaacagcttggcccgcagtttgcgcgctttatgccgaacattgaaaaactgccgatgccaggcgatctcacccaggtcaatatcgagagcctgctggcgctgcatccgcaggtagtcttcgttgccaactatgcgccgcaggcgatgatccagcagatccagagcgccgggatcccggtggtggcgatctctctgcgccaggatgccgcaggggagaaaaacaaaatgaacccgacaatggccaatgaagagcaggcctacaatgaggggctgaaacaggggatccgcctgattggcgaagtggtcggtcgccaggatcaggccgaacagctgattgattacaccttcagcgcgcgcagtctggccaatgcgccggttgccgacatcccggaaaatgagcgggtgcgggtgtatatggccaatccggatctcaacacctacggttcgggcaaatataccggcctgatgatgaagcacgccggagcgctgaacgtagccgccgccagcgtgaagggggcgcgctag

SEQ ID NO: 187752 - DNA, 1665 bp, Klebsiella oxytoca
atgacaacatccaatcctgatatccagcccgccgtacagcacagcgcgcaggtcgcgattgccggcgccggcccggttggcctgacgatcgccaactacctcgggcagatgggcgtcagcgtggtgctgatcgagaagctcgagtcgctgatcgattatccccgcgccatcggtatcgacgatgaggcgctgcgggcgatgcaggccgtggggctggtagataacgtgctgccgcataccacgccgtggcacgcgatgcgctttctcacccccaaagggcgctgctttgccgatattcagccgatgaccgacgagtttggctggtcgcgccgtaacgcgtttattcaaccgcaggtcgatgccgtgctgtacgacggactcagccgctttccccacgtgcgctgcctgttttcccgcgaagttgaagcctttagccagaatagtgacggtgtcacgttaaatgttaaaggcagcggcggcgagcgggaaaccgttcgcgccgactggctggtggcctgcgacggcggagccagctttatccgccgcacgctgaacattccttttgaagggaaaaccgcgccgaatcaatggattgttatcgatattgccaacgatccgctggcgacgccgcatgtctatctgtgctgcgacccggtgcgcccgtacgtctccgccgcgctgccgcacggcgtcaggcgtttcgaatttatggtcatgcccggcgaaaccgaagcccagctcagcgagccgcacaagatgcgccagctattgagcaaagtgctgccggacccggataacgtcgaactgattcgccagcgcgtctatacccataacgcacgcatcgccgaacgctttcgcgtcgatcgcgtgctgctggcgggcgacgcggcgcacatcatgccggtctggcagggacagggttacaacagcggtatgcgcgatgcttttaacctggcctggaaactggcgctggtggtgaacggcaaagccggagaggcgctgctggacagctaccagcaggagcggcgcgatcacgccaaagcgatgatcgacctgtcggttaccgccggcaacgtcctggcgccgccgaaacgctggcacggcgcggtgcgcgacggaatttcgtggctgctgaattatctgccgccggtcaaacgctacttccttgaaatgcgtttcaagccgatgccgcagtatcgcgacggcgcgctgctggcggaagacgaaggcaaaacgtctccggttggcaaaatgtttatccagccgaaggtcacgctggaaacggggcaggtgacgctgctcgatgaggtgataggcgccaggttcgccattatcgcctggggctgcaatccccggtgggggctcaccgacgagcagattgcgcgctggcgcgcagtcggggtgcagttcatccaggtcgtgccggaagtacagattcattgcgatcaggacaacgtgcccggcgttatccgcgtcggcgatacgcaaaaccgcctgaaaaactggttcgcgcagcacgataccgccatcgccgtggtgcgtccggatcgcttcgtcgcgaccgtagctatcccgcaaaccctcggcaaaaagctcaacgcgctggcgagcaagatgcagctggcctccgcgcaagcgccaaccgtgattgaacaggtggcctga

SEQ ID NO: 187753 - DNA, 432 bp, Klebsiella oxytoca
atgtcgggagtgttggcaagtacagccgctgctgttgggatcattgataaagctgtaggaattgcaaagaaacttgctgatgatggcggggagcttgatagggcaactctcaaacttgagcttgcaaacctcatggcagaacttgctagtgccaagatggaagtcatcaccacacaggctctgttgtttgatgcagaacaaaaaatcatagatctaaaagaaaaactgaaagacaaagcagcattcacattcagtgatggagtattttgggctgaaggtgatactactgctttctgtcccaaatgctatgaaaacgaggataaaaaaatacatatggtatctcgtgaaagagcatatgctggttttggctctaccattgcgaagcctaattggtattgtcgagtttgcaaaacgacattcaatcgatcgtga

SEQ ID NO: 187754 - DNA, 1671 bp, Klebsiella oxytoca
atgtggactaataccaacagcctagccattattttgtgtttaaatctgctcacctgttttactgcccgcgcgggtattgaggccgcaacggtaaaccaggttgaacaggataaagcccgtgaaagcgcattaatgccccatcagcagcaataccaatcctctcgtagccatgtaaaaacgcaaactttaatatttcccgaagaagcgacctgcagatatatcacgcaagttgatattgcctccgaggacaaagcaaaaaccaccgccctcctcggaaagatcgcctcccaggcgattggccattgtttaggtgtggaaggaattcgtctgctgacgaccgctttgcaaaatgagctgataacgcaagggtatatcacttccctgatcgatgttccgtcccagtcattagaaggcggcattctgaagataacgcttgtttatggcaaaacggggcatattgcttttgcgccgaatagcgccacgacgaacctgtggacctcgatgcccacgcataccggtaagatcctgcgccttagcgatcttgaacaagggatggctaacctgcagcgccagcctggcgccagcgcccatatgaaactgcggccgggggaacatatcggcgagagcgatattgaaatcgcccgcgtaacggataaacagtggcagattggcgcctggcttgatgatgccggtagccgtgccagcgggcgctatcagggcggcggcgcgctgtacctgtacgatttatcctcactgaacgatattctgtccatctcggcaggcggcgacgttgaattcaaccagcacaacgacggcaaccataacggcaacctttactactccgtaccttttggttactggtcattgagcatgtacggctcctacagccagtaccgccagatgtttaaaggaagatggtcaagcatcgattataaaagtaaaaaccgttattacagcgcgacccttagccgcctgctttcacacacccgacagcaaaaaacgaccgccgatctgcgcatagcgaaaagcagttcacactacttttttggcggcgatgagctttacgttatgcgcaaacagaatccggtctgggaatttaccctgcgccaccagcgctattttaacaataaaattgtcgacgccagcgtgggtattcagcgcagccttccgtggctcagctccgtgcctacgccagaggaaaaagccggtttatacagccgccattcgcgcgtcgtgcatgccgatattcaggcattaatgcagtttgccgcaaccggcgataaatttagctggatgccgcgtttccatgcccagttcagcccggatatattatcttcggacaaccagtttaatatcggcaatcgctggacgattcgcggttttgacggcgaaaatacgctatcggccaatcagggctggtactggcgtaacgactttagctggaatatacctactgccgaccggcagttatatcttggtctcgatttcggcagaatcatcggcaacgagcgcgcgcagcaagggaaaagcctttctggcgcagtcggcgggatccgtggagaaatagcatcaacgcaatatgacttttttatcggcacgcctatcagtaaacctgatgactttcatagcgatgccatgaatatgggcttttcattacagtggaggtattag

SEQ ID NO: 187755 - DNA, 429 bp, Klebsiella oxytoca
atgaagagttttttaaatggttttatcagtaacgctatatcctggtctctccttgccttgcttgtatacgcggcgtggacaggcagcgaggcgctatcaagaatctcagcagttgcttactggatgataatcatcctgatggtgttcatgtccgttatcgttacgtttgctgtgttcttaatcaagcgggaagatagcccgcaaaagaagaatgcggcaatcgaaagcctcagggtggtattcaagcgctcgggggtgttaagcaaaatagtgggatggtttcgtcttatcgcaatagtgatgctcctggcatattccggctgggtatttactgctgttagctatgcgctctgcgcgttattttctcgcttcattatctctgtagggcgtgatgagtacgagaaagtaacctccggtctgcaggcgtag

SEQ ID NO: 187756 - DNA, 144 bp, Klebsiella oxytoca
atgcgcactactggaattctgacggcggaaattacgcttcgcccatacatgaagccgctgctcatcctttcagtgcttttgcgctggggctggctcactaagaagtgcatccggattggccctgtaattggcaagcaggcataa

SEQ ID NO: 187757 - DNA, 636 bp, Klebsiella oxytoca
atgactgaaaatgacaatcgcagaccataccctcccgtcaacttcactggcgaaaactggctgccgtatacccggctgatccctgctgccgaaatcggagaatgggtaaatcagaacatcctctccgaagagggccgaatccataaccctgaccatacgcacttggtcgacgctgatgtggcgttcatgtgggcctctggctcattcgccaaaagcggccgcattgtgctggggcagtgtgagcaggtaatgatgcgcgcaggaggttggcagaagtcccgcatggaacagcagatgcatgaatggttcggtcgtataccgaagttcatcatcaccctggctgccgactattgcgagcaatgcaacgatctggagttctgcgcactggtggagcatgagctttaccacatcgcccaggctaccgatgactatggcgcgcctaagttcaacaaagagaccggaatgccggtgctcaaacttcgcggccatgacgtcgaggagttcgtcggagtggtccggcgttacggcgccagcaaagatgtgcaggaaatggtggatgcggcgaacaggccggcggaggttgctcatatcgatgttgccagagcgtgcgggacgtgcatgctgaaactggcttaa

SEQ ID NO: 187758 - DNA, 1320 bp, Klebsiella oxytoca
atggaaagtcaggttgacctacaaatcccggcgaagctcgttcccgtattcgcgacagagggcattcgctatcgtggcgcgcatggtggccgaggttctgcaaagacgcgcacattcgcgctgatgagtgcagttaaagcgtatcaggcagccgaaagcggattaagcggcgtcattctctgcgctcgcgagtttatgaactccctcgaagagtcatcgatggaggaagtaaaacaggcgatccggtctgttccctggctggatgattacttcgatattggcgaaaagtacatccgcaccaaaaaccgcaacgttagctacgtcttctgcggcttgcgccacaacctcgacagtattaagtcaaaggcgcgcatactggttgcgtgggtagatgaggctgaatcggtatcggcgacggcctggaagaagctgcgcccgacggtgcgagaaaatggctctgaaatctgggtgacatggaacccggagaaagacggcagtgccactgacaagcgcttcagaaagaacccgccgaaaagctcgatgattgtcgagatgaactacagcgacaatccgtggttcccggatgtactcgaagaagagcgcctcgaagatctggaaaacctcgactacgccgattatgcgtggatttgggaaggcgcctatctggagaactcagacaagcaggtgctggcgaataaatacgtcgtacagagctttgaagacgacctctggaagaaatcagagcgcctgctgttcggtgccgacttcggtttcgcaaaagacccaagcacgcttattcggatgttcatcctggataacaacctctacatcgaatacgaggcctacggtaatggtgtagagctcgatgacatgtggaagttttacgctggaaaaaccgatgccacgccgaaacagcttgaagactggaaagttactgacgaggcgaaattccccggcatacccgaggctcgcaaatggcctatcaaagccgacaactccagacctgaaactatcagccatatcaagggccagggtttcaatatctcagcagctcagaaatggcagggcagcgtagaggacggcattacctgcctgcgcgggttcaagcaaatcatcattcatcctcgctgcaaagaaacggcgaaagaagcgcggctttattcgtacaaaacggaccggatcaccggtgaagttctgcctgttatcgaggacaagaacaaccactgctgggatggcgtccggtacggtctggacggctacatcaaacataagcctcagtcgatggggatgatgattcccaagaggctgcgagggaaatag

SEQ ID NO: 187759 - DNA, 177 bp, Klebsiella oxytoca
atgccagacaattggtttgatgaagaaaataatcactgcaccttacttgcaatcattgaagatgatgggcaaagaatcattgcgtataaattcaaaaatgatgcgcataggtgggaataccgaatcaaaagggaatctcacatagttttcccggactctaaaatgaaagatatgtaa

SEQ ID NO: 187760 - DNA, 927 bp, Klebsiella oxytoca
atggcagcgaagaagacgaagccaccgattctaccgcgtaactatcaagaccctaccggagcagatgcgcttgagcgccgggcaatgaaagacttcgccaggcggatgaataaaattggcaaagcatataaatcagcgctcgacaaaataccttcctccctcgctgtaaacgccagatacgaataccagctaaacccgacaattctttccatcatcctgaatgacaccagttacctggtggatcaggtgctgcttgagggtggcgattatgacctgtggttttatgagtatgttgacttagcagttgagaaaggaactggtcaggcatacgcaaacctgagtcagcaatcgccggtgtacgcggctggtagagaatcactatctgcaatcctcattagcgagccatatcagcgcagaatggccttggttaacgcgcgaatgttcgaagagatgaaaggcctttctgctgaggttaagcgtgatatggcaagggtgcttactgagggcatcggtagaggactcaatccgcgtgaagtatctcgcaatctcaccgagcagattggcatagaaaagcgacgtgctaatcgcatagccagaacagaaatcactacagctctgcgccgtgctaaatgggaagaggatcaggaagccagtgagttctacgggcttaaaacaaaacttcttcatatctctgcactgtcaccgacaaccaggcacacacatgccgccaggcacgcacatctctacacaaatgaggaggttcgcgactggtatgcgaaggatgccaacagcattaactgcaagtgtactcagcagtcagtgttggtcgatgaagagggcaagccgatttatccggacaccatcaccaaactcaaacaggaatacaaaacgatgcaggcgcgcggttacgcctgggcggagaaataa

SEQ ID NO: 187761 - DNA, 363 bp, Klebsiella oxytoca
atggtttgttatatgaccatgaagctgtcgaactcaatgttaacccctccgttcagattcacgatgctcttcaaggagatccgccacgctgacgtcaatatcgtaatgaatagcgccaatgtgaattatttctggcctatcaacggcatcaccataccaggcatcgtcgtctattttcccaccactgattttgtcggacataccctattccctccatcgcagcacgattgcgcctgtagcctgtatgcgagggcagttaataaaccactccccggcgccgttaacgtaagccgtggtctgctggccggtatcggtgatcacccacacccggttaaacgtccgcggcagccgctgctgaactga

SEQ ID NO: 187762 - DNA, 240 bp, Klebsiella oxytoca
atgtgtgactacattggcggtctttcgtcaaaactcagcgaattggggcaggggattgtcgttaaaaacaccttcttcaccgcttacgctgatgcagagaagggtgattacatcctcatcggaaccagcgcggatgccaacccatacaacaccaaagcggacgaaataagggctttcactcagtggaacgataccctcgatggtgttgaagatgactgggccattattacgggagtctga

SEQ ID NO: 187763 - DNA, 282 bp, Klebsiella oxytoca
atgaataacacagtccacgatgatgttgtacgtccatttccaaaagtgccaaaacatggcggtggtggacctggtggggaagaatcaatgcttgaaaaacgtgtcgataagttagagcaggatctgacctctctgaaggtagatatcgctgttatcaaatctaactatgcaaccagagaggatttgcataaagagattggcattcagacgaagtggatcgcggctacgattatcgccacaactggtatggcactggcgattgcgaaatacttattcgcttaa

SEQ ID NO: 187764 - DNA, 462 bp, Klebsiella oxytoca
atggataagtttgaccgcaccatccaacgagagctactccaacgtctctgcgacatttacccagaatctgccgatagtagcttctccaaggagttttcagaaaaatttggaggcattaatatctttactgccaacttactttatcttgctggtcacggactcattgatataagacttagcaatgaaataggccgacgactgccatctgtaatggactctttcacgaaaatcaccagcaaaggcatagatttcattcgcgatgacggtggtttgggcgccatcctgaacgtacagaccattaagttccaccgggatgctgtagtcgtactcgaagacctcatcgcgatttcgaacttgaacagtgagcagaagaaaaaagccaaatcaacactcggcgaaatgtctacggaagcccttaaaaccgtggtacagacagcaactgcagcccttctcaccttgtag

SEQ ID NO: 187765 - DNA, 288 bp, Klebsiella oxytoca
atggaagataaaaaattgctggcatccatatcggtcgacaccagcgaggctcaatcgcaacttgatagcctaatctccttacttgagcttaaatttggttcccttcagtctgtccctgagcgtatctacgaggaaatccttgccgtggcgaaagacatcgtttttgctgatagcccttccgcaggaggcacaggactcgacattgtctatggtgtgcggttcggcgctaaatatgaattgctcactgccgcaatcagggcaggagagtttgactctgaatttctctga

SEQ ID NO: 187766 - DNA, 234 bp, Klebsiella oxytoca
gtggatcacccggttaaatttctcatgagcaaaaagttgggcaataccttcacgatccgccagatcgattttatggaaactgaacaggggggattgcagcaaatccagccgggcctgcttcagattgacatcatagtattcgttcatgttgtcgagtccgacaacctcatgacccgcctgcagaaggcgtttgcacgcatgaaaaccgatgaatcctgcggctccagtcactaa

SEQ ID NO: 187767 - DNA, 231 bp, Klebsiella oxytoca; identical to SEQ ID NO: 25792

SEQ ID NO: 187768 - DNA, 426 bp, Klebsiella oxytoca
atgcttctggccatcgaactctatggggtctttgataatggcaccgcgctcttcaagccacgccgtaaattcatcttcaatggcctgaatatccaggggcggttcttcgatcaccttattggggtcaaaaatccactctttcagccggctcaggttggcccccggctgtgcataccacaccttttcttccttcacgtagtccagagcattactgccatcagccagtttgccggccgcacgtattgcacgttggcgatcgtcaaagggaatactcagacgggttctttcagttgcaatttcaggtttcgccatactgtctacccctgtagttatgtgttatcgctgagagcgccggtaccaccacggccgcccggtaagttttttcccgcggataacccggagaatgacctggtacagcaccggtaa

SEQ ID NO: 187769 - DNA, 600 bp, Klebsiella oxytoca; identical to SEQ ID NO: 154770

SEQ ID NO: 187770 - DNA, 144 bp, Klebsiella oxytoca
atggggctggcatatggctatatcggtctggtcgttctctctttgtcatttataaatttattggtgaagtacgaccgcgtcatatcgttaaccgaggttgctctttcgcgctgcgatgaagtgaagggcgatgtgcaggggtga

SEQ ID NO: 187771 - DNA, 390 bp, Klebsiella oxytoca
atggcctttccatcgccagctcaagactacatagaacgtccgatttcactcgatgagaagttgatcagacaccctgctgcgacctattttgttattgctgacaatacaaattaccaggctggaattttgcagggagcaattttggtgatcgatgcttcgttaaaaccatgcgatggaacattgctggtttgcgctgtagatggtgaatttaaagttaggcgttatcgcacaatcccacggcctcatctggaggatttaagctccggtaagaaggaagctttaccagatgacaccgatggctattcaggatcacgggcaatttttggagtagtgacgtacattatcaacaatgctcgtttgggggagtttgacgactgtcctgtgatgtaa

SEQ ID NO: 187772 - DNA, 237 bp, Klebsiella oxytoca
atgccacgtcgctatgacattgaagcagctttccgtagtgcaattgaaattgaccctcgtgggcggcgtacagtcacaacgaagcggtttgttgaggaactcgcaaaagtgaactggatgtggtcaggaagtcaggcaaataattggattgagcattatgtgacgatttttcgtgatgtctctcgtgaagaaggcgagaacagaacattcgaactgaacagctatgggagattttag

SEQ ID NO: 187773 - DNA, 1932 bp, Klebsiella oxytoca
atggaccagaaattttttcgcgtcccctgggccgccagcggggaccgcgccagcatttccgaaagtacgaattctgatggcacagtaagttaccctgagggatggggagaagactaccagaaggacatgctgaccgatgccaatgcaaagccggttgagcgcgatgttatgaacggcgttctgaacgccatcaccggcgctatccggcagtatcagacgaacggctacccggagtggattaccgcggctaataataacagtgttgcgtttggctacgacgctggagtagttgtgtcgtataacggcgcgctttatctgtcgatgatggctggcaatacggcaacacctggcgctgatgctgcgaaatggcagccgtacatccaacgcgaggctacagaagcagaagcgctggacggtaccggatcaacgcaggtgatgactccacggcgcacgaaagcactggctgatagtctggatgaaaaactgtttacgtctattaagccttatacagtaccggtcggcggagggatgttgtggtttaccccaataccgcctgatggctggttggaggccaacgggcagacattcaatacaacagagaatccaaagctgactactgtttatccatctgggcgattgcctgatatgcgtgaccgctatccaaaggcagcaagtgataaatcactgatcgggactaatggcgcaggaacatcgctggagcattatcatctgacgtcgaaatttgctggcaccagcggatcggagggcgatgatatctatctcccgttacgaggggataactgggggagtgaatcctatccaggccagggagtttttggcaatctgaatcgcgtgaaaagtgaacaggtgccaaatcagcaatcaggaaacacaacaggaacatcgaactggcgtaacgctgacggaactgccagggcgccggttgcggagcctgaccacacattttgcatgattattatcaaaaccgaccaagccgaagctgatgcaggagaggccgggccgacaggcattattattacacctgctacagacagcatcgaagcagggaaggcgcgtcagttttcagctattgttgttccctcgaatatcgggggtaattacccggtatcctgggctgtatctgatacgtcgctgggctccatatccagtgccgggctgtatactgcaaaccccggagcgagcgggacgcagacgattatcgcctctatttcaacggggcttacttcaaccgctgttattacgcaaagcgtgtggctaaccagcatcacaatcggcagcattccatcggagctgctcgccggcaatacatacaacgtcccgatcacatactcaccaaccgggtacacagaaactgtcctgacgtcatcgtcagatagtagcgtcgctgcgctgagcagcacaggtgtgctggacatatacaacgcggggacagcgacgctcacactcacgggcgcaagttcaggcgtaacgcgttccgtgacagtcacggcgacggaagttgtggcgccagaggtttaccttgcgatcagcaaaaacttttctgagatcaaggaggcgggcacagcagcacaaacggcagcacgcgtaaatctggggcttggttcactggctacgaaaaatagcctgggagctggtgacgtcggcgccgtaccgcttgccagcgcatcactacccgcaggaacggatctggactccgtaaccgctgcaggcgagtatttccagagcgtgacgagcaacgctacaacggctctgcactatcctgaggcggtagcaggagcgcttaaagttgttgctactggtgtgagtgcaggggcttgccgccagttctactggccgtacagctcaggtaaagaataccgccgagcgggattcggaactcccatcgctttcactgagtggtctgaacactaa

SEQ ID NO: 187774 - DNA, 1242 bp, Klebsiella oxytoca
atggcaaataaaaagttaccttctaaactggatgaagtcagtaaagtcacaccaatatctgctgctgttgcaacttcacttagtaagagtaatacgtctagcgtcaaaatctctgaaatgagcagggtatcatccctgaagggagacgaagtattcccattgcttcaaagtagcgggaatatgacggccacgataaaccagattaaaacgttaattcctgctggtgaaaaaggcgacaaaggtgacaaaggtgataccggggctactggcgctcagggaccaacagggccagcaggtcctaccggtccgaaaggggataagggcgacaaaggtgataagggcgatgagggcagctctgctaatatagttattagttctgaagataataatgctttggtacacaataccgattcagcgtcgggccctgttgggctaaaagtactggtatctaaagacctccagaatgaattatttattcttcaggacgaaaaaaaccctggattatacgcacgcccaattagcgcgatgttatttgctgaagatgactcgatttttaaaacgtctgcatatgaaggaaacccaaaaaacgccgctattagagtgcgaattagtgctaaggctggaaactcaattcaattagtgaccagcgcaactgaaggaggtttgtacgttcctgaaaaaagcgtcactgttgatgaagattctattaacggcactggtagcgcagatgatccgttatctgtcaatatctcaacagaaacaggtaatgcgttatcagtgtctgataaaggtttatgggcaaaagacaccatttcttcacttgttcgtagtgcgactagcttcaatttctcagttagtcatcctgatgttaaaaccgcagaatatgcatgtggaccgcttggaaaaggagtgtattttaaaaccaccctgcttatcccttctggggcagactataatatggttaaccagatatttcttgataggctcccatgtctggcagatggtactttagtaccttataacgtatggtgtgctggcgtaaacgggaatagtcgggtcccaacatggctgatttgtcaagagagaccaacacacacattgatactctcaactggtgttattgcaccaattacaagagagacaggtaaggactctggccttcctgattatcctgagactgatgctcagtcagtcaattatatactcttctcatgtttacaattctactccaaacaatcatag

SEQ ID NO: 187775 - DNA, 612 bp, Klebsiella oxytoca
atgtatgactataccgaaaaattaaaatcacgaatttatcttcaatataaaaattcaccgaaattaatcaaatggcttctcattctaccggaaatagcaaagagcaatatcgttgagcaacttgaaaaaatacgtaatattctggatatagataatgcggaaggtgaacaacttaacatctgcggtcgtatagctggtttacacaaaagaccagttattaaacttcctccggactgcgtggagcgcgaagttgatgacgatattttcaggatattaattaaagctaagattttcaaaaataacagcatcgcgactatcgacgatatcaaagatgcagctgattatctgcttggtatcgatataaacgttctggacggtcaggacatgacaatgcgcctggtgtgggaggatgattctgtcagtgtggcagtgcagaagcttgtagataattacgacctgataccgaggccgcagggcgtgggaatgaaaaaacaccgtgtggtgaaatataaacctttcggatttggccctcatttttcaaatttcaataacgcacctttctggtacggagacggagttcctgccggtgctggtgattgcaaagacgattaa

SEQ ID NO: 187776 - DNA, 1206 bp, Klebsiella oxytoca
atggccgaaatcactcaacacggggtgaccgggaaaaccctgcaggaatacaaaagcgaaatggatgctgcttatctggcgatcgacagcgcctggaatattgacccggatacacctgatgggctgcagatagccgcctggtcggaacagttggcgaatttggatgaagaggtggtgaatgcctatcactcagtagatcctaacgctgcgatggggcaggcactaaaccgcatagcggcatttgctggtattcgccggcaggctgagagctactcaacagacacggtacagtttgccggtgatccgttgatcgaggtgccagcaggtacccgagtacggcatcgtataacgggaactctctggcagactgacagttcagttgtaacggatacaaccggcgccgccacgattggtgttacatgcaccacaccaggggcaaacggtgccaatccgggaacgctgacgattatagcaacgccagtagcgcgcattcagtcagtgaccaatacaacaggggccagcctgggtaaagtcgaggaatcaaacaatgcgtttcgctacaggcgcaatcagtcggttgcactgcccggaaataatcagatcgataatattgatgcagcgctaaaaaatctgccgggagtgaaacaagttaaaatctacgaaaatgtggatgatgaccccgatgaaaacggagtgtatggccactcgatggcgatttttgtcgatggtggtgagcatgacgatattgttctggctatagcaacacataaaaaccctgggtgcgggctgaacaaaaaaaacgtcttccctaacaaaatcagcgtggataccgtgacgcccaaagggcaaccgctgaatgtcacttattttcggccatctctcgtcacgatgtatgtggaggtggatatcaagactgcttcgctgacggaggaagacaaggaaaaaattgctgatgcgctggtggattacaccctggtcggattcgatgaaacaaccggatttgcgaaaacagggtttcgtataggtgagtcaattgcagcaggacgactttatacgccagttaactacttcgtggcagcggatgaatatgtcagcgatatgcgtatcgggaccagttccgggagcgtgacgcaaaaagttattcagctgaagtttaaccagctcggtgtttttagtcgagataatgtaaaggtcaagtatgtatga

SEQ ID NO: 187777 - DNA, 348 bp, Klebsiella oxytoca
atgatacgaaatttttcagacggggatatcgttacctccggggatcacttcgttaccggaaaggaagaaaccagacaggcctgcattagcaggcttcgtctttttttaggtgagtattttcttgacgcaacggacggaacgccctggttccagtcgatccttggtaaagcatcaagagatatcgcagaagcgaatatcaaacagcgcattcttggcacccgcggggttattgccattaattcgtttgaaatgacttcagataccagggaaaggaaaatttccgttgtggctacgctgacggatatcaacaacgaacaattcgaatttctgtttgagaaggaaacctga

SEQ ID NO: 187778 - DNA, 603 bp, Klebsiella oxytoca
gtgaaagacacaaacccttatctttccctcatcaaagacatgaagcgagtattgctactcgatgtgatggtcggtttgcctggaaaagtcctaagttataacccggatacgcagcgagccgtggttgagtgtgggatccagaaacatacaggcggtggagagtttaggactattcctggaattgaacatgtgccggtacagttcaccgggacggcgcagtgggccgtttttcacgaattgccggaaggcactgagggttttatccacttctcacacagggcggtagattactggattgaccagggcgggccggttcgtccacttgatgccagaatgttcgattcctcagacgctttctttgctcctggttatcgctcacgtgcgacatgcattccagggctacccaccagcgggatcgggatgagtaatcgcgacggtagtgtggtacttcacctaactgatggtggaatagagatgatcgctggaggccagcagttaacgcttaatgaatcaggtctgcaacacaacgggagtaatgtcggtgatacgcacgttcacgggggagtgcagccaggcggaagcaaaaccaacataccggagtaa

SEQ ID NO: 187779 - DNA, 840 bp, Klebsiella oxytoca
gtgctggaatatgaaccacctcttcatatcaattttttcgtcaataattttcctcagcacacgaacgctactgcgaaaatcgcaatatatgggctttcatcacgtgctcgtgaactaattcaagttcgtgatgatgaggaaaatcactacgggagagtagagttatctgcaggttatgaggaaaataacggggtagtatttacaggaagaattaatagcgtacaagtttccaaggatggagtgagtacagttatcacgctctactgcaattcagcttctgcacagtggaatgcaacgatatttaaatcgtggggtgaaaatacaccttatctggaaataatcagggacattgctgcaggattcggtgcacccgtcgaaatactgggggatttttcagatcttccagtattaccgtttgggcgatcgggtggtggacgactttgccgtgatttgctggatgagctgaaagacaccttcggtttcaactggctgcacacgcccacaaaaacagtaatctcacgcgacggggccgccagggagtatgtagagcacgaaatcaactaccgcaatggcatggaaggggtaccacgctggtacgctaacgcgctggaagtggacattaaaatgaaccaccagatccagccgggagatatcgctaatgtgacatccagcttctggacgctgaatttttctggaatgtattttaacgatctgcaggacctggcgaatacacaacgcagaacgggaaaattcaatgtgcttcagacggtgcatgaaggcggtctgtggggcgatacctggaaaactacggtgatttgccactggagggaaacgcagtga

SEQ ID NO: 187780 - DNA, 315 bp, Klebsiella oxytoca
atgtcttcagctatgtcacaggatgaaattaacatcattccgctttccagcggatttgccttccagcgctttcgagttcaactaggaaatcattatctgatattacgcttacgctggctgactctgtatcgttatttctgcgttgatatctacgaggaaggagagccggtaacgttgggccgcgctctgctccctggaataaatcttcttgatggcctgaatactggaatcgggacaattattctcagaggagatgaaccaacaccggataatcttgggatcgacaatcagcttcagtgggtgccacatgagtaa

SEQ ID NO: 187781 - DNA, 696 bp, Klebsiella oxytoca
atgcctattaccggactttttaccagaaacaggccaaaaatcgggaacctgtattttgatgcattgctcaaggaaggctcagaactcagaacggacgtaagcgagtatccactggaaacagcggaaacgtcgcaggacaacgcggtcacccgggcgctgacattaacgatggaagttggtgtatctgataactggtatcgtagcatgattgcacaggaggaaagcggaacggcagaactggtatcgctggggggcagcctgactaccggcgtcgcggcgtcattgttatctggacgtacggcggcgctggccggtgttgcgtcgagtataggtataagcctgtatgaaggaggatcgggggacggtgcgcagacatcccggtcacagtcactgctggatcaacttcggcaactgcagcgcagccacattccgttcgatgtcgtggcaagtaggggagcatcatacaaaaactgcctaatcaccaacactcgcacagaaaccgataaatcgactgagggcggacttatcattgtggttgagttactgcaacttacgataacccacgatgacgcccaaaaaactaacgataacctgccttacaaggactctgcggcgactcagggccaagtagagcgttcgttaggcgaagtgatagtccagggggctaagaatgtcttcagctatgtcacaggatga

SEQ ID NO: 187782 - DNA, 1686 bp, Klebsiella oxytoca
atgccagaaatgaatcccaacaatgttgttgatagtttactcgtatctctaggagttgacgttgacgataaaagtttcaaggcggcaagtgacacatttaacgggttgaaatcaacaatacttcagttgggggctactgcgggtgtggggtttggttttagagcactgacttcaggtctttcggcatcggtgcttgaaatggataggttaagccggattacagggttcaccatcagacaagtagaaagcttaagatatgctatgcggcagtctggactaaatcctgattctgcaaatcaattagcgcaaaaaatcccggcatggaggcaggctgctagacagggagagctgggagatagagcatattggagtggtaaatttaacccggtagaattattaaataaatcagaccaggaagctctggaatatatagttagtagttatggggtaatgaataatgaacagagacgtactctacggcagggtttagggattggagataatgacgatacgacaaggttgttcgagaatggaatacagggtttacaaaaggcttataaggaatttcaggagctgtatcagccgatagaccagaaacttattgatgctgcaaatgagtttaacaaggaaatggcaaagttaagtgttaactttgaaaaccttcaaaaacaaatcggaggtcctttacttgctgatttaaatgcatgcctgaaattaattaacgattttgttaaggaaaataataaagaaatatcatcaattatttcaggtgagtggtatgacgacttgctgaaatattcagagaatgctggcaatacctttaggagttggttgaaagaagtatttgtaagcgaaagtgatccggtgcttgcaaacaatcttgctacgcaggggacttttagaggatattctgcaaattatttaaacaatgcaatgaatcgacttccttcagcctattcacgagagattcaaagtagggaatctatcactccaggtgtttttgacagaacgtattatactgaggccagtattggtggtgctgaattaaataacagccagagaggtagttcgactcaacctttaggagtaagaaacagaaaccctggaaacctaagatttgccaatcagtatggtgcaatcagaggcgagggaggttttgcgaaatttggaaacgacgaggctggtatttcagcgttacatcgacaattggggctttattttggtcgtgggattaacacaatttcaaaaatagtaaataaatatgcacctgcctcagataataatgatgttccagcgtatataaacgcgctcatgcgtgtgacaggcaaaagtgctcacgaaattctggatttcggggatacggaaacgattatttccctaatgaatggaataataaatcaggaggtcgggcgtgggcactattctcgcaatcagattggcggggtagtgcgtaggaattctgcaggagccccagcagtgaatctagatgcttacaatgcaacggccagcacggttccgagtatttcagcgcctgctggtggaggaaataaagtagagataacccagattaatcacaacactattcaaacgggggctgactcagaggaagttatcagacgtattgaagaaagagacacgaccaaccttaacgaagctatggctatgacaaagacggacaaatactga

SEQ ID NO: 187783 - DNA, 534 bp, Klebsiella oxytoca
atgagatatttaatccttaaggttttttatatatcagtattattactaattccatatgttagttttgcttcaggaaagtatgacggagtagatccactcgggccaaaagtagggagaagggatttttcgttatgccaattgccgactgttggagatgaagtaataaatagagtgataaacaaatttaacgcacaagatatttcatgtgataaaaaaggaaagtcatcagtaaatggggggttttcaataaatggaaagcccgttgatattccggtttttgaaatggtcgaattgattaggaatactgttttttcatgtcaagattacactgatagaagttcgttttttaaaactaaaaggaatcaatgtgtcaggaacgttgagtctgatgttgattattttttgaatatgacgaaggatcctcgtataaagtcattcgcaagcccatatgatatagttgttagtcgaacgcaaatgggggggcagtatactaattttaaacgatgggcaaacctcgcgttgcgagcaagataa

SEQ ID NO: 187784 - DNA, 390 bp, Klebsiella oxytoca
atgggtcgcaagatagaagtcacaattaatgatgtcctgtatgtaggagatacatcaccggctcgcgatcagctggagatgctgacgatagcaagtcagaacatgatgctgcctgtgttggcgaaaggtgttagcgatatggcgctcgtggccgcattttcatccctgaacatatcaacaattgaacgtttaaaagatctggttattaaaaaaggtgagttcaggcgctcggctgatggggttccggtagcagaaaatatttttcaggatgaagtgcatttatttttgctgcttatgggtcgagcgctggaggaaaatatcggccctttctggaatctcaacaagggagggcgaaacgaggaagagacgacgagcgaaaatcagacctga

SEQ ID NO: 187785 - DNA, 405 bp, Klebsiella oxytoca
atggcaatgaaacgatatggcgcggattttacggatctgaccgtaaacggactaccgatagacgaattcggtgattcagatccaccgttcaccgtagaagatattgaccctcgatcaacgctaaaacgcggagtcggaaaaacatcagttcgcctggatagccagaccaggccaaagcgtctcactgttaatctgatgcctggaagcgaccaggtacgccagctactggcgctggaaaagtcaggcgttgattttttctgcacataccggcaacggggaacagatgaaactatcgccgcgtttgacggcgtgataaccaatcgtggtccgatgggacgcgccggcaagcgaacggtgacagacgagcagtttatttttgaatttacagacagtgaggaaacctga

SEQ ID NO: 187786 - DNA, 1254 bp, Klebsiella oxytoca
gtgggctactcagtagacaatattattccggtcaattttattttgaccgctaccggccttggatacgcagactttaccagtgcgttcgcgttcgctgatgagtctgatatggtcggaattgaaggagcaatcctgacggaaagcggggatccgattacttccgaatccgggcagacgctggtggtggaaacagccggagcgacaacccgggcagcaggtgatttcgcagtcgatacatacagggattactcgtcagtcagcgaggtaggtgaggacttcccgacaaccagtgacatctacatgatggcgacacgatatttctcgcagataccgcgccccaaaacgttctctgtctggatgtcgaatcctgacgataccagcctgatcgagacggtaaataaagcgaatgaatccgcttggcggtacaactacttcttcaaaccatcagttttgacagatgacattctcctgcagttaagcgactggagcgataccacggatcacccgatctggtataccgacaccgctgataaagccatcgaccagaacagcagcactgatatcgtgtcccgcctcgcaacgaaggggaaccgccatatgtttgctggatggcgcactcaggaatcagtagacgccgacccgtcacaggtgtactcgatggtgcaagttgctgcaacgttcgcaaaattccgtcctaccgggctgaatacggcgattactgcagaataccaggttctgccgggaattgacggcgacgagctgaaggacagccactacagggctctgaagaagaagaaaactgtcttcttcactccggtagaattggcaggggagaaggattcatgccgggtgatcaacagcgtatcgatgtctttatatggggagtttatcgacgatgtagtgaatctggacgtgctgaaaaaccacatgcaggttgacggttataaccacatcgccaacgtggggacgaagcgaccgctgacgccgaagggatacgccggtctacttaacgtgctttcgaataccctgaagcgcttttatgacaatggcgtgctcggtgagggatcgtatagcgatgaggaaaccggagaaacaaaaattgcagagtttggttttgtcatcaagtcaaaagcggaggacgtgctggagctgacatcggcacagcgcaagcggcgtgaatacccgccgatcaagattctggtcattctcgccagggctggacatgttgctgaactgaatatcaccgtggagtaa

SEQ ID NO: 187787 - DNA, 540 bp, Klebsiella oxytoca
atgagggagatcagcgaactccacgaactgttgcaggggctggtttcggtctgcactggcctggacagatggagaatcattctcgctgaccagggcagagcaccaccagcaggaggcacgttgtacgcaacgtataacccgatccccgttcgggcctacggtcaaccttcacaacgccttgagtatatcgacgcactggaagagcacgatgaagccctgggtgatgactggcaggatctggaggaaattactgcgagttcaatggagtttatgatctcggtgaatttcttcaacgagggagcgcagcaggcagcaatgcggctgcataacgcaaacttcagaagtccggttagtgattaccttttcatgaataagctggcgttccggtacgtcagcaatccccgcaacctgagcacacactatcagtcaggcatccagccacgatggcaggctgacattttcatattcgttgaacatgaggtgggcgacgacgttcttcgcgctgccgggttctctgttgaatttttacgagaggagtaa

SEQ ID NO: 187788 - DNA, 420 bp, Klebsiella oxytoca
atgtatgggaatgggctggacatgcgcggccatgtcgattcgaccttcaaatccaaggtagaggggggcatctggttaattcgtaaggagggggattacagcggccctggcggggtgtggcaggaaacggaaaccgaacgggaagagctgaagcgcgtaaacgtccagcctggcaaatggcgggaaataaacctgctggtgggcgagggtggcgtggcggtcatcagtgacttcagaacggttcatatcaacgatggcaaaacgtatctcatgccggatgaaagcgggcagtataccgaccagcttgaattcagcgacggggtagtaatgcgacgctggcgcgtcatgaccgcagacaatcgcccgtggcgtaatttctgccgcgccgtcgttcaggtcatcagggagccagttacatga

SEQ ID NO: 187789 - DNA, 468 bp, Klebsiella oxytoca
atgaaagttaaaaccgaagtacgtggcggggaaaaactggcgaaaaagctcaaacaaattcaggaccgtctgaccagtaaaaagcgggttctgattggattgccggcagggagcggagtttatgaggacggcgcaccgatagccgttatcggagccgttcaggagttcggttccgctgacggtcgtattcctgagcgttcatttctgcgcgtgccgctgcgccagaacgtggacaacataaaaaaggggttcgcttcgctatcccgccaggtaacacggggggaaatttcagcctttcagatgctggatcagatgggggcgcgtgctgcgggttattgcaaagaggcgattgaaacagggattgcacccgctaacgctccgtcaacgattaagcgcaaaggctccgcaacgccgcttatcgataaaggcattctgaaaaacgcgatcacccacgttgtggaggactga

SEQ ID NO: 187790 - DNA, 468 bp, Klebsiella oxytoca
atgtttaatcagttttttgttccctctgccgtcatgccttcctccggaaaaaactctgtaaaaatcacggctcagatcgtggctaacttccgcgcgtactatcccgcttttgcgaataccgacctgtggcctgatgacattgttattcgggcgctggaagaggctgacgcagaaacggggccgcgctgggggaagtacagagctaaaaccgcatcaataaaagcacgtgggatgtacgcgtatgcggcccacaggcttcttatgtggaagcgagcggaagaggaagaggatgctggggcactttacgcggtttcagcaaagaatgtcggtgatgaatcgacctcttttgccgttccatcggtaaccaccgatgacctggttctgaatggcgaccttccaatgacgcagtacggcgttgagtttttacgtctgcggcgtcgggccagtgcggggccagccatcgtatga

SEQ ID NO: 187791 - DNA, 312 bp, Klebsiella oxytoca
atgcagacgttaattaactggaccaaaaatccgattgtggtcgctgatgaaaacggcgagcgcgtcacccttaaaccaggtgaagggaaacccgttacgggagattttaaaaatcatccgtgggtgaaaaaaggccgccttgaaatttccagctcggaagagcgtgaagcgtcaggtggtgctgaagtcgatgaagagctggcagccctgcgcgagcagtacaaaagtatcttcggcaaacctccgcataaaaatgcgggtaaggcgaaactccggcaggagatcgaaaaatggcgtgaagagcaggactaa

SEQ ID NO: 187792 - DNA, 963 bp, Klebsiella oxytoca
atgcgacgcaatatgtttgatatgtctccaaccgcagcgatgggttttctgatccaacaggctgcacatctggagcaaaaggtttacgaaaagaaataccctcaatacaaatacacccaactggttccgctggatgactcagcaccagactgggtagacgttgtggcgttccaggccgctgacgcacgcggcgagctgcaactgctgggcccgaactcaacggatatcccgaccgttgatgtggcaacaagcatcggtttccatcagatcaaaacggcggcgctaggttacacctacacgctggaggaaatcggccgtgcgcagctgtacgatatgccactggaggcgcgtaaagcacaggctgtgcgcgatgttacagagcgtggcctgaacaagatttatctctggggccagaaagtgggtgaaggcctttacaccagcccaaacgtgacccgtgaagttgcgccagccacgctcaaagcgctggtggctgatattcctgacaagggtacgcagccgatcattgatttcttcggcaatgcgtacaaccaggtttatctggacaataccaacacggtatttcgtccgactgattttgtgcttccaccagctcagatgcagcttttgatgcgcaccatgctttccacgcataacgcgtcaaattacacgctgttgcagttcctgcgcgaaaacttccccgacatgacgtttaccgatgacattctgctttcaacgaatgtgaaggacgataacggccagccggaagaaaccccgctggaagaagatcgtatggtcgtttactgcaaagatatggaagtggtgaaaggccatgatgttatgccgcttcagttccttgctcctgccaccgctgacaacgtgaatttcaaagtaccggctctgacccgtactggcggtactgaaattcgagtgcctggtgctttccactacatcgacgggctttaa

SEQ ID NO: 187793 - DNA, 552 bp, Klebsiella oxytoca
atggctattgctcaggactctttcggcttgtttaacggcctcggctacgaaggccaggtatccaccatcgaagtaaacaaaatcgtgtcgcgcctgactgaagagcaatttattccgttcggtcgcgcggtcatccgtggtgctgcacgtcgttctgtcgctcctgtcacggctgatactgtcgccgctgacattgtagggttcaccgttcgtagccaggcacaggcaagccctacgccgccaaacaatgaaggcgtatacgcaagcggctaccgcatcaacgatgtggcctctgtgctggaagacggcgcgatgttcgcgctgtgcgtagatggtgctgaaggtggcgatcctgtcgaagtgattgttgatgatgaagacaatctcggtcgcctgactgctggcgggaacggtgtagctctgaatctcgttaagtgggtggatgacgtggaagccgggaaaatcggcgagatccgcgttcatggcatcctcgcggtagatgctggtgcttcaggttccgacgctggcaacggctccggtaacggcgaataa

SEQ ID NO: 187794 - DNA, 1188 bp, Klebsiella oxytoca
atgcggatcacggtaacggatcggctgtctttccgcgtcgattctcagcgaaaaattcttgataacggatatctctccgttcctggaagagtggcgcgtactggcgtgcagcagtacaccgcgcaggagctgggattaacggacaggccaccgaacgagttagtaaacgtctatcgcccaccggaagaggtttttaaaccggaaagcctcgccagctacgacaacgccgatatcacccttcagcaccccgacgattttgttgattcgaaaaccttcaaagaggtttctgtcggccatgccacgaccgcagggcgccgatttggtgatttcgtcgttgttgatcacctgattaaagatcaggccgcgatagacgccataaacgctggcaccgccgagctatcagcaggatatagcgctgaatacctccgtcagcctggtgtagccccatgcggcacgccttatgaatttattcagactgacattctcgttaaccacatagcgctttgtgactccgctcgggcggggcatctggcgcgactgtttgattcacaaaaaccaaaggagaaccaacccatgccacaaatcaccctcgatagcggcgcaaaagtggaagtggcagatcaggccaccgccacgctgattcaaaccactctggacagcctgatgaagcgcatccgtaccggtgatgaaagtcaggaaaagctggaaggggaaattgcacagcttgaagtgaagctggaaaaaaaagaagaagagctggaagacctgaaaacgcagacttcagacagcgccattcaacagcgcgtggatcaggtcgtcgttgcgctgggcggcgcccgcaaaattgcagggaaaagtttctcctgtgattcgatggacccgctgaccattaaacgcgtggcgctcgatgcggccggtatcaaatgcaaaaaatacgcgacctgggataaagcgcccgatgcgtatgtttcagcgttctttgatgcggctgaagagcaaaaagaaaatcaggacgaagaccctgatgatccgcagaacaagagcaccaacgattcacatcgccttttcgctaacgacatgacaaacgttatgacccgtcagacgggcgatgcgaaccagcagcgcgtaagcgcgcgtaataacttcctcgaccagcgctacggtcgcaaccaagaaggtaaaaaataa

SEQ ID NO: 187795 - DNA, 816 bp, Klebsiella oxytoca
atgacggttaacggcgacctggagaagtattacaacggccagctcaggacaatgattaacctgatggcccgaagtgttcaggaagcgctgatccccgtcctcaaacgaagttataccgccgatagttttctcactgacctgattaaagccgcgttaaaccatgccgcagaacgtttttattctgacgcctatcacgggcagcagaacaggcttgcgcagcgcgtagttagcctggcggagtcggaaacatcggcggcgttcgtagagcagattaacagggcgctgggcgtggatatcgaggggcttttgacgcgtgaaagcctaggagattttttcgatgcagcggtagaagaaaacgtggccctgattcgctctctgtcgtctgattattttgacaatatccagcggcaggtgatggacagcattctgaggggagacagcgttaccaccctgacgcgcaaccttcaggctgtgacaggggcaacgtatcgcagagctgcgctgatagcgcgtgaccagacgctgaaagtcaccagtgacattaaccgcaagcggcagacttcatccggtatcagccgtttcaggtggtctgattcgaaagatgccagggtgtcaggcaatcccgcagggaaatatcctcgcgcaaaaataaaatgtttctacatcgccagaaatgacgtgggctacggtccaggcgtttatctctggtcacgcggtgcgatgtacaacggggaaacagggctttacccgggacgtgcgcacataaactgccgctgtactggcgttcctcagatacaggggctggattacaagtaa

SEQ ID NO: 187796 - DNA, 1413 bp, Klebsiella oxytoca
atggccgagaaagaaaccaaagcggctaagccccgctttaaattaaccaatagcggcggggtgatgcctgtctttgacagtctttctaatgtcgttacaggcatgggaacgaatcgcgaccgtcgctcttataaccgcttcacaattacccagctcaatgattatctggaaatggaagccgcttatttcgataactggatagcgggggcagtagttgaccatcctgtagaggatgccacgcgagaatggcgaacctttacggggaaagaggcggcgaaaattcatgaggctgaaaaattattcgagcttcaggaaaaaacacaggccgcttttacctgggctggcgtttacggtggtgctggcgttctgctgataactgatcaggagctgggccagccgttagaactggacaaaataaagcagggttcgcttaaacgtctggttaatctcgacagaacgatgatttctccatctgcctataactattcggatccgaccgcagaaaactacatgcgagcggaaacttaccggataaacggaggggtgcagaacgttcaccacagccatttcattatcgcccctggcgaagccttaccgccgcgcttgcgattgctcaataacggatgggatgacagcgcgttaaggcgatgcatggaggatttaaaggactcagccgcagcgaaagccggtattgcgtcactcattctcgaagccaacattgatgtgatctcccgcgataacctggctacggacctttcatcgggtgatatggatcagtccatcatgaatcgattcctgaattttggaatgctgaaatccatgttcaggctggctctgatggataccacggagaattttgaccgcaagccgatttcattcggtgggctgggggaaatcctctccgttctcatggagtggacagcaggagccgccaaacagcccatgacgcgtttgtttggcgtgcagtcaaaaggtctgggtgattctggtcaaggggatgcgaagaactactacaaccgcgttcgcggcgatcaggaaatgaagtatcggaaattcctgaaccagatcgacgaggttttaattcgctccacgctgggcgttgcgcctgacgacctgaactatgaattcaaccctctcgaaattccgactgaatcagaagttaaagatcgcaatctggcagaagcccagaccgatgaccttcgcattcagcaaaaagtcattccgcgatctgctgtggttcgaaaactcaaagagagtggccagtatgttatcagcgaagaattccttaaacgcgttgaagaggacgaacgagcagaagccgctggggaattccgcttcaatatcggagaaactgaaaaggagaattcaggaacaggcaacccgccgccgtccgattcagttgatgacggttaa

SEQ ID NO: 187797 - DNA, 1410 bp, Klebsiella oxytoca
atgcttgattttacgctctacactcatccgacatatcagacgggttggtttaatgaattaatttgtcttgagcttgataaatttctcgcggatgtagaaaaagggcttatgccccgcctgatgatttttgctcctccacgttctggaaagagtgaactggcttctcgtcggtttccggcaaaagttttgggaaaacatccagactggaatgttatttcctgctcttattcttctgacctcgcaaaccgcatgtcacgcgatactcagcgcatcattgaaggtgagcgctatcgggaagtttacccgcatacgtgcctcggtggcggtcgtaacagcgctatcaggactgccgaactgtgggaaacgataagcgataaagggcagcttacaggcggttcatatcgtgcagctggcgttaacggggggatcaccggccagggtatgaatattggggttattgatgaccctgcaaaagattataaaacggcgtcctctccggtttaccaggaagctgtcatggactggtatgacacgacattttttacgcgtgttgatccaaaattaaacgggataattattattctgacccgctggcataaagacgacctggcggggcaactgctaaaaaaagcaaaagaaggtggtgaagcgtggcgtgttgttagctttccgatggaggcagaaaacgacgaataccacgagctgaacgggaaaaaatatttcctgaggaaaaaaggcgaaatactttttcctgaacgaatgccccaggcttttgtagataaatgcaaacagcgcggatcgcttgtctggaatgcgttgtatcagcagaggccagcagcgaagggtggcgggctgattaaatctgcgtggtttggagagtacacccagcttccaaaacttaaatggcgagctatttacgccgacacagcccaaaaaataaaagaagttaatgacttctctgtattcgagcattgggggttgggcgttgatggatatctctatctgatcgacctgatacgtgggaaatgggaatcagacgagctgaagaggcgagctatcgcgttctgggacaagtgcaagccgatgcagaacgggccgctgcgcttcatggccgttgaggataaatcttccggtactggcctgattcagtctatccgcaagggcgctctctgccctatacgcgcgatacagcgcgatcaggataaatacacccgcctcatggattcgcagggctggatcgagtctggttacatcagacttccggcttctgctccctgggtaagtgatttcctacaggaaatagagggtatcaacgccgcttttaacactcacgatgaccagcttgatccgatgatggatgccattaaagaggcgtttgacagcggcgttaccccatacaatgaatggtaa

SEQ ID NO: 187798 - DNA, 1104 bp, Klebsiella oxytoca
atgagaaagacggactgggaggctatcagacgcgagtatgaaactgatggagtatcagcccggaagttagcggaaaaatacggcatcagtcatacagcgataaaccagagggcaaaagctgagagctggcgaaagccggaaaaaaaaaatccagaaaaaaaagtttccacgaaaaagatttccgccgaaaaagtggaaagaaaaaaagtggaaacacggagtctggaaacagtaaaaaaactggaagaagcgggtgaacgggtatcaaaacctaggaagataaaaaaaggatcggatgatgatttttattcttttgatcccgctgatttcgggctttcggaaaagcagggaatttttgcagaaaacgtagcggcaggaaaaaaacttgtcgaagcgtatcggattgcaggatatgacggtgagggagcatcggcacattcttgcgcttcaaagatgttgagaaatgcaaaggtttatcgtgcagtcagttttctacgcgacaaacgtcagcaacgcctttcgcttaccgaagatgaaattattcatcagctttcagccattgccagcgcaaaccccaacgaattggttcagtacaggcgcgttaactgtcggtattgttggggggagcgtcatctttatcagtggcgggacattgaagaattcgacaaggctgcggagaaagccagtcaggacggaaaggatcaaccagaatacggcgggcttggattcgtcgagactggtttccccaatgaagattgccctaagtgcaacggagagggggaaacgcagctctttgttgctgatacctctcagctggaaggtgatgcccgctggctgtatgcagggattaagcagacacagaatgggttagaagttcgcatggctaatcaggaggctgcacgccgggatctcctaaaaataattgaggccagaaaaaatcgactcattaaaaacgccagtgatgatccacctgatgaggaaagcgacatcagcgacgaacagctacacgacgcgttaaggagcttgggttatggcagatttagcgctcaactctcagacagagaaaaggtgtcgaacaacgacgaacaagcgggaactgactaa

SEQ ID NO: 187799 - DNA, 258 bp, Klebsiella oxytoca
atgttcgatcggcaaaaggtgcaggttttagctgctcgccgtctaaccgagcagcaaattgcggatgttttggaaatcgaccttcaggaactgaaacaaaacagggatgagctttccagtttccggaaagaaatcaggataggcagagcgaaaagcgaggctgagttacgaggggctttgtataaaaaagcgaaaagtggcgatgctggtgcttaccatgaattactgaggcgtgagaaacaacaggacggtgactga

SEQ ID NO: 187800 - DNA, 873 bp, Klebsiella oxytoca
atgaatcctaagtttcccctctacatcgtcagcaaagggcgcagtgaaagccgattgacggctaaaacgcttgagcgcttgcaggtgccgtattttatcgttattgaagagcaggaatacgtgcagtattcagcggttatcgataaagaaaaaatactggttctggataaaaaatatcaacatgagtacgacacatttgatgagctgggactgactaaaagcgtcggccctggcgcagcgcgtaactttgtatgggaccattcaatcgctggtggttatccgtggcattgggtgatggacgataacattcgtgcgttctaccggttgcacaaaaacaagcgtttgagggttggtgacgggacgatattccgttgcatggaagatttcgttttgcgttatgaaaatgtcgccatggcgggaccgaattactacatgttcgcgcctgaccgacaaaaatgtcccccgtttatcacgaatacacggatttattcctgcaatctgattcgtaatgattcgccgttccgctggcgcggccgttacaacgaggatacggacttatctctgcgtatgttgaaggctggctggtgcacgattcagttcaacgcctttttgcagaataaagttgcgactcaaaaaattaaaggtgggaacactgctgagttttatgctcaggaagggacctataacaaatcccgaatgcaggtcgaaatgcatcctgatgtatcgaggatggtttttaaattcgggcgggtacatcaccacgttgactattcgcggtttaaatctctccggttacgtttacgttctgatattcaaatcaccgatggagcagacaactacggaatggttctgaaagagaactatacggagtaa

SEQ ID NO: 187801 - DNA, 636 bp, Klebsiella oxytoca
gtgactgaacaaaaaatttctattcgttatcttgagcgctcaaaattaaaaccgtttgagcgcaacgtgatgatccattccgatgctcaggtggcacagattgcagccagtattgaagagtttggatggacaaacccggttttgattgatgagaacagcgaagtgattgctgggcatggtcggctggctgcagccgagttgctggagatattttcgataccaacaatcacccttcgtggcctgactgacgcacaaaagcgtgcgtatcgcattgcagataataaattgccgcagggcgcagtatgggacgatgcgttactgaaggctgagcttgagtcattgagtgcggaaggattcgatctgaatctgacgggcttcaacgattttgaaatcggttctatgaaaggggatgcaggggatattcctggcgagcactggatcggaatgcctgagtttgagcaggaagaaaagcagggagtgaaacagcttatcgtgcacttcgaaacagaaagtgatgttcacgctttttctgagctggttgagcaggccatcactgataagacgaagtatatctggtacccggcaaaggcgagggaacgtctcaaagataaggtgtatctcagcgatgaatcctaa

SEQ ID NO: 187802 - DNA, 633 bp, Klebsiella oxytoca
atggcgtcgaaaaagcttacagctgatcagcagcagcttttcgatgctctgactccgctgcaaaaaagattcgcacttgcaatcatcaaaggtaagaaccagacggatgcctataaggctgcgaaggggaaggctaagacgccagaagctattcgcaactcggcgagtcagatctttacaaatcttggtgtgcaagcctttctcaaatcagtgcagggcgagattgtcgacgaggcaatcatgacccgagaagaggcgttaaagcgcctttctaagatgggtcgaacatccatcgccgatatagccgagttcagcaacagcatcgttggcgaagatgacgatggcaatcctgtgttccaggccgtgtggagcttcaaagattccgttcttcaggaccctgacgcaatgagtgcaatctctgagctaactacgggaaaggacggcatcaagctgaagatgcacgatcccaaagcggcaattaagcagcttgccgaaatgcagggttgggacgctccgaagaaaaccgagctgaccggtaaagacggcggcccactgaatcaggtgacgtacaccgctgaagactatgcgaaggcccagcagaagctggagggaaggttagaagggctggactga

SEQ ID NO: 187803 - DNA, 531 bp, Klebsiella oxytoca
atgaaatatccaaccgtatcagtaaacggcgtctccgttcgtgttgatgactatgggcgctacagcctgaatgacctgcacgcttccgcggtatgcagtggccaggctaaagaaaatcagggcccgagtcagttccttcgctctaagaaggttaaggaatttgtccacactttagccagaatgcaaaaatgcactctggaagaaaatcaaccagttaaggtcgttaacggtggcctgaatcaaggcgtctgggctctggagatcgtcgctattcgctatgctgcatggctcagtgctgagtttgaaatccgtgtttatcagacattccagtctctcgtccgtcagggatttgatgccatgtcccgcttaaataaaatcgaccatgtgataaacgctgaaacgaaggaagttagtcagtgcgcaagtcgaatggggaagtggggcgcaggtggaagaaagcgcctgcttatggccgcccgcgcccgtgtggtagacgaggttcagatgtacctcccaggatttgaggcgtga

SEQ ID NO: 187804 - DNA, 654 bp, Klebsiella oxytoca
atgataaaaaagtattttcttctcgcgctttcgctttctttgtcaggttgtgccttatctcctaacgaggcgataaactaccagaaagaacatgattttgagaatgtaacatttcagacaaaatcaaatgaaaggctgtctgtgtttaatttaagaaataaattcaagaacacaacaggaatggaacttccaaatcaaaacacctatgaatgtcaaagagatgtattatgttattatggaaaatatgctagtgcctatgactctctaatggaaaagtaccaagaagaaaaagataaacagaataaaatattcgctaagcagaaagaagctgagtgtcaggctagtaaagagtgcatggccaagcgtgagatcgattccgcatcttacactttaaataatgtctactattctctaatggcccgatatccataccagcaagctgattctgatgctggggtaaggcatatgtgccgggtggctggagcagcccaaagggaaggtgtgacccttgagtttatgaagaagcacattagcttaacagaaggaattagccctgaaatgagataccaaataatccaggttgctgaggcttgctggaaaatgagcaagtatggcgttccggacggaaccacgcagatcaaatcaatgtattaa

SEQ ID NO: 187805 - DNA, 1350 bp, Klebsiella oxytoca
ttgaataattcagccattccgtcacgtttgacggtggttttttctgtgaatggtgagaagaacaccattccgaccaattcaacatcggatacgcttgcagaagggaatgcagcgatggattccggttttccaccgttgaccagggtcgccttatctgcaggcggaaagccaccaaaaggacaggactttaacggcattttcaatgacgtttacacccgccttcaatggtcttcggcaggtatgggttatccgttcaataatgactttcgcacagcaatagccggatacccaaaaggggcaataattccggcgagtaatttctcagtaacatggttaaatacaattgatgctaataattcagcacctgagaaaacagatgctacgtcttcaggatggataccatcctggggatgtggggctgccacagtttcaatatcaactgccaatgttaatgtttctcacctgcaggctgcaaatccgaggataattcttactggtgcgttgactggaaatcgggttctttatctaccaccttggataaaggactggaccattgagaataattgtactggttctgcatactatgtgcagataagtacaaaggctgcggggaaaacggttaacagcaaaccgggaacgacaaccaaaatccattctgatggcaccaatataacaaatgatgatggattcctgagaattgataataacctctcagaaatagcagacgcaggaaatgctgcaaagtcatctgcaagatcaaatcttgggcttggcacctccgctgtcagagatataggtacgcagggcgatactattcctctcctgtccggagcaaatatctggtcatctactcagtatatggtcggctctggtgctccagatttaggagaggtcaggtcagccacaggtctttactacccttatggcctagccgggacgatgtggggtgaggtctacagcgttgatattgtcaatgaccacttcgagtcacgcatcgttgtggtcaaagatggtgaaaggaaatatttcaggtttaaggaaaatggagagtttacatccgaaggagatatcaaagctggggggggtgtttatgatcagggtaatcgagtttacagcgcatctaacaaacagcctccagaatatattaatgaagtcggggcttacgcctgggcctggtatgacggagcggcaaattataatgacacagttagcggaaccttgctatttccagcgacgggagacggcaatcacgcttcgacagcattaaatgggacatggcgatgcatgggaaagactgaaacagtaaacgaccagcacaggacaaccctttggcagaagataagcaattag

SEQ ID NO: 187806 - DNA, 1026 bp, Klebsiella oxytoca
atgggaagaccacgtaaatatttcaaagataatcgacttcctcccagggtatataaaaataaatatagttatatttggaaaccaaacgggaatgaaacgtgtattacactcgccccaatactaggtacgagtatgtctacactatgggcaaaatatgaagccattaaagcaaagcagcacgatcaaatgactgtagcaaaactttggaatctatttcttgaaagccctgtgtttactgaattagctccaagaactcaaaaagactaccggcaacaccagcgcgcattactgagtgtcttcgggaaagtaagagctgatagcgtaaaggttgaacaagtaaggatcttcatggataagcgcggattagaaagtaagacccaggctaaccacgagcttgcaagtttaagccgtgtctatgggtgggggttcgagcgtggttatgtgaagggtaacccctgcaaaggggtcaggaaatttacctctaaggctcgtacggtttatatcaccgatgagcaatattcagcgatttatcaagaagcatcgccagcactaagagtggcaatggagatttcatatctttgtgctgcacgcctgggcgacgtgctcgatctgcgatggaatgaagttatggataccggcctctatatagagcaaaacaaaactggggcaaaacagattaaggaatggacgccacgtctgcgttctgcaatccaattagcccgcaataccagcgcttctgatactgaatttgtgataaccaccagcaaaggcggaaaggtaataacaaaaacattgaataactggtggaacaatgcgaaacgagcagcagaacaaaaatcaggcgtaccgtttggatgcaattttcacgatataaaagctaaaggaatttctgattacgaaggttcgagtagggataagcaattattttcgggacacaagaccgaaaatcaagtgattgtatatgatagaaaaataaaaatcacaccatcactagacatacctattataaagattaaaaaaaattaa

SEQ ID NO: 187807 - DNA, 237 bp, Klebsiella oxytoca
atgtacgagttaactttatcaccacaagaaattcaggaccttactcgttataagagatatacacagcagcaacaccagttgcgctgtcacggtatcccgtttactcctggccccaaaaatgagccgattgtattacgccgtgatgtgcaagcattcagggaaccgctaaaaaaaattaatgagtatgtatctgaagaacctgattttggagcactagacaatgggaagaccacgtaa

SEQ ID NO: 187808 - DNA, 258 bp, Klebsiella oxytoca
gtgaataaggtaactaactcattaacccattcttataaaacatggcttgcggtagcagaacaaaacggggcaaaacttattgcgtataactgccccgcttgccttgaaaaattaaaaacaatacagccacagcctggcgaatattgggacacattctctacctgccctttctgtcaggcgctgttatttaaaatcaccaaaatcgataaagtagaggttgaactcattactaaaattggttcagagaaaggtgattag

SEQ ID NO: 187809 - DNA, 180 bp, Klebsiella oxytoca
atgagctatttctgtgaaaattgtgggtgcagaaaagtatcgggctactgcacgaactgccaggaagaggcttatatcgcttttgttcaagcccctgaaatggatttcagtaatgaatttatggaaaaagcctggaatcaagaaaagcagaaaaatgaaaccgggaggaatagtgaataa

SEQ ID NO: 187810 - DNA, 825 bp, Klebsiella oxytoca
atggctaattcatttaagaaaatgatcaagggcggcatcatcaaacgctctgacaccggcatgtttatttctatcgacgatattcacgttcggcctaacttcaaccgccgcgaagataacgaacgtactcgtaacgctgatgatgacaccttcgccttcatgatggcgggcggcgttgtcccggcgcttgaggtgataccccgtgatgagggcggagtgtggattgttgaaggccatcgccgccagcgttgctttctgcgctgccgtgaggccgggaagcctgtagaccgtatccacatcgtgccattcaccggaaacgacgtgcagcgcattgcacgcatcatgacgtcgaataatcagctaccactcacgactattgagcaagcagcggttgttcgtgaccttgccgcattcaacctgacgacggcggaaatcgcaaagctggtccacaaggcaatcccaacggttgaaaaccttttgacactgagcgttgcaaatcatgacgttcaggaagcggttaaatctggggaggtttccatagctgttgccgttgatcgtgttaaagaacacggtgagaaggccggggaagtgctggaaaaagataaagccaaagctgctgccattggcaaaaagaaagtaacccgtagcgttatagcacctgaaatcagtgtaaagaaagcccgccgcttggttgagcttatcactcttgcaggaatcgacgagagcggcactatttcgctctcaggcgaactattaaatgaagtgaaggaaatcataactgaacagcgcgacatagaagcacagcgcagcagggctgcagcatga

SEQ ID NO: 187811 - DNA, 273 bp, Klebsiella oxytoca
atgggtgatgtaggtgattattatcgtgatattgctccctatctgaaagaaggtagaaaaaaagcaagggatggtgctcacgaaagaatcaaagccttctttatcaaaaacaggatcacatttgaggaaggtaacaacacgctggtattccgaacgccatcaggaacggtctgttattacactccaagccaaaaaatgcagcacaaaaataaatggcaggaatgcagtccgactaaatgcatgaagtatgttaataaattaagagggctatga

SEQ ID NO: 187812 - DNA, 162 bp, Klebsiella oxytoca
atgtttgtatttgaaaatgaaattctcgaagaaaaaaacgatgatttgagatatccgcgcaagcagcctttgaatcctgcaatcgactatacgagaaaaatcgtcgctgaattatctaatcgtcgtaatctgagaaaaaaaaggaataataagaatgggtga

SEQ ID NO: 187813 - DNA, 300 bp, Klebsiella oxytoca; identical to SEQ ID NO: 101412

SEQ ID NO: 187814 - DNA, 276 bp, Klebsiella oxytoca; identical to SEQ ID NO: 56170

SEQ ID NO: 187815 - DNA, 2043 bp, Klebsiella oxytoca; identical to SEQ ID NO: 101414

SEQ ID NO: 187816 - DNA, 1452 bp, Klebsiella oxytoca; identical to SEQ ID NO: 101415

SEQ ID NO: 187817 - DNA, 204 bp, Klebsiella oxytoca; identical to SEQ ID NO: 101416

SEQ ID NO: 187818 - DNA, 531 bp, Klebsiella oxytoca
atgagtactcgcacaatagatttagcaaacgagattagcaaaatcctttcacttgctgaaagtggcgaaatggacccacaaactattgcggataccctggaaggcatcgaaggcatgatggaagataaattcgatgccactatgtcagttattcgtgattttgaagccaatcaggaaaaatgcaaaaaagaagcagttcgcttgaatgaacgagcaaaacactggcagcgtcaaagcggaagccttcaacaatatctctttgaatgccttaaggctactggtcggaaaaatttcaaaacagcacttaatacattttcaatcagaaaggggagtgtttctctcattattgatgatgaagagttattacctgacgattacgtcacctctcacaccgaggtagttaatgaaattgataaagacaaaattaaaaaagcacttgttgaaaatttgaaagcaattgaagcaatgcgtgagaaaggcgaagaaccaacaccagagcaactgggtgatgctgccaacttactgatttag

SEQ ID NO: 187819 - DNA, 2307 bp, Klebsiella oxytoca
atgtctgacttaaaaacttttatctgtgcagcgataccagatgaaaaatctattgaagaaagcggagcgcgtaaagttgcacgtgcattcgaagctaaagacgagcgccatgctcgggcaaaatgctctttaagttttgtagaagattatccaggtgcgcaggatgccgcttataaattcctcatttgcgaagctgcaccagagatcccctgtccgtctattgattgctgggatgaaaatttcatgtacgaacatgattgggatgaagaggtcgggcaccccgtaattaaagccgaactaaaagagccagtagatattaataccttatcggctgatacgaagattgcggcgctggtaatgtatggacatgatgagttaaccaaggatctcatccctgctgctcgcacgcttctacaagaagaaacgccttcatttgaggggcatattgtagaagcaatcactaagacgccagaaatttccgccatgcactcagagcgtattttaaacgcaattggatgggttatggctaaatgcgcccctactgctaaatggcctgaaattaaagcagaattagtgaactggaagaagcgccttgagggtgagcgcaaacctggcggcccttcaagatcagttgccagtatcgtacgagataaggcggcaaataacgcagtagacatgagtcctgcaaatgatgctggcgaacgtcctaagcggacgtacaagcatacatatcaaactctggatcaggaactcgctaacgcgttttggccgggtgacgttaatcctggcagcgttgacggtgagatttatcgttgggctaaaaaggaaattatcgacaaggacagggacgactggaagcgattctccgcagcattgcgcaccattaaacgtgcgctcgaatatgacctgctgactatccgtgatctggttcagatgcgccctgacgatattcacaaagacgcggtgcatctgaatgattacataaatgcgtttctgttatctcacggggtttttgaagatgaaaccaaacaggacacgtcgaacgcagatagctctctggactcttcagcgtcaacgactggcacagtggaaccggaacagcacgacgatgactcaacagcggggacgctggaaactgcgccacatgtagagcgtactggcccgttctattacaaggaggtgaacggcgatcgctggggacgagtaaataaatacgaaagactggttgagatcctcagcgaagatggttttatcgaaatcagcaaagaagaacaccagcagcttaaaaacggggtaaaacctgaaccggaaaataatactccatcatctgaagaagtggacaagcaacctgcagctcaacgtggggagtatgtcgaaggaatcagcgacaagaatgatccccgctgggttgaaggcaaaccgaaagaagtaccagccccgaccatcgtcacagaacaagacaccagttttattgtacgtgccgatgaactggataaggagctgggagatagcgagaacctgaagctgtggcgtaacgtcatgcgcacaaaccctcgttatacaaaagacatgagcgatcttggattcggaggaacaagtattaatgccgaatacatgattatgcgtgcaacagaaatgtttggccctgtgggtttaggctggggctggaaagttatcgaagataaaatgctagaaggctccccattatcagaaaaaatatttgaaggtaataagttcatcggaaaaagaactcttcgtgattctgatggttctttaatttatgaattaaaccattatctcaaaattgaactttggtatttagctgagggtgaacgtgccactgttgaaagttatggctcaactgtttatcggcaaacaactaaacatgggatttattgcgatagcgaagttcataaaaaatcgctaacagatgcaatcaaaaaagcattatcgaccctcggtttttctgctgatatctggcttgggctttatgatgacgctgtttataaagcagaaagtaaactggagtttgaaattaaagacgccagtgataaagccgatgatactgcgcgtattcgtgaagaactggacgagcgttttaaaggcaacgttgaaaccatgcgcaaagctgttactcagaatgaagtatctaaaattgccagtagcctgacacgcacaattgctgtgcatttaaaatctgcaaaagatactgctgataatgaatatgcaaaatatttagaaggccgcttgcgccgtcttgaagaagttaaggctgaatgtcttaaaaatctggaggaaaaagcatga

SEQ ID NO: 187820 - DNA, 264 bp, Klebsiella oxytoca
ttggaaattaatcttgattttaaaaaaatggttctcaataacggtgaagaaatcacactgagcatcacacatagtgcaatgaaaaaaatggtgatgggacttgtagcaaacggttatctaactactgaagaactaataattctggctattggtcagataaaactttctgacaagaagcacctcgatcatgttttaccagaaatagtcttaaaaaaattaaatgaaacatttgaaactgtgaaaaatggagaaaatcatgtctga

SEQ ID NO: 187821 - DNA, 126 bp, Klebsiella oxytoca
atggaatacgaattaatgcgggttcgagagttcctgtccgacaattgggaggcgtgggaagccttatgtgatcaaaacggcgatgatgctcaacaaatatatgagcaactcggcggtgaagactga

SEQ ID NO: 187822 - DNA, 309 bp, Klebsiella oxytoca
atgtttaatttaaacattagcatcaccacactcaaggcaatcaacaaaaatctcgcggcgttcaaaacggcgggtaatctttctggctttattcagaccagcgatgatgagggttacaccgttgcttttgatggcggtgacgtgctcggcaaattcgataatccgcttgatgctatggaggctattaacaatacaggagaacttttaattcgacacaacattattaatggctcgtacaaaaattataaaaatagaatcatgaaagtgaacattgaaaatttcttaaacatactaacaaagggtaaataa

SEQ ID NO: 187823 - DNA, 177 bp, Klebsiella oxytoca
atgaataaaagagaattgatctatttattcatgattcgcactggtgaggcaaaggaaactgcaaaaagatatcttgagaataattactggagtttaccaaccgccctcaccttttataacgttgataaaaatgaaggcaaatataatgataacaccgatagaagcggctcaaagtaa

SEQ ID NO: 187824 - DNA, 621 bp, Klebsiella oxytoca
atgagcaagcaaaacgcaattgacttagcacgtacagcacgcagcgaagctgaaagcatccagaacggaaccaagcgcactatcatgcaaatcatcgaaaactggaatgagtgtgtaaaacaagccggttttatgtgcatttacgactttccgactactggttacacacgtaaatctcagctggcggccgacctgctccgctgcgctgatcagcttgatgaatatgttgaaccaaacccacatgcagctaagaccgttgaacagcaaacccgcgaatttaacgcagcatgtactcgtattctggatacagaagtagcccacgttgaagcaatccgcgtgaattacttgaataacatgttcaaaaacttctggagtcttaaccagtcggatcgaatgaaatggttcagcaatgattatgacgatgcacggaaaatagaattcgaacttaacgcaataccacaacagcagagactggaaaccagcgacacctggcaaaccagaggacgtggaagcaacgaccaggaatatcagatataccgttcatgcgccgacgatgggaaaggcaacgagtttatgactggcaaccccctcaaaacatatgagcaatggctcaggagttaa

SEQ ID NO: 187825 - DNA, 408 bp, Klebsiella oxytoca
atggaaaaaatcactttaggccagcgcgtcctggctcgtagaaaagagcttggtcttacacaacgcgatgcagccaaactcgcgggagtggcccatgtcacgatttctcaatgggaaagggatgagacacaacctgccggtaagcgcctttttgcgttagctaaagcgctagaatgtaaccctacctggctgatgtttggtgataccgacaaaatcccagagactccctccttaagccctaaaccgacagaattatcagcgacacatcaagaactcattgagctttttgattctcttccggaatcagagcagcaagcccagctaagtgaactgcgggcaagagtcgaaaactttaacaagctattcgaagaaatgctcaaagcgcgaaaaaacaaaacaaataaatag

SEQ ID NO: 187826 - DNA, 444 bp, Klebsiella oxytoca
atgaaaatcaccccgacgattgagcaggtagctgcgggcatcgagtcgtgggcgcaagctgagggttggaaaacagtagccgtccgttttgctgacgagtatcagcagaaagttgggggagagttaatccctccagcattagatgaacaggggatcaggaacgccacgcagcgtgtaaaacggatctttggcttaggcggtcctcgctacgtcaaaatggcagcgagtttgtctgatatcgcgcttgacgcaatgcccacgcgccgacgcatggaaattgaagaacctgattctccagctctgctaactgctaaagcaatggaggcgtatagcgccgcaattgctgcactaacaatcaggtgtcctaccgccactatcaaactgaataaggcaatggaacaccttcaggctttgatcccagtagcggatatgctgattcattaa

SEQ ID NO: 187827 - DNA, 765 bp, Klebsiella oxytoca
atggttcaggctatgaaagcgcgggtgggaaatcctctgcggaaattagtgctgataaagcttgctgataatgccagtgatagcggggaatgttggcccgcagtggcgacaatagcatttgaatgcgaaatttcagaacgctcagttcagaaccatattaaacagcttgtggctgatggttttgtacgcgttgaagagcgtagaggggcaaacggcgttaatcgttccaacatctaccatttgtcctttaataatgacggtgcaaatcctgcaccctatcagaacgggagcatttcagagggtgcaaatgctgcaccctatggtgcatatcctgcaccccagggtgcaaatcgtgcagggggggagggtgcaggagctgcacccagaatcagtcagttattagatccagtcattgaacctaaagatccccctttatcccccaagggtaaatcagccggtaaaaaatttgacccgttgctcgtggatcttcccgaatggttaccacgacaagtttggtctgagtgggtcacgtaccgccgtcaactccagaagccaattaaaacgcaatacggtgtaacaggcgcaatcaacaaactggaagaattcagacgacaaggttacgcgcctatggcagtaatctctcacagcatggcgaatgaatatcgcggattatttgcgctaccagttgctcctgcgatgttgaaaaaaacagtaacttgtatttcgacacctgattccgaaataccaaccggcttcaaggggtag

SEQ ID NO: 187828 - DNA, 723 bp, Klebsiella oxytoca
atgaagaatatttctgatgccatgaaaagattgcagcggattattccagcgggcatatcaccgaaattttccactgcgcaggagctgatggactggcagcaggaagagggccgtaaacattcacagcaactaaaccgagaaaaccagcgtaccagaattgaaaaaaaattcggtcgttctggcattcgtgatcgatatcagaactgcacattcaaaaactacacagtagggaacgaaggtcagaaaaaggcgcttacaatggctaaatcctggctaaataattttggttcaggctgtgcgtgcttcgtgtttagcggctctcctggaaccgggaaaaatcacctcgctgctgcgataggaaatgcattactcgcgcaacaaaaaagcgtgttaatcattacggttgcagacctgatgactgaatttaaggccagcttcaatgggggaaaatctgaggcagagcttatggacgacatttgtcgtgttgatctgctgattcttgacgaagttggtgtccaaatggattcgaagtacgaaaaggtaattcttcaccagatcattgatcgcagaacttcaatgtttaagcccgtaggaatccttacaaatctgaattttgcagaacttggccatgccatcggagagcgagcgatcgatagattgcaaatggaaggaggggtatgggtgattttcaactgggacagctacagatcgagagcgaaatga

SEQ ID NO: 187829 - DNA, 600 bp, Klebsiella oxytoca
atggcacatatacacatagttaaaatcaatactgagttactggctccggcaactgaagaggccaggattttcttgcatcgcgttaaactcggcgagtggattcacgctgattttaaacgtgtcagaaattaccgctttcacaaaaaatttttcaaactcctgcaactcggttttgaatactggacaccgacaggcggcatggtaacgcctgaagaatgtcagttcctggacgggttcatcgcattcgtgtgtaaacgcgttggtgagggacatagcgcagcattcgatgaagcagccaatctttatatcaacgaacaggcaattcaacgctcaaacgatactgcgttactaaaggactttgaagtgtttcgcgagtgggccacaatccaggctggttacttcacaacacacatcaacccggatggcagtcgctggcttaaagcaaaatcaatctccttttcaaatatggatgagtccgagtttgaagggctatataaatccgttctgaatgtgctctggaactacattctttatcagaaattttcctctcaaactgaggtggaaaacgttgcggctcaactgctggagtacgcagcatga

SEQ ID NO: 187830 - DNA, 678 bp, Klebsiella oxytoca
atgaacgctcagcagctcgagtatattcggattaagctgcgccaggcgctggtggatgactcaggaaacaccaaaggccagcttgaggcattcgcagaacacccaccagctgataaggaccgcaatccccgccagcgtattcatgttgtagaactggataacgatcgagggggagtgaaaagagttaaagccgaaaatacagccctgtatgtgctggagacgcgtagtcgccgccgcccgatgcctccgataagagaaagggcgttctcttcgtgtgcatggcgtagagccgttctggcgctaaatgccagccagcaggcctggctgaaatactgctatggttttgatcttcatttcggttatcagactgaaatttgtcgctatatatggaataactacgaaagcggtctggatggtgcaaagttgcaaaagagggttaagcgccgattgatttcacttgtgtggctggccacgcaggaagttgcggcgaggaacaacaacgacacatataaagaatatgcagccacggcgttagctaattttctctctattaatcgcgatacgtggtatcagacctatgctgaaccgtggcgggtttttaagctgctggcatctgaactggatagaagggggttatgtgatattggaatgattttaaagattggcgaaaaagagtga

SEQ ID NO: 187831 - DNA, 222 bp, Klebsiella oxytoca
atgtttactcaggaacttgtcaaaacctttatgctgatcagcgaaaagcaatctcgtgctaagtatgaggtttttacgggcgatcatgactattacgccttcatcactgtgtatggaaacgagtctggtttccacatcaaaggttacgattccttgaagttagatgaatcacgtgatgtacggtcacaaattgaagaacattttgcggctacatatccttag

SEQ ID NO: 187832 - DNA, 351 bp, Klebsiella oxytoca
atgcaaaacagcataccgccaccggattggtggggggcaatcatgttttttttacagcaaaacagccttgcgattaagggggcactgactgcatttttcactgctctgctgttttccttgtgggatggtgaaggatggcgtcgcagcgtgaacgctgggcttatctgcttcattgttagtgctgcggtagtcagcgctatgcaccagctcggacttagtgagcaggattggtcattcatcatcggagctacggtaggcggtattggcgttgaccggtgcagggcgttcgccgtttcaatagtgacttacattgctgaccagcgggggattaaacgcaatgacaaaagatga

SEQ ID NO: 187833 - DNA, 540 bp, Klebsiella oxytoca
atgacaaaagatgaaatatttaacattatcctcgaaaaagagggggggtatgttaacaaccccaacgataaaggcggcccaacaaattggggaattactcaggcagtcgccaatgctcatggttataccggcgatatgcgcaatcttacacgtgcgcaggcactcgatatatatgaggctgactactggtacggtccgaggtttgatcaagtagctgctctctcgccggatattgccgctgagctttgcgatactggcgtgaatatggggccagcagttgcagcgaaatttctccagcgctctctcaacgtgatgaacaatcaggggcgtctgtatcccgatattatcgctgatggtcagataggcccacgcacgattgctgcactgaagagctatttaaccaccagaggttccaccgctactagggtaatgctgaaagcgctaaacagcttacagggcgcccgttatatcgatctctcagagcagcgatctgcaaatgaagcatttacttttggatggtttgagcgggtagaaatatga

SEQ ID NO: 187834 - DNA, 249 bp, Klebsiella oxytoca
atgatgttcaggaagctgttaagcgtatgggcgatgacgatgttgatagggagctgcgcgaaaactttacccgccccggtggtggttgataccgcctgctactgggttcgcattatctatctgacagagcatgatatcgatgttctcgaccgtcagaccaaacgcgacattctggcgcacaacaaatcaattatggcaaattgccaacaaacatcggaaattaaaaggtcaattgtcgttaataagtga

SEQ ID NO: 187835 - DNA, 186 bp, Klebsiella oxytoca
gtggacgtgctgattgacagttctcttgaaggctatctctttctcttactgggtatgtggcccgttttaattattgctttcgtcgggttggctctatcattttatggcgtgtttatgcctaaaacagcggtcacctttttgttacttgctatggtgatagggactacaggatggatttatacctaa

SEQ ID NO: 187836 - DNA, 204 bp, Klebsiella oxytoca
atgcatcccgttatcacctgctggtatgaactgaggctaggatttattttccgcagcgtctgccgtaaccgcgctcaggttgtcaacgcaatgtatgtcatcccaacgttctggatagttatattaatgatgacggtgtacggccctggagttctcctttttatactattacgtattttcaatagcttaatgaagcgagattag

SEQ ID NO: 187837 - DNA, 186 bp, Klebsiella oxytoca
gtgggcgtgctaattgacagtgccctcaaaggctatctctttcttttattggatatgtggccggtgctgcttgttgctttcatagggctagctttctccttttatggtgttttaatgccgaaaacagcaatcactttactgttacttgctgtagtaatcggaattgccggagggatttatgcatag

SEQ ID NO: 187838 - DNA, 1023 bp, Klebsiella oxytoca
atgtccacagcaacgattcacaatttcatagttcatcagatcaaacgtgattctcttaaaactgctcttttggtggaacgctttgaagaaaacgatatcgatgaactagccaaagaggtcgtaaccagccttttaaccttgttcaacaagactggtttacagacaggtacttttggccagggtagtgggaaaccaagatttgagcaagtccttgaaaaaaatgcatctgttgctgatgaaatattcacttttgataattttactcaaatgacaattgatcttgctcgtattttagagcgtgagatgaatactggcggaggaaaaaatgctaaagcaacatatgtcgtttttttacatcattcattcaatttaaaacattatctttctgtcatcaccttattagaaactaaaggttttacattagaggagttatctttcaagaaaatagatcgacttgatttagataagttgcacttagctgcaagaataaggctgaatgattggtgtgatggaattgatgagcgatatatctcttttcgtgtgggcaaagcaagtgtagtacgagattactttaaagaatttattggttgtgaagagtttactcaggcaaaaattgaaaccaaaggtctggttgatgccattagacattgcttacaagaaaagtatggtgataggcctgaagtcgttacagaaaagcttgaacttgccgagaaatattgtaaagagtctaaagatgatgatggtaaaataagcattgaatttcttggtcgtcatttatttcctgagcatgaaaattatttcatagaagtcgcacaaaacgaaccattcaatcttagtgaacgtgttagcattgataacggtggcttgaaggctctagttagatatcgtggtagcgataaaactatgagtattagttttgattctgacttgattaattctaaaacggtagtgtttgataaaaaaacaggtaggttgactttcaataaaatacctgtatctcttcggaaagctttagaaggataa

SEQ ID NO: 187839 - DNA, 759 bp, Klebsiella oxytoca
gtgactcggactcggacagcgactcggattctgacagcgactcggattccgacagcgattcggactctgacagcgactcggattccgacagcgattcggactctgacagtgactccgattctgacagcgattcagattccgacagcgactcggactccgacagcgattcggattcggatagcgactcggatagcgacagcgattccgattctgacagtgactcggattccgacagtgactcggatagcgacagcgattcggactctgacagcgactcggactctgacagcgactcggattcggacagcgattctgactccgacagcgactcggattcggacagcgattcggattcggacagtgactcggactccgacagcgactcggactccgacagcgactcggactctgacagcgattcggattcagacagcgattctgactccgacagcgactcggactctgacagcgattcggattccgacagcgactcggattccgacagcgactcggactctgacagcgattccgattctgacagcgattctgacagcgactcggattctgacagtgattcggattccgacagtgactccgactccgacagcgactcggattctgacagtgattcggattccgacagtgactcggactctgacagcgattcggattcggatagcgacagtgactcggacagcgatattgaggccaaccccgatagcaacagcccggacgttgtcgcgctggaaggtaacctga

SEQ ID NO: 187840 - DNA, 1008 bp, Klebsiella oxytoca
ttgccggatgaggggtatctccccaggaccaagggcctgtattttaacttctatcgccgcggccacctgcaccgcctgcgcgtgcgaaactctggcgcgacggggatcggcatcgactttgcgcgcgattccgccattactgaatgtgtggtggagaatttcgggcgtctggcgccatccgacaacgataaccccgcaggtgcatccggtctcgggttaggggccgggggaacacagagtgagccgctgtatgttgctggcaacttctgccgcaacggtaagaacttcggcatcttccttgagaaacagcatggtaccaacgcaccgtacagctctgaacacaccatcattatggggaatacctgcacaggtaataacggcgggatgggggattgcggtgtggacggcatgattatgatcggaaataacttctccgaaaataattatggtgtcgttatcagtccaggaaccgtactggcataccccggttcgcgcggtcgcttgcagggaaatattatcgccaaaaatgctaaacatggcgtctattacaacagcacgacagagcagcgtgacggcgaataccagatcgatggcaataccatccgtgataacggagaagacgggatcaactttaaagctccagggcaagaagtccgcagcatgtttatccaggggaatgacgtttatcgaaacggtcgccatggtttccatctggaagacggcacagccatcaatatggacgtaattaataaccgcttctggaataacggcctgaccgctgccggaaacggaattaacctggcatcagaggtaaaactcagctcgttcagtggcaataaaattcgagacatccaggctacacccactcagcaatatccggttaatgccactggcgcactgaccgacgttgatatttcgtttaaccactgcgttggcaatgcacagaacacgcttaatctgaccggcgcacaaacccgcgtcaccactctgaacaatccaggaatctga

SEQ ID NO: 187841 - DNA, 1401 bp, Klebsiella oxytoca; identical to SEQ ID NO: 96516

SEQ ID NO: 187842 - DNA, 318 bp, Klebsiella oxytoca
atggggttcccgtcaccggctgcggattacattgaaaccacgttaacagtgaactctctgtgcaacatcacagcaaactcgcgaattatcggaactgacagcggctttgctgttcttgatttgtctctgaaagctaagcagggtagcactgtcctgataaggcacactggattcatggaatttgcgaaaatcttaggcagggcatttatcacgatggagggagaagccattgaaggggaagcgctggatgacgtagaggtgatcggagtcgtcacgtatacgattcacaatgtgatgcaggatagcagtcctgtgtga

SEQ ID NO: 187843 - DNA, 1161 bp, Klebsiella oxytoca
atgtccatcttccgcagatgtgaaatatggtacgcctcgtactcgctcccgggcgggaagcgaattaaggaatctcttgggacagcggacaagcggcaagcacaggagttgcacgacaaaagaaaggctgagctctggcgagtagacaggctcggtgattttcctgatgtaacttttgaagaagcttgcttacgctggctggaagagaaagcagacaagaaatcgctcgatactgataaaggccggatgggattctggcttgagcatttcgaaggggtaaggataaaggatatcactgaggcgaagatttacgccgtggtgagcaggatgcaaaacaggaaggcaaaggagatatggcagcagaaagttgaatctgcgaagagaaagggtaaggaagcaccagtttttgagcccaggccggtcaccacatcgacaaaggcaaagcaccttgcgttgatgaaagctatcttgcgcgccgcagagcgtgactggaaatggctggagaaagcgccggtaatcaagataccgtcagtgagaaacaagcgcgttcggtggcttgagcatgaagaggcaaaaaggctgattgatgaatgtccggagccgctaaagtcggttgttaagtttgcgctggcaaccggtctgcgtcggtcgaacatcatcaatcttgaatggcagcaaatcgacatgcagcgccgggttgcgtgggttaacccagaagacagcaaatcaaaccgcgctattggcgtagcgctgaatgagactgcatgcaagacgattcgtgctcagataggcaatcataataaatgggtgttcgttcacacgaaagcgtggcatcgaccggatcgctcattaacgccagcggtaaggaaaatgcgcgttgatgataaccgggcgtggaactctgcatgcaaacgggccggcattgaagacttccgctttcacgacctgaggcatacgtgggcaagctggttaattcagtcgggcgttccgctttctgtacttcaggaaatgggaggttgggaaagtatcgaaatggtccgccgatatgctcacctggcacctaatcatttaacggaacatgcgcggcaaattgactcgatttttgatgaagatgtcccaaatatgtcccacaaggaaaaatcagcagttggagaaagttga

SEQ ID NO: 187844 - DNA, 291 bp, Klebsiella oxytoca
atgagttacacaccgggcccgtggaagtggtggacgtcgaatagctttcttcggctttccagtgaggcagatggcaaagacggcggcgttatctgccctaccgtatcgcgtagtgacggacatccagacctgatagtaaagcgtgaggatatggcgctgattgcggcagcacctgagttactggaggcgctgcacagcattgtgcttaacgccaatcctgcactattcagcccgggacagctagaacaagcaagggcagcaatcgccaaagcaaccgtaaccgcctactga

SEQ ID NO: 187845 - DNA, 318 bp, Klebsiella oxytoca
atggccgttgatatgccaactttaagttttcaggagttcaagcctgaccaaaaagacctctgcacactctgcggcggtaattatggcgataccgcaatggtgtcttgcaaagatggaatgcacgtctgcatggactgtataagcatccttagagatataaagaaagaacgagaggtgaaaaaaagagatgagttagcaaaagctcttcatatcgctgccggtgccgctccagttgagcactgcggtattggccccttataccttgaactcgccgataagattatcgctggcgaagtaccccacctcaaaatcgtatag

SEQ ID NO: 187846 - DNA, 267 bp, Klebsiella oxytoca
atgaatcacgtacttgtttttggtggtggttacaaaggagccaaacgctcaacacgctttagtgcaggtgaaacaatggaactggcatcgcacccggttcagtctgcaggagagcctgtataccaacctataaactatctgttctcattacatcgatttgcacatgaagacggcaaagaatacctgattgccattcatggagacgaaccagatgatgcattgataaaagattgcatcttcagggaaaagcctgaccctttgaattaa

SEQ ID NO: 187847 - DNA, 273 bp, Klebsiella oxytoca
atgagcaaaaacctacacatcgaactcggtgataaatacgtcgtcaccgggtcaacgcatgacctcatcttgagcgagaaacgcatcattaaggatggcaagaacgccggtcaggaaacgctggcgcgactcggctattacagcaagtttgagcacctggtgaaagagctgtgccacagggaaatcctgcagtcagaagcgcagtcactggaagagttgcgcgactacatctttggactcggcgagaagttgagtaaggcggttgaaccatga

SEQ ID NO: 187848 - DNA, 294 bp, Klebsiella oxytoca
atgcaaaaacaaaatatctccccggaggagcttcgcagcgtctccgggaaaatggttgcgtgccgcgcagctgagaagctggggataaccgttgctcgcttctactaccttgcacaaaggcaccaggttagcaccgcttatgtcaggccgctgtggagtgatggcgaaacgcagaggctgattgcaatgcgcaaagacggcataaccgttaagcgcatagccgcagaactgaacaggaccgagtgggccataaaaaagaaattgggctatttgcgaaaggatgggctgatatga

SEQ ID NO: 187849 - DNA, 483 bp, Klebsiella oxytoca
gtgagtaagctttacgaaatagccaatgactacgcgaagttactggatgaagacctggagcctgagctgattgccgacactctggaaggaatggaaggcgagttaaaagataaaattgagcaactgcttgccatctgcaaaaacgaaaccgggtacgcagaacgcctcaaggaagaggctaagtcactcaatgagagggcagcggcaaccctgagtcgagtagagagaattcaggaatacatttccctcgctctatcaactgccggccttaagaaaatcagagccgggattcatcaggtgacaatcagatcgccatctgaatctgtagaaattgtagattcaagtgccctaccagctaaattcgtcgaatacgaaaccaccatcaaacctgacaaactggcaattaagcatgagcttaaagcagggcatcaaatccccggcgcgcaattaaaaattggcaagccctctctcctcattaagtga

SEQ ID NO: 187850 - DNA, 906 bp, Klebsiella oxytoca
atgggccgcagaatgacctcaattgttgaatttgtcagacaacaggagccgctgttctgcggcgcattaacagaccagagcgtaacgtgggccaaggaaagccagtttgcaattcagtacttccagaaaaatgactttctggcaaaaactgcgctgggaaacccaactagcgcgcagaacgccattataaacgtggcagctattggtatcactctcaacccagccagcaagcttgcttatctggtgcctcgtgacggtatggtgtgcctcgatatcagctatatgggccttcttcacctggcccaggcaaccggctcaatcaagtggggccagtgcaaactggtctactctaatgacacttatgagtcgaatggcctcgatacggcacccactcacaaatataacgccttcggagaccgcggcgctgtagtcggaggctactgtacggtgaaaacagcggacggtgactacctcacggaagagatgaacctcgcagaaattaaagctgtggagtcaaccagcaaagcaaagaatggcccatggaaaacattctgggaagaaatggcacgcaagaccattgttaagagagccagtaaatactggcctaaggcgcagcgtctcgataacgcgattcacctcctgaacgaggatgaaggagtattccaggagccggtcatgccgcataaatcagaggaagatatccgggaggatgagcgtcgtcgccagcaggagattatcgatcacgttcagcaactttgtgatgacatggctcaggcagaaaccatggatgacctcaagcggatatttgctgatgcctataagcgcacatcaggaatgaagttgcagcagaacgtgcaagccatttacgcagagtgcaaggcaaaactggaggtaaccagtgagtaa

SEQ ID NO: 187851 - DNA, 282 bp, Klebsiella oxytoca
atgaacgcatattacgtgcaggacaggattgatgcacaacaggagtctgcgtatcaggctcgcattcagcgtgaacaatggattgataaccgcgctaaggaaatcattgaaagcgcgcctactgagcctcttgagttcaccgcgggctcagtaagcaaggttcttcgcctcgctattcagtcagaaaaaggccgcgaagcttacaacgactttattaccgcgatcgcttatgaccaggctgagcgagagtggggagaacaatatggatgggccgcagaatga

SEQ ID NO: 187852 - DNA, 204 bp, Klebsiella oxytoca
atgcaagagtttgagtatttcgttatggacggtcgcgcaaagttcgattttgacagggccgtggtatttgaggctttaggtcgaaagcttccatctaataaaaaattacaacgagattggggcgatatggatgctgtgctggttcgcgctcctgtcattagcgatacagcctgcggtgactttgagcttctccgcgaaatctaa

SEQ ID NO: 187853 - DNA, 216 bp, Klebsiella oxytoca
atgatcaatcactacggaacgacaacgattattcgtcagtgcgtaagaccgggaatgatggtcagacacaaagaccgcaactttcaggtatcagcagtaccggaaggaaagcgagtaatttatttaaattcactcatcgagaagaagtccattaaagacctgatagttgaggtttatcttgatgggcgcggtgagccgttaattgcgagggggtag

SEQ ID NO: 187854 - DNA, 282 bp, Klebsiella oxytoca
atggcatgtaagtgcttttcagaagttaaagaacgtatggaggcgcgagttaaagaggcgctgggtgactcggttcattcgatggacgagtgtgattttggaagtcgagtttgggtgcttgaaaaaggcgactactgccaggtaatgctcccgttcaacgtgcgatatcgcaaacgcaagaaaaacggggatccggagcagcgcctaacaaacgctgacaccaaactcgcaatcaactactgcccattttgtgggacaaagttcgaaggtaaagtcgcttaa

SEQ ID NO: 187855 - DNA, 189 bp, Klebsiella oxytoca
atgaaaagcgcatatccaatgaaaaaaacaggtcagatttatgaagacatggacggaattcttttggaggttacatatgcatggaaagacggctcatcaatgatgaagattttaaatgggaatcgtgctggacgagagatgtgcattaacgggcagagcgttttcaaattggttaaagatatcgaatag

SEQ ID NO: 187856 - DNA, 324 bp, Klebsiella oxytoca
atggatgcacaagcacgtcgccgcgaacgtcgcgcagctaaacaagccgaatggaatgcagctaatcccctgttagttggggtaagcgctaaaccagatagccgccctgttctttcgttgaaccgcaagccgaaatcacgcgtagaaagcgctgtaagcccgattgatttatcagtgcttgcacagtaccgggatgagatggaaaagcgcgctgaagcagttgagcgcaagaatcataagctctggtacaaacagccaggcgagcgcggcattacctgcagcggccggcagaagatgaagggtaaatcgataccgttgatttga

SEQ ID NO: 187857 - DNA, 210 bp, Klebsiella oxytoca
atggactacgaagaaattgcgcaattacgttatcaagagatgtgtcggattgttggtgatgttgtttttgccatggttgcagaagggcatgagactagaaaagtggcgattgctgacgtgataaggactgaactttcaaaggggctggataaatgggatggagaccagctgcaaatgatggagctggcggttaaattgcttgaagagtag

SEQ ID NO: 187858 - DNA, 654 bp, Klebsiella oxytoca
atgaaatggtatgagctggctagatccagaatgaaagcactgggcataacccaggaaaagctggctgaagagctgggaatgacgcagggtggaattggtcactggctgcgtggttctcgacagccatcgcttgatgagataggcgaggtattccattacctcgggatcactaacgcgacctttaatcacgatggtaccttcactgtcggcggtcagctctcagagacgccagtaaaaaaacagttcgaatacccggtgttctcacacgtccaagctggaatgttctctccagagttccgtaccttcacagaacgggatgccgagggttgggttagtacggctaaaaaggccagtgagaacgcattctggcttgaagttgatgggcactccatgacggcacctgcaggatctcgcccaagcttccctgagggcatgctcatccttgtagaccctgaggagtcagttgatccaggtgatttctgtatcgcccgactgggaggtgatgagttcactttcaagaagctgattaaagatagcggacaagtatttctccagcccttaaatccacaattcccgatgataccatgccatgaacagtgcagaatcgttggaaaagttgtcgcctcgcagtggccggaagagacttttggatag

SEQ ID NO: 187859 - DNA, 216 bp, Klebsiella oxytoca
atgagcaacctacggaagtgccgggaagatttgagaatctcccaaacaacccttgctgagatcatgggttgcactcaaggggcaatcgggcactgggagtctggccgcagaaaccctgacttgaaaacatgtaggcgccttgttgagtgccttaacaagctgggtgcaaaagtaattctcgatgatgtttttcctcctgaaaaacacgccgcataa

SEQ ID NO: 187860 - DNA, 324 bp, Klebsiella oxytoca
atggacaactcaatcaaacgcaataaagccaacgctcgccagattgaatcatggttactcagtcaggttgccattattggcggtcgcaatgtcgctaaggcgatcggagtagacgaatcacaggtaagccgatggaaggtttcatggtttccgaagatttcaatgttgctgtctgtactggagtacggcgtggttgatgacgatatcgcccgggtatcaaagcaggttgctctgtatctggaagagaacattttgacgaacgtcagaaagaaaaaatccccggctgccaccgaggattctgagcaaatcaccatgcaattctag

SEQ ID NO: 187861 - DNA, 798 bp, Klebsiella oxytoca
atgaccacgctttcccaactttacaagcagaaagagaagaacggcaccggaacagcagtgaacaaaacctacatagtgccggttgctgagctatacgttgagccgggtttcaacgttcgcgaaattgaccaggagcacgtcggtgaatttcgtgatgctttcattgccggtgagtacattccaccgttagcggttcaagtcaccgatcagggaatcaagattatcgacggccaccatcgttattacggtgcgctggcggcaacggcagcaggtcaccccatccttcgcatcgagtgtaaggatttcgtaggcacagatgccgatcgtatcgccttcatggttacatcatctcaaggtaagccattaacccctatcgagcgaggaaatgcttaccagcgcctggtgaatcaggggtgggagcatgctgaaattgcgaagaaggttaagcgctctgtctctgatgtggtgatgcatatcgacctcgtgagttgcgatgaacctcttctggacatggttcgctccggtgaggtagccgccacaacagccgttgctttatcccgcgagcatggacctcaggctgtttctgtagcctctcgccaaatggataaggcaaaggcatcaggcaagtcaaaattaacccgtagcgcggctttaccgcaatttagcgcggcaaaggcaagacagttcctccagttggtttctgacacacccggcttagagctgaaccaggatgcgaaggtgatcatggatgaatatctggcgttcctgagggaagctggatgggagagtgagtcatga

SEQ ID NO: 187862 - DNA, 888 bp, Klebsiella oxytoca
atgaatacagctcaaatattcaaatatccaggccctgcgtctggttcactcaggagcaacaggatggagaataaaaggcttggtcacttttctctgttcaggagccttctgcattgcgattgggcaaaagatacagcgaaattatcgctgtggatcaggctaatcggagaggcgtcttatcgggaccgaacagtcgaattcgctggtaaggaatggttgctatcaagcggccaactagtgacaacagcggcgatattagccagaaaactgagggatcaggatggtaaagaaaagagccctcaggctgtaacaaggatgcttaattttttcatacgagaaggaatgattgtgacggaggggaaccggttcggaaccgtgatcaccatcgcaaattatgctgaatatcaggccattttacccgatgaaccatccgatagaccctccgacaaaggcaaatccagcaatggcgcggggttgaggctggtacccgatgaaccatccgataaacaacccgatgaacagaacaagacattaactaacaagaataataataacccccttatatcccccaagggggaaacgaaaaaattcgacccgctatcgataccgatacccgaatggctcaactcgcagtcatgggcagagtgggttgcttaccgaagccaatccaaaaaacccatcaaaacggttcttacagtgaccaaggcattcaagctcctgaaagaatgtttcgatgaaggtcacgacccaaccgcagtgataaacaccagtatcgccaacggatatcaggggctgtttaagccgaatggccccccgcgagtacaaagagtcactgcggaaactccacactggaacagccgcgaagcctgggagaatgaattcttatga

SEQ ID NO: 187863 - DNA, 708 bp, Klebsiella oxytoca
atgagaaatctcgtatcagcaattcagaatcgtgatgcaggtgcattagcccgtattgcaggagatgggccagtccaggttgagcgcggagtacatgagggcgttgagaggctggttgatgcactgttctctaacctcaagcaggtattcccggcatcggtcagtactgcctggcgtaaccccaacgacgaagcggcagcgaagcgccagtggattgccgcgtttgccgagaacggaattcacaacaagcagcagctgtctgcgggtatgaagctggcccgagccagtggctcgcctttcctgccgtcacctgggcagtttatcgagtggtgcaagcagggcgagtatcgttccgcaggactaccatccgacgaagagttgcatgaaatgttccgactgttctgccgtgatcgaggactgtatgactgtgctgaaaactacccctgggaaagcaatgcctgtttccacatggtgacggcggtctacaaccagatgcggtcattcaacctgactgacggcgagtgtcggaagcgctgcggcgatgagctgagaaagatggcccgaaggattgaatccggagaagagataccaccacctcgggctcaactgccacacctgcacatcccgcttaccaacgagaaaggcttgcagaaaattgcagagctgagggctaagcacgggctgaggagcaaagggcatggaacgtga

SEQ ID NO: 187864 - DNA, 159 bp, Klebsiella oxytoca
atggaacgtgagagagagcgctttgaatcccttttcctgagtatcttccgcaacaaatatcccatttccagaacattcaccggctatgaaaatccgttcgtggatagctgttttttcttctggcagagcggcgcaaatattgaggggcatcatggataa

SEQ ID NO: 187865 - DNA, 633 bp, Klebsiella oxytoca
atggataatcttcaacagaaaatcatcgactacgtgcgtgaaaatgaaccagtaagcattgctgaaattgttaagcacaccggagtttaccggaataaattttatgtcattgtcgctcctctacgcgagaagggtttgctgtttagtcgcggcggcctgggtgttttttacaatcaggagagtttcagcaagtggatggatgacggtggcagggaaatgctttcgcagcgaggcagggctggctcagaggcaagcctgaaaacacgcagagaggagccatggagagctcgcgaaggtagtttgaagtgcattgtgatgagttgtctaaagaactcaccaaaacctctaacactcggccagatatctgacgcaacaggcataccaacaaaatctgcatcaggaacaatttccttcctgatccgcatcggttgcatcactcacgacggtaaaagattcgccaggaaatattcgctgactgagggagtgacacctgaaccggtagccattgtccagcgtcatggcaagagaggtggattcgtattgttcaatcccgctcgcaacggcgtggttgaggagtatatggcaagcccggcccgtcagaggctgatggctgtatacgggaggatgggatga

SEQ ID NO: 187866 - DNA, 396 bp, Klebsiella oxytoca
atgagcaagtcgatggacatccgcgccggtgatcggttcgaaacagtttacccattcattttcgtatgcactgaccatcagcaatgggatggaaatgtgttcaccgacgaaaggtggattggtggttgccgaaagacacttgagccagctgattgcggttatggagaccaggccgtttacacagctgacgcagaaggaaaaagaatccttgaggttctgtcggtcgctgaaatgccaggaaagtggcagcgccggatcatctatgcctgccatcttgttgacccggaagggcaagaaaggaaaggcaggaaggcctatacggtaaccgaggacagattcatcaaaatgtcgtcagggtattttgcggattatggagtggagaacagcgatgactga

SEQ ID NO: 187867 - DNA, 459 bp, Klebsiella oxytoca
atgactgatatcacagaactggcgcagaggttaaaacttgaggtccatcgtgcggtaagcaatttcaaccctcagatgaatattaaaaccagagacctaaaggagctggtagaggcgctggataagtcagaatcacggcttcatgaggtcgccgtagcgtgcgcaaccgcagagcaggcgctggagaaggcgcagcggcggaacggcgagcttgagacctatagcaaaaccgcgctcgaatttagggaagcggcgagagatgaaaaccgacacctaaagttggaactggaaattgcagagaagcgcatcgccgagcaggagtcaaagttagctaatccggtgcaattgccaaaaacaaacggctattggactgagacagaaaaggcttatgaagaagctattacgctcgcgaagcggcaaattcgcgttgccggatttcgctgtgagggggatgagtag

SEQ ID NO: 187868 - DNA, 195 bp, Klebsiella oxytoca
atggctgaatcactgattaaaagggggtatctggaaaggcttgggagtgtaattcgtgccaccgaaaagacgaaggcgctgaagtgccgcgcaggtaactgtttatatggtcgcctttatgacgataacgatgtggattcggggcagtgccctgattgcgatggcggcatgatgtttgaaggagccaaccaatga

SEQ ID NO: 187869 - DNA, 231 bp, Klebsiella oxytoca
gtgaataaggtcgaattgcttcagaagatatcagcactagccactgaatgccacacgctggcctgtgagcttgatattggtcatgagcgcacggaaatgttcgaaatctacggcgtgctgcacaacctcggtcgccgcgggtacgctagccaggtaggtcggcgaatgaatccattgctcacatcctgcgatgacgacgatgatgatgattgggacgaggatgacgactga

SEQ ID NO: 187870 - DNA, 450 bp, Klebsiella oxytoca
ttgcaaatcgacctggttaaacacccaggcggcgtattctctccagcaaacgaaacagacctcgaacgactccagcgattcagaaacggcgaaacctacgtagccgaaataaaactcaccagaaaccccgcgcatcatcgtaaagcctttgcattcttccagttctgcttcgaacactggtcagcggaacacgctggatatgaatgctcagacgaacacacgcagaaagaagagttccggaagaatctaaccattctcgccggattctatgacgtggtgacgacgatacgcggggagacaaaggtgagggctaagagtctggcattcgcatcaatggaccaggaggagttcgagcgatgttattcatcgctgattaacgctgccattaagaacatattcgccgggacaaccgacccggcaatcctcaaccgattacagtcattcttctga

SEQ ID NO: 187871 - DNA, 627 bp, Klebsiella oxytoca
atggctaaacagccgcggcgaagatgcaagatatgccgtgaatggtttcaccccaaattctccaatgaatggtggtgtagcccggaacacggcgctgaatacggaataatgctcagagagaaggataaagcaaaaagagagcagcagcgtaaggaagaagcccagcaagaacgacgaaacctgaaaatccgcaaattagcccttaagccagatagttacttcaaatcccaagcccagcaagccttcaacaagtacattcgccttcgtgaccatgaccaaccctgtatcagctgcggagaaaccaatccgccagaccttcacggtggccagtgggattgtgggcattttaagacagttggcggctttcctgaattgcggtttgaagagcggaatgcttaccggcaatgcaaatcgtgtaatgccggctcagcaaaacacggagcaaaggccgcaacggtagcccagcaatacgaagcaacactggtagagaggtttggtcaggagttggttgactggctgaatggcccgcatgagatgacccgataccggcgcgatgacttcattcgaatacgggatgagtatcggcgcaagtgtcgggagatggaaaagaaactggagggcgcatga

SEQ ID NO: 187872 - DNA, 132 bp, Klebsiella oxytoca
atgaagcaggaaatcatcgaagcactccgcatcagatggactcgcctccagctattccgccgcggcagaacctttccagacaactacatccttcttcgtcagttttaccggatttacgggggtaatgcatga

SEQ ID NO: 187873 - DNA, 618 bp, Klebsiella oxytoca
atgagcagattaacaccagttttcggcatggttaacttcgttgatgacgctcattttcgcagagtctggaagcatcctaagaagaccataaccaccggtcagagggcctgggttcattacatgctttctgtatggggaagggtaaacagaggagatgattctccatgtggggctgtaaacgtaatcggtcgcctgatgattagaagtcactggagcgaggataaggctatccagatccagaaggtagtgaacatgcttcatgatgagagtggactgagaggggaagagttatatcgaaaagccagggaaatcatcatgcctcaaacctcagtaagcaacatcatcgctctcgccaaagaatcagatgacgctgcttttgtagaaaaggtaatgattaaaacatttcaccgtgaaagcccggttcgtgatgtagcgattaaacgatactgcggacgcaactgcacgcaagacattgccaggttgatatctcaaataaccggcatcgatgtccaggcggccaggagaagggttgtgtggtgtgagaatgtcctcgatgcggaaatcttttacgctatgaggcgcgaaattgagaaggagcttccattaattgcagcatag

SEQ ID NO: 187874 - DNA, 609 bp, Klebsiella oxytoca
atgaatattggggtcgagctgcttaatatcgccgacgttgagctccttaccggtgctcggcatgacctgcataacgccaatggcgccgacgtggctacgcaccgactgattaagccgcgattcctgatacccctgagcggccatcagcagccagtcaacatcgtagcgatcgccatatttgcgaaagatctccaccatggccagaaatttacgccgttctttttgccccgccgcgtttttaacgtagctggcatccttcaggtagcgcagcagtatcgtattacccagcctgctgccctggcgattcttattgatgaacgcattaagcagggccagcagctgcgggctattgttacgtaccgcccagccgatattaccttcgtcgcgcagaacaatgttctgatgaacctgaatcctggggaagacctgtttccagaacagggccttgtggcggtcgaccacgatcaatgggatcaggcccgcgctgagcatctctatcagatcctcatcttccagcgcttcgggcgccggttcgatggtgatggggggcagcgattgctgcgcaaagcgtgcgttgagcgcgaccaggctcgcgtaatagctggatga

SEQ ID NO: 187875 - DNA, 1401 bp, Klebsiella oxytoca; identical to SEQ ID NO: 185420

SEQ ID NO: 187876 - DNA, 1008 bp, Klebsiella oxytoca
ttgccggatgagggttatctccccaggactaaggggctgtattttaacttctaccgccgcggtcacctgcaccgcctgcgcgtgcgaaactctggcgctacggggatcggcatcgactttgcgcgcgattccgcgattactgaatgcgtggtggagaactttggtcggctagcgccgtcgggtaacgataaccctgcgggggcatctggtctcggattaggggctggcggtacgcagagcgagccgctgtatgtcgcaggaaacttctgccgcaacgggaagaacttcggcatcttccttgagaaacagcacggaacaaatgcgccttacagctctgaacacacgatagtcaccggcaacacatgtacagggaataacgctggcctgggtgattgtggtgttgatggcatgatcgctaccaataacaacttctcagaaaataattatggcgtgattatcagtccgggaactgtgctggcatatcccggttcgcgcgggcgtctgcagtgcaatattatcgccaaaaatgctaaacatggcgtctattacaacagcacgactgagcagcgagacggcgaataccagattgacagcaataccatccgtgataatggcgaagatggaattaacctcaaagcgccaggccaggaagtccgcagcatgtttatccaggggaatgacgtttatcgaaacggacggcatggtctgaacctggaagacgggacggcgatcaatatggatgtggtaaacaaccgcttctggaataacggcctgaccgcttccgggaacggaattaatctggcctcagaagttaagatcagctcgttcagcgcaaataaaattcgcgacatccagtctacgcctactcagcaatatcctgtttatgccagcggtacgcttaccgatgtcgatatttcatttaaccactgcgtgggtaacgcgcagaacacactaaatctgaccggtacgcaaacccgcgtcaccactctgaacaatccaggaatctga

SEQ ID NO: 187877 - DNA, 1350 bp, Klebsiella oxytoca
atggaaccaacattgtcattaaccgtgatgttctgtgctgcagtgggtgcttcagtatcagaatcgctgtcggaatccgagtcactgtctgaatccgagtcgctgtcagagtccgaatcgctgtcggaatccgaatcgctgtcggaatccgagtcactgtcggagtcagaatcgctgtcggagtcagaatcgctgtcagagtccgagtcactgtcggaatccgagtcactgtcggaatccgaatcgctgtctgaatccgagtcgctgtcagagtcggaatcgctgtctgaatccgagtcgctgtcggagtccgagtcgctgtcagagtccgaatcgctgtcggagtccgagtcgctgtcagagtccgaatcggtgtcggagtccgagtcgctgtcggagtccgagtcgctgtcagagtccgaatcgctgtctgagtccgagtcactgtcggaatccgaatcgctgtctgaatcggagtcgctgtcagagtcggaatcgctgtccgaatccgagtcgctgtcggaatccgaatcgctgtcagagtccgagtcactgtcggaatccgaatcgctgtctgaatccgaatcgctgtccgaatccgagtcgctgtctgaatccgagtcgctgtctgaatcggagtcgctgtccgaatccgagtcgctgtccgaatccgaatcgctgtcagagtcagaatcgctgtctgaatctgaatcgctgtccgaatccgaatcgctgtcagagtcagaatcgctgtcgctatccgagtcactgtccgaatcggaatcgctgtcggaatccgagtcgctgtcagagtcagagtcgctgtccgaatccgagtcactatcagaatcggaatcgctgtcagagtcagaatcactgtcagaatccgaatcgctgtcggaatccgaatcgctgtcgctatccgagtcactgtcggaatccgaatcactatcggagtccgaatcactgtcagagtccgaatcgctgtcggaatccgagtcgctgtcggaatccgagtcgctgtcggaatccgaatcgctgtcggaatccgaatcgctgtcagagtcagagtcgctgtccgaatcggaatcgctgtcagaatccgagtcactatcagaatccgagtcactatcagaatccgagtcactatcagaatccgagtcactatcagaatccgagtcactatcagaatcggaatcgctgtcagagtccgagtcactgtctgaatcggaatcgctgtcggaatcagaatcgctgtcgctatccgagtcgctgtcagcatccgagtcactatcggagtccgaatcactgtccgcatctgagtcagtttctgaaatcgaagagtggtga

SEQ ID NO: 187878 - DNA, 321 bp, Klebsiella oxytoca
atggagcgcttcttccgcagtcagaaaacagtatgggtgccgacggaggtttacgcaggcaaggacagggcccggcagcaaattaatgatcatatatggagctactacaatagcgtcaggcctcaccattacaacggtgggctgacgccggaagagtcggagaacagatttcttagccttctctgtcgcaccgcggctttccattcgacgcagtacattcagcagcaccaaaggcttaatgtttttcaccggcaagtggccgagaaaggggaaaatatttttattaaaggcttcgataatgtcagaagcatacccttctga

SEQ ID NO: 187879 - DNA, 651 bp, Klebsiella oxytoca
atggcacgaaaaaccaaacaacaggcgcttgagacccggcaacatattctggatgttgctctgcgtttgttttcgcagcaaggcgtatcatccacctcgctggccgcaattgcaaaagctgccggtgtgacgaggggggctatctattggcatttcaaaaataaatcggacttatttaatgaaatatgggtgctgtcagaagccaatattaacgatctcgaagttgagtatcgggcaaaattccccaacgatccactgtcagttgtgcgagagatcttagtgtatatccttgaagccactgtgacagaaaaacgcagacggctgatgatggaaatcatctttcataaatgtgaattcgtcggtgagatggtcacgctgcaagaagcgcagcgcattctttgccttgagagctacgaccgtatcgaacaaacattaaaggagtgcatcgtcgcgaagatgctacccgccaatttattaacccgccgggcggcgatcctcatgcgcagctatctttccggcctgatggagaactggcttttggcgccgaacgcctttgatctgcaaaaagaagcgcgggattatgtcgaagtcctgctggaaatgtatcaattttgcccctctctgcgcagttctgaaggactggacgcttaa

SEQ ID NO: 187880 - DNA, 789 bp, Klebsiella oxytoca
atggaaagattctcacgtacgccgcacgatgccatttttcgtcaaatgttgactcagaaagaggtcgcccgcgattttttacagctttacctcccggcgcagtttttaagtatctgcgatcttagtacgctgcagctggcttcaggcagttttatcgaagaagacctgcgctccagctactcagatatactttactctctgcaaacgcggcacggcgccggatatatctatgcgctgattgaacatcaaagctctccggacaagttcatggcttttcgcctgatgcgctatacgctcgtagccatacagcgtcaccttgatgctggccacgatacgttgccccttgtggtccccattctgttttatcacggcgccgtcagtccctggccgcatacgctcaactggcatcatctctttgaccatcctgagcttaccagcgcgctgtacggcggtgattttccactggtggacctgaccgttatgccagttaatcaattcatcctccaccagcgtatggcgatgctggaactgttgcagaagcatatccgccagcgcgatctggccgaattgcaaccgatactgattgcgctgctggcgattgccgaatggctggaagagaaaggtcgtaaaaaagggagaagagaaggcagactggagggtcgacaggaaggccgtaaagaaatctcgcacagcattgcgctgaaaatgctcgccagcgggcaggatcctaagatggtgatggagctgacgggtctgagccaggaagaactctcctcgctcagccattaa

SEQ ID NO: 187881 - DNA, 717 bp, Klebsiella oxytoca
atgacagacgatagtgttctggatggcatttttgattcagtaaagagcgaagctgagcgttttatatcgtgctacagcggtagtgatgatgtcagtagttacaatgaactccgtgaccggtgcgagagtaaagcaaaagaaaaaattaataaattcaaggaggaaggctgccacatcctggatgatgattttgaatgcatgctttacgatgctaatttttctgcacaatggaatggaaagtttggaacgtatcttgccattgcattcttcttttaccactgggggcagtattgttattcctctgggcaccggcgtgaaggattgctatttatggcaagagcagctggttgtggtggagtctggcagggggctgggctatacgctgaccgtgtagagactgctgaattggcgttaaagaaaaagcaagatcatggaaagaagggaggagaggctactggcttggctttagcacccgcacgggatgagttgaagcggttgcttaaaataaactgcccggcagaaggatggaaaactaaaactgcagcaatcggtgccgttgtagatcaacttgaggtttttgttaaaaaacacaaaataaatttgaaaaccgataatcttgataatgccatattaacatggtgtaagagatatgatgatttacgagacgtattggagagttctttaaaaaagaacatgaaaaataaccgcgtgggttga

SEQ ID NO: 187882 - DNA, 234 bp, Klebsiella oxytoca
atgaacactcaacacattaaaatcctgcgtatgtctagtgttgtcaacaagataggcgtagcccgttctaccatctacgactggattaaccccatgtcaccacgatatgacgccacattccctaaacaacgtcgcctaggcatgcaatctgtcggctggcttgagtctgaactggatgagtggttgctgaaacgtcatctggcatcatcaactactattgccgaacaaccataa

SEQ ID NO: 187883 - DNA, 1164 bp, Klebsiella oxytoca
atggctatttgtaaaagaaataactgtacgctctcaattggtgaattacctgatgagcgtaaattccgcttatgttctgtacattatcagggtaagctttctaatgcagctaaaagagcgcaaaggtggaatctgacgtgtcagtacccgccctgtggtattagcctgtctggtactcgcaatcaacggtattgttgtattgggcatcgtaataaagatagaaggctcatagatgacgatgccattgtcagtctggtaaaacattcttactggatcaacgtggagtccaagctaaagaataatcccctcgggctgggaagtatcaccagccctgatgacattgctgatctcatccggttgtaccagcgcaaagcagactaccagaaagcttacaatactctaaatgggcaaagggttattgattcacaggggcaggttattaaacgcctgataccctggctggagctggagttatgtcacatatatccgaattccaaagggggggccaatacagcggataacatcattattgcccctgcgttgattaacaggatgatgaaggacactattcccgtgagcaaaacccgaggaacgttcagcggcataaaagcggcaggttctcccctgcctgtaaaatcgacgttattaaaggcgctcacgatgcaatatggtcaggatgaaatacaggaagcgctagcctctgtaaaacatgtgacctttgcagatctgagtgtaccacgcaggctgtttggtacggacatttatgcttatccaccattactgaaacttttaaacgatcaggcaatgcgcttgggtctctggcgtttgagggagtccattaattctattgaaagcagtcactggctgtctgcaggtcctgcaaatgagttatttgctgctgctgcttttcatgccatgttaaatggggataaggatgacttaattgaggtattttcaagtctgcacgaagacataattgaacgagctaggaataaagaaaaattaaaccatgattattatcaaaacattctggaacggtatgtatcccgttatttccaaatagacttacacaatcaggagtcatgtattttattttacaattcatttttcacagtgccgcctttggacaaacatggggttttaatcataccacatcacttctaa

SEQ ID NO: 187884 - DNA, 729 bp, Klebsiella oxytoca
atggctgtctaccgtaatgaccctgatttgaatctgctgggccaatgcagcaatgaagaactgcaattgctgatttccatcctgaccactgacccacgagacggcgacactcgttggacagagagtcttaccggaaccccggagtttcgtctgctggcaccagaccatcgccgctactggcaactgatagccgctgagcttcagcgttacggcgcgaataccctggcgagcctggtccggctggggcaaggcgtgacctatcgggaaattctcgttgatgtctgtgacaagcttgatgtgaattacaaccagaaaagtactaccgaaaccattgagcttgctctgttgatgaaggttctggaaaaaagcttggatcagatgtcaccagaagagctggctgctttctcccacaatatgcatctggatctgacaaaccccacgccacaactcattcttatcgccgttcaggccgccatccggacttcctcgctggctgcgctcgagctggcaacgatgttgtctgctagtgtcatcacctccctgggcggcattgccacttggggaactgttgtggtcgcttcacgtgctctttccgttctggctggtcctcttgccatcgccctgagttcagcgtggatgatttccgacatcaccggtccggcttatcgggtcacgatacccgcatgcatcatcgtgtcctggctgagacagcagcacctttcccgttaa

SEQ ID NO: 187885 - DNA, 678 bp, Klebsiella oxytoca
atgtctgaacagaaacaacgctatgaccgcctggcaagccgtctcgccatactggtcagccgcctctttatgggagaaacgctcagtgtcaggcaacttgctcaggagtttggcgtctctgagcgtaccgtgcagcgcgacctgcgtgaacgcctgcgctatatcgacacggaatattccgggggtaattttcgcctgcgggatgcacggggcccctttcgcactaactgcgacattatccgctttgcccagataacccaggtggcacattactttccggcacttgaccctaaattgttgtcggtcttgctcgacagcggccaagactccccctgcattatctggaatacgccaccccgtcaggctccggcgttgtttggcggttttcaggtcattatccaggccatcatcagcagtcgccgtattcattttctgcaccacggacaccatcagtccgccgttgccccttaccggcttatctgtctggaaggcgagtggtacctgacggcaataactggcgagcggattcaggtatttaccctttcagccatcaccgatgtggttatgaccatcgggggcttcaccagaaacaatcatatccggcgaatttttgaagacccgcgatttattcaggccctgccgcattttcattacatcagcaggctcatccgggaatga

SEQ ID NO: 187886 - DNA, 465 bp, Klebsiella oxytoca
ttgaaaaatgtatcactcagcatcctggtattggctggcagtctgctgccggttatggcgctggcatctggcagtcaggggacctggacccggggttggggacagggtgtatcagagtttgttatcaaaggaaaaggtcagtcacaactgtctctgagttgcgaggattatggctcgcaaccggccacgatcatatttactgacgcaagcggacatcaggtcagtatggatgaagataaaagccttcaggtcagtatcgatggtggggcacttattgatatcagcgaatctggcagtcgcgtgggcggtaataacctggcgctggcctgggctcagttacgtaatggcaaacaggtctcagtgacaggagacggtgttaagcctgccacattcacgctggccggtgcggctaaggtactaccggcattcgggacacacggctgcgtgggtaaagatgcactctag

SEQ ID NO: 187887 - DNA, 360 bp, Klebsiella oxytoca
atgaaatttaaatatatgctggtatccgcactgcttgcattgtcagcacaggcgctggcagagccagcgccgcccatcaaagtggagaccagtaatcaggttcatcctgccggaacacgctatgtcacggtcgtagtcacctcgctggatgacagtatcaaagttgaaaagatagatgtgaaccggggtaactgtcgtattgataaccagaagtacctatattccagcaataaggaaactattctgcccgccaccttgcgctacggggagtccgtcaaagtaaatttttataataactgcgttgcttcagaagtcgtcgtcaccactgataaggggggatggcgttacacctaccactga

SEQ ID NO: 187888 - DNA, 822 bp, Klebsiella oxytoca
atgcgattagctagccgttttggtcgggtgaaccagattcgccgtgaccgtcccttaacccgcgaagaactgatgcagcatgtccccagcgtcttcggggaagacaagcacgactccagaagcgaaaagtacacctacatacccaccattaccctgctggagaaccttaaacgcgaagggttccagccattctttgcctgtcagtcacgagtgcgcgaccagagccgacgggaacatacaaagcatatgctgcgcctgcgtcgtgccggtcagataaacggtcagcaggtaccggaaatcatcattctgaattcgcacgatggcgcatcaagttttcagttactgccagggatattccgaagcgtctgcaccaattcgctcgtttgcggacagtcgtttggcgagatccgcgtgccacacaggggcgacgttgtcgggaaggtgattgagggggcctatgaggttctcagcgtctttgagcgggtggaagagaaacgtgacgccatgcagtccatgcaactcccgtcacccgcacaacatgcactggctaaagcggcgctcacatatcgttttggggaagagtaccagccagtgactgaatcgcaaattcttgcacctcgccgctggcaggacgagagcgatgacctgtggaccacttaccagcgcatccaggaaaacctgctgaaaggcgggctaagtggccgtaccgcgcaggggaaacgcacccaaacccgcccagttaacggaattgatggcgacgttaagttaaaccgtgcgctctgggtgatggcggagaacatgctgaacctgttggacaggtaa

SEQ ID NO: 187889 - DNA, 480 bp, Klebsiella oxytoca
atgacagacattattaatattaacgataacaatcagcgacctctgcaggctggcgagaacggttctgcacctgctctggcagccatacccgtgctggacgaacagcgtgtgggattctggccgcagcacttcggcaatatcccgcagtggataactcttgaaccgcaggtctttgcgtggatggaccggttctgcgctgactacagcggcggtatctggagtttttattctctcagcaacggcggggccttcatggctccggaaacggacagcgatgccttctggtcgctgtttaacgccatgaatggcaatgccgcagacatgagcgccgaagctgcagggattgcggtctgtcttatcgcttacagtcatcacgcatgccgcacagaatgcgatgccatgacggaacattactggcgtctgcgtgactatgcgctcaatcacccggaatgcaacgccatcatgtgcattaccgactga

SEQ ID NO: 187890 - DNA, 234 bp, Klebsiella oxytoca; identical to SEQ ID NO: 112245

SEQ ID NO: 187891 - DNA, 483 bp, Klebsiella oxytoca
atgaataccaccacgtgtccccctgaccgcaggggaatatctcccgtcgcacagcgcactatcagacgcgcactgaccctgctggaacgccagttacgcgaacccggcgaggcattcacctccagtcaggcggtccgcgactggctccgtctgcagctcaccacgctggagcgtgaagtcttcatggcactcttcctcgataaccagcatcgtcttattgcccatgaaacgctcttcaccggcaccatcaaccatacgcaggtacatccccgtgaagtgataaaggcagcactgaaatacaacgcggctgccatcgtgctttcacataatcatccgtcaggttatgcggaacctggccatgccgaccggctgctcactgaccatctgaaacaggcacttaaactcgtggatatcagtctgctggaccacctggtcgtgggaggcatggacatcgtctcgtttgccgagcgtggctggctttag

SEQ ID NO: 187892 - DNA, 222 bp, Klebsiella oxytoca
atgaaaatcatcagcaaacgtcaggcaatggcgatataccgccagcattctgagtcccggctgtttcgcttctgtaccgggaaatataggtggtccggcagtatctgccattaccacggcagggaagtgcaggatatccggggtgtgctggccgtgtttgctgaacgccgacaggaccgcaacggtccgtatgtgatcctgcgcagcgttaccctgaactga

SEQ ID NO: 187893 - DNA, 360 bp, Klebsiella oxytoca
atgcagaaagcaacccgtgtaatcaaccataacatcacggaaccctggtggggcctcagacgcaacatcacgccgtgttttggtgcccggctggtacaggagggtaaccacctgcattatcttgctgaccgcgccagcattgccgggacatttaatgacgcagatttacgccatctggaccaggcatttccggtactgatgaagcagatggagcttatgctgaccagcaatgaactcacgccccacattcagcgctgcatcacgatccacgcaaaagggctgatatgtgaggccgatacgctcggttcctgtggttatttgtatatcgtaatttatccggcgtctgcaacaacagcataa

SEQ ID NO: 187894 - DNA, 2967 bp, Klebsiella oxytoca
atgcctaattttttcagggattcgaatggtgctctgaatctagccgcacaaacgttagtgccaaaccaaggctttcgtgcaggtcaacttggtgccctgcatgctgcaatggcgcattactcggtctatgccgacccagcgataatctgccttcctactgggtacggtaagacatctgtaatgatggcactgccgtttctggttcagtcaaaacgagtgctcgttgttgagccatctaatgcgctacgcaagcaggtgtcatcgcactttgcggagctgtctaccctaaagcgtatcggtgctattccggtggatcttgctaacccatcggtgctccgacatgaagggagacctcaatcggaggaagattggcaggtcttagagagccacgatgttgtggtttcgaccccaagtagttcttcacctgcggttgcacctggcgcctcgccagacttgttcgatttaatcgtatttgatgaggcccatcacgctcctgcgagtacatgggctgcatacttagagcactacacgaaagcccggttcgtatttctgaccgcaacgccttttcgccgcgacggccaagtaattccagggaagctggtctaccgctacccagtaatgaaggccgtagatgaaggagcgtttcatcccgttgccttccgagctgcgcctattcaaaacacggttgatgatcatcatattgacttggtcattgcagagactgctgtaaaccaactgcatctggacttagctgcagggcatgatcatcgcctttttgtgagggctgcaacgatcaatgcagcgagagctttggttccaatctatcaagcgcttggagtcaacgttgaagcagttgatagtaagatcacgaagcgtacccaggatcgttgcgagcagcgtttggtcagtggggaactgcaggggatcgtgtgtgtggatatgttcggggaggggtacgactttccgaaactgaaggtggccgcattgcacactccacatcgttcattggtaccgacaattcagttcattgggcgtttcgctagggtggataaggcaactggccaagcgacattgatcgcgccgctcccaagagttctggaggcacctagcgctcttctgaaagagggggtagatcttgcgagtatgatagatgctgcagcacaagcagagatggcaggtgatgctgctgagttagaaatggttgagcggctcaagctgcggcgaatggccgagtcaaactacgatgcagtgtcccctttagcaattgagctctatgcgcatgtctgcgtattccggtgctccactcctccaatcttcgctcagataaaagaaactttggggcgtgacctgcgagtagtgaagcaatgggcgtcagatgatggagccctgacactaatcctgacctctgacgaaaatccaccaaatttcgctacatccgatgtacttgtgaatattcggcatgatgcttttctgcttttatactttgcggactctcaactttgctatatcggctctactcgaagaactgaaaagatctacttgggattgatggacatgatttgcccccaaagttatcggtcattgagctacgaggaaaccagccgcgcgagagcaggtttggagggggtgcgattcttcaatgtcggattaaaaaatacgacattcaactcacaaagtgaaacataccgtacgttaacaggaccggcagcggaacgtgcggtaacggctggtgatagccgggcatactctcaagggcacttctttggaagcggctcgagcggcggagaaaaagagaccatcggagctagcagtagctcgcgtatttggagtaatcagcgtctctccatagcagaatttaaccagtgggtcgctcgattagatggtcgacttgctggcaatgctcccttctcagaaacacgcctcgatgttattcggtcggctacgacgttgcagaagctaccagacttagtgattgcagggacctggcccagagcaggattcaaggcaaatccgaggattaggattcgtcgttctgaggatcaacgcccgctctatagccgcctcactgaatgggacctagcagactttgactgcagacctttagaaggccaattactcttcagtattcactcagaggaagcctgtgccaatatgcttttttcgccccaggggcgaatggtgatattgcttgataagaatgtggttttggagatcgaatcagctagcgaacaatggatgccgttagctgactggttgagtgaacacccgccgatgttctatgcctccgataaatcaacctttgaagggctgaatttaatgcttgcgccgcagttacaggcagtttcactaacaaaggacgatacgaaggtcattgattgggacgagtgcgaaatcaaggtcgagtttgtcatcgacaatgacactgaaaaagcacgggaacagcgtgcagagctacagggaaaaaggactgtacaggaacatctcgaacattacctccttggtctccctaacgtattcgtattgttttacgaccaccgttctggagaggcagccgactatattgccgtgaccgtgggggccaatggcgtcgtggacatcacgttgtaccactgtaaaggagcaggaggcgcccccagcggggggcgagtggatgatgtgtacgaagtcgctggtcagttggtgaagtccgttttctattgcgatgtatctgtacttcttgcgcatatggaggatcgaatgagtcaacgttttaagtcgccgtctaggtttgttgtgggtgatctgcagacactcaaggaaagactttacgctactcgggcaacccaacttggattcactgtagtgggcgtgcaaccaggaataagcaacgctgcaatcgatgcccacctcgcagatctaatgtcattcggaatctcttatgccatgcagggaggcgcaacaagagcctattggttagtgagtgaatag

SEQ ID NO: 187895 - DNA, 765 bp, Klebsiella oxytoca; identical to SEQ ID NO: 112243

SEQ ID NO: 187896 - DNA, 1629 bp, Klebsiella oxytoca
atgagtattactagcctatccgatgcaggtgggcctgcggcaaggcagggcttcaagtatcaagatcacgtagctgtcagtttcattttcaagatgctccaggacagtaactactcccaagtggaatgtgagacagcggatgacattgtggcggtattccaatgctcgggccagatagtaaatgaatacattcaggtcaaaacaactgaaagtgatagcaaatggaacttgaatgagataacggcgttagacggcaccaaggccaattcttcgctactacataaatcgctgaaatgtgatgttcgtccaggtattgcacgctttcgaatcgtgaccaagcgcgacgttgcaaaaattcttgatggattcaagaaagagatagataagcgagtgctacctgacacaaccacagcacgaggtgtggcactgtgcaagaagtttaaaacatttgtatcacctcaaaaacgtgacttcttgtactgggctgaaaactttgtctggcaggtatacggtgatgtcgaggcccttgaggctgtcaatataaaggctttgtcccagcttgcggaggggcttggaaatcgccccaacttcacgcagctaaaggcaatttacgaagaatttttagagattgctgacaaagcggcaacatctagcgtgaagacagccgcagcatctaagatcatccttcgagctccgacgctggatcacctcaagaaattactagaagaggctgatgacatgtcaacggccacatccaaaccatataaaaagcatccggacccgttcttagtcgagtttcacaccaacgcaaaagagagcttgttgcactcattttctggatttgacgtgcgctattcgcttaggaaatggcggcatgaaaattacgcaaagcatctcgtcgaatggctaccggagttttccctaaaggccagtgaaatcgtaaacatccttgcgcataacgccgaaacgatattggccaggtcaattagtacattcagcgacagtgagcttccgcgcgacaggctcattgcagaactaattctccattccatcctgcgcagccggcaacacagcgagcccgttgcgtgtaaagtcttctacaagtctgctggtaagctttccgaatttggcaatgctcacatcgttcaaatgcctgatcaggatgaccagttgtggctaggccttgcccgcatgatcaaagcggatgacatggatacaactctagagcaaattcgagaaattcttgacgaaactatctcagaaaccgtgctatcagcagagcgcgaaatcattatttctctacgcgaaccattacaccaccagccaaaagcagattccttcaatcaagctctgcatcgaaattctcctatcgatgacatgctgaatattctttgcttccccatcttgctgacttacgacagtgcagctctctcatcaggatggttcgtaaattacgtagacaacctcaagaaagagatcgaaacccacttcagcgcgttcacctctgaactgtcggagaacatcaaacaagttaaggtgctcatcttcttggtgcctatggaaagtattgaacttctgaccaaagcttttaacgctcgctgcgaaaagctggaagaattacaggcataa

SEQ ID NO: 187897 - DNA, 2142 bp, Klebsiella oxytoca; identical to SEQ ID NO: 112241

SEQ ID NO: 187898 - DNA, 2511 bp, Klebsiella oxytoca; identical to SEQ ID NO: 112240

SEQ ID NO: 187899 - DNA, 465 bp, Klebsiella oxytoca
gtgtcagttttgatgtacaggtataatgttgccatatctttaataggagcagtcatcgctgtattcgttgtgccaaaagattggaagcctctgtttattattttcgtgccatctgttgttgcgtgttatttaataatagaaaaaacaatgatattgcatgagtttggaaagttcagaaatttagctatatttacgttagcattcatgccctctggattttacagcgtagggactttcaatgctcaaaatataataaatggagtaaagacttacattatcagttcggacacgccatgcacaactgattctcatgatagctatagatacattgcaacaatttcagacaaagttttcgcactttctttaaaagataaatcagtttgtatattcaaatataattttttgaagctaacgcctgaacctcttcaaacctacaatcagtcactgccaaatgatagcgcctaa

SEQ ID NO: 187900 - DNA, 1161 bp, Klebsiella oxytoca
atgctggatatgctgaatctgaatgcgggtggcgtactgacgcccgattttatgctgatgctcgacagcaaagatattaccggcaatatcagtaaccggttgatgagccttaccatgacagacaatcgcggattcgaagccgaccagctcgacatcgagcttgatgatgctgacggactggtcgaactgccgttacgcggtgccgtactgacgctttacctcgggtggaaaggctttgcgttgattggtaagggaagttttaccgtcgatgaggttgaacatcatggcgcgccggacacggtgacaatccgcgcccgtagcgcagattttcggggaacgcttaactcacgtcgggaagagtcctggcatgacaagacgctcggcgagatcgtggcagcgatagcgacacgtaacaaactgacgtcaagcgttataccggagctggccggaataaaaattccacatatcgaccagtcacaggaatcggatgccaaatttttgacacggctcgccgagcgaaacggcggtgaggtttcggtaaaagcgggaaagttacttttcctcaaagccggtcgtggggttacagccagcggaaaagctattccgctggtcacgatcacccgcagcgatggcgaccgccatcagttttccattgctgaccgtggggcatataccggcgttacggcaaagtggttgcacaccaaagacccgaagccacaaaaacaaaaggttgcgttaaaacgcaaacccaaagagcagcatttacgcgcgctacagcaccccaaagccaaaccggtaacgaagaaaaaaacggtgaagacaccggaagccagggaaggtgaatatatggtcggtgaggatgacaacgtgtttgccctgacgactattttttcaaccaaagcgcaggccatacgagccgcccaggccaaatgggacaaactgcaacgtggggttgctgagttttctatcaggctggcgacggggcgagcagacctttacccggagacgccggtcaaggtctcaggctttaagcgcgtcatagacgagcaatcatggacaattacgaaggttatgcactctctgagtaatagcggctttacgacgagcctagagcttgaggtgaggttatcggatgttgagtatgaggcagttgcagattaa

SEQ ID NO: 187901 - DNA, 480 bp, Klebsiella oxytoca
atgatgcttgctcttggaatgtttgtttttatgcgtcagacgctgccccaccagacgctacaacgcgatgccgaatatcgatggccgtcaaattcacgcgtcgggaaacgggattcgtttcagtttttagggccgggtgaggaaaaaatcaccctggccgggacgctttacccggagttgaccggtggtaagttgatgatgacggctattcgtctgatggctgaccaggggcgcgcctggccgttactggatggtaccggcataatttacggtatgtacgtcatcaataatattagcgagacaggaagcctgttttttgctgacggaacggcgcgcaaaattgattttacgctgacgctcacccgcgtggatgaatcgctggcggcgctgtatggcgatatcggcgaacaggcaaaatcactgattggcaaggcgggaaatatggcctcgtcagtggctggcatggtgggtattagctga

SEQ ID NO: 187902 - DNA, 291 bp, Klebsiella oxytoca
atggcgtttacattatcagcacctaaaaccgttcagattcattatctcggcgggtatctctgcgatcaggaaactgaaattgagctgatttacgccgtggaaagcgtcagacaggacagcggcggcacagttaaggcctcgctatccgtgcgctacgacgaccaagcaaaaatcatgatgggtgattatccggtgacgattgagccggattctcaggactcctggactgagcaggcggaggcacagattatggcattgagtgatttcactggtgcggtaaaaatccagtaa

SEQ ID NO: 187903 - DNA, 2523 bp, Klebsiella oxytoca
atgacgcgcattaatgaaacccctaaatgggaaggtgatatttatcagatctcccggcaggataaagttgcagggggcaaagatggtgtcgccaataagcaggcgggtcagcttgcaaacagaaccctgtacctgaaggaggcgattgacgatttatccgatgccgtttattccggttcggatatttacgagacgaaagaagccggattactgaaaaccagcgagggggaatactttaaagtacccgttagcggaataagtgatatctcttacattctttatcagaataaatcaggcgtagcggttgagatacttcgcgagaagagcccttattcgtcaggttaccaggcggctacggtggtcagcagtagcgcagctaacacagtcgctattactattcccggcctgctgggtgatggcagtctgatttattttctgtccccaatcctgaatactggtgctgtcaatgtcacggtgactgatgcgaaagggagcatcgttacccgtgccatccagaaacaaaactttgcagcattagtcggcaatgagctgctgctgaatcagccggtactgatggagtttcgcacaggcacggcaaacaatttcgttctgatggcatccggtccggtggcggcggagctgaatgcacgcctgctgagtcttgagctgaactcactgaccattgtatcttctgtctcagcatcagcagacgcctatacaggaaccactgccaacaccacatcatcacaggttctggtcaccggtcgtgcgtttgtttttacacccagcgcgaccaataccacgagaacgccgacgctgtcgctgaacgggtggactgcacgcacgattaaacaggcgggcggtactgctctggctgtcggagacctggtatcgggtaacccctgcttcctcatgtacaacgccgcttcttctgattttcgtctgctgacctacccaggggacagggtacgtgttctcaatgcgtataccaaaggaacggtaacgagcgacagcgccagccctaatgcggtatccgtaaccattcccggcctgctgggtgacggtactcagattacgtttgaacctgtggtggcgaacaccggcgtgacgacgctggtcattactgacctgtacggaaactccgtaacgcgcaacctgctgaaaggggcaaacaccgcgctgacgggtggggaacttcaggcagcaaaacccgttacggttcagtatcgcggctctccggttaataatttcaaactgcttttctcgggtgacccgaccacggacattctgaacctcaaaagcagcgttactaatctgcagggtgctatcaccgacccgtataccaaactgagcaaaaagctcatcggtgacggaacgcaggccaacaccgcgccattcggtgagatttcatttagcaatggcgtaagaactgttactaagaaacgcatcatagtcaccactcccggttcgtctgtggggctaggagccgggtcaactggtggtggcgttgttggtgctcctttttctcccagcgctttatttattaattctatgaaagagcacctttctggttatggtgagtttgagtttatcgacgacaaccagagtatcggaggccaggcgatacaccagtttgccgcgcagctgcaaaattccccgtatttcaccagtagtaaccctgacgactggccggatatcgtgctgattgttggcgggatgaatgatgccacgccgaacggaaactttaaccgcgggcgcacgtacccgcttcagcgggcagtcctggaaaatctgattgaccagtgcacggcaaagggcgccgtggttattgtctgcaccacgccacaccacaatgtcgagcacagcaccgtcaaaaacatcaaactgggtgacctgaatgtcctctggccggtcagaacattcaacgtccctacgggtttcacctttgattcagctaacaaaactatcaacagcacggcatttgcctatgacacaggaaacgcagcgaccagctggggcgggcaaatcctgcgaccggggcatgtgctgcgggttatcggggagaatgccggtgattacaccattgctgccatatccgaggaccgaaaaaccatcaccgttgcagaaaacatcccggtttctggcctgattaataccaccattcagcacatcaatctcgacagcattattgaagaggtgctggacccgcctccgtcaaaatcgtttgtggaggccaactggtcggggagcggcgttaaagttgttggggatgtgcgtttcggcctctacaacagcatggtgcgtacagtggcacgtgggaaatcagcgtttgtaatggagaacgaaattccctggttcaggctgggtgttgaggatcacggatggtccgcgcttttcaactttcctaattacaaccacccgaatgacctcggctataccgtcagttacaaggctggcgcagatgctgcggcattcagtctgtgcaaactgatttacggcgaaaaatactatcgcgcttcgtga

SEQ ID NO: 187904 - DNA, 594 bp, Klebsiella oxytoca
atggcgaccgggtcgtcggtgctggaacagcgagccgccgcagcgtgttcagtcatcagcgacttatctgtcccgctgcgtgatttgtggaacccatggcggtgccccgtaaaatttctgccgtatctggcgtgggccttttctgtcgaccgctgggaagaaacctggtctgaaacggtaaaacgccaggcggtcagcgacgcattctggatccaccaacgcaaaggcaccgttgccgccgttcgccgggtaattgaaacgctgggatacagcatgacccttcaggaatggtgggaggtggccgaccctgccgggacattccgcattgaggttgacctcaatgatatcggcatcactgaaccgatgattaaagagctggagcggattatcggtgatgcaaagccggtgagtcgccatatatcgcagctgacactctcggcgagtgcatacggcacggcgcacatcggcgcagcgatggtagacggcgaagttatcacggtatatccgcagaattattcacctgacggcagcatttattacgatggccaggcttattttgacggtagctatttattttcggagaacggtcaatga

SEQ ID NO: 187905 - DNA, 567 bp, Klebsiella oxytoca
atggataaaaaatttagcttgctacgacgtaaaataaaaggttcgcaaagcgcggtaatgaataaaattattagcaaccataaaacggaaatatgtattctttgcggtagcgatagtgaaatcacaaaggaacatgtattgccgcaatggtcatttgaggggaggccagataaatcccttgtaaatactaaaaacaatcagtcatctaattacattaaaatgactgttccagcatgtaagacatgcaactctgatttacttggagcctttgaggattatcttaagaggtttctattggaaaaggacggttccgaattaaatggttatgaggtggattgcataatatggtggttgcaatacatagcatttaaactacagataatggacctgcgcgctcaattcttgagatacaaaggaggtgagtacatcccttttttatctaatatccctgtggcaatgttttggggggaaatggacaccactcctaatgatgtattcaatactataaggagaggccgaagggagctaacaaagaaaagaaaagaaaaaagcacaattcattattga

SEQ ID NO: 187906 - DNA, 747 bp, Klebsiella oxytoca
atgccagctcaaactgaccacccatgctttaaacaaccagaatcgaacaaaatcactgtatggaaatacatggattttactaagttcgtctcacttatatcttcggggaagttattctattgtcgcgccgataagttcagagacccatatgagggtacttaccctataaaaaatagagaggcagatgacctaatatttgcaagcatccctccagaacatagagcaagtattgcaaataggctttatgaacacattaaatggacgcgccaatggacatacatcagttgctggcacattaatgagttcgagtctgctgcgatgtgggacctttatgcccgaactgaggaagccatcgccattgaaactacttatgagcgactagcctcaagcgtatctggtcacgcatacatcgggttagttgagtacataaactaccaagaagattatatacccgtagacaacgtcttttatccgtatctctttaaaagaaaatcattcgaacatgaaaaagaagctcgcattttgtttcaggagcacccaacaggaaatgatgatgctgacacacctttaattaatgaatgtactggaaaacaagcagaagttaatctagatgtattaataaaaagcattcgcatctgtccaagcgcacccaattggttttatgaattagttgaagagataaaaaataaatatggaattactgccccgatagtaaaatcagacttatatagcgaccctgttctttaa

SEQ ID NO: 187907 - DNA, 441 bp, Klebsiella oxytoca
gtggatagagagttaagtgagtacgttatgattgagcgggtcgagatgattgcgcgtttgacgacggaaggtacttgtcaggaaagagaccgtgaaattgcgttaaatttgattgcggagatagcaagaggtaatctaatgaaaaataataatttttctgttgttttctacgcaccgcccattgatgaacgctttgcaaggggggggaaagtgaaagttaacatcacgttagataaaggccagcaaataggccagccgattattgatgcgttccggtgtgagttaaccaggaggatacaatctgtttttccgtcaacgtctgttatcgttaaaaagggatctgttgccggtgtcgagctagtggggttcgataaagattctgaccgtgaagcgctggatactatccttcgagaggtttgggaagatgagagctggcgctag

SEQ ID NO: 187908 - DNA, 474 bp, Klebsiella oxytoca
atgggtattcgtatcgaagtcggcgaaaagtgggttattaccagcgaccaatatcaattcatcctgaatgaaaagaaagtcgtaaagacaggcaataaagctggcgaggaatggctcggcactatcggctattacccaaaaattaatcagcttatttccggtctgattcatcaccatatccataactccgcgattacctcgattgagtctatggttgcggagattgaacgcatcggtgagttatgcagtaaagcatttggtgtcataaagccaagcgaaaaaattggcggttgcgagtgggtgtcatggaatgaattaagcgcgcgcggtctcatcgttcgtatcaataaagagattttacaccctatcgggctggcggtatttcgtgaccccaaaataggaatatctcagggggctttagtttctcctgatggtgtgtgggaatatgaccagtccgtttcagtgaaggggtga

SEQ ID NO: 187909 - DNA, 222 bp, Klebsiella oxytoca
atggcagacgcaatggatatcgcgcaagagcgcgaacaagcagaacgtgagcgccttatcaacaacgcgcgcagccgtatcgctgcgccatctcgttttacatgcgaggtatgtgacgcaccaatcccggaagctcgccgcattgcgattgcgggcgtggccttttgcgtgacctgtcagcaaatcgccgagcttaaatcaaaacattacaggggcgtataa

SEQ ID NO: 187910 - DNA, 222 bp, Klebsiella oxytoca
atgcgaccaaacattacaatcgtcatccctgagccttacctgccacttgatgagtattgccgccgtactggcactaacaaagaaacagctaagaacctgattgaatacggaaaactaccaatcaagccaaagggtaaacagactaagggcctggttgaagtgaacatggctgctctgactattcaagctctgagtgaatgcgaaatttcacttaacgtgtaa

SEQ ID NO: 187911 - DNA, 585 bp, Klebsiella oxytoca
atgaagctacaaattgatttttcacaaggcggaaatgacaccttagatcgcgtcattgaggcgtatggattcagaactaaagtcgctcttgcagaacacctagggatagcgagtagtagccttgctaatcgatataagagggactttttcccagcagatatcgtggttcgctgcatggctgagacgggcgctacgcttgagtggctggttaccgggaatgggccaaagtttgacggcgaagacctcgatattctgagaatttccagacaaaaaattgtcgatggtcagctttatgactcaggggttcttatgttggataaagctacatttttgccaggaaaagcagtaccaacgaaacctctgtgtatcattgaaagctcgacaacgtatgttatcgagagggagttttcagaggtgtttgatggtgaatggcttgtcgatattgaaggtaaaacaagcgtaaggacactgacccggatcccagtaaagaaagttcgtgttagcggcgctggcgcggcttttgactgttcgattgatgacataagcgttatcgggcgtgtggtgctaacaataatcagcggatga

SEQ ID NO: 187912 - DNA, 1038 bp, Klebsiella oxytoca
atgaccgttcgaaaattaagtgatgggcaatgggtcgctgacttttatacagtcaatcgtagcgatggtaagcagggtaaaagagtccgtaaaaaattctctactaaaggagaagctcttgcattcgaaaacttcacaatgcaaaaggttgatgactccccctggctaggtgatggcaaagatcaccgtcgtctttccgacctcgttcacctttggtttgaccgtcacggaattaccctaaaagatggcgagaaaagaaagaaatccatgctatgggcggcggagtgcatgggctccccacttgctagcgaatttagcgcccagctatttaccgcataccgggcaaaaaggcttgaagggcatttcgctcgcacaaagagaattagccaggtatcgccacggacgatgaaccttgaacacgcttactttttagctgtctttaatgaacttaaacgattaggtgagtgggctccacccaaccccctagaaaatgtcaggcaatttcgcactgaagaaagcgagatgtcatatctcacagctgagcagattgaatcgctgttaaaagagtgccgcaacagttctgctgaagacctggagataatcgttaaaatttgcctggcaactggagcgagatggagtgaagcagaaagcctaaagcgttctcaggtttcctcggggaagatcacttatatcaagactaagggtaaaaagaatcgaacaatacccatatcggccgagctaatgggggaacttcccaaaaagaatggcgcgctatttacctcgtgctactacgcctttagaaatgccctaaatcgcgcagggatagagcttcctccaggccagttaactcatgtcttgcggcatacgttcgccagccactttatgatgaacggcgggaacatcctcgtattgcaaaagatactggggcacaccgatataaaaatgacaatgagatatgcacacttcgcccccaaccatcttgaggatgcagttaaatttaacccccttacaggaataaataatggctataacagttaa

SEQ ID NO: 187913 - DNA, 1101 bp, Klebsiella oxytoca
atgaacctcagacaacagcaacagcaggcgtttgaccgcagcggagaagcccttattgtaggcgacgtcagccactgcccgctgccaccggagaccctcgccgcgctgggccccgattcaccgtatgtggtgcaggtatacggttctggcctgaccggtgaggtttaccggttgcgcatcggctgcgaggagtataatttaaaaaaacgacgcgctgtcgctggcgttgccaaccttaacggccagctgtcgtttttaaatgaagtgcagagccggcaggcattgctgcggctgaaggataaccctgtcaccgccccgagcttcgcccacatcgtcccaacgctgtatgctgattatcgtctcggcattcttctctctccgtggatcgatggcgagctgattcaccaactgaccccgtcgctgatcgcccagctatttactaccctggaagcttgcgaagaacaggggttgatggagtgggatctttgtaatggaaatctgttggtggaccgggaggagcatctgtggctattcgattttggctatatgtatcccttcgatccgctcagggaattcaacagcaacggtctggccgatcccctttttcactttgtcgagcgctttgagacccgcttcttttttaactggctgatgacccaggtccccggcgcggagcagcagctggcgcactatcgcgatttgaagcgactagcggttgaaagctaccggcgtaagctcgcctggctacgcgcccggtgggctgccccgcaggtgcaggctcatttacagcagataacggcacgctgggaatcagcgctggcggactctgccgcgctgagccagttatttttcctggaggccttccgctcccacgtactggatatcgaagatgatctgcatggccagtcttgtaccttgctcaccttgcaacgcattgactgggttataaaccagattgaacaccattatcgctttatcgccgataaaggcggcctgttttacgacaacgaagggaaatcaaagcaagtgctgctcagcaactatgcgcagaagcggcaacaggcgcagcggtacctgctgaacgcctccacggcaggttag

SEQ ID NO: 187914 - DNA, 522 bp, Klebsiella oxytoca
atgcgatggctgcgcaactccagattctgcaggtgtagtggcgaagaccttatcacccgtgaaaaaagcaatctcgagcgtatcgtcgccacgctcgagatgaaggaaatgactcagggaacgctgatccgtaaattgtgcacatatacaacggcgtatccgacaagacaggcggtatttgaatatgaccggctggtacgcaacacctatacgctaagatatttgcgcgatccgcagctggaacgcaacatccggcgttccttgaactggattgaatcttatcaccagctacgtgccgccatcgctaaagtcggtggaaagaaagagttaacagtgaaaaatgacattgaagcagacatcagtaatcggtgcgggcggctgatttccaacgagatcgtttattacatctcagcgatcctgtcacgattgcaggatggtctggaagccgaaaacagtgacaagggtattgaggcactaacccggatattaccggtggcttgggagcacattttgttaaactga

SEQ ID NO: 187915 - DNA, 807 bp, Klebsiella oxytoca; identical to SEQ ID NO: 125432

SEQ ID NO: 187916 - DNA, 906 bp, Klebsiella oxytoca; identical to SEQ ID NO: 125433

SEQ ID NO: 187917 - DNA, 1797 bp, Klebsiella oxytoca; identical to SEQ ID NO: 125434

SEQ ID NO: 187918 - DNA, 834 bp, Klebsiella oxytoca; identical to SEQ ID NO: 125435

SEQ ID NO: 187919 - DNA, 1284 bp, Klebsiella oxytoca
atgttattgtctgagggaaaaagcatgcgtatatttccggcatcttttcttattatgggcgctacgcagctcatttctggtcattggataaaaggctccgtttttttattattccagattgtagttattagcaacatcaatttattactcaacgcaacgcagggactcatcactttaggcaccgtggcccaaacacgtagtgggtttgatattgtagctggtgacaattcaatttttatgttggttgaaggtgttgttgcattcatttttttatttttttcaatttttgtttattggttaaatattaaggatgcgcaggtatgtgaaaagtgtcatcagagctttacggaacagttacgaacgatttacgataatcgttttgctactatcatgttggctccggcatttattgcctgcattgcctttattattatgccgatgatcatcaccgttttggtatcactaacaaactactcggctcctcatcatatcccacctaaaaatcttgttgattgggtcggattgaagaatttcattaccctctttgagcttcggatctggtctaaaacgttcgttggtattggtgtgtggactgtgctatgggctttttttgcaactctatgcacttgtagctttggatttctgttagccctcgcgttagaaaacaaaaaaattatagcgaagaaagcctggcgagtcgtattcatcttaccctatgcgatcccggcgttcgttaccctgcttattttccgtctgcttctgaatggaattggtccagtaaatagtacattaaatagctggggtattgattcaattggttttctttccgatccattaatagctaaaatgactgtaattgcggtaagtgtatgggttggcgctccctactttatgctgctaatcaccggagcaatgaccaatattccccgtgacctatacgaagcaagtgaggtggatggtgctagtaaattccaacagttccgtgaaatcacgttaccgatggttctgcaccaggtcgccccttcattggttatgacctttgcacataatttcaataactttggtgcaatatacctgctaacagaaggtgggccgataaacccggaatatcgctttgccggacatactgatattttgattacgtggatctataaattaacccttgattttcagcaatatcaaattgcttctgtcatctcaatcattattttcctgttcttatcgatatttgcgatctggcaatttaggcgaatgaaatcattcaaagaagatgtggggatgtaa

SEQ ID NO: 187920 - DNA, 1230 bp, Klebsiella oxytoca; identical to SEQ ID NO: 125437

SEQ ID NO: 187921 - DNA, 1041 bp, Klebsiella oxytoca
atgaaaaaaaaattactctctgcctctattgctcttgctctcacagcgcccgtacattcatttgcagccagcgatcagcgtgggtacaaacctgaagacgtcgcttttgatgaaagttttttttcgtttggtggccatgtagggacttctgttgaatatgaagataaggtaactcgtggtttcaataacacggataaaaaggagaagacgattaccaatgaggttttcaactttttttataacaatccacaatggaattttatgggtttttactcttttaaaatagaaaatagagagcaaaaggagcctggttattatgagaatgaagatggtattaagcagcttgtttcattgaataaaggtcatgatcttggtaacggttgggctactggtttaatttatgagctagaatatacaagaagtaaagtttattctccggatgttagtggtctacgtaaaaaccttgccgagcacagcattagaccatatttaacctactggaataatgattataatatgggattctattctaatcttgaataccttttgagtaaagaagatcgcaatgcatgggggaaaaggcaagagcagggatatagtgcattgtttaaaccctacaagcgttttggtaactgggaggtcggtgttgaattctattaccaaattaaaactaatgatgagaagcaaccagatggaaccattaatgagaaaagtgattttaatgaaagatatatagagcctattgttcaatatagctttgatgatgccggcacgctgtacacgcgggtacgtgtcgggaaaaatgaaactaaaaatactgatcgtagtggtggcggtaatgctggcattaactacttcaaagacattagaaaagctaccgttggttatgaacaatcaataggtgaaagttgggtagccaaagctgagtacgagtatgctaatgaagttgagaaaaaaagtcgattatcaggatgggaagctagaaataagagcgagttaacacaacataccttctatgctcaggcactatatcgcttttag

SEQ ID NO: 187922 - DNA, 1008 bp, Klebsiella oxytoca; identical to SEQ ID NO: 125439

SEQ ID NO: 187923 - DNA, 480 bp, Klebsiella oxytoca
atgaaacgtttaaatttaattattgctgccgtattcactatgctttatgcctctgctgtttttagtacctcagttaacgcacagggttccgctgataatcctttctataattgtgctctgccttccgttgacgagcgtggaccgattcggccttctttatatgttgttggtacctttcctgaaggacaatggattcagcaagaaaaccgtaaaatgctctataaaggcaatggtatatatcagttagttatagatgaaaaagccggtaatcttagcgttcagttcgctacgatgagctggaatccgcaattcactgcagcgggtctggagttaacagttggacaggttaaggatctgaaacgagcaggttttgcaaaaaatacagcagtaacgttaccagttgctggccgctacgtctggacggtcaaaattgctgaagataaaaagccacttcaggttgccgttgcacaatgtaaataa

SEQ ID NO: 187924 - DNA, 1131 bp, Klebsiella oxytoca
atggcaacggttagtttgcggaaaattgaaaaaagatatgaaaatggctttaaggctgtccatggtatcgatctcgaaatccatgacggtgaatttatggtttttgtcgggccttccggttgtgcgaaatcaacaactttgagaatgattgccggtcttgaagatattagcggaggcgaaatttatatcggaaatagaaaggttaatgaccttccgcccaaagaccgtggtattgccatggttttccaaaactatgcactttatccgcataaaaccgttttcgacaacatggcttttggtctcaaaatgcagaaacgacctaaggatgagattaaacgccgggttgaagacgcggccgaaaaacttgaaattaccgaactgctttatcgtaagccgaaagaaatgtcgggcggacagcgccagcgtgtcgctgttggccgggcgattgtacgtaaacctgatgtttttttattcgatgagcctttatcaaaccttgatgccaagctcagggtatcgatgcggatgaaaattgcccaactacatcgttctctgaaagaggaggggcatcctgctacaatgatttatgttactcacgatcagactgaagcgttaactctaggagatcgcatttgtgttcttaaccatgggaatatcatgcaggttgatacacctactgatctttataattatcctaataataagttcgttgccagttttatcggttcaccatcaattaatttgatagatactgctatccgtaagaataatgagaggttgtatgttgaaattgctcctggcgttgaaatattaattccacatagtaagcaagtgttgcttgaaggttatattaataagcctgtgtgttttggtattagaccagagcatatctctcttgctagcgatgatgatgaccttaatacctttgagggagttttaacggtggttgaaaatatggggagcgaaaaatttttatattttatcgttggtgggaaggaacttattgccagagttgatacacaagatattaatccatttcatatagggaaaactttaagatttaatcttaatactgccttttgtcatgtttttgatttctataatgagaacaatctgacaaatgtaagagtgtga

SEQ ID NO: 187925 - DNA, 1968 bp, Klebsiella oxytoca
atgaaaagaaaccgtttttttaatacctcggctgctattgccatttcgattgcattaaatacttttttttgtagcatgcagacgattgctgctgaaccagaagaaacttatcttgattttcgtaaggagacgatatattttctattccttgatcgtttcagcgatggagatccaagtaataatgcagggtttaattctgcaacctacgatcctaataatttaaaaaaatatactggaggagatctccgggggttgattaataaactaccctatttaaaatcacttggtgttacttcaatctggattactcccccaatcgataatgtgaataatactgatgctgctggcaatactggatatcatggttattggggaagagattattttcgtatagatgaacattttggcaatctcgatgatttcaaagaactgactagtttgatgcatagtcctgattataatatgaaactggttcttgattatgcccctaatcattcgaatgctaatgatgaaaatgaatttggtgcactatatcgtgatggtgtgtttattactgattatcctacagatgttgccgccaatacgggctggtatcatcacaatggtggggtaacgaactggaatgatttcttccaagtgaagaatcataatctattcaatctatcagacctcaatcaatccaatactgatgtctaccagtacttgttggatggttctaaattttggatcgatgctggtgtggatgctatcaggattgatgccatcaagcatatggacaagtcttttatacagaaatggaccagcgatatttatgattacagtaagtctatcggccgggaaggattttttttcttcggtgaatggtttggtgccagtgcgaatactacaacaggtgttgatggtaatgctatcgattacgccaacacttccgggtcagcgttgctggattttggattccgcgatactttagaaagagttttggtaggacgtagcggaaatacaatgaaaacgttaaatagttatctgataaaaagacaaacagtctttaccagtgatgactggcaggttgtttttatggataaccatgatatggcacgcattggtaccgctctgcgttcaaacgccactacttttggtcctggaaacaatgaaaccggtggaagtcagagtgaagcttttgctcagaaacgtatagacctcggtctggttgcgacaatgactgtacgtggtattcctgccatttattatggtactgaacattatgccgctaactttacctctaacagttttggtcaagttggcagtgatccttacaaccgagagaaaatgccaggatttgatacggaaagtgaggctttctccattattaaaacactgggtgacctaaggaaaagtagcccggcaattcaaaatggaacttatactgaactatgggttaatgatgatatattagtatttgagcggcgttctgggaacgatattgttattgttgcacttaatcgtggtgaggctaacacaattaatgttaaaaatatagcggttcctaatggggtatatcagagtttgattgggaataatagtgtttcagtagcaaataaacaggcaacactaacacttatgcaaaatgaagctgttgtcattcgctcacaatcagatgatgcggagaaccctacagtacaaagcataaacttcacatgtaataacggttatacgatttcaggtcaaagtgtttatattattggtaatataccccagttaggtggttgggacttaactaaagcggtaaaaatatcaccgacacaatatccacaatggagtgcgagcttagagcttccttctgacttaaatgttgaatggaagtgtgtgaaacgtaatgaaaccaatccgacggctaatgttgagtggcagtctggtgcaaataaccagttcaatagcaatgacacacaaacaacgaatggctcgttttaa

SEQ ID NO: 187926 - DNA, 675 bp, Klebsiella oxytoca
atgaatgttccgttgcgctgcccggattacaccagtgtcagcaagcgcgcaaagtcggttaatgtcagtttcaaaacgttcacccggggtgaaatcgcgcatctggtgattgattccaccgggctgaaggtctttggtgaaggcgaatggaaagtcaaaaaacacggcaaagaacgccgtcgtatatggcgaaagttgcatctggccgttgacagcaacacacatgaaatcatctgtgcagacctgtcgctgaacaatgtgacggactcagaagccttcccgggtcttatccggcagactcacagaaaaatcagggcagcatcggcagacggcgcttacgacacccagctctgtcacgatgaactgcggcgtaagaaaatcagcgcgcttatccctccccgaaaaggtgcgggttactggcccggtgaatatgcagaccgtaaccgtgcagtggctaatcagcgaatgaccgggagtaatgcgcggtggaaatggacaacagattacaaccgtcgctcgatagcggaaacggcgatgtaccgggtaaaacagctgttggggggttcactgacgctacgtgactacgatggtcaggttgcggaggctatggccctggtacgagcgctgaacaaaatgacgaaagcaggtatgcctgaaagcgtgcgtattgcctga

SEQ ID NO: 187927 - DNA, 252 bp, Klebsiella oxytoca
atgaaaaaaagaaatttcagcgcagagtttaaacgcgaatccgctcaactggtcgttgaccagaactacaccgtggcagatgcagccagcgctatggatgtcggcctttccacaatgacgcgatgggtgaaacaattacgtgatgaacggcagggcaaaacaccaaaagcctcccccattaccccggaacaaattgaaatccgtgagctcaggaaaaagctacaacgtattgaaatggaaaatgaaatataa

SEQ ID NO: 187928 - DNA, 654 bp, Klebsiella oxytoca; identical to SEQ ID NO: 96990

SEQ ID NO: 187929 - DNA, 747 bp, Klebsiella oxytoca
atgggagcactagtgatacatcctgaaattacatctctattcaaatactgccctatcggcaagaatcaattgagtgctcttgcgcaacggaaaatttggtactcaaaaccgtcagagtttaatgatcccttcgacaccaaatttactgtgaggggaaaaacgcatatattcgaacaggaaatggattctcaaaaattatctgccatttttgatggagacatgtctgatacgatggtattcaaaaaaagatctcttgatgaacctttggacaactttaagagagggatagaaaaactaggaattctttcattagcgagcagtaataataatttactgatgtggtcgcactatgcttctgaacataaaggtatgtgcttagggtttgaacgcgattctagcacagccttagcagacgatgaaaaaaccaaaccgatgagttacaatgataattacccttcgataaaagcgtcttcgattctaaatgaaattgatacgttatctaataaagttagaatattacattcaaaatccaagcattgggaatacgagcaagagtggaggcatatagttgagcagggggataagttgtatccctggccagcagcattaacttctgtctatttcggttgcaagacagaaatgtcagatatacatttggtaaaaagcatcattgctgactcaagtgttaaatactataaaggcaatttgtatagtgacaaattcgatatttatttcaaaccgatataa

SEQ ID NO: 187930 - DNA, 558 bp, Klebsiella oxytoca
atggaaagtagtagtcgacttgcaataattagcctgattgtatcgatatgcggtgccatcattgcgctctgtgcgctgggactctcagtttacatgggttggctacaaaaaaataattacgagatttcagttcaaccttatattacacttgtaccaactattgagccggggaagaatgagtatggcttttacctttacaacgctggcatgggaaaagggtatattgaaaatattgaatattttctcgatggaagacaggttgaaggtagtaattcagatatcctgatacaggtcgttaatttctttggtttaaataaagactgttttgcttatgggaatccaaggagaggagattcggtatcgctggatgagatgaatactcttctaacacttggcacgggagtgacttcattagcgcagtgtaaaaaaacgtatgaagatttttataaagtattaaggggccaaaataacgcctttacgatcaagctaagatatagatcgatttacaatatatcttatctttatgattcctccaataattctcaaataaaaatatga

SEQ ID NO: 187931 - DNA, 2199 bp, Klebsiella oxytoca
atgaataataaaaacatgttattgggttacggcgaaactttaactggtgaggttaaggttaataaaggtaatggccctaaaaataagccatatacatacgaagagaacgcacccgtaataatgcgtgagctacagggcgtgttaaagagcatggatgcacttcctgatgcggttatgccaaatggcgaggctgttgcgaagatcacgctgcatcctgcatttttagcaaaatcatatttcccagtcttactttttaaaaaatttgctttgcatagcgtgggtagcaaatcagtaaaagtaaaaccacggaaaatagttggagggcgaggcaagcctaaggatgaattttctagcgcttgtatttatgtatctggtaaagttaaaaactttttagctctttataatgctttaaatggcgatcgtttgaacaagggcgaaaagaaagaaatcatcactttcgaatctatttcattctttgattcggatgataaaataaaaaccattgaaccatcgcagaaaacaagaaagcttgaagttgcactacacaccccagagagtaataaagatgttttacgtagctttattaattacgcattatcatgcggtgcaaccattaacgaaaataaaatcataaacatgaatgggttgacgttcatgccgattattgccaatgctcacgaagccgcaatggtcgcagaattctcatttttaagggctattcgtgacttacctagcctgagaattaacaatccagtttttacacgcacattaactgaaaatgctgacttaaaattacctacagagaaagctgttaatgataatattaaagtcgctatatttgatggagggataggtaacactgactttgaacaatgggtacaagaatacgcatttagtcaaaattcaaagacaagtggacaactactttcgcatggtcaagatgttacctctacggtattgtttggtgcaattgttgaagggcagagagaacttcccattccttatacaaaaatagatcactatcgtgttatagacaattcgattgatggacaagatgaagatttattcgatgtcttgttaagaattaaatctgttctagatgatgaggactatgattatatcaatctgagtctgggaccaagattccctgttgatgacgatgatgtacatgtatggacatcaacattagaacaatatctctcatccggtaaaacattatgtactgtagctgttggtaacgatggttgcttaggtgatggattaaatcgcattcaaccaccttctgacttagtaaacgcactggctgttggtgcggctaactctttgtctgataagtggatgaaaagtgattatagttgtattggcccagggcgaagccccggatttgttaaacctgacggtatagcatttggggggtcaaaagaagagccattcaagctgtatagtccatttttagggggagtagtacaaactgcggggacaagtttctcttcgccattagttttacgccaagctattggcttggcagcaagtctgcaatatgacatcacgccacttacggctaaagcactgttaattcatcatgcagaaaataacggttcagaacgtagccatgttggctgggggcgatttcctcataacttagctgatattatttactgtgatgacgatgaagtcaaggttatttaccaaggtaaattaaaaccatctcaacatctacgggcttccattccatttcctgatattcccgttaatggggttatcgatttaaaagctacgttctgttttactactccggttgatgtcgagcaccctgttaattacaccaaaagcggattagttgttacaatgaggaaaactccaaaagacaaaattggcgcaaccttccctctatttaacagtaaaaatatttatgcaacagaagaagaacttcgtgaagactcccatcggtgggagaccacgttaagaagtgaacatacgttcaacaaagacactcttaaagacccttgttttgatgtgatctattatggtcgtgattgcggtatgcctgtggaagttgaggatttaccagaactagcttatgtcctaatcgtttcactcaaagcaaaagatactcctgagttatataataatattcggcaacgttatcaaactttgcaaccaattcaaatcaaacaacaaattaggctgagatcttaa

SEQ ID NO: 187932 - DNA, 1083 bp, Klebsiella oxytoca
atgattaacatcactaaagatttatttgtagaagtgatgaatgatgcattacagggaaagcgtgaaaatctcgaaatgcgtttacgcatcatgataaagaaacttaagaaagactctccggagttggcgtctgagcttagtgatgcacttttgagaaatgccgattctgtcaacgtaatgcggggagctacggcaaaccggcaaccagcgcctgttgatgcagatacaaggcaaaaattattggttgagacttacccagtcaaattgacagttactcctctttggcctgagcacatttctacctcactcaatcgttttgcggcagagtgggataaaagggatcagcttatcgaaaaaggtttgttaccctctaaatcactattaatggatggccctcccggagtggggaaaacgctcgctgctaaatggcttgcagaaaaaatgaatttaccacttttgacattagatcttgcaagtgttatgagcagtttccttggaaagacagggaacaatatacgagcggtgttagattatgctcgctcttttccgtgtgttttgttattggatgaatttgattcaattgcgaaaaagagagatgattcttccgatgtaggggagctaaaaaggttagtaactgtattgttgcaagccattgatgaatggcctgccacttcaattttagttgcagctactaaccatggagagctattagaccctgccgtgtggagacgttttgatcgagtaatcagttttgactatccatcacaagaacttataaaagaatttttgcttcggagcgatttaccgcctgggttggcaatgtatattagcgaaagtttggttggtaagtcttttgccgttattgaacgttcaattaaccaagctaagcgcaactctgttctggagaatatacccgttaataaagctgtcatggaagaagtttttgagggaaaacccatcgcagatttaattaggtcaatgaatgaaaaggggctatcgcagaggcaaatatccgctgagcttgctatctcaagaccgttgattaaaaaaataattgatgcagaaggattgcgtgatgaataa

SEQ ID NO: 187933 - DNA, 372 bp, Klebsiella oxytoca
atgacgatgtgtcgggtgttgtgcgttgcccgggccgggttttatgcgtggctgcataacccggtctccgcgcgggataaagataaccagcgtctgctgacgcttatccgtgactcctattcactgagcggaggcgtatacggttaccgtcgggttcatggcgacctgaacgaaatcggggaaacctgcggtaaaaaccgggtgggccgtattatgcaactgaaccggattaaagccgtgcgcggctataaagctccgcgtcgtatcgctggcagaccttcagtggttgcgcctaatcgtgtgcagcggcagtttaccgttgtccgggccaatcaggtctgggtcaccgatattacttatatccgcacctag

SEQ ID NO: 187934 - DNA, 903 bp, Klebsiella oxytoca
atgaccagattctcagtcaaaaaaactgatcgggaaatagcaaaacggcagtccgctaacgtaatgaaaattttgcaggttgatgtttttcgctcagttggcacagtgagaaattatcaggctgccctgacgcgcattgcactttatttcagaataaatggcggagtaaacctgcaggatgttacgactgaaatggccattgcttatttccgtaaaagggccgctgctgttggtcagaaaagtttggatatggaacgtcaagctctacaggcaatgatgactcatctgacacaggaattaccctccggagaagttcttgagatagtgcattctttgaaagagaaaaaattatcatctagatcatatacatcagaacagatttaccttatttcatcacatcagtccgataaaaatggtctggcaacactgattgcctacaatgcgggattacgcagccacgaattatttacgatcagtgagttacagcaacgccaaccgaatatcaggcctgtttctgctaaaaaatttatgggacgttctgggcaggcgtacacggtgcagggaaaaggcgggctaattcgggaaattaggttatccactgatttggccgaaaacctagagacaacacgattaccagaaccgataaaaatcactgatcgtggtgtccactatgaccaattttatgccatcgcggcagggcaatcctggagccgatcattcagcacagccagtaccagaaccttgggctggtctgcggggagtcatgggacgcgacatagttatgcgcaggaacgaatggaagaacttcagagtctcggatgccattatgctgaggcacttgagattgtcagtcaggaaatggggcatttcagacccgaaataaccgaggtctacctaaggtag

SEQ ID NO: 187935 - DNA, 1272 bp, Klebsiella oxytoca
atgtttctgacggatgcttatattaaaaaacaactcagagagttaaatgctcggaaactgagtggggaaattatcgaaaaagacagtcgtctatcagatggcagtggactatacctgttgattaaatcaaatggctctgcttattggcgactgcgttaccgatttaatggagaagatcggctgatatctcttggtgagtataaatatatccctttggcattagcacgtgaaaaacgagaagaggtcaaaagaaatattgccagaggaattgatccaagagggacgaaggatgaagaaggttttttaacattccgtgaagtcgctatgcaatggcatgcgagtaatcgccaatggtcaaaggaacatagtagacgcattcttaaaagtctactggatgaggtttttccagtatttggtgacgataatattaagctcctcaaaacgcaggatcttctaaaacctgttaagcaagttcaagattcagggcgtttagagttggcatcgcgtatttatcagcgtattaattcagttatgactttggctgttgataatggattgttggaatttaaccccattgcgcacaaatcgggggctctgataaaaagaaactcggagcatcgtgctgcactggaattagagaacataccagagttccttaaacgcatagaaaaatttaaaggcagaagattaactcagttagctatgacatttcttttacatactttcgtgcgctcaagtgagctgcgttttgcgcgctggaaggaatttgacttagaaaattcattatggactatcccatcggtcagggaggaaataccgggggtaaagtattcttatcgtggttctaagatgaaaacaccccacattgtaccgttgagtcatcaagcatgttcgattattcaggaaataaaaagcattacaggagaaagaatatttgtatttaccagtgatcatttccctaaaaaaccaatgagtgagaatactattaatcatgccttacaatcgatgggatacgataccaaaaaagatctttgttctcatgggttcaggactatggcatgtagtgcccttattgagtctgggaaatggagccgagatgcaatagaaagacaaatgagccatcaagaaagaaataatgttcgtgctgcatacattcacaaagcagagcttattccagaaaggcaaaaaatgatgcaatggtggtcagattatctaatgcagttgcaacatgggtttcatcatccatatgactttgaaaataatagtaaataa

SEQ ID NO: 187936 - DNA, 186 bp, Klebsiella oxytoca
atggataagttgcttacgtttgatgaattaattaacagaactggatactcccggccaagaatctatgaattaatcaaattgggggtattcccaagaaagataaaaataggctcaagaaaagtagctttcattgaaagtgaaattaattcctggatccaagaaaaaatcagcacatctacaaagtaa

SEQ ID NO: 187937 - DNA, 1062 bp, Klebsiella oxytoca
atgaacgatgaaaacatcagtaacaatgtgaaaaaaatttcaagcgtaaatggaatgccattaagtaaagggtctgacggttataataagcagcaatgttatgttatgaaaaatcaccttccagaccaaacattatgcagcatttatggtcccagcggttcttataaaagctttttggcggtgtcatgggcatgtcacattgcaactggagttaattgggcaggaaataaagtaaatcagggggctgttgtctatatagtaggggaaggaggaattggagtatctcgtcgggttaaagcttgggaaaatatataccaaaaagaggctgataatctttggttagttaataggcctgtgtttccggtgagaaggtcagagattagtactcttgttgagttggttaaatacattgaggatatgagtcattttcctgttcgactaattattttcgacacccttgcacgttgttttggtggaaaggatgagaatgatgccagagatatgggtgcatttattgaaggttgtgactcattaaaaaataaaacatctgcaaccgtccttgttgtacatcattcaggcaaggatgaatctaagggtgccagagggtcaagctcatttagagctgcacttgatgttgagtttaatgttaaaagagaggccgaagaacaagcattagttctatcttgtacgaagatgaaagatgcagaagaaccgaaatctaacgcttatgaattgcaaaagtcagagttatttgtcgatactgatggtgagttagtctcttctctggctgttattgacagtgcgagaaggccaaagtatttatttcctgaattgtctgaggtttctaacctcactctaaatcataaaattctttggggaataataaataatcgttttgcaaatggtgaaaaatgcacaaaaaaatcaattcgtgatgatttgaaaagtcagggaattgatattaaacattttacgcgatggctgaagaagcttgttgatgatggggcactggtggacaacggtgaagaagtcttgctgccctctctacctgaagcaccatag

SEQ ID NO: 187938 - DNA, 3522 bp, Klebsiella oxytoca
ttgactgccgataacctgtaccactcagcaaactttgctttcctggcagaacatgatcctttgctcgttcagataactgcaaccgctgaacaggtcttctcaagtgatcccaacaccacgttgatgaaactccggcagtttggcgaggcgctggcacagaacatcgcagtcaggttgaacatcactcggaatgataatcctacgcaacaggagttgctttaccgactgaacagagaattacaactcgaccccgcgattcaccagctattccatacgttgaggattgaaggcaataaggcaacccatcagtttcagacaaagcatcgtgaagcgatggatgctcttagagttgctcgtgcgctggcgatttggtttcatcaaacctttggcaaacaagacagtacgtttaatcccggcccctttcttccccctcacgatcccagtgagcagttaagcaagtcccagtcagctattgaacagctcaagcagacgctgctggcagctaatcaaaaactggaaaccagtgaacagttgcaagcattgctgaaacagcagaaagatgagtatgagcaactggtgcaggcaatggatcaggaggccagagaacaacaggagctgctggagattaatcagcaagacctgcaacggcttcagcgagattatgaagctagattaaaggcattgcaggaacagcttgcccagcaagctcagcaggctgtgatggctcaacgtaaagagttcggccgtagatccagctatgcgcgcaagcaggtgattacagaagaactgacgcgaattctgattgatcagcaacttaacgagtgggggtggctggccgatagtcaggagctaacgtacaaaaaaggttctcgtccggaaaaaggcgtgaataaagcgattgctgaatggccaacctatgcgaataacgaacagggcagggcagactacgttttgttctgtgggcttatccctgttgcgactgttgaagcaaaaaagaaaaatgaaaatgttgccggaaaaatcccccaggcagagcgttacagtaaaggctttcagtttgatgcctcattaatcccagcctggtcggaagaaggtcgagcgactggctgggaagagggtacaggcgatgtatttcagatcccgtttgtcttctcctgcaacggacgcccgtatatcaagcaatctgctgaattttccggtacatggttccgtgatgtacgctcacccgacaatacacgttatccactggaaaattttatcactcccgaaggtctgattgatcgcctgcatcgcagccgtgctgatgcagaagcaaagctacatgatgaaccttttggctatcttggtttgcgtgattatcaggaaaaagccgttagagccgtcgaatcggcgctggaaggtggggcaaagcaagcattgctggcgatggcgacggggacggggaaaacacgcactattattggcctgatttatcgttttttgaaagttgaacgcttcaaacgcattctctttctcgttgaccgctcagcgctgggggagcaggcgcaggatgcttttaaagaagcctctttggagcaaaatcaaactctgtcacagatatataacatcgctgaactgggcgatatggccgcagaagcagaaacacgcgtgcaggtagccacggtacagtcgatggtcagtcgaatttatcgctctggaaatcctccggcggtagatgattttgactgcatcattatcgatgaggcacatcggggatataccctcgatcaggagatgactgagggtgaactctctatccgtgataatgcccagtacctttccagctatcgtcgtgtgctggattactttgatgcagtaaaaatcggtttaaccgccacaccggctaaacataccagcgagattttcggtcatccggtctatatctactcttatcgcgaagcagttgcggaggactggttgatagatcatgaaccgcccgttcgttatgaaacccagctaagcaagcatggcattcactttgagaagggagaaaaagtgagtgcgattgatgccgcgacgggagaagttgataccagcgagctggaagatgaactggattttgacgtcgaagcctttaatcgcagggtgattactgaagattttaatcgtgtgatttgtgaagaactggcgcaagagatcgatcctactggagatgaaaaaacgctgattttctgcgcgactgatgcccatgccgatatggttaagcgtttgttggataaggcgatgggagaggtcaacccggactttaaccaagctgccattgaaaagattactggaaaaagcgatcaggtcagtaagcttatcaagcgcttcaaaaatgaacgttatccgagtatcgctattaccgtcgacctgttgaccacaggaattgatgtgcctgccattactcacttggtgtttttacgccgcgtgaagtcacgtattttgtatgaacagatgattgggcgtgcaacgcgtcgctgtgacgatatcgggaaaaccgtattctggatccatgacccggtagacatttatgccacgctgcaaaacgtcaatacaatgaagccactggtaaaaaatgcaggtgtcagcattgagcaactggttgaagaattatctaatgatgatgtactggaaaccgcgttgaatacccccggtgatacccctacagaaacgcaagcagacagcctgttgaaccagctcagccagaaagtaatgcgcgtattgcgtaaagcggagaacaaggcggaaaagcgtcctgaagtacgccagaaattaaaggagctggaagaactgtggggtatcgagccgaaaaaacttcaccagcatctgcacaaactgggtcctcagcaggcttcggcatttctgaaacagcatagtaatcttatccgtcagctcagtgacgttggagtcttactgggcagtgaataccgcccggtgatttctgaccatgaagatgcacttattagtaaagagcaaacctatggacgttatcaaaagcctgcggactatctacagagctttaacgagtttatcactaacaacctaaaccaatctgccgcattgtccgtggtagttaatcgtccacgtgatctgacgcgagaacaattaaaagagattcgtctgttactggatgaggctggctatagtgaagcgagtttacgttcagctgttcgcactgagaaaaatcaggatattgctgcgaccattatcggccatattcgtcaggctgccttaggtgaaccgctggtgccgtttgaagatcgcgtaaagcaggcgctggcaaaaatctacgcccagaatagctggactacagttcagaaaaggtggctggatcgtctggcgaagcaattgttgcatgaagtggtgcttgataagaacttcgttaatcactgcttctcagatgccggaggtgctaaaaaacttaaccacctgctaagcgaccagttagatagcatccttgagcagatgagcgaagctctatgggctccaaaaacagcctga

SEQ ID NO: 187939 - DNA, 1482 bp, Klebsiella oxytoca
atgagtaaaactatgcttccgaaagaatggattaacactaatttaggggctattcttctttcaattattgggggggggacaccaagcaaaagtaaaccagagtattttttaggaaatattccgtggatgagtgtgaaggatatgaacaaacatattcttaaagatactattgatcacattacacccgatgcagtaaagaatagcagtaccaatattattccggcaggaacgccgattattgctactaggatgagtttaggaaagattgtcactgcatcttttgactcagcaattaatcaagacttaaaagcactattccttcctaaggatatagaacgtaatttctttttacattggtatcgctcacaatcacaattaattgaaagcttaggtacgggtactacagttaaagggatacggctggaagtgctgaatggactttcaattaacctcccccccttagccgaacaaaaaatcatcgccgataaactcgatgaccttttggctcgcgtggacagtattaaagcccggctgggaaatatccctgagcttttgaaaaaatttcgtcactcagtattactttctgcagtaagcggaaagcttactgcagaatggagaaatgaaaataaaacatcagaatcggcaaaggaactggttgttcgctggattagtcttagaaaggaacggttttctatatatcagaatgaattgttggcgcttggtgatttaaagagaactaaaaaatttatagaaccacaccttcctgatatagaaactggaggagaattggttgttcctccatcctgggaaatagttagtgtttctcaaattgcagactgtctggatagccagagaataccggttaaaaaagaaaaaaggattaaatctgagggcctctatccatattttggtgctaatggtgaagtggaccgagtagatgactttatatttaatggtgattacgtactagttacagaggatgaaacattctatggaagagtgaagccaatagcctaccgttatacagggaaatgttgggtaaataatcatgttcatattctatctgccccaacaaaatcagcaaatgattatttatgctatgcattgatgtattataaaataatcccttggttaactggcactactgggcgggcaaaattgacacaggcagcattaaatgtcttgcctattggacttcctcctgaaaaggagattgaagaaatagttctgcgtattgaccaatttttttcctatgctgattccattcaaagggcggctaataacgcattagcacgaatcaataatctcactcaatccatccttgctaaagcattctgtggtgaactcactgcccaatggcgagaagaaaatcttgacctaattagcggcatcaacagcgctgaagctttattacaaaaaatctctactgagaaattagcgtcaggtacctcaaaaaagatagttaaaaaggttgttcgataa

SEQ ID NO: 187940 - DNA, 552 bp, Klebsiella oxytoca
atgctgattggttacgccagggtgtcaaccggggatcaaaacctcgatttacagaaaaatgcgctgatccgcgcagaatgtgagctggttttcgaagatacggcgagcgggaagaatgcccggagaccagggctaaaacgcgcgctgcggcggctgcgaccgggggacgtgctggtcgtctggaaactggacagactgggccgcagcgtgcgcgatctgattacgctcgtgtcggagctgcaggcgcgcggggtgaatttccgcagcctgacggacagcatagataccagtacgccagcaggacgctttttcttccatgtaatgagcgctctggcggaaatggaaagagagctgatcgtcgagcgtacccgcgccggtttagcagcggcaagggagcaggggcgcatcggtggtcgccgccgggtaatgaccgaagaagtagtggaacgctgccgccggatgttggatgcaggtgccacccgtcagcaggtggcgggagtgatcggggtagatgtgaagacgatctataagtacctgccagctgctgaataa

SEQ ID NO: 187941 - DNA, 240 bp, Klebsiella oxytoca
atgccgcgaaactcagatatcgaaatggcctggcgtcaggcaattgtcattgaatcaaatggccgccgtacagtgacaacatccaggtttatcttggaactcgcaaaagttaactggatatggtctccgcgtcaggcaaaccagtggatagagcattatgtgacgacgttccgtgatgtctcaacgaaagagggggatgagcgaacattccagctttataacccgaacggagggctgtaa

SEQ ID NO: 187942 - DNA, 240 bp, Klebsiella oxytoca
atgcgactgataaaccgaagcaaacaatctccgctggggcgtcaggcatgcgatgcggcactggcgaagcattttgagcgttatgggaattatggacactgcgaaagaaaagtgacttacaccgtagaagttgaaggagtgaaagtctgggttgaggtagtcaatcgccataaaagctacgtcgccacagcgatgacaggaatgcgcagactgagaagtctcccgggccagactgactga

SEQ ID NO: 187943 - DNA, 192 bp, Klebsiella oxytoca
atgagcacaatgttcgctctggtgataaccgtcggcatgctcattggcggtaatcaggatgttttgctgggtgtatatgacagcgagaaagcatgtgaggaagctgctgttgaacaaggtgtaaagggcgaatgcctgccattgaaaggcgttctggcggaacaccccgccggattcaccgcacagatgtag

SEQ ID NO: 187944 - DNA, 378 bp, Klebsiella oxytoca
atgaaagttttattatccattaagccagaatttgcagaaaaaattttggatgggactaaacgatttgagtttcgaaaaggtatttttaaaaatcaagagatcagcattgttataatctatgccacaatgcctcttggtaaagtcgttggtcagttccaaatagaaactatcctttccggagagccagagtctttatggaatgaaacgaaaaaatatgctggtatatcaaaacagttttttgatagttactactcgggcagagacaaggcatacgctataaagatcggtgaagtcgaacgctatcaggagcctctccccatctctgacttaggcggaaacattaaaccgccacaatcgtatctctacttacccgcttaa

SEQ ID NO: 187945 - DNA, 1062 bp, Klebsiella oxytoca
atggatagcttaaggtatgaaagtttctctcaatttgatcataacgacccattttttgattcattgaagagtgattacaaagagttccctgattggctcaagaaaaaagccgacgctaatgaatccgcctacattctctacgatgaaaatcacaaaattgaaggattcatgtaccttaaggaaaatgatgatgccgacgacataagccccaaattgcctcacggccgtcatttaaagataggtacatttaagttcgagtcaaagggaacacttagggggcagcgtttcttaaaaaaagcctttgaccatgctttttcatctggttctgatgacatatacgtcacagtgtttgataaacatgcccacctaataaaactcttccaaacctatggtttttatgtgcatggtgaaaaagaaacgcataatggaaaagagtatgtatatgctcgctccttgcatgatgtctacggtgatatcctgttggattatcccagaatattaacagcgaaagtaaataaataccttcttgctatttatccagattatcatacaagactattccctgactccaagcttattaacgaatcaccagatattgttaaagacatctctcacgcaaacagcatacataaaatatacatttgtgggatgccaacagttacccgcatgaacaggggcgatattattgttatctatcgcacaggagatgggcaaggcccagcgcactaccgtgcagtcgcatccacgatttgtgtcgtcgagtcagtaaaaaccattgatgattttcgaaatgaagatagctttgtcgaatactgccttcgctttagcgtcttctctgaagaggagctcagaggtttttacaaagataagcgttacccctatgttatacgcttttcctataacatatctttacctaaacgtccaaatcgtgctagtcttattgatcaggtcggtttaaatggtgctcgtggatttagatggagtcattttcaacttactgatgagcagttttttaagatcatagagttaggtcgtataaatgaaagttttattatccattaa

SEQ ID NO: 187946 - DNA, 291 bp, Klebsiella oxytoca
gtgagctcgcaatctgttaacaactggtttgttagaggagcgatcgggaaaagctctgcaataaaacttgctgatgcgctaggtgttagtcttgagtgggttttggggcaggacgtcgattctaaagatggcttgaggccagatgagcggagactgttggagctctataaccagctaccgaatgaagaagagcagcaaaacatgttgcggatcgtatctctgcggctgaaggaacttgatgagctgtatgccaagtacatggggcgaaggattaagggtgacggtgaatga

SEQ ID NO: 187947 - DNA, 234 bp, Klebsiella oxytoca
atgaacgcacttgaaagagccatacatatcgccggtgacgctacaaaactggctgaaaaattggatgtttcctcaatgactgtcagtcattggaaaaaacgtcacggcggcgttgtgccgcaaaaacgggttttcccaatctttaacgcaacaggtgttacaccgcacgaactccgcccggatctttatccaaatccgaatgatggattgccctctcagggattgggggattag

SEQ ID NO: 187948 - DNA, 537 bp, Klebsiella oxytoca
atgcaaacactatcttttcaacaaaataccggattcaacaccggtgctctgataaagcgaaatcaggcgaaagtggcagatcacgacggcgttcgttctgccgttcgcgcctgggctgcagttgaaggtcaggatgttgtttcggcatacatcatcgatgagtggcgccagcagggtggggaagaaattgaatttccctctgacatcagccgtgcccgtcagaagcttttccgttacttggataacgaggtcgattcggaaaagtatcgagcgaatttgcgtcttctgacgccagccatcatggcggtactcccgctggaataccgcaaccggctgatgcctcatgacgatgttttgtcgcgcctgtcttcagcaattaaagagtgcgccgaagcaaagcaggcagtgatgctgaatgcgccagagcaccagaaattgaaggaggtaagcgaggggatagcttcgctattcaggctgatgcctgagcagacaggaacgctgatgacaatcgtgagctcgatgctgggcgtgatgtaa

SEQ ID NO: 187949 - DNA, 594 bp, Klebsiella oxytoca
atgcaaaattacccattaccttggacgtttcatccgcagttaaccgaagaacgcttatctattattgcggaggctctccttaaagtgcaggaagacacgcatgagcttttgtcttcttcgcttgatgataattatacccgagcaacatgtacttttgggcgccagaaaaatcgaatcgtcaaattgtgcatgtcaaataaatacgactggttggggctttctaatccgaataatgattacacaatcactattggcggtatcccaatccgttcatttagcgatgatccaactaatccgaaaaaggctaacttctttcgaaagaatagtgttgatcagctattcgcatcggaagatacaatccctacgatttggcgcttcgttgtagagaaacctgagttcgaaggtgaaggtgggcgagtgcattttgcgggttataatgcgctggaagaaatgctctctttatggacgtatggcgaagaacgggtaactgtgctgcattctacagatgataccccgccagcacctgtcaagattgagctggatgatatcagcgcttctattcctgaaaaggaaaagaaaagcgataacggataa

SEQ ID NO: 187950 - DNA, 1113 bp, Klebsiella oxytoca
gtgtttaacggttctaatttgcgattggctcgtctgtatcatgagttatcactggagcaagtagctgagcgggtcgataagacccgccagtacattcagcggctggaatccggttcggctgtgcctactcctgagcttgcgaataaattagctgccgtattgctggtcacgcctgaatttttctcagtgcaagagcagtctccagtgaatgaagagctcgttcacttccgcaagcgtagttcaacacgcatggctactaagttggcgacgcttgctaaagctgaattatatcgccgcctcattgaagtttttgaagagtacttgaatttaccgccagtaagatttcctgaactgagagtaaatactcaagaggacatagaaagagccgctgagaaatgccggactgattggggattaggttttgggccgattgacaatatgactcgacttgctgaaaagctgggagcatttgttacttctttcgattctgtctctgatgatgtggatgcgctttctgttcctttaagccggccattcattgtaagaaatacggctaaaaaatcgccttgccgtcagcgttttgatattgctcacgaagtagcacatttgattttgcatgaaggtatttcaacgggagatcgggtaactgaatctcaagctaaccgttttgcatcggcattgcttttaccccgttcggcgatggcaaaatatttccctcgcccaattggtggtcgtatcgactggcaagggctgagtcaatttaaattgacatggaaagtaagtaaggcagcaacaatttatagggcgcatcagctttctctcttaaccgatgcccaatataaaacggcattcttcggtttaaagcgcaagggggaagcaattgatgaaaaagaggattatttgattcctaatgaaaagcctgagctttttcataaggcaatgaagtttctcttaacggatctgtctgttgatgttgagtacttagccaagcgtttgtgtattaccccgacgatgttagcagagttagcaaacgataatacgttagattttgcccgagaagtcgctaacgaaaatgtcgtttctctgtctgcataccgaatgaataccgtttaa

SEQ ID NO: 187951 - DNA, 267 bp, Klebsiella oxytoca
atgaagattcgcctcacagtgacagttagcgcttatggccagggtgataaccctttgtttacaagattgatatttgtagataaagaccttactaatgcgcctccgatagaggtttttgtggaaggattacaaatggagttgcttcctgattttcaaaaagaaaacagtagtattgcaagcattgcggttgaatcaattgtgattattgacagcggaaaaagcgtcgcgcatacagtctggccgaagcctgataaaaaaggtgcataa

SEQ ID NO: 187952 - DNA, 420 bp, Klebsiella oxytoca
atggccagaaaagaaaaatgcctcttctgcggtaaacccgcaactttatattgtgatgggatcctcggctgggatgctgatgaggatgaaaatcatcacctttccaatgcccggggaatttttacctgcgacgcgccaatgtgtgcggagtgtggaacctggcacggcaatatctttttttcaggtaaagcgggtggaatggaaacccgcgattactgtccactttgtcaggcgctgcacgtaagcggtgacgtgatccgtgaagacccgcatcgaaaaggtaaggctattcgtgaaccggttctacaggcagagcaggcggcaatcatccgaaaggcgcactggaacagttatctgaatgagcatcgccgggaactgaacgcaattcagggaggtggacaacaatgcctgccattctga

SEQ ID NO: 187953 - DNA, 1035 bp, Klebsiella oxytoca
atgaccagtaatttagcatctgtaacttatggttctgtttgttctggaattgaagctgcatcagtcgcttgggagtcactcaactggaaagctgagtggttcgcagagatcgaaaaattccccagcgctgtattgcagcatcactggcccaacattcccaaccttggcgatatgacccggattgcagggcgtatccgtgaagggacaataacagcaccggcagttcttgtgggaggaacaccttgccaggcattcagtgttgcaggaaaacgaaaagggctagatgacgagcgcgggaagcttaccttatctttcgttgaattagcagatcagatcgacaatacccgcattgcatcaggaaaagagccagcaatcattctttgggaaaatgtaacaggggtactaaatagccatgacaatgcattcggttgctttctcggtgcgctggccggggaaggttgcgcactacagccagcagggaaaaaatgggcaaacgctggtgttgtctctggaccatcgcgaactgttgcctggcgagtgctcaacgccgaatttttcggagtgccccagtcacgtaaacgtgtcttcgttatggcaagtgctcgacgtgaatttgaccccggaatggttttatttgaattcccgactttgcctccgcgcactgcgaaatattacggagcacagaaaaaaaccggcaccagagcttatacaggcattgagagagaattccatcgatattgcctgagggcaatccctgagacggcgggaactttactcgcgagctataacggaacgtcaaaccaggatatgcgaatgcgtggtggcttgattgtagaagttaccccctcccttagagttcgccggctcaccccatcggaatgtgaacgactacagggctttcctgtaggacacacgaatattccttggcgctcaaactcccctttgcctcgttacaaagctctcggcaactcaatgccagtgccagtaatgaaatggttaggagagagaatacaaaatgctatttcttcaacttaa

SEQ ID NO: 187954 - DNA, 336 bp, Klebsiella oxytoca
atgggcgtaaaggtattcagaagcgaacttcaaccggatagtgaatctgcgtatcgtcattggcttagcgataatcctgatggatatgtcgtcaacaccttaaaaaccgccagcggtaaggcaagcaagagtgatgaacgctttaccaggattcatcgggctaattgcaaaagcatcaacccgctacttggactgacagaaaagaaaggcttcacaaccggtagataccagaagctttgcgcagctaccttagaattggctgagagagaagcgaaatcggttactgggctggcaagagtggagacatgcccatgcatgcatctggtctgtagttga

SEQ ID NO: 187955 - DNA, 1308 bp, Klebsiella oxytoca
atggcgatagctccgacgcttaacgttccccaggctcgttttctggctatgcagcaaaaattcaaagcctatgtggctggctttggatccggtaagacgtgggttggctgcggtggaatatgcaaagggttctgggagttccccaaaataaaccagggctactttgccccaacctatcctcagatccgcgatattttctatcccacggtggaagaggttgctcacgactggggactgaaagtcaaaatcgttgagagcaacaaagaggtccatttctacagtgggcgccagtaccgcggtacgacaatttgtcgttcgatggaaaagccggacacgatagtcggctttaaaatcggcaatgcgctggtggatgagctcgacgttctgaaagcggataaggcgcgtcaggcgtggcgaaaaatcatcgcgcgtatgcgttataaggttgatggtctccgtaacggcattgacgtcaccacaacgcctgaaggatttaagttcgtctataaccagtttgttaaggctgtgagggaaaaacctgaactgaggccgatgtatggtctggtacaggcttcgacattcgacaacgaaaagaacctgccggatgactatattccttcgctcctggcgagttacccgccggaattgatcaaggcatatctgaacggccagtttactaacctgacaagcggcaccatttatcaccagttcgacagggtgctgaacaactccagcgaagaagaacagccgggtgaagcgctctatatcgggatggacttcaacgtcgggaagatggccgggatcgtacatgtattgcgtctcggcttaccgcacgcggtaacagagattatcaacgcttacgatacgcccgacatgatacgcatcatcaaggagcgtttctggctgtatgccgacggtgactaccgcaaggtccgcgagatttacatttatccggatgcctctggtgattccaggaagtcaaacaacgccagcaaaacagatattgagcaactccgacaggccggatttaacgtcatcgttgatgatgctaacccgccagtaaaggaccgcatcaactccatgaacgccatgttctgcaatggtaatggcgatcgccgatacaaggtgaatgtggcccgttgtccggtctatgccgactgcctggaacaacaggtgtgggataaaaacggcgagccggataaaaagagcgataacgatcaccccaacgatggcgccggttacttcattgtgaagcaattcccaatcgttcgacctgcattctctatttcactggacacgacattctga

SEQ ID NO: 187956 - DNA, 1401 bp, Klebsiella oxytoca
atggccaataacgatattacttacgttcgccctgaggtcagggcggcgatgcccgtgtggaaaaaaattcgtgacgtgtgcaaaggggctgatgctgtaaaggccgccgggaatgaatatctcccttttctggatccgtccgataagtctgcacgcaataaaaagcgcaatgccgattatattcagcgcgccgttttctacgcgataacgggcaatacaaaggtggggttactggggctggcattccgaaaagacccgaccatgaccgcgccggataagctgaattatcttcgtgataacgccgacggtgctggtgcaagcatttatcagcagtcccagcaggttacagaaaatattctggaggctgcgcgcgaggggctttatacggattatgccgctgagaccgatgaggcgatcattcttcgctatcaggcggaaagcatcataaactggcgcaccaaacgcatcaatggacgtgatcaactggtgctggtggttttacgcgaatgcatggaaaaggaagatggctttgcgtacgaggatgaaatccagtatcgcgaactggctctggagaacggaaagtttgtctgccgggtgtggcgaaaggcagctgacgcaggctctttttccgtcagttccgagtatctgccgaagccaaaaggtgaggaattctgggatgaaattccctttacctttgttggtgcgcagaataacgatcccaccatcgatgagtcgccgttagctgctctcgttgaaatcaaccttggccattatcgaaattcggcagattacgaagacagcgtatttttctgcggtcaggtgcagccggtgatttccggtcttgatacagcatggcgtgactggctgcaggataagggaattcgtgtcggttctcgttctcctttcctgctgccgaacgaggggagttttacgtatgctcaggcgcaaccaaacaccctggctaaagaggcgatggacagtaagcgtgattattctgttcagcttggcgcccggcttatcgagcaaaacagtgcggttaaaaccgccacgcaatcgagcggtgaacaaactgcttccacatcggtgctcggcatttgcgtgtccaatgtctcggaggcctacacgctggcgctcggctggtgcgccagatatctcggcattaaagacgagagctaccgttacaacatcaatcaggagtttattgctaaagtcgctgaatccggcatggtaacggcaatcgttaatgcctggcagtccggtgcgatccgcgacacggatatggtcagagcgttgcagaggcttgacctgatagatcccgctgatgaccctgaaactgtcattgacgctattcgtaacggcgcgcctaacctgattggtggcaataatggcaacggcgaatga

SEQ ID NO: 187957 - DNA, 1113 bp, Klebsiella oxytoca
atggcaacggcgaatgacaaactgcaggatgaatcagtagcccacgctatatgggtgagtcgctacagtaccggcgttgccaacaggatgataaaagtcctgaatgacagcgacgccgaacttaccgcaaggttgctggtggctattgatacgctggacgctgagagctttaccgtttctcggctggaagcgttactggtaagcgtcagggcgataaacaaggatgcgattcagtcgatgtatgcagctcttactgccgagctgcaggaactggcgaagcacgaagccacttttcagatgagcctcttccagtttgctattcccgacgatgttcttgctcttcatccgctggtgggcatctccccggatgcggtttatgccgcggcgatgggacgtccattccagggacgtttgctgagtgaatgggccagcaacctcgaagctgatcggatggcgcggatatccaatacggtgaggcagggattcctgctgggcgatacgcaggagcaaatcgcaaaaaaggtccgtggccatgctaatcgtggttaccaggacggcgcgctgcagatgagccgggccaatgctgccagcattgcaaaaacggcagtagggcatcttgcatcgacagccagacaaagctttgcggcggcgaacgacgacatcctgaagggtaaacaatggctatctaccttggataaccggacgtcaaaggaatgtcggatccgcgaccgtctcaagtacacgctggataacaaaccgatagggcacaaggtgccttatttgcaggggccggggaaaatccatttttgctgtcgcagcaccgaaacttacatcctgaaatcttccgaggaattgggtatcaaagtcggcgaaatcaaggacagctcgcgcgccagtatggatggacaggttccggccgataccaattaccaggactggttctcccggcagtcgttcacgcgacaagctgagattgtcggagaaacgcgcgccaggctgattcgtgatggcggtttgtctcccgatgagttctacaacgacaggggcgagtggctgacgctggaccagttgcgctcaaaggatgagcaggcattcaggaacgccagaatttaa

SEQ ID NO: 187958 - DNA, 786 bp, Klebsiella oxytoca
atgcttattcgtaacatgctcattaaatattattcggcagctggtggtgaaggtggtgatggcggtggctccggtggtggtgcgcctgagattacgccggaaatccaaaagctgatcgatgagcaggtcaacgctcaggtctctggcctgaagaataaaaatagcgagctactcggtaagctcaaagagtccaccgagtcgcttaaacgttttgatggtatcgaccctgacgcggtgaaaacgattctccagcgtttttccgacgatgaagaagcgcagctgattgccgccgggaaagttgatgaggttctggataagcgcactgaaaggctacgcgctgatgttgataagcaaatcaaagccgctaatgaacgcgctgaaaaggcggaagcgttctccaacaaattccgtgatcgtgtcctgggtgatgccatccgcagcgcagcgcttaaggctggcgcgctgccagaagcatccgacgatctaattctacgtgctaaaggcactttccagctcaacgacgaaggcgaggccgtagcagttgatgcaaatggcgatgttctgttcgggaaagacggcaaaactccgctcacccctgttgagtgggctgaatctctgaaagagacggccccgcacctgttcccacgcgctgaaggctccggggctggtggtcacaagccaggtggcggcggcggaagcctcaaacgttcagaaatgagctcaagcgataaagcggactacatccgcaaacatggccagcaggcctatctcaaattgcctaagtaa

SEQ ID NO: 187959 - DNA, 954 bp, Klebsiella oxytoca
atgcctacgaccgtaaacactgacctgattatctatgacgacctcgcgcagactgcgtttcttgagcgtcgccaggataatctggaagtcttcaacgccgcttcaaacggcgcaatcattctcgacaacgaactgatcgagggtgattttcgcaagcgcaccttctataaagttggtggctctatcgaatcgcgcaacgttaactccactgacccggtaacgggtaaaaaaatcggtgccggcgaatctgtcagcgttaaggcaccgtggaaatacggcccgtatgaaactactgaagaagcgtttaaacgtcgtggtcgcgatgtaagcgaattctccgaagtgatcggcgtcgacgtcgctgatgcaacgcttgaaggttatatcaagtatgcacttcagggacttgtggcagccattggcgcaaacgctgatatgacggtttcagcggatattgccacggatggtaagaaaaccctgacccgcggcctgcgtaaatacggcgataaatttaaccgtgttgcgctgtttgttatgcattccacgacctatttcgacattgttgatcaggctatcgacaacaaaatctacgaagaagcgggcgtggtggtttatggcggacagccaggtactctcggtaagcctgtactggtaaccgacaccatgccagttgatgcgattctgggtctggtggccggcgcggtatccgtaacggaatcacaggctccgggcttccgttcctacgatatcaacaaccaggaaaaccttgccattggctatcgcgcagagggtacggttaacgttgaactgctgggttacagctgggatgagacgaagggcgctaaccctgacctgaccaaaatcggcactggtgcgaactggaaaaaacatttcaccagtaacaaatccactgcaggcgtactgatcaagctggaagccccggcgggggagtaa

SEQ ID NO: 187960 - DNA, 396 bp, Klebsiella oxytoca
atgaccgtttatataacaattcaggacgttgacgagttgctgggggatacctgggctgccgtcgacaaaaaggctaaagccgtgctacaggcaaacacctggatgacggcgctgaaccttcaggatatcgagccggagcatatacccgaagaggttaagcaggccggagcgtttatcgcttccgtagccgctgcaggcaatctgtatcagcaaaaaacagattccggcgtggtgacgagcaaaagcgttgaggccgacgatgtgaaggtttctcgcacttttgccgagctttcaaccaccagcactgaattactcgatcctgatttgcagttggcgctggatatgctcaaaccgtggatgattaaccctttccagacgttctttgtgagggcgtga

SEQ ID NO: 187961 - DNA, 393 bp, Klebsiella oxytoca
atgacccttacagaaatcagaaacgctgtcatttcccgaatgacggcgcagaccgctattgctgctgatgcggtgaactatcccaacgggccgatatttgatccgagtggccgcgatatctgggcacgcttcaccaatatttcaggacaggcgggaaccaacgaaatcggggccgggccggtagtccatcgaaccggcgtcatcatcattcagctatttgttccgatctataccggcacgattctgattactcaaaccgcagaccagctaacgcagcacttcgagttccagaatgacggaggactgagttacttcgcagtgtcggctgttccggcgggcgaggctgacggctggtcccaactaaatcttcaaatcccatatcgcgctttgtag

SEQ ID NO: 187962 - DNA, 1173 bp, Klebsiella oxytoca
atgtcgtctggagccaaaagagttacggcctgggtacgtgaaacgattcccggcaccacacccacgggaataccgtggaatctgttaagacgctcatctttcgggcttgggccaacgcaaaacaccaatgacaatgacgagattggtggcgaccgtatggcccagggcacgtctcgtggaactaccgacgttggtggtgatatcggcacaaggtttcgctgggggcaacacgatgactttttagcgtcatgctttggcgctgaatgggttgataacactctgacgatgggcaatggtcggatcgctttctcggtcgcttcgatggatagtgatgtcggtatcgcctccatagcccgtggttgtcaggttgccacattccagattgaaatcccgaatgatggcgatatcactgccacagtaacttttgcaggactggactgggaaacgaaaggagacggtaccagcttctttacggcgccagtcgataatgcaggggcactccgctacacattcaaagaggtaacagctcttagcctgaatggtgttgctggcggcaatggtttctgcgtcgataccttcaacatccagttcgacaacaatatgcagacccagcgctgcatcgggaccggttcggcgttcgctggcgcaaacattccaaccacctttacaccgtcaggccaaattacgttgtcctggtcaaaagccgcctgggaaatctataagaagacgttcactggcgaaacggtgccgttcagcttcaccctggagaatgctgaaggtgcctatatcttcgaattcccggaagtgcagatttccggcgactggcccgacgcaggcagtaccgatattgttcaggttcagctcgatatcacggcagccaatacgccaccgacgatcacccgcgttcctaccgtaccggcaacggccattagtgtagcgccggcgacgtcttccggtgctgttggctccaccgtgaaccttaccgccactttaaccccggcagactccagcgacatcgttgtatggacttcttcggatccggcgattgtcagcgtgatttcaaccggccagaaaacagcgaaagtcacgcgtattgctaccggcaccgcgacgattaccggcaaagcgcggacctttaccgcaacgtctgaaattacagtcacggccccttaa

SEQ ID NO: 187963 - DNA, 3204 bp, Klebsiella oxytoca
atgtcagaacaagaatcaagactagcgatacgccttgacagctccggggcagagaagcaagccgatagcctggcggtggctctggtaaaaatgacgcgcgcgggtgaagaggctgaaagagcagccgacgatctgggggatgcaactcaaaatctaaattcacgccttagggatggtgcgactgcaacaggaagagcgacaaaatttactgaggagcagcgagaggcatttcgtaaactccgcgatcagattgatcccgtgggtgctgccatagacagaattggcaaaaaatactccgaacttaaaggatattttgaccgtggtcagattgatcttgaggagtatcgctcgttagcgaaaagccttgatgctgccactaatgaattaactggtgtggcgaaggcagagcgtgaagctgcaaaagcagctgatgagcaaaaagctgcattacagcgcctagctgcacagctagatcctatatctgatggttttcgaaaaattgctgacaaccagaaattgttggatagcgcaaaatctaacggaatgctctctacagagcagtacgactcactttctggaaagttaaaacaaatgcgaggcgagcttgagttgactcaggcccaactcggaaaaacgggaatgtcagccagacaaaccgcttttgccatgcgcatgatccccgcacagatgactgatatcgttgtcggcctctccactggtcaatctccatttatggtgctcatgcagcagggcggtcagcttaaggatatgttcggcggtattggcccagcgattaaaggcgttggcgggtatgtagtagggttgattaacccctttactctggccgctgcggcggtcggtgtacttggtttggcttattacaaaggttctcaggaacaggacgagttttataaatctcttgttcttactggtaatcaggtaaacaaaacatctggccaacttgccgatatagctgctcgcgctggagttgcagcggattcaaccacaggcaaggctgcatcaacacttaatctgttagtgtcatcggggaaggttgctggcgattcgctggagcgcgtgacagcagctatcgttaagatcagtgacgcgacgggtattgctaccgataagttggtaagcgacttcaacgatatcgccgccgacccggttgcagctattaccaagctgaatgaccagtaccactttctgacgctggcgacctacaaccagattaaagcgcttcaggatgaagggaatcaacaggaagctgctcgcgtggcgactgatgcttatgctaacaccatgcagcaacgagcgaatgatattcatgagaatctcggtcttctggaacgggggtggaattctgttaccaatgccataaaaggggctacagatgcattattggattttggccgcgaaaagggaccatctgaaagattagcagagataagaaaagaaattgattggatcgataaggctgctggcgggaagtttttttttggtggaagaaagaatgaactcgaagccgagctaaataatcttcaatctcaaatcaccactgaaagcgttttaactggaataatcagcaatcatgacaaagcagaacaaaagcgcattaaaactcagcaggaagcggatcgagttaaccagcaatatctcagcaatgcggacaagcgcaataaagccattaagcagcagagtgagttcctgaaggctggcgcaatcacagcggaccaatacgctaaaaacgtttcccgcattaacgagatgtataaggatccaaaagcacctaaaacgccaaaggaaaaagcctttacagaggacgccgcaacccgactgctcgaccagattaaccagcagactgcagccatgcagtcccaactggatgccagcgacaagttgaatagcgcaacacaggcgcgggttaagttcgagcaacagatcgctgacctcaagtctaaaacgcagctcactgctgaccagaagtcgatcctttcccgttcagatgaaatcctccaggcgtataagcagcaggaggcactgcaaaattccgtaaaaaccctggacgattatcggaagatgcaggaagagataacgccgaaggagctacgacagaacgagacgctgcaaaaacgtctcgaaatcctgcaaaagatggtcgatctcaaaaagctatcaccggaagacgcagggcagcaggccagcgatctgattggtaaatctgtacttcctgattccgttatctcaggggtgaacaaagctggtggaacgcttacttctggtgcgactaatagcgacctgtcagggcagggtctgaacatgatagggctgcaaattgacccgcaacttgaaatcatcgagaagctgaaagttgcccagactgattatgcggcctggctgaatcagcaacagcaggcgataacgcagagcaccgtcctgaatgagcagcagaagcagcagcagctactggccttacagcaacagggccagcagaatcaggaggcattaactacggctgtctacgttgcgcagatgcaatccgctcaaaactccttctccagcatcaccgattcgatgggaactatgtttggcgagcaatccgcgatgtataaagctgcttttgtgacgcagaaggcattcgctatcgctcaggcagccctgcagcttcctatggcgatggggcaggcgatggctggcttgccgttcccggctaaccttgcagctgtcgctcaggttatcgggctcatggcctccattacttccagcatcaccagtgccgctgctgttggcttcgcctctggcggttataccggccccggcggtaagtatcagcccgcaggtatcgttcataaaggtgaatacgtctttgaccaggcgtcaacgaaccggatcggggtgtctcagcttgaggcgcttcggaatggtaaaccgctcgatgccacgctcagcaaaccgggttttgggaccggggtgcagaacgtgaatagtgataacagcaggaaaaccactattcacgcaccgatagaacagcatttccattcacctgctggtgtaacccctgaccagatggctatctccatggcacaaacgcagaagcgggcgacaacagatgcgcttaatcaggttgcagcgcaagtgctgaagggggacgggaaagttggaaacgcaatgcgcaataaatacccgggaagggggataggttga

SEQ ID NO: 187964 - DNA, 2148 bp, Klebsiella oxytoca
atggcctttaacccggagctggggagtacttctccggcggtgctgctcgataatgccgagcgcctggataagctggtgaactcggacgctctcaccgtgcctgatcgcgcggatgttgatctggatacctggcgcggattcatggcgaaaaatgacgagattcgtcagaaccttgtgccattgagtaagcattacatgacgcctgaagcggctcaggctgatattgcaaacatcccggatggctcaacaacctatgtacgcagccctgatgatgcttatctggctgttgaatacaagaacacgggtggaacgttagaggctaccgggcgcaggatgatttcagcgggatatgttgacgcgttgagggatttagttatcaccgaactggcgaagattatggccttcggtgccgcgcagacaactgatgcttatccggatattgctgaactgattcttgatagtgtagggaatgcagtttatcgccgcttcgcggacggaacgagccagtttccggcgctgatgattggttcagggattgagcttgtgcaaatgacgggcggagggtttgtctgccagatgcgcgccaccggagaagaaatatttaatatttctgcattgggtaacctgacgcatggcagccagacaacgtggtttgctgatgatgacagtgtcagtgattatgctgaaatacatatggacggacagggaagaatttttcggagagttctcacggatggtactgtggagcaagtgggtgatgatacacctgatgatgacgcctctgaattcccaatggttgcttcagttgatggaaacatcattgcagtaaacggcaacaacgttactcagataacgaacgacaccggagtttcaaatattgctcctgtagcattcgctaaatttcttcgttttctgtccaaccttagcggcaactatctgacgaatcgctctacgtataacgggaaataccgggtgcgtgaaagcaagaatatcctgcttcattacattggcaccgggcaatctcttaaagcagggggatcgacgattagccaggctcctgtcactatcgcctcagaagcagactatggagtgatcagcttttcaactggcccgaaggtcgatttcaaatacgatactctggacgaatccctgctgggatcggccacccctgcgcgagaaaacgtggggacccgtcccggccaggagtcaccatccagcggcatagcttataaaattcatgagctgacagggcataccgttttggcctccaccgctgcaagttcgggtacagatattgcggggatttcggctggaaccgccacgtttaccgccgccaccaaaatgattcaggcggccgttgcgatggctgatgaactgggcatggagtatgtcccggtacttgtgctcatccacggaaaccagaatgcggcagcaggaacatcgatatccagttatcgcacagcgatggaaaccctgcgcactcagtatgagtctgtaataaatgccgcaacaggcgaaacgcagtcactgcacatgtttgtcgggcagctatccaacacgatcccatatggtggcactgccggcacgacaaaaaccaataacattggcatcgcgcagtaccaggaggcccgtgataacgcgttaatccatctcgccagcgcacaatatgcccgcccgtattcagacggggagcatctgacaagcgcaggatatcggacagaaggtgaagttattggcgcggtggttggtgggtggctgaatgacaacacaaaatcctcgcttgtgccgatagagtctggtgttgtgcagtccggcaccacaatcactattcctgtggcgggctgtgtaggtgatctcgtgattgacaccgcgagggtcactgaccccggcaactacggatttgtcctgaccagggccactattgcttcggtagccgtcagcggcagcggaacagcggcaaaaatagttatcacaaagaccgattccaccactgcgacggcaatatcttatgcaagccaggggattgcgggacaaaaccctggacccgttactggttcgcgggggtgcattcgtgactctcagtctggatcatcactatccggcctgcctctctataacgatctatgcgttttctccatccagctttaa

SEQ ID NO: 187965 - DNA, 753 bp, Klebsiella oxytoca
atgactacccgcttttatgttgataacggcgtgacagccacgcgttacctggacacttacccgtatccaaacgacatcacgcaactaccagcactgatccccggtattattttgcaggcggatttcgatgtgaatgatcccgcctcattaaccagaaaccgggttggggctgctatgtccgttgttggctctcctgctctgggtgattacggcgtcagccttactgaggtaaaccaccttgatacgaacatcgacatagcagcatataacggcagcgatctgacaatggtgacaattgcagttcatccaggcgttgttggtgcaattgtagggcgcgcacaaatgaatgccccccagcgctcgcgtgcgacgcagactacaacgacaggatggcaggcaaaatggctgacgtctgccggagcggcgcagcaggccattattgtcccgtccagtgcagcggtcgatggcgaaatggcagtcagtcggtttgtgcgagacaacggtagcggatcaatgctgactaagcttgatctgccacgcacatcacagtcagcaaccggcaccgcagcgacgactccttatgctgtaccttcgtcaaacattctgctgggcggttcggttgagggaggcacgacagcgaatatctctatgcgggcctgtctgattgtatccaggtcaattacgaatactgaaatggcaactatttacacctgttacaaaaactactatcagctgaaaggtaaaactatttaa

SEQ ID NO: 187966 - DNA, 195 bp, Klebsiella oxytoca
atggctggctacattgtcgattatcaggcaactaaaaacgggcaggtaatttattctggaacactggcggttgagtcagagggaactgatgctgcagtaaaggaggcagttacagccgaactgaacaacatcaatacccagtatggcggcggcgtaccagactccgtcatcgttaactcttggctgggaatttaa

SEQ ID NO: 187967 - DNA, 276 bp, Klebsiella oxytoca
atggctttcaaattatcaacaacaaaaacagtccagatttattatctgggtgggtatctgtgcgataaagagatagacattgacctgatttatgctgttgaaagtgtcaggcaagatgatgcgggactgttaatggcatcaatatcagtacgatatgatgatggagcgaaggtcaacgctggtgattaccctattactttagatgttttatcttcaaagtcgtgggcagaacaagcagaagcgcagcttgtgactatggaggatttttcacaataa

SEQ ID NO: 187968 - DNA, 2532 bp, Klebsiella oxytoca
atggcctttaacccggagctggggagcacgtctcccgcagtgctgctcgataacgccgagcgcctggataagctggtgaatggtgatgcgccgaccgaaccggaccgcgctggcgtttatctggatacctggcgcggaatgatggcgaagaatgacgagattcgtcagaaccttgtgccattgagtaagcagtacatgacgcctgaggcggcccagacggatatcgtcaatatcccggatgggtcaacaacctatgtgcgcagtcctgatgatgcttatctggctattgagtatatgaatgtcggcggtacgctggttgcaacgggtcggaaaatgccatcggcgattccaacgggatatcagtctgctaccgcggttagcagcagcgcggctaatactatcgctatcaccattcctggactgttgattgaaggtagcctggtctattttctttccccaattctaaacactgctgcggtcaatgtgaccgttacagatacgaagggaaacagcgtcacgcgcgcaatacagaagcaaaacaacgggacgttaaccggaggtgaattacttctgggccagcccgttttgatgcaattcagaaccgggactgctaataattttgttatggtcgcatccggtccggtagcggccgagttggctgtcagaatttcagcactggaaataaacagcatcgcgttactttcgggagttgttaataatgccgacgcatattccggcaccgcatctacaatccctggtattgttgcttctgatcgtgtgttcctctttactccgaacgctactaacacgaccagaacgccaacgctttcagtcaatggcggtaccgctcgccagataaagcagaataacggttcgaacgtcgcggctggtgatttggtagcgggttatacgtatctcgttaaattcaatttcgcttcagcagattttcggctgctgacctacccggcagacagaaaccgcttattgaatgcgtattccaaagccacagtgacaagtgatacctctactcctgatgcggtatcaatcacgatccctggctctttgggtgacggtactcagataacgtttgagcctgtggtggcgaataccggtgcaacaacgctggttattacagacctctacgggaactcagtcacacgtagtttgtttaaaggagccaataccgcactaactggcggagagctgcgggcagcaatgcctgttaccgtgcaataccgaggctcaccacagaataactttaaattgctgtatgccggggacccgactaccgacattctgaacctcataagcgatgtcaccactctgcagggtgcaatcactgacccctacgttaaactgagcaaaaagcttatcggtgacggaacccaggccaatacctcgccattcggtaaaatttcgttcagcaatggcgtcagaactgtaaccaagaagcgcataattataaccacgcccggctcctccataggcctgggggctgggtccactgacgggggtgtggtgggcgcgccgttctctcctagcgctttgtttattgaagcgatgaaagagcacctttctggctatggcgaatttgagtttatcgacgacaaccagagtatcggaggccaggcgatacaccagtttgccgcgcagctacaaaactcgccctatttcaccagcagtgagcctgaagactggccggatatcgtgctgattgtcggcgggatgaatgatgccacaccgaccgggaactttaaccgcgggcgcacgtacccacttcagcgggcagtgctggaagatcttattgaccagtgcactgcaaagggcgctgtggttattgtctgcaccacgccgcaccacaatgtcgagtccgccaccgtcaaaaacatcacgctgggtgatcttaatgtcctgtggccggttcgaaccttcaacgttacagcgaattttacattcgattcagtgagcaaaactataaacagcacggcatttgcctatgacacaggaaacgcagcgaccagctggggcgggcaaatcctgcgaccggggcacattcttcgggttagcggtgtgaatgccggtgattacaccattgccgccatatccgaggacaggaaaaccatcaccgttgcagaaaatatcccggtttcaggcctgcttaataccagcattcagcacatcaatctcgacagcattattgaagaggtgctggacccgccaccttcaaaatcgtttgtggaggccgactggtcaggaagcggcattaaagttgttggggatgtacgttttggcctttacaacagcatggtgcgtgcagtggcgcgtgggaaatccgcatttgtactggaggctgaaatcccctcgttcaggctgggtgttgaggttcacggatggtcggcgctttttaactctcctaattacaaccatccgaatgacctcggctataccgtcagttacaaggctggcgcagatgctgcggcattcagtctgtgcaagctgatttatggcgaaaaatattatttaccttcgtga

SEQ ID NO: 187969 - DNA, 603 bp, Klebsiella oxytoca
atgactatttactcaagaattaatcaatttaccttgtcctattttaaaggagattatgatcttgggatctattcagtagctttaacacttggcacagcttgggtgtttataggaaatgcgctagctatttcttttttatcgaagatttatgctgaaaaagatgatgatgttgctctaaataaggcatcaggcttatcagcttgtatttttataatgctttctacctttcctcttttcttctttttattcggcaagaaaattatttttttattatatggggagcaatatcttcaagcatataatttgcttatcattttgtgtttttcaactgtagtaacgtcattaggttttgtctcaaatcgctatattgttaagttatctggttacagttacctatcgaaaaaaaccgtattgattttactttttagtgttcctgtatcgacattaatggtttactactttggtatttatggcgctgcctatagtgtcctgtttatcgaaactatttcacttactattatgaattatttttttcataacggtattatcttgaaaatgcacttaggtgcattcaatctcaaaaatattcttaagatgaagtaa

SEQ ID NO: 187970 - DNA, 1062 bp, Klebsiella oxytoca
  misc_feature (371)..(398): n is a, c, g, or t
gtgaaggttgcatttcttactagagtagacgcatttgataaaaatggtggggatacttaccaaattcaaatgtataaaaaatattttgaagcaaatggacatatcgccataatcattaacgatttaacaattccagatggatgtgattattatatattgcttaacatagacaggcctcttgagttaattacatattttcaaaaacttaaaaaactacagaagttagatcatacgttgcttttaagtatacatcactcttacgatgcaattaatttctttgaaaaaaacattaggcaaggaaagttaggtatacttttgagaaaaatatcctcgtttcatcgtcgtgagaaaataaagaacgtagctagagnnnnnnnnnnnnnnnnnnnnnnnnnnnntattaaagatgttaaatgtttaattttaattgcagaaggagaaaagcaaataattgagatagattttaaaacaacagtgaacaattactttgtcgtaaaaaatggggtagacctaaaaaagcaattagctgatattcatgaaatcaatagagatatagatgtattagtttgcggtagaatagagtctaggaaaaatagtctggcaatagcgcagcatttcataaatagtccatacaacataacattcgttggtgctattaatactaatgataaagagtatggtagatcatttctctcattaatcaattcatgtaaaaacatgacttatctaggacgtgtcactcctgaagaaatgtcggatatctatttaaggagcaagatccatttatcagggagttggtttgaagttgcatcacttgtagatcttgaagcatatgcgtacggatgccatgtagtttcttcagttaatggacatactaatagttatctagctgataatgcgatctatcttgacccaaaaaatttagataatatcactgatattatgcaagagctatattaccgaacttcatcattgccagagcaatatgattttatttcaaaaaatctatcatgggagaagtcatatcaatcgctatcttcttctctgatggaattgggttaa

SEQ ID NO: 187971 - DNA, 1053 bp, Klebsiella oxytoca
gtggaaggccacctcaaaactgcggtcgcgccgggcgcggctgtggaggtgggttatcatcaccccctcccggaaggtgccggtgacctcttcgccgccgctcaccttcagttcctgaccgggggcgagcgtcgcgcagctgctctttccgctcagccgggtctggtcgttcaggtaacgctcgtgacgcaggcgggcataaaacgccccgctctccggcgccgggtcgcgcggatggctgtcgcccggcgtcaggtagttatccccccagtggtacgcctcgccgtaagtggtgctgtcgccccggctgacatcgatgctgaggctcatctccgccggcgcgttgcggtagttatagtcccgggtgaacaccgactgcggcaccacgcgatgccggcttttcagcgcccacacggattccatcccgctgtcgtgctggccggagggcggcacagacggcagaaccagcccctgcccgtcgtgccgctggtcgtcgtaaaactccaccacgtcgatgttcagccgggtgtcggcggtgaagcggaaccagatacccacctcactcagcaggcgggtgataaagcgcaggtcgtcctcgccgtactgcatcacctgctcgcgacgcgggtacgcctgcgccagggtgaagataaagtcctccccgcgcatgccgtggcgggtgcgcaggatatgctccacgatatccggcaccgacatatcctggtaaatccggttctggtggctccgggagagcagcgccagacgcggctgcagagtcagggaataatgcgtttcgtcccgggaggcggaaaggcgctcaaacgccgtcaccacgccctgaatcgtgcgtaccggctgccggatttttaccccgaagccctggtcaaccggggcctgcagggtgaaggcggcatcctgcatcagcatctgctgcggcgtgagggttttgtcggcgctggtgaattcaatctggtagctgaacggttcgctcagggcctcatcgccttcaaaggccagcacgtccaggagggcgcggcagccgcgcaccgttaa

SEQ ID NO: 187972 - DNA, 474 bp, Klebsiella oxytoca; identical to SEQ ID NO: 185284

SEQ ID NO: 187973 - DNA, 1086 bp, Klebsiella oxytoca
atggcgagtgtagactttagctttgaggggcttcttatagagagaattatcgcacacagggtttttcctaaaagtgctgataaatcattaactcccccaaaaaccagcaagtctttaatggcattcaaacaagatgcattagatgcttttcaggtgaggattactgaagctttggcaagtaaatctcatggaattgaaatgtctattggtggtgttggtgatgattgttttttaaatttgtcggcttcaacgttttctaatgatacagatcatttcatcaaggttaccgaacggcttgcaagtaaacttagcgaggcacaatacaatagttcggctcctggtgggatattagctgtattgtcgggccgtgttggaaatgattcacttccattccttgcggtaataaaagctgaaactcagaatggttttagaactgtggaaaatgatgatcaggtgacaatggagtttattgcagaacttcttttaacgcctgcgcaacgtttttataagattggctttatagttcaaactattgctttacctcctgataactatggtaattataacagctcatcttatcgtgcttttttgttcgaccatttaatgacatcgactgaaacaaaaaacgccgctgggtatttttactcccgattcttggatatggatataagcaagtcatcaaaaaaacttactcaggatttttttgagagtaccagggacttcatcaatactgcacaaatagaggaaagcagtaagcttgcgctacatgaggctttaagaagcgaaatgcgctctagaaagaccacattaagtactgcggatttcgctgaaacaaatctccctgaagaaatgcagagtgagtatttggaatttatgaagaacaaaagcttccctgcagcggcagtgactaaagacaacggctatattgaatccaagttaaaaataagaagcaagctcgtattctctaatgatgtatgggtttccgtgccaccagatcaattaaaaaatcttgtagaaattatcccatcggatgataatgaatcaacgattttgaaaataaaagggcggcttaaaagtcaacaataa

SEQ ID NO: 187974 - DNA, 993 bp, Klebsiella oxytoca
atggatatcaatgagttccgcgagtttttacaggcacaccaggatgcttacgcagcttgggggcagtttgtgtctgaagaaatttgcaacgcacttcgcaactccttaggggatgacaaggccaaactctttctaaagatccgctcagaaccaaggctaaaaactatcgcctcagcattaggaaaggtcagccgaaaaggctatgataatccaattgtgcaaatgactgatttgattggtgtgcgttttgtagtcttgctctctgttgaaatcagaactatcagtgacataatcgagaactgcgataaatggcatgcgactgtttctaaagactatttatcagaaattgatgttaaccccaaaatttttgactatcaatctcggcattacgaagtaagaccgataactcaattcgactaccgtggtgagagtataacgccggaaatgtgttgtgaggttcaagttagaaccttgcttcaacacgcctatgctgaattagttcatgacagcatctacaaaccttctggtgatgtacctaaatcggctgaaagacagatagctcgtagcatggccttaatggagacaacagatgatcttttttgcaaaacaatggaaattttggccgataatagcaaggaaagaaacaagcttttagaattcctttcaggttattactcagaaaaaattggcaagcaatacattgatgaagatttacatgttaacttttccgtcattgatacctttaaagagcacattgacgacaatctgccaaataaaatccacgtgctactcagtgagaaaaaatacattccgatacggataataaatagagttgagtacaatcctctattcactcaaccatgcatactgtttgtatactggctagcaagccagttagactctggtgaattgctttcacactggcccttgccgggcaatattagtgggctggagttagtattaagcgacctaggaaaaagcatttctcgttag

SEQ ID NO: 187975 - DNA, 348 bp, Klebsiella oxytoca
atgcgtgacatgtacgaagttctagaccgctggggcgcatgggctgcagctgacggtaacggtgttgactggcaaccaattgcggctggatttaaaggtttgctgccacacgggaagaaatcacgactgcagtgcgatgatgatgaagggatcatgattgatggttgtgtagcgcggttgcggaaatataagccagaagagcatgagttgattattgctcactttgttataggtatctcactacgagccattgcgaagaaacggaagtgttctgatgggaccatcaggaaggaattgcagactgcgatggggtttgtagatggttgcatttcgatgttagatttttaa

SEQ ID NO: 187976 - DNA, 285 bp, Klebsiella oxytoca
atgtacccggattatgtgcagattgaaatgcctgctcagtactgccaggcagacgcgcagtggattcaggaggggttactccagctaccgaactcgctgagacgaaaaattgcgcagcgttatgcagaagtttatgaaattgagtttaacgccgagcccgtttcatttcggcaggagaacagggcaaggcatgaggcaaacgtaaggcttcgcaggttcgtggatgcacacggacgagcatcacaggggtatacgacccagccacccctggccggatcacggtaa

SEQ ID NO: 187977 - DNA, 702 bp, Klebsiella oxytoca
atgtcgaaaaacacttttgcagataggctaacggaggctatgaaagcagccggttttactcagggggcactggcaaagatggtcgggatgtctcagtcaagcatttggaaattaacatccggggcggcgtcaggttcgaggaagaccgttgaactagcaaaggtactggatgttaggccagaatggttagcgtcaggggagctacccaagcgggatggcaactcagagctcttgcctgtgcatgtcgatagccctttgccaccaagcgtatacagggtcgatttgcttgatatccaagccagcgccggccctggcagtttcttatcttcagagttcattgaaacaattagggctattgaatttactgaagaacatgcgcgagttatgtttggtaatcgcccagcgtcttcaataaaagtgatcaccgttactggtgacagcatggaaggcactattgatcctggtgactttatttttgtcgacacaacagtaaattactttgaaggggatggtatctatgtgtttgtttttggtaaaactatccatataaaacgactccaaatgcaaaagaactgcttagtagtgctttctgataataaactttatagcccctggcaaatcgactcaactgatgaagatcagtttcatgtattggcaaaagtgttggttaagcagtccgcggcgattaagcgctttgcctaa

SEQ ID NO: 187978 - DNA, 192 bp, Klebsiella oxytoca
atgaaaaacttcaaaggactttccctcgaatcagtagacgcactaaaaaatatcagcgccattatcgagggcggccatcttctggcaatttgctctgacaaagagttttcagaaattggcgatctggttatagattttgtacgtcagtatgcaactgctgcacacgcatatgcactggagaatcagaaatga

SEQ ID NO: 187979 - DNA, 198 bp, Klebsiella oxytoca
atgaaaactccaaaacagatgcttgaagaaatcgcaggcgaaatgatggatgctgaaatatcattagagacgctttaccaaaatacaaacaatagagccgaggcggaatcaactatttcctgcatcattcgctcactgctttataccaatgaaaaggcgcagaaatatatcgaagttctaaaagatacctctgcctag

SEQ ID NO: 187980 - DNA, 264 bp, Klebsiella oxytoca
atgaatattaaaccctgcaataacagtgatcgtgaaatagtaatgcgtggtgaattccatatagtcattgaaacaagtggagcactcagaacggcacggcacgcagatgcttacgctaatcagcttagagatgagtttaattcattgctctttgctgcgatagccagaacggataagcgtgtcgctggtcgctttaccagtctgctcaatgagctttgcgttatgactgactccacagtgaataacattttaaaaggtcgctaa

SEQ ID NO: 187981 - DNA, 279 bp, Klebsiella oxytoca
atgaaaaacgagcttatcaacgtgtggtaccaagtcacgtttatggtgaccgaaaacaatgatcgccgcgaatacacaatcttcaccgagggtagcagcgagacaggggtggcggtttctgctgcggtcagtatatgcgaagaccgcgacgatttaagcaaccccacgttcaaatctatccgcatcgctacctatggcgaggccgaatcgctcgatgcagaacttgatgcaattgccgaacggaaagagaaagaactggaggaagaagtcgatgaataa

SEQ ID NO: 187982 - DNA, 846 bp, Klebsiella oxytoca
atgaataacaaaaccgatctgaaaatcatcaacggcgagccaatgatgggtagccgaagcattgccgatatgactggtaaagaccatagcagcgttgtcgttcgcgatatcaaaaatatgcttaagcaactcaatatctatcctgcaataccgcaagataatgaaaataaatcattttttattaaaatgaaaacatacaatggtcgggaagtcattgaggaaatcttccttgatcaggacctctccacaactctcgtaacgggctatagcgttcaggaacgttataaggtcatcaagcgctggggcgaccttgaatccggaaaggctcaaccgcgcatcgctgctcagcccggacagccggagatcgggattaaccctgattttgcagcactgacccgcacggtcgcagaagccaccgcagcaggggtaatgaaaagcatcctggaaactactggcattcaggccgtcgtacatatcagcgcaacagtctccaccccgtcgacagcagctcttgtcaatcatgtcggtcatgccgcccaaacggcgcaggaggaaaccaaagaaccggagtatgtgccggtgcacaaagtttcctgggctaccggattatctgatcccacctgccgccggctggttactttctccgaccttccgaactgtcatatcgatggcgttcgcggactttgcgtgcatcgcgaatttttcatggctgcggtcgaggtactgattaaggaatccacgccacctgccaaaggccgcaaacgctggcaccatccggagttcggcggctttgagctgcgcaaagatccggcggagatcttcagggaggacaaccacggtgaatag

SEQ ID NO: 187983 - DNA, 198 bp, Klebsiella oxytoca
atgacgatgttgatcgcgagctgcgcgaaaagtttacccgccccggtagtcgttgatacggcctgcaactgggtgagggtcatctacctgaccgaccacgatattgaagttctcgaccgtcagacgaagcgcgacattctggcgcacaacaactccgtgctggctaactgcgagaagaaacccaccaataatcagtaa

SEQ ID NO: 187984 - DNA, 3321 bp, Klebsiella oxytoca
atggcctatgttccacccgtggggcaaaccactgaccccgatatttttctggataacgtcaagcgcgctgacgaactggtgaacggtccggccggaacggttaacgatcggggcggagttccgctggatacctggcgccagatgatggcgaagaatgatgaaatccggcagaacatcatccctctcagtaagcagtacatgacccttgctgatgctcaggctgatatcgcgaatattccagatgggtcaacaacctatgtgcgcagtcctgatggcggcacactggcggatgagtacatcaataacggtggcacgctggcggctaccgggcgggcgatgccatcaatgactgcgctgacaaccggctacgtgacagtggacgcaaaaggcgctgctgatattacggccgggttggttattaatgctgacggctctacgcagtcaaatgcatcatggaatgcttactatctcaaggcgcgcgagggggagacagtcacctacagcggcacggtgggttctaatacggtgggtgaggagatggcgtatctcatccagctcgacagcaacaaatcattcgttgcgccgatggcaacatggacgtcaacggggagcccgaccgacaagtccacattatcggcgacggctactcaggacggttatatatacgtccgggtacgagatacagctgaatttacgctgacgcagcgtaaaaaaacgattctggttgagtctgatattgatgtcgctggcggggttgccggttacgctactgattctgttttatttggctatgagggcgttgatgctgtaccactggccactgaggttaacggtagtgtgttgaatgccgatggcacaacgactcctgcggccgctttttcaatgtattacgtcccggttaagaagcatcaggcggttgatttcaccgggaaactgggcagcgcatcgtacagtgaacaaatcccacagatgatacagtgcgatgctgataaaaacgttgtctctgtgttgaaatattacgtatcaaaaggggttaccgaagacggttcgatgacggcgattgctgctcaggacggttttatcgctgtgcgcgtgcgaaaatccgacatcacagggattctggatttttccatcgtgttacgcaaggcgcggacattcacggaggaaacagcagaccagtccggcggtgctgccagttctgaccgggtggggatgattgaaaaaaacctcggatattttgatatctcaaaatcccaggataatgaatttgggattttctatgctctgaatgcagacgggacgaagacggcaaccgagtcgtttattacgttatacgttcccgccaaacctggcgatagcgtgaaatatcgcggccctgtcggcgtcaattccacaggaaatgccgaatggatgttccaggttgacgaaaataaaaacttcgtttccgtcctcacatactgggcctctactggagcgatagtggttcgtgaactggaagccacggccacgcaagacggctatattgcaatccgtcatcgtctcggcaccagcccgtttgtcctctctaaaaaactgtcaacgttcgcacccggcgatgaataccgcgaatccgtagacgaactggatgcaatccaggggctggacagtcgggttatcgcggactatacctgcgatgagtctgtactcaccaaaggtaaagtaattaatgcagacggctctgttactaatgcgaacgggtggtgggcgtatttcattcctgtaaaagccggggatgttatccggctgcgcggctggctgggtgcgttatcaacaacaggaacgtatgcgccgataattcagtgtgacgcgtccaaaaatttcgtcggtgttctcgcaacgttcactaacgcaggacgactggtggacgccgctattgagggtacggcaacccaggacggatatgtgtatgttcgcgtgcgaatgacggcggcacaatactacgaccacaaagtagaaaaaattaaaccggagtcagtgttagctcgtcgggttaatgccctgagttcagtcccggaaaaccgtatgcaggcgacaattgagcgcctgccgttcgagctggacaactacgccgactacaatttcaacccggtcagtcaggacaacgtggttattgcgggtgattatgtgtacgtggtgggtgtctctctggggcgaaacccggtgattttgcagcgcagtatttatggtggtgcgtggcaaaaatttgacctcagcacgattgcaggtaatccgttccactctccgaacgaacccgacggacacaacctgttttcgatagtcgtgacgaaagagggatacgtgattgttgcgggcaatatgcacgcgcacccatgccgggcggctatcaccacaaacccgcacgacatatcggcatgggaagcgatttcttttactgcatttgaccttatcacgtatccgcgattcgtcacgttctctgacggtaccgtttgtgcgttttatcgtgtaggtcgttccggcgatggcgcttactacatgtcaacgtttgacgatgcgacgaaaacgtttatcaatgaaacaaaaatcattgacgctacggactcgaacccgtatgaacagcgcattgtcgtggatgataacgacagactgcatctctgctggggctatcgtcagagcgcaggtaatgctgacacaaactacgggatgttctacggggtctcggcggataaaggtcagacgtttaccagcgcagcggggtctgcgagttttgcactgccgatgactgaatcaaactcggagcgcatcgcaaacattgcgcagtcatccggctacgtcaaccagtgcggctcctgcactgacgtcgaaaaccggttccagactgtcatatggcagcatcaggcaaacggtcgcactcaggttgtgcgtatccgctggacgggttcgggttgggccacagatattctcactgactatgaatttacagtcattaccgcaacgaatatcctggttccgattgccagtcgtcctgtactggtgcggtcccgctatggtcgcgttttcatgctctatcacacaacacagatggggcgtgaaaatcagattcgagccgttgattgtaccgatcccgataatctggttgagtggctggtaggcacctacaaccccggtgcgcaggagcttgtggttaatacgtctatcgcgcgggagcataaccagctcatgattatgctcagtcgcgggccgagctatacaggtacggatacctcaaccgaaccatacacggcagaaccggcacacctgctgactgctgtactgccctcatag

SEQ ID NO: 187985 - DNA, 1200 bp, Klebsiella oxytoca
atggaaagcattttctttacattttgtttactgctagggttagcggtcacatttttagtgtcaaaatacacaattagaaaattgattccactttcaggtcatgggcgcttcgttgagattgatgggttgcgtgggtatttggctttaatggtcgcatcccatcatttttatatattctttggttgggcgttgaatggaaactggaaagcgccagagtttacagtatttaataaccttggcgtttttgctgttagtgtattttttatgattactggttttctatttataggtaaaattgatagggcgagattagatggatgccttgatttttttggacttatgaagtctagggtttttagaatatgcccattatatatctttgcggtatttataactatctcgttatcatttcacgcaactctttatcaacttgaagatgttcatagtattgctaaagatatttttaaatggattgtatttcttggcgattctgttaatggatatcaagattcaaaaagaataactgccggtgttacatggacgttaaggtatgaatggctattttacttttctctgattggcatctattttatatcaaagaccaaatatggtttggcaaccttcggcgtcttagtagcaatgttctctttaactcaaatggattttttattctttaatagcttatatttgatattctttgttcttggcggtctatcatatttcattaacaaaaagtacaccactaaatttagctcaactctattcaaaggcaagtttttctctatgcttttgttattttcaatgttattagcattgattacgccggagaaggattatctattattgttcagcatttcctcatttgttttttttgtgattatagttatgggtggggattgcttcggtcttctttgcttaaaaacttccagaatcttaggggaaataagctatagcatttatttgatgcatggggttatttttttcttattatttaaaataatttggccagaatttataagcaatgggttttataagtatagtttactactccctgcatgtcttttgtgtgtagtgtttttttctacgttcacatttttaagcattgaacttccatttgttaaaattggtaaaggaaaatttaaattcaataaaatgctgaaacctacaggaaagaaattagattccgacacctctcggtag

SEQ ID NO: 187986 - DNA, 1215 bp, Klebsiella oxytoca
atggaatcaagagagttaatttggcctgttttattatcgtcatctttgctgatttttttgtgcatattactttccgtttactctccgatacttggtttttatattcctttaatattgttgtgctttgattttttcaacttgaagaagcttagatattccctttgcattatctccattttttcatgtgcttttttcgccgcgtcaagaaatgttattagcggtaattcatacgacgatcttttgaatgtatactatcctgcatatctggatataataaatggcggttctatcttcgttagcggaagttctggtggggtagaatttttattctatggttaccttaaagctgtatattacttgttcgatatacgaacaccaacaggattaatattctttgtgtcaatattttgtttaattggattttatatttggcttgaaaagtttggaacagaaaacgtttctgatagaaaaaaatccttatgcatagcatctgcgcttgggttgtttggctttttctcaacatctcaaataatgagacagtgtttttcaactgtatttgtccttttttcgataagttattttgaaaaagggaataaatttaaattttcattattttttattttggcgtcgattagtcacatggtgtccattgtaataataccattagtgataataataaagagaaacaacaaaaagataaacgcactgatagccgtgcttgctatcttattttctgttttcttccctattgttactcttattatcgtgcaatataaccttttgggtagtgcttcaataaagatgctctattatttcgccattccaaacggcgtatcaggaggattgattactacctttaccaagcttttaataataatgatgctgtttggatggtttttcttctctaatatgcataaaaattacaaaagccttatgttttttggcggcataatatatttatcactcttgccaataccacaagcctcagagagactattgcagatattaagcacattcttggttggatacttggcatttttaagtacttataaaatatccaatatatacagagtattgcttgctgcattcttgttatacaggatttttgtttttggtcctttcttatcagatgggaatctggcattcatggatttttggaaaacatatccatggtcttctgatgatgccttctattatcttaaatatataagatga

SEQ ID NO: 187987 - DNA, 939 bp, Klebsiella oxytoca
atgagaatcatagtgttagcaataatgctgctctcttttcagtctgtggctgcacaggtaccatcaatatggtttgcgccaaatcatagtgagtttttgggggatcgctcgaaagattatttatggtcatcaagtataaataaaataaaggtgtttaaattttattatcaagcaatactaagtagagactccagtgaattaaaaaaagaatttgattttttgcatcagaataacatcaaaatagcaatagagtttccagctttggagtgggagaagaatggcattgggtataatattgagggctttcaggagcctggatttacaaaaaaggttgtagacaagctaagaacatttaatggtgccattgattatatatctattgatgagccaattttttttgcacattacaaaagtggcgacgggcaccctcagatcagcattcaggatatagcaaaaaattcaagtttattcttgaagcctattcttgatgagtacccagatttgattgttggagacatagaaccatttatggcaatgcctgatttaagtgatcagcaggtcaaagaaatgcttggagtttttgtcgaaaagtttaatgaatattctggaaggaagatttcatatattcattctgatgttgactggaaaagagactggaaaagatatcaaataccggtccaggagtttgcggaagaaaatggtctgagatttgggttgatatttaactcatcaatgcagggtctaccttctgaggggtgggttagcaatgcgagaaataatatcataagctttcttggtagtgggtttaaagagcctaatgatgtaataattcagagttggaataaaagtcctcaaattacagttgatgatagaaataaattttccatgtcaagcttgatcattgattatgctgaaagttcaaaggcatacaaaaagtaa

SEQ ID NO: 187988 - DNA, 909 bp, Klebsiella oxytoca
atgaaatactatatcgcaataccaacttataatggcggcgagggttggcgtaaagttgcaacaaatatattaaagttctcaccgaaaaatttgtttgtgcacgtgattgactcaggtagtaaggatgatacattagcgattgcagaaaacgctaattttgatgtggtaaaaatacttggaacagattttaatcatggtggaacaaggaatcaagcagtctatacattcattgacgattatgatctaatcattttcttgacgcaggatgcaatacctcaacataattttgttgaaaaaatcatatctgtatttgacgatcaaaatattgcctgtgcgtatggcaggcaattaccacataaaaatgctaacccgctagcacagcatgctagaaagtttaattatgcagataaaagctacgtatgtggaaaagatgatataccccaaatgggtattaaaacagcttttatgtcgaattcattttcagcctatagactatcagtttttaaagagttaggaggtttcccatctgacaccattctttgtgaagatatgtattataccgctaaagctatcttagcaggatatcaagtagcatatgtagctgatgctgttgtagagcattctcacaattatacaccagttgaagagtttaaaagatatttcgatatcggtgtttttcattctaacgagcgatggattagagataaatttagtggagcttctaaggaaggacagaaatttatagtatccgaaattaaatatttactaaagaaagcccccttttggatcccatatgcatgcatgaataatctaatgaaaatgttaggatataaacttggacaactccataacaagcttcctaaatccacaatcaaaaaattaagtatgcataaacgatattgggattaa

SEQ ID NO: 187989 - DNA, 474 bp, Klebsiella oxytoca
gtgacggacaataataatgcgctggtaatggcctggtttcagcagcagcaaacccctgccgggtggttcgatctgctgctgattatggttgatggcatggtcaataacgcgggcgagctggagagccagccctttctgcggcaaatgggcgaggcgctggccgatgagcatccgctaccggcgtcggaaacgctcggtgagctggaagccaatatgaatgcgcagctaagccggtttcagtggggcgtagtgagcgttgaggttagcgatgacggcctgcggttacgccatcaggcgctgccgatgagccgcgatgaagcgcgccgcgtccgctggtgtaatgcgttttgtgccatactcgaggggctttattcccgctggctacagggacagggcggcgcggcgcacgtggtgttacagcgcgagcggctgttttcggtctctgacgttcagtttctttacttccatccctga

SEQ ID NO: 187990 - DNA, 2409 bp, Klebsiella oxytoca
atgaaacgtttaacgacgcttgcgctgctggccggtatgctctctgcgccagcgctgcatagcgaggaaacgcccccggacgcattgccgccgcttaattttccgctacctgatgcgggagccagcggcgcgtcggcgcctgccagcgagtcgaattcgcccgccacgacggagcccgcgccggcaaacgtccctcagccggcttcgctacccgcgatgccgtcgccggttgcctctggggtcgctgatacggtgccgctaacgccgattgtcggcggagacctgaacctcatgcagatgggcatgccggacggcatcatccttagcggtggacaaaaccagggcggcgccagctttacgctgccctccgatcaggtggtcacccacgcccaactgatgctggatgttaaggtctcgccggagatggcgtcccgcaacgccacgctgcagttaatgctcaacggccagccgctcggcacgctaccgctgggcgcggacggcgaggagatctcgcactatcagctggatatcccggcggcgctgatggtctccagcaacaacctgagctttaagattaacgacggcgatgcaatgcagtgccggctcgatattcacgacacctcgcgggtgaccattttgcccgcctcccactttagctgggagagccagcagcttaatatcagcaacgatttaggccatttcccgcgcccgtttttcgacagtatgcagatgacgccggcggatatcgctatcgcgtatccggagaaaccaacggcggatattttcagcgctgcggcgctggtgtcgtcatggctgggtattcaggccgattatcgcggtatcgcttttgacgcgctgcgcgatcgcctgcccgagaagcacggtattatcatcggccaccctggcgatcgggtgggcggcctgacgctaccgcaaaccgacaagccgctgctgcggatcgttgagaaccccggcaatccggcctataagctgctgctcatcgtcggccagaacgacgcggcgctgcggatggccgcttggcgactgacccgcggcgatttcgccccgcagacggccagcatggatgttgatccgcagacgatagccgtcagcaggccgtacgatgccccgcgctggatcgccaccgatcggccggtaaaaatcagcgagctgatccgccaggatcaaagtatgaccgtcagcggcgtatggcatgaaccgctacgcgtggccttccgcgccgcgccggacctctacctgtgggatggcgaaaccattcccctgcagatcggctaccgtttcccgtcggagagctggattaacgaggataggtcgctgctgagcgtgacgctcaacaacaccttcctcaacaacctgccgatgaataaacagggtccgctggagaagctctggcgtcacctgggcggcgacgcgcgtcaggaacggttcactatcccgctggcgccatacctgatttacggcgataaccagctctcgctctatttcaatctggtgccgaaggacagcgcgccctgttcggttctgctgaacagcacgattaagagtcgcatcaccgacgactcgtggatcgatttgagcggtacgcggcacttctcgttgttgccgaatctttcctattttgtcggcgcgtcgttcccgttctcccggttggcggattattcgcaaaccacgctgctgctgccggaacagccttcggaaacgcaggtcgcgacgatgctgaatctggccgcccgttcgggtaattcgaccggtaaagcgctggccaataaccgcgtgatgctgggcgttcctgacgacggcgcgaatgcgctgttcctgcgcgatcgcgatgtgctggcggtgagcgccctcgatcagaaagcgtttaatcagcgcctgctggccgattctccctatcaaccggtcgataacctgctgagcgtacgtgaaccggcgctatggacaaaaattcagcgcaggctgagcggcgactgggcctccgacggcgtggatgccgatcgctatttctcttccagcagcgcctggcgcgggtttattagctatcgctcgccgtggaacccgcagcgggtggtcgtggtggcgatggccagcagcgacgatcagctggcgaaactggaagacgatcttaattcaccgcgcatcaatgccggtattcgcggcgatacggcggtgattaccagcgacaacggcgtgcgtagcttccaggtcagtacgccgttccccagcggccagatgccgtggtacatgatggcggtgtggtatgccaaccagcactccggcctgctggcggtgctggggttaatcgccacgtccattctgggtctggcgctgaccgcgatgttcaaacgtcatgcccgcaagcgcctggagtcgggagatagccaatga

SEQ ID NO: 187991 - DNA, 2112 bp, Klebsiella oxytoca
atgaaaaagacgcttttctggttgctggtactggtactttcgcccattgccgtgctggtggtgatcacgccgatggacagccaaaagcagtatatttttggcctgctgagcatcggtattctctttgtgatggggttcagtaaaaaccgcagcgtttccgtcatcatggtggtgacatcgctgctgatgtcgacccgttatatgtatttccgtttaacgcagaccctgcattttaactccaccatcgaagcgattctggggatggggctgtttctggcggaagtctatatctgggtgatgctgctgcttaactacctgcaaacggtctggccgctaaagcgtgaaattgtcccgctgccggatgatatgagcaaatggccgacggtggatatctatattcccagctataacgaaccgcttgaggtggtgcgtgatacggtgctggctgcgcagtgtattgattatccaaaagataaattaaaaatctatttgctggatgacggtaagcgcaatgaattcgcggtattcgccgccgacgttggggttgggtatatcacccgtaacgataacaaacacgccaaagcgggcaacctcaaccacgcgatgacgttgacccacggcgagctgatctgcgtttttgattgcgatcacgtggcaacccgcgtctttttgcaggcgacggtgggcggattcctcaacgatccgatgctggcgctggtgcagacgccgcactacttctattcgccggatccctttgagcgcaacctctccgtgggccgcaatattcccaacgaagggatgctgttttatggcccgattcagcaggggaacgacaactggaacgcgacctttttctgcggctcctgcgccgtcattcgccgcgccgcgctggagcagatcggcggctttgcggtagagaccgtgaccgaagatgcccataccgcgctgaagttccagcgcctgggctggaagtcggcgtttcttgatatacctctggcggccggcttagccaccgaacgtctggtggtgcacgtgattcagcgtacccgctgggcgcgcgggatgacgcaaatattccgtctggataacccgctactgggccgtgggctgacgttccagcagcgcctgtgctatctcagcgccatgctctattatcagttcgccctgccgcgggtggtctttgtcaccgcaccgctggcctacctgctgttcaacctgaatatcatctactcctcggccagcctgattgtctcctatgcgctgccgcatctgttcctcgcgatctatgtcggctcgcgcatgaacggtcgctatcgttacagcttctggggcgaaatctacgatatcgtgctggcgttccacctggtactgccgacgctggtgaccatgattttccccaaacgcgggaaattcaacgtgaccgataaaggcggcctgctggacgtgggctacttcgactttaccgtcgtcagaccgcacctggtcgtcgcctgtctgctgggcctgggggtggtggtcggtatcgtccgcgctatcggtcacgactactttggctcagacccgaacgttatcgcgctgaacgtcggctgggggatttacagcctgatcttcctgctggccgccattgccgtggcgcgcgaaacccgtcaggtgcgaaaaacgattcgtattgatgtcgatattccggtgctgatccactacaccagcggcattgtctcccgcagccacaccgcggacctgtccatgggcggctgccgcgtaagcgcgccggataagcgtcacctgcaggatgaaatcgaagagattgagctgactctccagtccggcgcgatttcgatcccggtgcgccaggtcaccgctgacgaccagtttattcgtctgcaatttgatgaaaatattcagctctcccgccgccgcgagctggtgcgcgtggtgctggcccgcgccgatgcgtggattaacccgccgcgcccgcaggacaacccgttccgctcttttgccaccattttgcgctgcgtattcgaactgttctggctgacgtggaagacgcgccgtagccagcgtcgtcagccgcctgcggtgaatccagcgcaggaggatggcagcctatga

SEQ ID NO: 187992 - DNA, 804 bp, Klebsiella oxytoca
atgccgttgatctgcgtgtgttcaccgaaaggcggcgtaggaaaaacgaccctggcggcaaatctggcctgggcgctggcccgcgcaggtagcaaagttctggcccttgattttgatgtgcagaacgccctgcgcctgcattttggcgtccccctcagcgacgagcgcggctatgtcgcgaaagcgctggagctccatgactggagccagtgcgtattaagcgccggcagcaatattttcgtcttgccctacggcgacgtgagcgacgcgcagcggcaggccttcgatgaacgcctgagccatgacgagcatttcctgacccgcggcctggcggcattactcaattatccggggctgattacgattgccgacttgccgccgggcccttcgcccgcgctaaaggcgctcacttcgcttgccgatatgcatctggtaccgctgctggcggataccgcctcgacgtccgcgctggcgcacgtggaaaagcagcgtctgaccgggggcgaactcaaccataaactcggacactattttgtgatcaaccagagcgataaccgtcgccaggtcagtcgcgatgttacggcgttaatggaagaaaagctgggcgatcgtctgctgggcatcatccatcgtgatgaaagcgtggtggaagcgaatgcttcccagaagtcgatcctggactttaactcctcctccgcagccgcctttgatattgaaattattgccaaaaaaatctctgcgcagttgggtatcaatattggtgacggcaaggtgcatagccagcctcgcaggtcagggctttaa

SEQ ID NO: 187993 - DNA, 471 bp, Klebsiella oxytoca
atgccgggcttcatgtttttaagcaaaagtggccagcgcgtcgatgcacgggattaccataacaggacaaaccattccgagggcgctaaattgggcagagacgttttgcagggattttggggaagaaaaaaaagacaaaaaaccgggcgctgcgcccggtcttcttctgctctaaacaacgctcggctagctcaatctgcggatcgtgtccgcgccactggcgataaagttctgctaaatcagtactattgccgcgagacaatatcgcctcgcggaagcgctggccgttttcacgggttaactatattagatttcaactacttgcccattctcatcaaccttgtaatatcttcccgcctcaataccctcctccccctcataaatcactttaatacgattacgctcaccatcgtgccacaccaccgaggcaacaccgcccttaccgatagtgaaagactcaagaatacgtga

SEQ ID NO: 187994 - DNA, 621 bp, Klebsiella oxytoca
atgtcatcaacgccgcgtcctcatgatttagtctggttgaataatgccgccgcgctggaggcgattgaggagtcctgggtcgcgcagcactggcgtattagcctgccggtggtggtacgacgcgacgttgatgctaacgcccgcattccggtgggcgtacgggggatgaagcgcgatcagcgggccgcaggctgggtacagagggaaaatatcgtccgtaccgtcagcccggaaaccctcgccgatcgccaacagctcctgcgctcgccgtttgtctcccagccgccggtacaggcggcgatatcactgaccttacactcctggccgtggcgctggggcattaccggcagcaccggctacgcgctggccaccgagattccggtacttcacgccgccagcgatctcgatctgctgatccgcgcgccgcagccgatcgctcgcgaagcgctgctcgcctggcagtcccgcgtcgcgcagctgccctgccgggcggatacccaggtcgaaacgcccgcaggggctttcgcgctaaatgagtggctgcgcgatggccgcgtcctgctgaaaacgtcccgcggcgcgcgcctgaccgctgcgccgtggaacagggaggaagcatga

SEQ ID NO: 187995 - DNA, 699 bp, Klebsiella oxytoca
gtgggggccggggcatcgggtcaagccgccgcgcaggcggtgaatgaatttaccccggagggaaaacattcgcttgtcgcccttatcgccggaggagcgaccgccgcgcggcaggagatggaaaccgccgcgagtcattacgatcttggggctttcgaacttgaggctctgcgattcagcaaccaggatatgctgctggcgctgacggttagcggcaaaacgccgtgggtctggggcgcgatgcgccacgcctggtcgctgggggcgccgattgcggttgtgacgcagcagcccgccagtgaagccgcgcagctggcggatatcattatcgccccgcaaaccgggccggaagcggtggcgggtttcgggaatccgaaagcgcgcattgcgcagcggcagatcctgacgatgctgaccaccgggctggcgattcgcgaaggacgggtctatgaaaacctgcgcgtcgatctgcaggccaatacgccgcacgaggccgagcggcagatagcgatcgtgatggcggcgacggggggctcgcgcagcgaggccaaagccgcgctggccagctgcaatcagcactgccggacggcaatactcatgctcctcagcgggctggatgcctggcaggcgcgcgagctgctggcagagcataacgatcatctgcggattgcgctacgcgcggcgcagacggttgcctga

SEQ ID NO: 187996 - DNA, 1302 bp, Klebsiella oxytoca
atgaagggcaaactggttcagctgcgcgccgcggcggtcgagcagctcccgctgatgctggcggtcaaccaggatctcggcggcctgcggcgacagcaccagctggtggtcgatacgctgagagagtttgttcagggtggcggcaatattgccgaccagctcgatgtccggggtatagttgcgctcttcgtaagccggcagcacgtcgatatgcaccagcgtggcgttgccgttattccacatggccggttcgtactccaccgggctatagccgatgcagatgaccaggtcggcgagatgcaggagtcgatcccccgcctggttattgaacagcccaacccgcccggcgaagcgggtaaagtggtcctgattcaccgcgccggcggcctgataggtgctggtaaccgggatatggctttttttcagcaattcacgcagcgccgcgctgttttccgcctggctggccatcaggccgagcaggaatatcggatttttagcgccggcaatcatcttcgcgactcgctcaatggcttcgtccggcgccgcgccggtctgcggcgcatcgctggcgggcagaaccctggcgtggaccggcccgtcgaccacgtcctgcggcaggctgacgaaggcgctgccgggacgtccctgctcggcggcgcgaaacgcgttggaaaccacttccgccagcgcttccgcggcggtgacttccaccgagtatttggttaccggactaaacatcgccaccgtatccatactctggtgcacctgtttggccttgtcggcgcgttttaccgcaccgcccagcgccaccaccgggtcgccttcgctgtttgcggtggccatgccggtaatcaggttggagcagccggggccggacgtgaccagcgcgacgcccgctttcccggtgatgcggccaaccgcggcggccataaacgcggcgttggcttcgtggcgtaccggaataatgcgaatggaggagtccagcagcgaatcgaagactttatcgattttggcccctggaatgccgaacacctgttgtacgccctgcgcctcaagctggctgacgataaggtcggcgccgtgcgcccactggcgcggttgatgttgattatccacgagaatctccttagttttcgactgagcgaatggcggcatcaagattgtcaggatgcagatccgcctgcaggaaggcgctatcggcaggaaggtcaatcatcaatttgtggatctcaccaaaggtcagcacgccgtggtcgagctgataatcgagcagatggccgccgccctggcggtcatcggtga

SEQ ID NO: 187997 - DNA, 1572 bp, Klebsiella oxytoca
atgcaaatgattacctcacgacagaacagattattgaaatttctcctgccccgcagagaatacgttacgctgctgaaaattgctgaatatttaaatgtttcagaaaaaacggttcagcgtgatttacgctttttagaacagtggttatctgagtggaaaatgactatcgacaaacgctcaggcaccggcgtgatgctgatcgctgataatgtcacggatctgctgcaattagaccaattactcagtaacgagggggaggacagcgatgtcatgatgaataactcccggcgtgtgaaaattgcttcgcagctcttaagtgagactccgcgagagacatcaattaataagctctctgagcgttattttatcagtagtgcatctatcgttaatgatctgaaaattattgagtcatggattgctccgctcggcttaacgctgattcgtagccagagcgggacgcatattgaaggcagcgaaaacagcgtccgccaggcgatggcgtcgttaattaatggagtgattaatcataatgagcccggctgtattatccattcccggctggactcaggaagctataaagcgctggtgcattattttggtgaggatgacgttttatttgttcagtcattattacaggaaatggagcgcaagctgtgctggtcattaggcgaaccgtattatgtgaatatttttacccatatcctcattatgatgtatcgcattacccgtgggaatgccttaccgcggcgtgagcaggggcagcagatttttgatgagacgatatttagcgttgcccagaatatgctgcgaaaaattgaacaccgtattgaccattcgctgccggaagatgaagtctggtttatttatcagtacatcatctcctctggcgttgtggtggaagagcgagatgatgtcagcatggtgcgctatatgcattctagcgatgaggcccgacaaattaccgatcgtctgattagcgctttttccaccatgattgatctcgatttaaccgccgatcgcgcgttatacgatggcctgctcattcatatcaagccgctcattaaccgccttaattttcggatttatattcgtaaccctctgcttgaggatatcaagggcgagctgacggacgtgtggccgctcacccagcgggcggtcaatcaggtttttagccgctggggcgagcgtgcggtttccgacgacgagattggctatctcaccgttcatttccaggcggcgatggaaagacaggtcgccagcaagcgcgttctgctggtttgttctaccggaatcggcacatctcacctgttgaaaagtagagtgttaagagcgtttccagactggaccatcgtcggcgtggtttcggcaagcagcctgcatacccttcagccgcaggacaagattgaactggttatttcgacgatcaatctgccggaaatagctttgccagtagtctatgttagcgcattttttaatgatgccgatatccggcgggttacggaaaaaatcgttaccgacaaattacatcgcgcggcaatatctgctgtagataatgaagttttatatccatga

SEQ ID NO: 187998 - DNA, 471 bp, Klebsiella oxytoca; identical to SEQ ID NO: 178424

SEQ ID NO: 187999 - DNA, 315 bp, Klebsiella oxytoca
atgaatattgtctgtgttgctgcctgtaccgcaggtattgctcatacttatattgcacgtgagaagctgattaaaggcgcgaaagcgctgggccacaatgtcaaagtcgaaacccagggaaccattggtactgaaaatgaactggcggcggaagatattgacgctgcggatgtcgttattcttgccattgatgtgaaaattaaaggtgaagagcgttttaaaaataaacggattgtcagagtaaaaacggaagtcgtgattaagtcgccgattcagtttatcgaaaaggtcgaaaaatccttagcgaatgcctga

SEQ ID NO: 188000 - DNA, 1092 bp, Klebsiella oxytoca
atgagtgagaataaaactcccgtctcacaggaaattaagaagcatttattaaccggtatttcatggatgataccgctgatcgtcgccgccgggatctgcatcgcgctgggacaagtccttggcgggacgaacgttggcgagaaaaccggcaccattccgtggatgttaaaccaaatcggcggctggggaatggggctgattgtgcccttgatctgcgccgctatcgcttactccattgccgatcgtcctggattcgctccgggtttgatcgtgggttttgtctgcgggcaaattcataccggttttattggcggcatgctgggcggcttcctcgtgggctacacggtactggcgctaaaacactatattcggctgccgaagtcgatgcaggggctgatgccgattatggtgctgccggtattaagcaccatcattagcggtttgctgatgatgaccctgatcggcaagcccattgcctggctgcaggacgcgctgattcacatgctggagtcgatgcagggcggctcgcgtttcctgctgggcgccatccttggcgccatggcgaccttcgacttcggcggtccggtgaataaaaccatgtcgctgtttgccgatggtctgctggtcagcggcgtttacggcccggaagcggtgaagtttgtgggttcgataatcccgccgttcggtatcaccctctcgttcctgctgacccgccataaatatacccgtgctgaacgcgaagccttgaaggccgcgttcccgatggggatctgcatgatcaccgaaggggtgatccccatcgccgcccgcgatctgctgcgcgtcgtgggatcctgcgtggtggcgtcagcggtggccggtggcctgatcatgacctggggcgtggagagtccggtgccgcacggtggaatgtttgtggtgccgctctttacgcatcccctgctgttctgcctctctctggcgattggcaccgtgatttgcggtgtgatgctctcgctgtggaaaaagccggtaaccgagcgcgatgaagagtttgatgagctgaacgaccaaaaggtcaaagacgacgaaatcacctttaccctcgaataa

SEQ ID NO: 188001 - DNA, 852 bp, Klebsiella oxytoca
atgtttgccgatatgaaaagtatggtgatcaaagcctggcgtgaacggtatgccctgctggcgattaactgcatgaacctggaaagcgcacgcgcggcggtgcgcgtggcggaaaaacatcgcgcgccgattattctcaacctgtatcaggggcatctgtcgcactttccggcgacgacggcggcggcggtagtcagggtactggcggaggaggcgagcgtacccgtgacgttaagtctcgatcacggcaaagagccgataaaaatacgtcaggctttccgcgccggatttagcgggttaatgatcgatgcttcggcgttcgcgctggcggagaacatccgccagacccgagaggtcgctgaactggccgccagcgttgggctgtgcgtggagggcgaactggggcacctggcggatgcgccgcgctacgaccaggccagcaatgccgatttaatgacccagccgcaggaagtccctccctttatcgaacagaccgggattgatctgctggcggtctccgtgggaaccgcccacggtatgtacgcccccggcgtaaaaccgaagctcgatttcgaccgcctggcgcagatacagcgcgcgtcatccgtgccgctggcgctgcacggcgggagcggtacgccgttcgagcagctgcaacgttgccccgaattcggggtcgcaaaaatcaacgttggggcggcggtatttgaagcggggaaagcggcgctgctgcacaccctgtgccacgacagcaccattgagctggccgatgcgctatcggtgatggagcaggccagcgctgacgccatcgttccctatttacacgcatccggctcaatcaacaaagcctga

SEQ ID NO: 188002 - DNA, 861 bp, Klebsiella oxytoca
atgttagtttcaatgcacgaattacttaaacccacccgtgaacatggttttgctatcggcgcatttaacgtggcggatagctgttttattcgcgccgtggtggaagaggcggaagcgacaaatacgccggcgattatttccattcaccccagcgagcacgattttgttggcgacgcgttttttagctacgtgcgggatatcacccagcgcagccgcgtgcctttcaccctgcatctggatcatggcgcctcggtggaacatgttctgcgcgccattcagtgtggcttcacctcggtcatgatcgatggttcgctgctgccttatgaagaaaacgtggccctgacccgcgaagtggtgcggctggcgcacgcggtgggcgtgtcggtcgaaggtgagctggggaccatcggccagaccggaacctctgtggaaggcggcgtgtcagaagtcacctataccgacccggcgcaggcggaagatttcgtcgcccgtaccggcgtggatacgctggcggtagcgattggcaccgcgcacggtatctatccgaaggggatgcagccggagctgcagatgcacattctgcgcgatatcgccgggcgtctgtcgattccgctggtgctgcacggcggctcggctaatccggatgcggaaattgcggaatccgttacgcttggcgtcggcaaaatcaatatttccagcgatatgaaatatgcctatttccagaaagtgcgcgaaattctgacaaaagagacatggtgggatccgaatgtcatttatccggaaccgattaacgccgcgcggaaggtgattcgccacaaaatgaagctctttggctctaccggcaaggccagcctgtactaa

SEQ ID NO: 188003 - DNA, 933 bp, Klebsiella oxytoca
atgaagtatttggggctggatatcggcgggagcaaaatcgccgccgtagtgatggatgaacaaggccatgaatggaggcgttttcgcattgaaacgcgaaaacagacccggcagcagtttatcgcaacgctggtggcgttaatcaccgcgattggggatgagctggctcagcctttggctatcggtatcgccctgccggggagtatctccccgcagaccggcaagatccgcaatgccaatattcaggtcatcaacggctgccgcttacaggatgagcttgagcagcgcctgggccagccggttgtgctggcgaacgatggcaactgtttcgccttatcagaagcctgcgatggcgcaggtgccgattattcgctggtatttggcatgacgctggggaccggatgcgggggcggtattgcgcttaatcgccagattttccccggcgcgtcagggattgcggcggagtgcgggcatatcacgctgccgggatatcaggaggtcaacgatgggccgcccgagcgctgctactgcggaaaatataactgcgtcgagtcctttatttccggcaccgggctgagcgcgcgctatcgtttgatgacccggcaggcgctcagcagtcaggctattatcgcccgggcgctggagggcgagcatgccgcctgcgagcaggtgctgcgctttcgccagcagctggcgcggacgctggcgacggtggtgaatcttatcgatcccggcgtgattgttctcggcggcggtctgtctaacgtagcgctgctggtgaacgacctggaggcggatgtcgccccgctggtgtttaccgaccatttcaccacccccatcgtgcctgcccgacatggtgacagtagcggcatgcgcggcgcagcctggctggccgtccgcagcggagtcgaaaatgaaacgttcacagattaa

SEQ ID NO: 188004 - DNA, 675 bp, Klebsiella oxytoca
atgaaacgttcacagattaactacgcgattgataaagcgcatgctatcgccgagtcctttcgcatttgcttacccgagtttgcctgctttaccgccgatatctgggcgaaaaagcggtttgaagagtggcgagaagttcgggatctacagcttggctgggatattaccgattttggcagcggccgttttcaggaaaccggactgacgctgttgaccctgcgtaacggcgcgccgggcgattcgcgctatcccaagccctacgccgagaagatgttgcagattcagcaggatcagcaaaccccctggcattttcattatcacaaaatggaagatattctgaaccgcggcggcggccggctctgtctgcagctggcatgggcgacagaagatgaacggctggatatgcagcgcagcgtgagcgtcgcggttgatggccgccagcgcacgctgaaaccgggagacaccctggttcttaaccccggggagggcgtttgcctgccgcccacgctgtaccaccgtttttgggctgaaaacgcgctggtgatgggctgggaaatttcgatggtgaacgatgataagcgcgacaaccgttttctggaagatagcggccgcttcccgatgattcaggaagatgaaccgaaaaaatggttattgtgcagtgagtacgggcgctga

SEQ ID NO: 188005 - DNA, 732 bp, Klebsiella oxytoca
atggatttagaaaacatctttcgtgacgttaagctaagcaaaacggaaatgaccgtgctgcgttttattcagaacgatcctgagcaatgcgttcgcgaagggatccgcgccgtggcggagcactgttatagcaatccgtcttcgctggtacgcctggcgaagaagctgaaattcagcggctggctggagctggtctattttattaaattcaatatcactatgcccaaactcgatgtgaccaacgacatcgattatatgagcattcagccggtggagcggataacgccattgctggaaagcctgcaacatcaccgcattttgattcacggcagcgggttttcgcagctgatcgcccagtatatttataataaatttttggtgaccggggtgaatgccagcctggcgctgtggccggattacgaaatcctcgagcagaagaacgccgccaaatttaattcgatctggattatttccaaatccggacgcagcagttcggcgctgaactgggtgaaggcgctggaaggaaaggagattaacctggtctgctttaccggcgattatcaaagcccgctggcgcaggcggcggatacggcgtttatcatccatgatccgcagaagttcgatgatgatatttactggagtaaccccttttttggctactgcatactcggctttgagcggctgctgaagatgtggtttatgcagacggggatccccggaggcggcgcctga

SEQ ID NO: 188006 - DNA, 1380 bp, Klebsiella oxytoca
atgaaattaaccgtattaggcgggggcggcgttcgctctgcgtttctggcaaaatctctggcatataacgcgcatcgcattggtttaacggaagtggtctttctcgacagctccgcggagaatctgacaatattcggcgagatcgcccgctatgtgtttaatgccattcgcccggatattcatttcagcgtaaccagcgacccggtgccggcgctaaaaaatagccactatgtgataaccaccctgcgggtgggcggcgatgagagccggatccgcgacgagcgtatcgccctggcgcacaacacgctgggccaggagaccaccggcgcgggcggtttcgccatggcgatgcgttccattccggcgattcttcactactgccgcctgattgaagagcacgccgccgaagatgccattctgtttaacttcaccaacccgtcagggctggtcaccgaggcgattatcaaatccggctttaagcgtcgggtgtacggcatctgcgatgccccgtcggagctgattcgcgagctgcccgagatcctcggctgcgacgagcacgatctcggcgtcgagtgctacgggctgaaccacttctcctggtttacccatttcaccgtgcgcggcgaggatgtcaccgagcgcctgatcgccagcccggacctgtatcgcaagacggcgatgcagtacttttcgccggagctggttcagctatgcgataagcagctgcttaatgaatatctttactactactactatcgcgaagtggctttgaaagcgattcagaacgcgccggaaacccgcggcgagcagattgcgcgcatcaatcacgatatgcgcgaagcgctgctgaccgttgatgtcaaagccaacccggaagcggcgtttaccatctggatgaagcactatctgcgccgggaaaatagctatatgcagaacgagtcgcagcaggaaaaattccatacccgcgagccgttgaccttaaagcaatttatcgaggagccggataccggcggctacgcgggcgtggcgctggatattctggaggcagtgaacagcaccaccaccaagcgcatcgtggtatcgatgcccaacaacggcacgctggacttcctgcgcccggatgatgtgattgagatcagctgcgacctgagcaaagagggcctgaagccggtgacgccgaagcatgtgccgacggcgcagaagaatatgatcgccagcgtgaaagagtatgagcggctggcggtggcggccattctgcagcgcgataaatcgctggcggtacgggcgctgatggcgcatccgctggtcggctcttattcgctggcaaaaacgctggttgaagcctatctcgacgataagcagttctccgactggcaataa

SEQ ID NO: 188007 - DNA, 1560 bp, Klebsiella oxytoca
atgtctgtaatacgtcaacgtattctggagaatatgcaaaaattctccagagcaatgatcggtgcagtattgttcttgccggtcatcggcttaattttggcactcagttcagtcttaactaacccaacattaatttcggagaccagttttttacaccagctcggacagctcctcggcgataccttctggccattatttggcaatctgggattactcttttgcgtcggtatcagctatggcctggcaaaagataaaaaaaccgaagtggcgctggtgtcggtaatgtgttttatcatgtttcttggcgctaaccactcgtggctggaacatacccacggactcgcggaaaaaattaacggcgaatattacggtaccgggcagactcagctgctggggtttgtggtagtcgatatgggggtcttcctcgggattattctcggctgcaccatcgcctgggtgcataacaaagtgtcgacgattgaactgcccggcgcgctctccatgtacggcggagccaagctgacgctggtggcgatgaccccggtcgtcattttctacgccatcgcctttacctggatctggccgtttatgacccacggcatcgcggcgctgaccggctttatgaaaaacgccggcgtggcgggggtcttcgtctacggcttctttgaaaaattcctcatccccaccggcctgcaccacttcgtctggtcgccgttccagctcacgcaaatcggcggtacgctgaacgtcgacggccaggtcgtctccggcacccaggcgattttcctcgcctatatgcgccacccggatttaaccccggtgatgaacgaggcgctgcgtttctcgcagcaggggatgaccactatcttcggcctggccggcgcctcgctggcgttctaccacacggcgaaaccggagaaaaaaatgatggccaaagcgattctgctaccggccattatcacctctatgctcaccggcatcaccgagccgattgagtttaccttcctgttcgtttcgccgctgctgtgggtgatccacgccacgttaaccgcggcctcgcaggcgatttgcgacatctttaccgtgcgtccctggggcgcttccgggctgattgagttcctgatttacaacctgccgctgccggtctccctgacccgctggcccggctacgtgcttatcgggattggtcagttcgccgtttactacgttatcttccgcacgctggtcgttaagttgaatcttaaaacgccgggtcgtgaagacgatgaaaatgtgaagttatatagcaaagctgattaccgaaaaaaaatgggcgaaccgcagtcggtgaccaacgagattattaatggtctgggtggtaaagagaacattatttccgtcgacaactgttttacccgcctgcgcgtcgctattcataatatggatctggttgacgatgcgatattaaaaagcaccggcgcaaacggcgtagtacgaaatcgaaatgaagttcaggttatttacggcgtcaaagtgggacaggttcgttcccgggttgatagctggctagcagaaaattaa

SEQ ID NO: 188008 - DNA, 1716 bp, Klebsiella oxytoca
atgaaatttctcagaaagctgattctctggctgctgattgccctgctggtggtgattattgccgcttacttcctgctgcaaacccagtggggcgggcgccaggccagcgcctggctaagcgacggtaccggctggaaggtctctttcaacaagatggaccataatttctcctcgccactgcacctgcagctgcaaaacgtcaccctcggacgcgacggcaaacccgccacgctggtggcgcaaacggtggatatcgggtttagcagccgccagtttagcgacccgctgcatgctgacgaaatcgtcctcagcgacggcacgctgaacttctccccttcttccgcggcgctgccattcgccgccgaccgtctccagttgcgcaatatggcgttcaatagccctgagagcgactgggatctgagcgcgcagcgcgtcaccggcggcgtcagcccgtgggcgccggaagcgggcaacgtgctcggcaagaaaacgcagattcagatgagcgccgggtcgatgacgctcaacggtattgaagccagcaacgtgctgattcaggggaatattgataacggcgaagtgtccctctcgaccattggcgcggacgtcgcccgcggtacgctcaccggcacggcgaaacgcagcgccgacggcggctggcaggtcgataatttgcggctcaacgagattcgcctgcaaagcgataaatcactcgccgactttttcgcgccgctgaccaccctgccgtcactacagattggccgccttgatgtgaccgacgccagcctgcaggggcctgactgggcgatcgccggcctcgatcttaacctgcgcaacctcaccctgagccgcggcgactggcaaagccaggagggtacgctgtcgatgaacgctaacgaatttatttacggctcgctgcacttcctcgacccgatccttaacgccggattttcgccgcagggcatcgcgctgcgccagttcacctcacgctgggagggcgggatggtgcgcacgtccggcaactggctgcgcgccggccatgcgctggtgctggatgacgcggcgttcgccgggctggaatatacgctgccaaccaactggaagcagctgtggatggcgccgctgcccgactggctgcaaagcctgacgctgagaaagttcagcgccagccgcaacctgattatcgatattgaaccggcgttcccgtggcaaatcaccgcgctcgacggctacggcggcgagctgcagctggtgaaaaaccgcagctggggcgtgtggagcggtagcgcgacgctgaacgccgccgccgcgacctttaatcgtattgatgtccgccgcccgtcgctgaagctgagcgccaatgcctccacggtgaacgttaacgagctcagcgcctttaccgagcgagggatcctgcaagccaccgcggcggtgtcgcagctcccgcagcgcctggtcaacctgagcctgaacggtcgcggcgtgccgctgaatattttgcaggcctggggatggcccgcgctgccggtttccggcgacggtaaccttcagctgacggcgaccggcagcgtgctggcggatgcgccgctgaagccgaccgtcaacggccagctgagcgcgataaatatggagaaacagcaggtggcgcaggtgatgcgcaacggggaggtcaccagcacccagcccccttcagcgccggcgacaacgacgccctga

SEQ ID NO: 188009 - DNA, 1392 bp, Klebsiella oxytoca
atgtccgttaacaccgcagaatcagaaaatgcgcaaccggttgcgcataagcaaaccagcgaattaatctaccgccttgaagaccgcccgccgctaccgcaaaccctgttcgccgcattccagcacctgctggcgatgtttgtcgcggtcatcactccggcgctgttaatttgccaggctctgggccttccggctcaggacacgcaacacatcatcagcatgtccctgttcgcctccggcgtggcctccatcattcaaattaaagcctggggcccggtggggtctggtctgctctcgattcagggcaccagttttaacttcgtcgcgccgctgattatgggcgggaccgccttgaaaaccggcggcgccgatgttccgaccatgatggccgcgctgttcggcaccctgatgctggccagctgcacagagatggttctctcccgcgttctgcatctcgcccgccgcattattaccccgctggtctccggtgtggtggtgatgattatcggcctgtcgctgattcaggttggcctgacctccatcggcggcggctatgccgccatggccgaccataccttcggtgcgccaaaaaacctgctgctggcagggatcgtgctggcgctgattattatccttaaccgccagcgcaacccgtacctgcgcatcgcttcgctggttatcgcgatggcggccggctacctggcggcatggctactcgatatgctgccggccaataccgcgccgacggaaagcagcctgattatggtacccacgccgctgtactacgggctgggcatcgactggaatctgctgctgccgctgatgctggtgtttatgattacctcgctggaaaccatcggcgatattaccgccacctctgacgtctccgagcagccggtttccggcccgctatatatgaagcgtctgaagggcggcgtgctggccaacggtctgaactcgtttgtttcggcggtattcaacaccttcccgaactcctgctttggccagaacaacggcgtgatacagctgaccggcgtcgccagccgctatgtcggtttcgtggtcgcgctgatgctgatcgtgctcggcctgttcccggcggtaagcggcttcgtgcagcatattcctgagccggtgctcggcggcgcgacgctggtgatgttcggcaccattgccgcctccggcgtgcgtatcgtctcccgcgagccgctgaaccgccgcgcgatcctgattatcgccctgtcgctggccgtcggcctcggcgtttcccagcagccgctgatcctgcaattcgcccctgactggctgaagaatctgctctcctccggcatcgctgctggcggcatcacggcgattattctgaatctgattttcccgccagagaaaaactga

SEQ ID NO: 188010 - DNA, 1203 bp, Klebsiella oxytoca
atgtttcatctcgataccttatcgacgctcgttgccgcaacactcgtgttgctactgggtagaaaactcgttcaaaccgtccctttcctgaagaaatacaccattcctgaacccgttgcgggcggcctgctggtcgcgctggcgctgctggtattaaagaaaagcatggatatcgaaatcgatttcgatatgagcctcaaagatccgctgatgctggctttctttgccactatcggcctgaacgccaacctcgccagcctgcgctccggcggcaaagtgctggggacgttcctgattgtggtggtggggctgctgctgctgcaaaacgcgctcggaatcggcatggcgaagctgcttggcctcgacccgctgatggggctgctggccggttcgattaccctttccggcggccacggtaccggcgcggcgtggagtaaattgtttgttgaacgctatggctttgccaacgctaccgaagtggccatggcttgcgcaaccttcggcctcgtcctgggcggcctgatcggcggaccggtggcgcgctatctggttaagcactcttcctccccggacggtacgccggacgatcagctcgcgccgaccgcgtttgaaaagccggatatggggcgcatgatcacatcgctggtgctgattgagagcatcgcgctgatcgccatctgtttgacggtagggaagatcgttgcgcaactgctggcgggaaccgtatttgaactgcccaccttcgtttgcgtgctgtttatcggcgtgatcctgagcaatagcctgtcggcgctgggcctgtaccgcgtgttcgaccgcgcggtgtcggtgctgggtaacgtcagtctgtcgctgttcctggcgatggccctgatgagcctgaagctgtgggagctggcgtcgctggcgctgccgatgattattattctggcggttcaggcagtggctatggcgctgtatgcggtgtttgtgacctaccggatgatgggaaaaaactacgatgccgcggtgctggcagccggccactgtggtttcggcctcggcgcgacgccgacggcgattgccaatatgcaggcgattaccgaccgtttcggtccgtcgcacatggcgtttctggtggtgccgatggtgggcgcgttttttatcgatatcgttaacgcgctggtgattaagctctatctgctgctgccggtatttggctga

SEQ ID NO: 188011 - DNA, 1512 bp, Klebsiella oxytoca
atgaccgacaaaaaatatatcgtagcgctcgaccagggcaccaccagctcccgcgccgtggtaatggatcacgatgccaatatcgtcagcgtttctcagcgagaattcgaacaaatttatccgcgtccaggctgggttgaacacgacccgatggagatctgggcatcgcaaagctctacgctggtcgaagtgctggcaaaagccgatatcagctccgatgaaatcgcggcgatcggcatcaccaaccagcgtgaaaccgccatcgtgtgggagcgcgaaaccgggaagccgatttataacgccatcgtctggcagtgccgccgtaccgccgagatctgcgaacagctcaagcgcgacggcatggaagagtacatccgcaaggccaccggcctggtggttgacccctacttctccggcaccaaagtgaagtggatcctcgaccacgtcgaaggcgcgcgcgaacgcgctaaacgcggcgagctgctgttcggtaccgtagatacctggcttatctggaaaatgacccagggacgcgttcacgtaaccgactacactaacgcctcgcgtaccatgctgtttaatatccacgagttggactgggacgacaaaatgctcgatgcgctggatatcccgcgcgccatgctgccggaagtgcgcaagtcgtccgaagtgtacggccagaccaacatcggcggtaaaggcgggacgcgtattccgatcgccggtatcgccggcgaccagcaggctgcgctgttcggccagctgtgcgtgaaagaggggatggcgaaaaacacctacggtaccggctgctttatgctgatgaataccggcgagaaagcggtgacatcaacgcacggcctgctgacgactatcgcctgcggcccgcgcggtgaggtgaactatgcgctggaaggcgcggtgtttatggcgggcgcctctattcagtggctgcgcgatgagatgaagctgattagcgacgcgttcgattccgaatatttcgccaccaaagtgaaggataccaacggcgtgtacgtcgttccggcgtttaccggcctcggcgccccgtactgggacccgtatgcccgcggcgcgatcttcggcctgacccgcggcgtgaactccaaccatattattcgcgccaccctggagtcgattgcctatcagacgcgcgacgtgctggaagcgatgcaggctgactccgggatccgtctgcacgccctgcgcgttgacggcggcgcggtcgccaacaacttcctgatgcagttccagtccgatattctcggcacccgcgtggaacgcccggaagtccgcgaagtcaccgcgctgggcgcagcctatctggccggtctggcggtcggtttctggcaaaacctggatgaactgcaggagaaagcggtcatcgaacgcgagttccgtccggggattgaaaccaccgagcgtaactatcgctacagcggctggaagaaagcggtaaaacgcgcgctggcgtgggaagagcacgacgaagcgtaa

SEQ ID NO: 188012 - DNA, 852 bp, Klebsiella oxytoca
atgagccaaacatcaacactaaaaggccagtgcatcgcagagttcctcggtaccgggttgttgatctttttcggcgttgggtgcgtcgctgcgcttaaggtcgcgggagccagcttcggtcagtgggaaatcagcatcatctggggtctgggcgtcgccatggcgatttacctgaccgcaggggtttccggtgcgcaccttaacccggcggtcaccatcgcgctgtggctgttcgcctgctttgacggtcgtaaagttgttccatttatcgttgcgcaattcgctggcgccttttgcgctgcggctttagtttacgggctttattacaatcttttcttcgatttcgaacatacccacaatatggtgcgcggtagcgtcgaaagtctcgagctggcaggcattttctccacctatccgaatccgcatatcaattttgtgcaggccttcgcggtagaaatggtgattaccgctatcctgatgggcgtcattctggcgctgaccgacgatggtaacggcgtgccgcgtggcccgctggcgccgctgctgattggtctgctgatcgccgtcatcggcgcatccatgggcccgctgaccggcttcgccatgaacccggcgcgtgatatcggaccgaaagccttcgcctggctggcaggctggggcaacgtcgccttcaccggcggcaaagatattccttatttcctggtgccgctgtgtgcgccaatcgtcggtgctgcgctgggcgcattctgctaccgcaagctgattggccgccacctgccttgcgacacctgcgtcgtcgaagagaaagaagccgcatcccactctacgacgcaacacaaagcttcgctgtaa

SEQ ID NO: 188013 - DNA, 240 bp, Klebsiella oxytoca
atgtcattagaagtgtttgagaaattagaatctaaagttcagcaggcgattgataccatcactctgttacagatggaaatcgaagagctgaaagagaagaacaacacgctggcgcaggaagtacagagcgcgcagcacagccgtgaagagcttgagcgtgaaaacggtcagctgaaagaacagcagcagggctggcaggatcgtctgcaggcgctgctgggccgcatggaagaagtctga

SEQ ID NO: 188014 - DNA, 990 bp, Klebsiella oxytoca
atgaataagtggggcgtggggttaactctgttgctggcatccgccagcgttctggcaaaagacattcaactattaaacgtttcttacgatccaacgcgcgagctgtacgaacagtacaacaaagcctttagcgcgcactggaaacaagaaaccggcgacaacgtggtgattcgtcagtcccacggcggctccggcaaacaggcgacctcggtgatcaacggcattgaagccgacgtggtgacccttgcgctggcctatgacgtcgatgcgattgccgagcgtggccgaatcgacaaaaactggctgaagcgtctgccggataactccgcgccgtatacctcaaccatcgtgttcctcgtacgcaaaggcaacccgaagcagattcacgactggaacgacctgattaaaccgggcgtgtcggtgattaccccgaacccgaaaagctccggcggcgcgcgctggaactatctggcggcatggggctatgccctgcaccagaacaatggcgatcaggcgaaggcgcaagagttcgtaaaagcgctgtttaagaacgtcgaagtactggattccggcgcccgtggcgcgaccaacaccttcgtggaacgtgggatcggcgatgtgctgattgcctgggaaaacgaagccctgctggcgaccaacgaactgggtaaagacaaatttgagatcgtgaccccgagcgaatcgattctcgccgagccgacggtttccgtggtggataaagtggtcgacaagaagggcactcgccaggtggcggaagcgtatctgaagtacctctactcgccggaaggccaggagattgcggcgaagaacttctatcgtccgcgcgatcctgagatagcgaaaaaatacgcgaatgagttcccgaaactgaagctgttcaccatcgatgacgtgtttggcggctggacgaaagcgcagaaagagcacttttccaacggcggcaccttcgaccagatcaaccagcgttaa

SEQ ID NO: 188015 - DNA, 756 bp, Klebsiella oxytoca
atgcgaagagtacgataccttttattagcgctgctggtggtcgttgtggcggcgatagccggcggctactactggcttcattccggcaaccctgatgcgttgcgcaaaattgttctgcaacagtgcgtccccaatcaacagcagcaccagaatcccgcgccctgtgcggaagtgaacctcaagggcggctatgtgctgtttaaagaccgcaatggcccgctgcagtatctgctgatgccgacttaccgtattaacggcaccgaaagtccgctgctgcttaatcccctgacgccgaacttcttctggcaggcctggcaggggcgcgaaatcatgagccagcatcgtggttccgccgtatcggatgacgcggtctccttgaccatcaactcgcgcagcggacgcacgcaaaatcatttccatatccatatctcctgcctgcgtcccgatgtccgtacccagctggacaaggacgcgcccgctatcagcagccgctggttgccgctgcccggtggactactgggccacgaatatctggcgcgtcgggtcaccgaaacggagctggcgcagcgcagcccgttcctgatgctggccgaagaggtgccggaagcgcgtgaacatatgggccgttttgcgctggcgatggcaaagcagagcgatggctcgctggtgctgctggcgaccgagcgtaacctgctaacgcttaatcgcgcatcggcggaagagattcaggatcacagctgcgcaatcctgcaataa

SEQ ID NO: 188016 - DNA, 1305 bp, Klebsiella oxytoca
atgtcgctctggttgtcccaccctctgttccttccttctatcatcgtcggcatcactattctcctctgggcgacttcgctactgccggagtttatgaccgcgctgctgttttttgccgcggcgatgatcgccaaaatcgcgccgccggaggtgatttttggcggctttgcttcctcggccttctggctggtgttcagcggctttgtgctggggatcgccatacgcaaaaccgggctggcggacagggcggcccggtcgctctcgtcgcggctgaccgactcctggccgctgatggtcggcagcgtggtgctgctcagctatgcgctggcgtttgtgatgccgtccaatatggggcgtatcgcgctgctgatgccgattgtggcggcaatggccaggcgtgccggcattgaagaggggacgcgcccgtggtttggcctggcgctggcggtggggttcgggaccttccagctgtctgccaccatcctgcccgccaacgtcccgaatctggtgatgagcggcgcggcggagggatcgtatggtatccatttgaattatcttccctatttactgctgcatacgccggtgctcggctggctcaaaggggctgtgctgatcgccctgatatgctggctgtttcccggaaaatcgcacccgccgcgcgacatgacgccgctgccgccgatgagccgcgatgagaagcgcctggcgtggctgctggtggtagtgctgacgctctgggtgacggagagctggcacggcgtggggccggcctggacggggctggcggcggcggtgataacgctgctgccgcgggtcggttttatcagcggcgaggagttttccagcggcgtgaatatccgcacctgtatttacgtcgccgggattttggggctggctatcaccgtgacgcaaaccggtatcggcggcgtggtggggaatgccctgctgcagattatgccgctggataaagagagcccgttcaccagctttctcgcattgaccggcattaccagcgcgctgaactttatcatgaccgctaacggcgtaccggcgctgtataccaccttcgcgcagagcttctccgatgcgaccggcttcccgctgctgagcgtgattatgattcaggtgctgggatactccacgccgctgctgccgtatcaggcatcaccgattgtcgtggcaatggggctggggaaagtgcctgcaagggcgggaatgctgctgtgtattgcgctggcggcggtaagctatttgattctgctgccgctggactacctgtggtatcaggcgttggggaaactgtag

SEQ ID NO: 188017 - DNA, 768 bp, Klebsiella oxytoca
atgcgacatcctttagtgatgggtaactggaaactgaacggcagccgccacatggtaaacgaactggtcgcgaacctgcgtaccgaactggctggcgtaaccggctgtgcagttgccattgctccgcctgagatgtacatcgacctggctaaacaagccgctgcgggcagccacattcacctgggcgcgcagaacgttgacctgaacctgtccggcgcgttcactggcgaaacctctgccgaaatgctgaaagacatcggcgctgaatacatcatcatcggccactccgagcgccgtacctaccacaaagagtccgacgagtttatcgccaggaaattcgcggtactgaaagagcagggtctgatcccggttctgtgcatcggtgaaaccgaagcggaaaacgaagcgggcaaaacggaagaagtgtgcgcgcgtcagatcgacgccgttctgaaaacccagggcgcggcggcgttcgaaggcgcagttatcgcttatgaacccgtatgggcgatcggtaccggcaaatccgctaccccggctcaggctcaggctgtacacaaattcattcgcgaccacatcgctaaagctgatgcgaaagtggctgaacaagtgatcatccagtacggcggttccgttaacgcgggcaacgcagcagagctgttcacccagccggacatcgacggcgcgctggttggcggcgcatccctgaaagctgacgctttcgcggtgatcgttaaagcagcagaagccgcgaaaaaagcgtaa

SEQ ID NO: 188018 - DNA, 600 bp, Klebsiella oxytoca
atgaagaagtgggcaaccttatgtttaattgggctggcggcattatccgtcggccaaaatgcgttgtccgccgagtcagacgccagcgctacggcgccctatcttctctccggcgcgccggcctttgatatttccatcagcgagtttcgggaaaaattcaacaacgataacccgaagctatcgctcaatgaatttcgcgccgtcgccgccagcaaagaccaggcaaacctgacccgcgccgccacgaagatcaatgagaacctttacgcgtcgaccgcgcttgaacgcggcacgctcaaaattaaatcgatgcagatcacctggctaccgattcaggggccgcagcagaaagcggcgaaagcgagagcccaggagtatatgagcgccgtgatgcgcgcgttcgtacccacgctcagcctgacgcaaagccagcagaagctgcagaaactgctgaccgccggaaaaggcaaacgttacttctccgaaacggaaggtgctgtgcgctatgtagtggcggacaacggcgaaaaggggctgaccttcgctgttgaaccgattaagctggcgctatctgaaacgctggaaaacaacaataaatga

SEQ ID NO: 188019 - DNA, 429 bp, Klebsiella oxytoca
atgaccctacagcagtggctattctcaattaaagggcggattggacgtcgcgacttctggatctggatcgctatctggataatgaccatgagcgcgctgttcacgctggccggtagtaaccttctcaatttacagacggcggcttttattctggtgtgcctgctgtggccgacggcggcggtgaccattaaacgcctgcacgatcggggtaaatccgggctctgggcgctgctgatgattctggcgtggatgctgctggcgggcaactggtcgatgctgcctggggtctggcagtggggcgtcgggcggtttataccgacgctgattatcgtcatgatgctgatcgacctgggcgcgtttgtcggtacccagggcgcgaataagtttggtaaagagacgctggacgtgcgctggaaagcggaatcctga

SEQ ID NO: 188020 - DNA, 747 bp, Klebsiella oxytoca
atggcaaactgggttacgggcaaagtggtaaaagtacagaactggactgatgcactgtttagcctcaccgttcacgcgccggttgcgcccttcaccgctgggcagtttgccaaactggggctggacgtagacggagaacgcgtgcagcgcgcctattcctacgtcaacgcccccagcaaccccgatcttgagttctatctggtgacggttccggagggcaagctcagcccgcggctggcggctctgaagccgggcgatgaagtccaggtggtcagcgaagccgccggtttcttcgtgctggaagaggtgccggattgcgacaccctatggatgctcgccaccggcacggcgattggcccgtacctgtcaattctggaagaagggaaggacctggatcgctttaaaaacctggtactggtgcacgccgcgcgctatgccgccgacctcagctatctgccgcagatgcaggcgctggaagcgcgctatgcgggcaaactgcgcatccagtcggtcgtgagccgggaaaccgcgccgggcatgctcacgggacgtatcccgttcctgattgaaaccggcgcgctggaagaggccgtcggcctgccgatgaacgccgagagcagccacgtcatgctgtgcggtaacccgcagatggtgcgcgacacccagcagctgctgaaagagacccggcagatgagcaagcacctgcgtcgccggccgggtcatatgaccgccgaacactactggtaa

SEQ ID NO: 188021 - DNA, 1011 bp, Klebsiella oxytoca
atgaaacgagaactggccatcgaattttcgcgcgtcaccgaagccgccgcgctggcaggctacaaatggttaggccgcggtgataaaaataccgccgacggcgccgccgtcaacgccatgcgcattatgctcaacctgatcaacatcgacggcactatcgtgattggcgaaggcgaaatcgacgaagcgccgatgctgtacattggcgagcgcgtcggtaccggccacggcgatgcggtagatatcgccgtcgatcccattgaaggcacccgcatgacggcgatgggccaggcgaacgcactggcggtcatggcggtaggcgataagggctgtttcctgaatgcgccagatatgtacatggaaaagctgattgtcggcccgggagcgaagggcaccatcgatctgaacctgccgctggcggagaacctgcataacatcgcccgcgcgctgaataagccgctgagtgaattaacggtcaccatcttagccaagccgcgccatgacgacgtcattgttgagctgcaaaagctgggcgtgcgcgtgttcgccatccccgacggcgacgttgccgcctctattctgacctgcatgccggacagcgaagttgacgtcatgtacggtatcggtggcgcgccggaaggcgtcgtttccgctgcggtgatccgcgcgctggacggcgatatgaacggccgtctgctggcgcgtcaccacgtgaagggcgacagcgaagagaaccgccgcatcggcgaaaacgagctggcacgctgtcaggcgatgggcattgaagcaggcaaagtgctgcgcctggacgatatggcgcgcagcgacaacgtggttttctcggcaaccggcatcaccaagggcgatctgctggacggtatcacccgtaaaggcaatatggccaccaccgaaaccctgctgatccgcggtaaatcccgcaccatccgccgtattcaatcgattcattatctcgatcgcaaagacccggatattcagctgcacatcctgtaa

SEQ ID NO: 188022 - DNA, 2082 bp, Klebsiella oxytoca
atgcagggccgtctgctggatgcggtgccgctcaattccctgacgggcgttggcgcggcccagagcagtaagctggcaaaaatcggcctgcatacggtacaggatctgcttctgcacctgccgctacgctacgaagaccgcacccatctgtatcacatcggcgaactgctgcccggcgtttacgccaccgttgaaggcgaagtcctcaactgcaacatcactttcggcggccgccggatgatgacctgccagataagcgacggctccggcatcctcaccatgcgcttttttaacttcagcgcggcgatgaaaaatagcctggcaaccgggcgccgcgtgctggcctacggtgaggcgaagcgcggtaagcacggggcggagatgatccatccggaatatcgggttcagggcgacatgagtacccctgatttacaggaaacgctgaccccgatatatcccaccactgaaggcatcaagcaggctacgctgcgtaagctcaccgaccaggcgctggagctgcttgaaacctgcgcgatcgccgagctgctgccacctgagctggcgcaggggatgatgagcctgccggacgccttgcgcacgctgcatcgcccgccgcccacgttacagcttagtgagctggaaagcggcaaacatccggctcagcggcgcttaatcctggaagagctgctggcgcataacctcagcatgctggcgctgcgggcaggcgcccagcgctaccacgccctcgcgctcagcgctaacgacacgctaaaagataagctgctggcctccctcccctttacgccgaccggcgcgcaggcgcgcgtcacggctgaaatcgaacgcgatatggcgctggacgtgccgatgatgcgtctggtgcagggggacgtgggctccggtaaaaccctggtcgccgcgcttgccgccctgcgcgccatcgcccacggcaaacaggtagcgctgatggcgccgaccgagctgctggctgaacagcacgccaataacttccgcagctggttcgaaccgctgggcgttgaggtgggctggctggctggcaaacaaaaaggcaaagcgcgcctggcgcagcaggaggctatcgccagcggacaggtacagatgattgtcggcacccacgccatctttcaggagcaggtccagtttaacggcctcgcgttggtgattatcgacgagcagcaccgttttggcgtccatcagcggctggcgctgtgggagaaagggcaacagcagggatttcacccgcaccagctgattatgaccgccacgccgattccgcgtaccctggcgatgaccgcgtatgccgacctcgacacctcggtcattgatgaactgccgccgggccgaacgccggttacgacggtggccattccggatacgcgacgcagcgatattattgaccgcgtacgtcacgcctgcactcacgaaggtcgccaggcctactgggtttgtacgctgattgaagagtcggatctgctggaagctcaggcggcggaagccacctgggaagagctgaagctcgccctgccggagctgaatatcggcctggtgcacgggcgtatgaaatccgccgagaagcaggcggtaatgagcgcgttcaagcagggcgagctgcatctgctggtcgccaccacggtgattgaagtcggcgtggacgtgcccaactccagcctgatgatcatcgaaaacccggagcgtctggggctggcgcagctgcaccagctccgagggcgcgtcgggcgcggtgcgatagcctcccactgcgtgctgctctataaatcgccgctgtcaaaaaccgcccagaagcgcctgcaggttctgcgcgatagcaatgacggtttcgtcatcgcccaaaaagacctggaaattcgcggccccggcgagctgctcggcacccgtcagaccggcaacgctgaatttaaagtcgcggacttattgcgcgatcaggccatgatcccggaagttcagcgcatcgcccgccatattcacgaacgctatccccagcaggcacaggcgctgatagagcgctggatgccggaaaccgaacgctattccaacgcgtag

SEQ ID NO: 188023 - DNA, 690 bp, Klebsiella oxytoca
atgaatttacagcgttatgcgcgtatctgcgagatgctcgccaggcgccagcctgacctgacagtctgcatggagcaggtccataagcctcataacgtctctgcggtcattcgtaccgcagacgccgttggcgtgcatgaagtgcacgccatctggccaggtagccgtatgcgtaccatggcctccgcggccgccggcagcaatagctgggtgcaggtcaaaacccaccgtactattggcgaggccgtcacccatttaaaaggccagggcatgcagatcctggcgacccatctctctgataacgccgtcgatttccgtgaaatcgactatacccgtcccacctgtatcctgatggggcaggagaaaaccggcattacgcaggaagcgttagacctggcggaccaggacatcatcattccgatgattggcatggtgcagtcgctgaacgtttccgtcgcctcagcgcttatcctctacgaagcccagcgccagcggcagaacgccggcatgtaccggcgcgagaacagtatgctgccggaagaagaccagcagcgcctgctgtttgaaggcggctatccggtgctggcgaaggtcgctaaacgcaagggacttccctacccccacgtcaacgagcagggcgaagtcgaagccgatgccgcgtggtgggccaccatgcaggcggcgaagtaa

SEQ ID NO: 188024 - DNA, 2121 bp, Klebsiella oxytoca
ttgtatctgtttgaaagcctgaatcagctgattcaaaactacctgcccgaagagcaaattaaacgtcttcggcaggcttatctcgttgcacgtgacgctcacgagggccagacacgttcaagcggtgaaccctatatcacgcacccggtagcggtagcctgtatcctggccgagatgaaactcgaccatgaaacgctgatggccgctctgctgcacgacgtgatagaagatacccccgccacctaccaggacatggagcagcttttcggtaaaagcgttgctgaactggtagagggggtgtcaaaacttgataagcttaagtttcgcgacaagaaagaggcccaggctgaaaactttcgcaaaatgattatggcgatggtgcaggatatccgcgtcatccttatcaagctcgctgaccgcacccataacatgcgcacgctgggctcattgcgcccggacaagcgtcgccgcatcgcccgcgaaacgctggaaatctacagccctctggcgcaccgtttaggtatccatcacatcaaaaccgagctcgaagagctgggctttgaggcgctgtatcctaaccgctaccgcgtcattaaagaggtggttaaagcggcgcgcggcaaccgtaaggagatgattcaaaagatcctctccgaaatcgaagggcgcctgcaggaagcgggaattccctgtcgcgttagcggtcgcgaaaagcatttgtactccatctactgcaagatggtgctcaaagagcagcgctttcactcgattatggatatctacgctttccgcgtgattgtccatgattccgacacctgctaccgcgtgcttggccagatgcacagcctttataagccgcgtccgggtcgcgtcaaagactatattgccattccaaaggcgaacggctatcaatctttgcacacctcgatgatcggcccgcacggcgtcccggttgaggtacaaattcgtaccgaagacatggaccagatggcggaaatgggggtggcggcgcactgggcttataaagagcacggcggcgagagcagcaccacggcgcaaatccgcgcccagcgctggatgcagagcctgctggagctccagcagagcgccggtagttcatttgaatttattgagagcgtgaaatccgatctgttcccggatgaaatttacgttttcaccccggaagggcgcattgtcgaactgcccgccggcgcgacgccggtggatttcgcctacgcggtgcataccgacatcggccatgcctgcgtcggcgcccgcgtcgaccgccagccgtatccgctgtcgcagtcgctctccagcggccagacggtggaaatcatcaccgcgccgggcgcacgtccgaacgccgcatggctgaactttgtcgtcagctcgaaagcgcgcgccaaaattcgccagctgctgaaaaaccttaagcgcgacgactccgtaagcctcgggcgccgcctgctcaatcacgccctcggcggtagccgcaagctggccgagatcccgccagagaacattcagcgtgaacttgagcgcatgaagctgaccacgcttgacgatctgctggccgaaatcggcctcggcaacgccatgagcgtcgtggtagcaaaaaacctgcagcagggtgaaaccaccgccgtgcctgtacagccagcgcctgtcggccataatcatctgccgattaaaggcgcggatggcgtgctgatcaccttcgccaaatgctgccgcccgatccccggtgacccgattatcgcgcacgtcagcccgggcaaaggcctggttattcaccatgagtcctgtcgtaacattcgcggctatcagaaagagccggagaaatttatggcggtcgagtgggacaaagagacagcgcaggaatttatcaccgaaatcaaggtggatatgttcaaccatcagggtgccctggcgaatcttaccgcggcgatcaacaccgcgtcttccaatattcaaagcctgaatacggaagagaaagatggccgcgtttacagcgcctttattcgccttaccgcgcgcgaccgcgtgcatctggcgaatatcatgcgcaaaattcgcgtcatgccggatgtaataaaagtcacccgtaaccgaaactag

SEQ ID NO: 188025 - DNA, 276 bp, Klebsiella oxytoca
atggcacgcgtaactgttcaggacgctgtagagaaaattggtaaccgttttgacctggtactggtcgccgcgcgtcgcgctcgtcagatgcaggtaggcggaaaggatccgctggtaccggaagaaaacgataaaactaccgttatcgcactgcgcgaaatcgaagaaggtctgatcaacaacaagatcctcgacgttcgtgagcgccaggaacagcaagagcaggaagccgctgaattacaagccgttaccgctattgctgaaggtcgtcgttaa

SEQ ID NO: 188026 - DNA, 624 bp, Klebsiella oxytoca
atggctcaaggcacgctttatattgtttccgcccctagcggcgcgggtaaatccagcctgattcaggctttattaaaaacccaaccgttgtacgactctcaggtttctgtttcgcataccacgcgcgctccgcgcccgggtgaagtgcacggtgaacactatttctttgtgaatcacgacgaattcaggacgatgattggcagagacgcttttcttgaacatgcagaagtctttggcaactattacggcacctcgcgcgaagctatcgagcaggtactggcgaccggcgtcgacgtcttcctcgatatcgactggcagggcgcgcagcaaatccgcaacagaatgcccggcgcgcgcagcatttttatcctgccgccgtcaaaagatgagcttgatcgtcgcctgcgcggccgcggtcaggacagcgaagaggttatcgcaaaacgtatggcgcaggcagttgcagaaatgagccattacgcggagtatgattacctgattgtgaatgatgattttgataccgcgctgagcgatctgaaaattattattcgcgccgaacgtctgcgcatgagccgccaaaagcagcgacatggcgctttaatcaccaaactgttggcagactga

SEQ ID NO: 188027 - DNA, 1677 bp, Klebsiella oxytoca
atgcaaaatggagtctgggcgctggtgctgtggatgctggtgggagacgggcaggcagcctgccccgcatggccgcaggccagggccgatcgggagattgaacgtctcagccagcagataacggaatggaaaaacgcctactggcagcaggggagcagtacggtaagcgatgaggtctatgaccagcttgcggagcggctggcgtactggcggcgctgcttcaccggcgaggctcccgctcacgacgcgtctcctcccctaaaaggggaggccagacatccggtggcgcacaccggcgtgcgtaaactggcaaatcaagccgacgtggcgcgctggatgcgcggtcaatccggcctgtgggtgcagcctaaagttgatggcgtcgcggtcacgctcgtgtatcggcaggggcgtctgacccaggcgataagccggggtaatggcctggccggggaagactggacggccagggtcttgcagatcccctccgtgcctaaagtctctgacggcgtactggcgaatagcgttctacagggtgagctgttcctgctccgcgaggggcacgtgcaaaagcagatgggcggcatgaacgcgcgggcaaaagttgccggcatgatgatgcgccagcaggttgcggcggatcttaatcagctgggtctctttatctgggcatggcccgatgggccgcaggatatgaaacagcggctggcgctgctgcggcagggcggctttctttacagcgcgcttttttcgcaccctgtcgcggatgcgcagcaggttgaacagtggcgccagcgctggttcacttcaccgctgccttttgtcagcgatggcgtcgtagtgcggcgggaaaaagcatctcccgggcgcttctgggttccgggtcagggcgattgggtcatcgcctggaaatacccgcccgcctcgcgcgtcatggaggttcgccgtatcagctttagcgtcgggcgcagcggtaaaatagccgtggtggcgcatctggaaccgcagatgctggacgataagcgcgtgcagcgggtgagcgtcggttcggtatcccgctggtacaatctggatatcggtattggcgaccagctgcaaatcagccttgccgggcaggggataccgcgcatcgattcggtcgtctggcgcacggctcagcgtaataaaccccagccaccggcggcgcgtttcaatgctttaacctgctattttgccacgcccgagtgtgcggaacagtttctttcgcggctggtctggctctcatcccgatcggttcttgatattgacggcgtgggagaagcgctatggcggtccctgcatgacgcgcgcagcatggagcatctcttttcatggctggcgtttacgccggagcggctgcaagccataccgggggtctcgacgctgcgcgggcagaggctgtggcaccagttcaatcttgcgcgcgaacggccttttctgcgctggaaccaggcgatgggagtccctataccgaagacggcgtttgcccggctgaaggaggatgactggcgacggatgcaggagcgaaacgaagagcagtggcggcgcctgccggggatcggggcggaaagagcgcggcagctggtgacgttcttacatcacccggatgttgccgcactggcgaagtggctaagcgggcaacgcgttccgggattctga

SEQ ID NO: 188028 - DNA, 618 bp, Klebsiella oxytoca
atgctgcttcatattctttatctgattgggattacggcggaagccatgaccggcgcgctggctgccgggcgccgccgtatggatacgtttggcgtcattatcattgccaccgcgacggccctcggaggcggttcagtgcgcgatattctgctcggccactatcctctgggctgggtgcagcaccccgagtacgtcattattgtcgccattgctgcggtcctgaccacgattgccgcgccggtgatgccgcatctgcgccgcctgtttctggtgcttgatgcgctcggcctgatcgtgttctctattattggcgcccagatcgcgctggatatgggccagggcccggtcatcgcctccattgccgccgtcatcaccggcgtttttggcggcgtgctgcgcgatatgttctgcaagcgtatcccgctggtgttccagaaagagctttacgccggagtgtcattcgccgccgcgattttatacatcgcgcttcagcattacgtcagtaaccacgatgtggtggtgatctccaccctgctgttcggctttaccgcccgcatgctggcgctgcgctggaagctgggcctgccggtatttaactacaaccatagcgcacattaa

SEQ ID NO: 188029 - DNA, 1260 bp, Klebsiella oxytoca
atgactgcagcagttggcaataaaaactatctcacccgcctgattgccgttgtgctgacggggctacttgccggcctgtcaggcatggttctggcgctgattttacacgcgattcagcacctggcctttggctacagccccgggcagatcgtgagcgcggagtcatttctacagggcgtcacggattcatcctggcctcgtcgcctctcggcaatcgtcgcggggggagccatcgcaggattcggctggtggctccttgggcgctatgggcagaagcgagtctcaatagcgtcagcggtggcaaatccttcggtggcaatgcctgcgggtactacaacgattcatgccctgttgcagatcgtcaccgtggcgctgggctctccgcttggccgcgaagtcgctccgcgggaaatgggcgcgctgggggcagggatggtggcgcgtaagctgggactgctggcggatgaaacccgaacgctggttgcctgcggcgccggtgcgggcctggcggcggtgtataacgttccgctggccggtgcgttattcagccttgaggtaatgctgctgtcgtttagctgggagaaaacgctggcggcgattatcacctcggcgattgccgcgtggacggcaacgctcgggttaggcgaggaatcgcaataccattttacttccgacatcctgccgcattcatttctctggtgggcgattatcgccggccccattcttggcgccggggcctggctctttcgcaaagcgaccagcacggcccgctcgcgcgttcgaagcaactggcagatgccggttttctgtctgctggcgttttccctgcttgccgtcctcagcctctatttcccccagcttccgggaaacggtaaagggcctatgcagctggctctcagcgatgaactgggctttcccggggcggcgatgctgctggcgctaaaaatggtggtgattctggcggtgctgcgcggcggcgcggagggcgggctgctgacgccggggctggcggtcggcggcctgaccagcctgctgctgtgtatgctctggcaacagctgcttcccggcggagattacggcagttttgctctcgtcggcgcggcggcgtttctcgctgcatccatgcagatgccgctcacggcggtcgcgctggtgatggagttcacccacatggatcacagctatctggtccccacgctgctgtgcgccgcaggggcatttttaacctgccggatattggataagaactattccttctga

SEQ ID NO: 188030 - DNA, 864 bp, Klebsiella oxytoca
atgatccgcagtatgaccgcctacgcccggcgtgaaatcaagggtgaatggggtagcgccgcgtgggaactgcgctcggtaaaccaacgatatctggaaacctacttccgcctgccggagcagttccgtagcctggagcccgtggtgcgtgaacgtattcgctcccgtctgacccgcggtaaagtcgaatgtaccctgcgttttgagcaggacccgagcgcgcagggtgagctgatccttaacgaaaaactggcaaagcagctggttaacgccgccaactgggtcaaaatgcagagcgacgaaggcgaaatcaatccggtagatattctgcgctggcctggcgtgatgtcggcccatgaacaggatctggacgccattgccgccgaaattctgggcgcgttgaacggtgcgctggatgactttatcgtcgcccgcgaaaccgaaggccaggcgctgaaagcgctgattgaacagcgtctcgatggcgtgacggccgaggtggctaaagtacgtgcccatatgccggaaattttgcagtggcagcgcgagcgtctggttgccaagctggaagatgcggaagtgcagctggaaaacaaccgcctcgagcaggagctggtgctgatggcgcagcgtatagacgtcgccgaagagctggatcgtctggaagcgcacgtgaaagagacgtggaatatcctgaagaagaaagaagcggtcggtcgccgcctcgactttatgatgcaggagttcaaccgcgagtcgaacaccctggcgtctaaatcaatcaatgccgaagtgacgaactccgccattgagctgaaggtgctgatcgaacaaatgcgcgagcagattcagaacatcgagtaa

SEQ ID NO: 188031 - DNA, 717 bp, Klebsiella oxytoca
atgcgtccagcaggccgtagcgctaatcaagtgcgcccagtaaccctgacccgtaactacacaaaacacgcagaaggctccgtgctggtcgaatttggtgacacgaaagtattgtgcaccgcttctattgatgaaggcgtgccgcgctttctgaaaggccagggccaggggtggatcaccgccgaatacggcatgctgccgcgttctacccacacgcgtaacgcgcgtgaagccgcaaaaggtaagcagggcggacgcaccatggaaatccagcgcctgatcgcgcgtgcgctgcgcgctgcggttgacctgaaagcgctgggtgagttcaccatcactctggactgcgatgtgctgcaggcagacggcggcacccgtaccgcgtctatcaccggagcctgcgtggcgctggccgatgcgctgaataagctggtcgcggccggtaagctgaaaaccaacccgatgaaaggaatggtggcggcggtctccgtaggcatcgtgaatggcgaagcgatttgcgatctggaatacgttgaagattccgcggcggaaaccgatatgaacgtggtgatgaccgaagatggccgcatcattgaggtgcagggtacggcggaaggcgagccgttcacccatgaagaactcctcaccctgctggcattggcccgggggggtatcgaatccattgtcacgacgcagaaggcggcgttgcaaaactag

SEQ ID NO: 188032 - DNA, 642 bp, Klebsiella oxytoca
atgaaaccgtatcagcgccagtttattgagtttgcgcttaacaagcaggtacttaagtttggcgagtttacgctgaaatccgggcgcaagagcccctatttcttcaacgccggcctgtttaataccgggcgcgatctggcactgttaggccgtttttacgccgaagcgctggtggattccgggattgattttgacctgctgttcggcccggcctataaaggcatccctatcgccacgaccacggcggtcgcgctggcggaacaccatgaccgcgatctgccttactgctttaaccgcaaagaggcgaagactcacggcgagggcggaaacctggtggggagcgcgctgcagggccgcgtgatgctggtggatgatgtgattaccgcaggcaccgcgattcgggaatcgatggaaattattcaggccaacggcgctgagctggccggcgtactgatctctctggatcgtcaggaacgcggacgcggcgaaatctccgcgattcaggaagttgagcgcgactacggctgtaaagtaatttccatcgtgacgctgaaagacctgattagctatctggaagagaagccggaaatggctgaacacctgactgccgttcgcgcctatcgcgaagcgtacggcgtataa

SEQ ID NO: 188033 - DNA, 534 bp, Klebsiella oxytoca
atgcttgaatccagcgatggaagtcagcgcattaccacagcgaaactggcggcgtccgttggcgtatccgaagcggctctgtatcggcacttcccgagcaagacccgcatgtttgacagcctgattgaatttatcgaagacagcctgattacgcgcatcaatttgattttaaaagatgaaaaagacacctcagcgcgcctgcgtctgattgtgctgttgattcttgggtttggcgagcgtaatcctgggctgacaagaattctgaccggccatgcgctgatgtttgaacaggaccggcttcaggaccgcatcaatcagctgttcgagcgcattgaagttcagctgcgtcaggtgttgcgtgaaaagaaaatgcgcgaaggcgaaggctataccgtcgatgaagccctgctggccagccagctattggcattctgcgaagggatgctatcgcgctttgtgcgcagcgagtttaaatatcgcccgacggacgattttgacgcccgctggccgctggtcgccgcccagctgaaataa

SEQ ID NO: 188034 - DNA, 459 bp, Klebsiella oxytoca
atgatgaaaaaaatcgacgttaagattctggacccgcgtgttggtcagcaatttccgctgccgacctatgccacctccggctccgccggacttgacctgcgagcctgtctcgatgacgccgtagagctggctcctggcgcaacgaccctcgtgccaaccggtctggcgattcatattgccgatccctctctggcggcggtgattctcccgcgctccggactgggccataagcacggcgtcgtactgggtaacctggtcggtctgattgattctgactatcagggccagctgatggtttccgtctggaaccgcagccagcagagcttcagcatcgaacccggcgagcgtatcgcgcaaatggtgtttgtgcccgttgtgcaggcagaatttaacctggtggaagattttgacgccaccgatcgcggcgaaggcggcttcggtcactcagggcgtcaataa

SEQ ID NO: 188035 - DNA, 1215 bp, Klebsiella oxytoca
atgatgagtctggctggtaaaaagatcgttcttggcgtgagcggcggcattgctgcctataaaacgccggaactggtgcgccgcctgcgtgaccgcggcgcggatgtccgcgtcgccatgacggaagccgcaaaagccttcattacgccattaagtctacaggcggtatccggttatccggtttccgacagcctgctcgacccggccgccgaagcggcgatgggccatattgagctggggaaatgggccgacctggtcattcttgcccccgccaccgccgacctaatcgctcgcgtcgcggcagggatggccaacgatctcgtttcgacgatttgtctcgctacgccgtcgccggtcgccgtcgtgcccgccatgaatcagcagatgtatcgcgccgccgccacccagcataatctggacgtcattgccgcccgcggtctgctggtctggggcccggacagcggcagccaggcctgcggcgatgttggcccggggcggatgctggacccgctgaccattgtggatatggccgcgcagcatttctcgcctgtcaaagatttgcaacatctgaacatcatgattaccgcgggccccacccgcgagccgctggatccggtgcgttatatcaccaatcacagttctggtaagatgggcttcgcgattgccgccgccgccgcgcgccgcggggctaacgtcacgctggtgagcggcccggtttcgctgcctacgccgccgtttgtacacagaattgatgtcaccaccgcgctggaaatggaagccgcggtgcaaaacagcgcgcctcagcagcatatttttattggctgtgcggcggtcgctgactaccgtgcggtcgccatcgccgaagaaaaaatcaaaaaacaaggtgatgaattaaccctgaaaatggttaaaaatccggatatcgtcgcaggggtcgccgcgcttaaggccaaccgcccttacgtcgttgggtttgccgccgaaacaaataatgtggaagaatacgcacggcaaaagcgagcccgcaaaaatcttgatctgatttgcgccaatgatgtttctcagccaaatcagggatttaacagcgacagcaatgcattacaccttttctggcaggagggagataagcgcttaccacttgagcgcaaggaactcctgggccaattattactcgacgagatcgttacccgttatgatgaaaaaaatcgacgttaa

SEQ ID NO: 188036 - DNA, 666 bp, Klebsiella oxytoca
atggaaatacaagaatccctcatgccgagggaaaagatgcagcgctacggtatcgaagttttgtcggatattgagctgttggcgctatttttacgtaccggtacccgcacgcaggacgtgatgacattttcgcgggagctgctacagcgttttggctcgctgtacggcctgctatcggcggaggagtcgcagtttgctgaggtggaaggcattggtctggcgaaatatgcgcagctaaaagggattgctgaactggcgcgacgctattttagcctgcgaatgacggaagaaccctcgctggttaccccgtcgatgacgcgggaatttctgcaaagccagctggccgacgaagagcgtgagatcttcatggtgatctttttagataatcagaaccgggtattgaaacatagccgccttttttctggtactcttagccacgttgaggtgcatccgcgagaaatcgtacgcgaagccatcaaagtgaacgccgccgcggtgatcctggcacataatcatccatccggtagtcctgagccgagcaaggccgacaggttgattaccgaaagagtgataaaatgttgtcgattcatggatatacgtgtgctggatcaccttgttattggccgcggagcgtacgtatcttttgctgaacgcggctggatttag

SEQ ID NO: 188037 - DNA, 237 bp, Klebsiella oxytoca
atgtcccgagtctgccaagttactggcaagcgtccggtgaccggtaacaaccgttcccacgcactgaacgcgactaaacgccgtttcctgccgaacctgcactctcaccgtttctgggttgagagcgagaagcgttttgtcaccctgcgcgtatctgctaaaggtatgcgtgttattgataagaaaggcatcgatacagttctgtccgaactgcgtgcccgtggcgaaaagtactaa

SEQ ID NO: 188038 - DNA, 168 bp, Klebsiella oxytoca
atggctaaaggtattcgtgagaaaatcaagctggtttcttctgctggtactggtcacttctataccaccacgaagaacaaacgtactaagccggaaaaactggaactgaaaaagttcgatccagttgtccgtcagcacgttttatacaaagaagctaaaatcaaataa

SEQ ID NO: 188039 - DNA, 810 bp, Klebsiella oxytoca
atgcctgaattacctgaagtagaaaccagccgccgcggcattgagccgcacctggtgggagccaccatcctgcacgccgttgtgcgcaacgggcgcctgcgctggcccgtttctgaagagatctatcgtctgagcgacgttccggtgctcagcgtacgccgccgcgctaaatatctgctgctggaactgcccgacggctggattatcgtccaccttgggatgtcgggaagcctgcgtatcctgagcgaagagctgcccgcggaaaaacacgatcacgtggacctggtgatgagtaacggcaaggtgctgcgctataccgacccgcgtcgttttggcgcctggctgtggaccaaagcgctggaagggcatccggtgctggcgcatctggggccggagccgctgagcgatgagttcaacgccgattatctgcaggcgaagtgcgcgaagaaaaaaaccgcgattaagccctggctaatggataataagctggtggtcggggtgggcaatatctacgccagcgaatcgctcttttcggcgggcattcaccccgacaggctggcctcttcactgtcgcgcgaggagtgcgagcagctggtgaaagtgattaagctggtcctgctgcgctccatcgaacagggcgggacgacgctgaaagatttcctgcaaagcgacggtaaaccgggctactttgcccaggagctgcaggtgtatggccgcaagggcgagccgtgccgcatttgcgggacgccggttatcggcagtaaacacgcccagcgggcgacgttttattgtcgccagtgccagaagtaa

SEQ ID NO: 188040 - DNA, 477 bp, Klebsiella oxytoca
atgagcacaaaagcgatctatccgggaaccttcgaccctatcaccaacggccatatcgatatcgtcacccgcgcggccagcatgttcgataaggtgctgctggctatcgccgccagcccgagcaaaaagccgatgttcactctcgacgagcgcatcgcgctggccacccaggcaacggcgcatctggtcaacgttgaggttattggcttcagcgatttaatggccaattttgcccgcgcgcagcaggcgaatattttaattcgcggcctgcgggcggtggcagattttgaatatgagatgcagctggcgcatatgaaccgtcatttgatgccgacgctggagagcgtgtttctgatgccgtgcaaagagtggtcgtttatctcctcttcgctggtgaaagaagtggcgcgccaccagggcgacgtctctcactttctgccggcaaacgttcaccaggcgctgctgaagaagctgtaa

SEQ ID NO: 188041 - DNA, 777 bp, Klebsiella oxytoca
atgtcgcctcgactctcggtcgtgatgattgccaaaaacgcggcggatctgctgcctgattgtctggcgtcggtaagttgggccgatgagatagtgctgctggattccggcagcagcgacaacaccgtcgaactcgcccgcagccagggcgttcaggtgcatgtcgatcgcgactggcagggctacggtattcagcgccagcgcgcccaggcctacgccaccggcgactacgtgctgatgatcgataccgacgagcgcgtcactccggagcttgcgcagtctatccgcagcgtgctggccgcgccgcaaaccggcgcgatatacagcatcacccggcgcaactatttccttggccgctttatgcgccacagcggctggtaccccgaccgcgtgatgcgcctgtacgaacgcgaccgttaccgctataacgataatctggtccacgaatctctcgacgcccagggcgcgcgggttatcgaactcgcgggcgacctgctgcatctgacctgccgtgatttctccggctttcagcaaaagcagctggcctatgccgccgcctgggcgcaggagcgccatcagagaggcaaaaagacctcgctggccgctatcttcggccatacgctgggcgcctttgtgaaaacgctgctgctgcgcgggggcattctggatgggaaacaaggttggctgctggcggtggtcaacgcgcaatacacgtttaataaatacaccgagctgtgggccctgagccgcggctactcggagaaagtgtcattatga

SEQ ID NO: 188042 - DNA, 1275 bp, Klebsiella oxytoca
ttggaattgctttataccgccctactttacctcattcagccgctggtgtggctgcgactgctgttacgcagccgtaaggcccctgcctatcgtaaacgctggaaggaacgttatggcttctgccagaacaaggtagaaccgggtggcatcctgctgcattccgtttccgtaggtgaaacgctggcggcgattccgctggtgcgcgcgctacgccaccgttacccctatctgccgatcaccgtcaccaccatgacgccaaccggctctgaacgcgccatgtccgctttcggcaaagacgtgcatcacgtctatctgccttacgatctgcccggcgcgatgaaccgtttcttcaataccgttcagccgaagctggttatcgtcatggaaaccgaactgtggccgaacatggtcgccacgctgcacaagcgtaaaatcccgctggtaatcgccaacgcccgcctctccgaacgctcggcgaaaggctatgccaaactggggaaatttatgcgtcggctgctgagccgcattacccttatcgccgcgcagaatgaagaagacgccagccgctttatcgctcttggcctgaaacgcaatcagctggcggtcaccggcagcctgaagtttgatatttcggtcacgccagagctggcggctcgcgccatcaccctgcgccgccagtgggcgccgcatcgccaggtatggattgccaccagcacccacgacggcgaagaacaaattattcttcaggcgcataagcagctgctggagcgtttccccaacctgctgctgatccttgtcccgcgccatccggagcgcttcggcgacgcccgcgagatggtgcagaaagcgggaatgagctacaccctgcgcagcaccggcgaaatcccgtcgaacagtacccaggtggtgattggcgataccatgggcgagctgatgctgctgtacggtattgccgacctcgcgtttgtcggcggtagcctggtggagcgcggcggccataacccgctggagcccgccgcccatgcgataccggtactgatgggtccgcacacgttcaacttcaaagatatctgcgccaagctgcagcaggacgatggactgattaccgtcaccgacgccgactcgctggtaacgcaggtgtctaacctgctgaccgatgaagattaccgtctgtggtacggtcgccatgcggtggaagttctgcaccaaaaccagggcgcgctctcccgtctgctacagttattgcaaccctatctgccgcagcggagccactaa

SEQ ID NO: 188043 - DNA, 990 bp, Klebsiella oxytoca
atgagtcaaacgcctttactaagcatcgtagccgccgtctataacggcgaaaaattccttgcgcaattctttgagtgccttgagcaacagcagctggaaagctatgaactgatcctggtgaacgacgggtcgacggacggcagccttgcggttatcgaccagtggaaagaccgcctgcaaaacgtgctcgtgctggagcaggaaaaccagggcgtgtcggtggcgcgcaataccggcctcgccgcggcgacgggtaagtacctgaccttcccggatatcgacgataagctttacccgggcatgtaccgtacgcttctggagatggcggaaaagggcaatctagacgtcgccacctgcaacggccgctacgtctacgagacgaaaaaagatatccatcctattttcccgctggaccggctacagtcgaccggcgttttgcccggccacgtctggttaaagcaggcgctggattctcgtaagttcctgcatgtcacctggctgaatatctaccgccgggagtttatcgccagccaccgcttccactttgagcctggcctgcgccatcaggatattccctggaccaccgaagtgctgctggcggcagaacgcgtgcagtacaccagcgaacagttctacgattactatattcactcggaatcggtgtcgcataagccggacaacgacgacacgctgatgcgttcagcgcgccactatatgaagattcttgagatgctggacgccatcaaccagcgttatccggacaaggttcgcgatatttccgcctgccgctggcagatcgccaaagaggggctggggattattcataccttcgatagcatgaaagatgagtcaaaaaagcatattatcattaaagagttctttgaccgcggtatctggcgcctgatctggaaaaacgcccgtacgttccgtctgcgctggcgtcttggacgccgctatctgcgcatcaagcgctatcgcgacgcggcttaa

SEQ ID NO: 188044 - DNA, 1095 bp, Klebsiella oxytoca
atgcgcatactgtttgttatcgacggcctgcccggcggcggcgcggaaaaagtcgtgctgacgctggcagcgcattttcttagccagggtgaacaggtatcgcttttttccctgcgcgacgtctgcgattatccgctgccggaagggctggattatcaggtcatcgccgatcgctgccgcaagccgtggcgcaagctgacggagctgtcccggcgcgcgcgccagcttgatgcggcaatcgagaaagcagaacagcagggccgtttcgatctggtgctctcgaatctgcataaaaccgaccgcattgtctcccgcagccgcctgctgaacgggcgcaacgtctggttttgcctgcacggcgtgttctccgcgtcctatctcggacaccgcagcggttttgaccgctggctgaaacagcagaaaatcgggcgcgtttaccagggacgcaacgtcgtcgccgtctccgatgcggtaggtcaagacctggtcgagcagttcgctattcgcccggcccagttgaaaaccatctataacccgtttgatatccccgctctgcgcgccgcggctgaagagcccagccagcgccccgacggcgactatattatccacgtgggccgctttcatcccggtaaacgccacgaccgcctgattgaggcctatgcgcaaagcggtatcgatgcgccgctggtgctgctggggcagggaaaaccggaacaagaacagcgcctgcgccagctggcgcagcagctacaggttgccgatcgcgtcctgtttaagggcttccagaaaaacccgctgccgtggattaaaggcgcgcggatgctggtcctcagctccgatagcgaaggctttggcaacgtggtggttgaggcgctgctgctggatacgccggtcgccagcacccgctgcccgggcggcgtgaccgagatcctcaccggcgagctgtcgcgtggcctggcggatctcaacagcccggcgctggctcagacgatgcaaagcatttaccatagcccgccggccatcgacgcagcggcgctggagaagttcagcgtggcatcgatttgtcagcagtatcgtcagctgcgcagcgcctga

SEQ ID NO: 188045 - DNA, 1128 bp, Klebsiella oxytoca
atgagtaaattcaggctggctctggtacgccagaagtatcgcccggacggcggcgcggagcgctttgtctcccgcgcgctggaagccctcgacgacagcgatcttgaactgaacgtcatcacccgcgaatggcaggggccggtgaagcccgagtggaacatccacatctgcaatccgcgcaaatgggggcggatcagccgcgagcgaggatttgccgacgccgcccgccagctgtggcagcgcgaagccttcgatctggtgcaaagccacgagcgtatccccggctgcgacctgtaccgcgccggagacggcgtgcaccgccgctggctgcagcagcgctcgcgcattttgcccggctggaaaagccgcctgctgtttgccgaccgctaccatcgttatgtaatgcaggccgagcgcgacatgtaccaggacgcgcacctgcgcggcgttatctgcaacgcggagatgattaaacgcgagattattgaagacttcggcctgccggcggaaaaaatccacgtcatctataacgctatcgataaccagcgttttctgccgccgacggaagaagcctttgtcgcgctgcgcgccaaatggaatctgccgatccaggcgacctgcctgatctacgtcggctccggctttgagcgcaaggggctggatgcggcgatccgcgccatcgccccgaccaaccgctacctgctggtggtgggcaaagataaagagcagggccgctatcagcagctggcgaaaacgctgaactgcgaggagcgggtgcgcttcttcggcatgcagtcggaaaccctgccgttctatcagatggccgacggcctgctgctgccgacgctgtacgatccgtttcccaacgtcattctcgaagcgatggcctgcggcctgccggtgattaccactaccggctgcggcggcgcggagtttattgttcagggcagcaatggctacgtttgcgatgcgctggatatcccggccctgcaggagtcggttagcgccctgcccgcccgggcgttaggctctgcgcaaggcgaacgcgcccgcgagcgcatcatgacctgcaccagcgaacgtctctcggcgcagctgctctccctctatcaggatttggtgaaataa

SEQ ID NO: 188046 - DNA, 1077 bp, Klebsiella oxytoca
atgacgcctgaaacccgcacttccggccgcgtgaacccggcgcgaatcctggttattaagcttcgccatcatggcgatatgttattgataacgccgcttattcacgcgcttaagcagcaatatcccgccgcctgcgtggatgtgctgctttatgaagaaacccgggatatgctcgcagcgaatacggatatccgccacatttacggcattgaccggcgctggaaaaaacagggcgccggccatcagctgaagatggagtggcggctgattcgcacgctccgccagcagcgctacgatatggtgctcaatcttgccgatcagtggcccagcgcgatcatcaccaaactgaccggggcggccatccgtatcggctttgactttccgaagcgtcgccacccggcctggcgtttttgccataccgccctcgcctcaaccgagcggcataaccagctgcataccgtgcagcagaatctgtcgattctggcgccgcttgggctggatattgctgacgcgccggcgacgatgggctacagcgagcaggactggcgcgccagccgcgcgctgctgccggcaggatttcaggataactatatcgtcattcagcccacctcccgctggttctttaagtgctggcgcgaagggcggatgagcgccctgataaacgcgctttctgaagcaggctacccggtcgtgctgacctccggccctgacgccagagagaagcagatgatcgacaccattatggcgggctgccccaatgctcgcctgcactccctcgccgggctgctcaccctgcgccagctggcgtccgtcatcgaccatgcccgcctgtttatcggcgtcgactccgtgccgatgcatatggccgccgcgctcggtacgccgctggtggcgctattcggcccctccaagctcaccttctggcgtccatggcaggcgcagggcgaggtgatttgggcgggtgatttcggagcgattcccgatcctgacgacattgataccaacaccaacgaacgctttctcgatttaatccccaccgacgcggttatcgcggcggcgaaaaaggtactggcatga

SEQ ID NO: 188047 - DNA, 963 bp, Klebsiella oxytoca
gtgcacaaacccgcatttctcatcacgattgatacagagggtgataacctctggcaaaaacatgacagcatcaccaccgagaatgcgcgctatctaccgcgttttcagcagctttgcgaaaagtatggttttaaaccggtctggttgaccaactatgaaatggccatcgacccggtttatatcgaatttgccaaagatgcgatcgcccggggaaccgcggaaatcggtatgcatctccacgcgtggaacagcccgccgaccgatccgctcaccgatgacgactggcgacataaaccgtatttgatcgagtacagcgatgcggcgatgcgggcaaaagtcgactatatgacccgcctgctggaggacacctttcagaccaaaatggtcagccatcgcgccgggcgctgggcgtttgacgagcgctacgcgcgtctgctggtggagtatggctatctggtggattgctcggttaccccgagggtgaactggaagacggcgaaaggcgcgccgcagggcgacggcggtaccgattaccgtcatttcccgcagcacgcctattttcttgacgagaatgatatccgtcgtgaagggcaatcatcgctgctggaagtgccgatgagcattcagtacaagcattccgcgtggatgaatagcctgaagcagggctacgatcgcctgcgcggcaaagtacgctcgccgtcggtacactggctgcgtccgatgggcggcaacgttgagacgatgaaaaaagtggtcgaacaaacgttgactcagggtaatgactacgtcgaatatatgctccactcttcagagtacatgcccggcggcagcccaacgtttaaaaacgagcaggatatcgagcgcttatatgccgatctggacgcttttttcagctggctggcgccgcaggtgaagggaatgacgttggcggagtactaccaacagaaactcacacagcgataa

SEQ ID NO: 188048 - DNA, 1083 bp, Klebsiella oxytoca
atgcgtatcgtgaagcagtttacgcggaagaaaaatgccttcttccgcgaaattaagtttaatttaattaactatcgttacagaaataaaagcgcacgccagccctttaattccgcgaagattcagcatgttttattattgcgcctggatgacaaagttggggatatggtcgtaacgaccggctgcgcaaagcttttagctgaccggggctataaggtttcggttcttaccgggccggtttgtaaacagatgcttgccggtgcggattttcttgagcaggtttatttatatcagccgcggatgccgttaaacgcactgcgtgcggcaggatttgacgcggtcgttgattttgatgacgtgaaaacctacgagcgttttaaactgctggctgatttacgccctggctgcgttatcggttttaataaacaagaatataagctttacgatcactccatcccttttctggatagcagcagccatatttccgcgcgctataaagccgtcgccaggctatttggtatagaacaccctcattaccactatcatctgcccggcgatgcttttgagcgggaaagagtcaaaacactgctggctcagcacaaggggagtcagctctgtattgccataaacccgtttaccgcctcaacggataaagacttttgccgtcatcaggtttctgctctgattgaacgcttatatacgctcccttataaaatcagcgtcgtgatggtcgggcatagcgagaaaattcgtcagcttaatctggaaacggcgctgcatctgccagatagcaatattaattcagcggttgagattgttcgccactgcgatctggtgattacggcggataccgccatcgtgcatattgctcgcgcgttcgacaagcccatggtggcggtttacaacaaacgtaaactcaaagataccggtttgccgggctataccatttgggcgccgggttatgacaaggccagacaaattgtctgcgaagagactaacgtcgccgacatgaccattgacgcggtctggccggtcatcaaagcgcaggtggatgccctgatcgccgctcgccagcaggcataa

SEQ ID NO: 188049 - DNA, 1167 bp, Klebsiella oxytoca
atgagtactttaaaaataagtaattacgccagacagggctacaccgttttcttcactttgtttctgttttttagcgctattttctgcgtatcaacccggacaaataacctccttcatttatctattttgctctttttgctttcactgcttaacaaagacaaccgtcaggcaatagcggaaagcatccgccagcggtggccggtttatagcctgctggtggtattctgcgtgtactatgcgctgagcaatatttgggggcagacgccgcagcatatcgattcccctctgacccacggcacctatttaattttctatcttctgctgctgacaacgctactttgccatccccggacccgacatctggcgctgctgagcgtcgtggccgggatcacggtgctctccgtctggacgatggcgatcgacttcacgctggtcctcaaggaacgcctggtttcgccggagaatcccggcccgaccaacgtgatcgacctggcgggctattgcggtatcggcatccttatttgcgcgatgctgctgaaggagaaaggcagccacctgctgtatgtgccgatggccatcatgctggtgatgctgtttctgacccaaagccgcggcccgattatcgcgctgctggtggcgtttatttgcaccctgcacctgcacgtctttacccgccgcaaccttctgattgtcgccgcgttagcgttggttctgggcgcgcttttcttctttacgccaacgggagacctgctgctggcgcgctttgaagagctgggcacccaaagcggattgcgcttgagtatctggcaccatacggtacaggaagtggccagccagccgtggctgggtcggggctttgactacgagctgaactttaccaactacagcggcgagcatatcactaccacccacagcgtctatcttggtgctctgttgaaaggcggcataatcggcctggcgctgctgctggcggtgattgccggagggttatggcatgcatggcgtaaacagcaggatggccgctacgggctggcgatttttatctatgcgctgatttttatggcctcgcagggcatgtttatcatcagcaaccctcgcgaaagctggccgctgttttggctgccgctgggcatcgcgctgagcggcagcctgaaggcgaaacgctaa

SEQ ID NO: 188050 - DNA, 909 bp, Klebsiella oxytoca
atgggttcattatttaagcagatctatcgctacacgcatcgacgcgcctttcgccataacgaaaatctctggccgtttacccatatcacgcgcgcggcgagcggcgaaatccgcaccctgaaatacaaagggaaagcggttccgctggtcaatctcagcgaactgaaggatagcgctcagggcgaggtgctgctgaccgccaccggcccctctacgcgccgcatcgattttacgctgctgccgaaaagtattccggtgatgggggtgaacggcgcctggcatctctctgataaaattaaattttcgctctataccatcgtggatatggagttttacgataaaaaaccggacgtgatccgttcggtgattagccaggctgacattgtgctcttcaccaccatgcacggtatcgccaaaatcctcgaccgccacggcgcagagcttcgctgtcgtttggcattaattgaagacgcctgttataaaatttatcagcctaaagtcgcaaaaaacgcgatacagcaggcctggcgcggcgtccccgcgctacgctttcatccgcaaaggcaggatatttgctttagcaccgacattcgtcacggcattttcgatgccggaaccgtggtctactgggcactgcaaattctgatgtggctgggatttaaaaccattctgataagcgggctggatatgagtaatttcaaccagccgcgattctacgaaacggaacaggataaactcccctcctggctggcaaataaggtggatgacctggtcatgccgtccttttcgcacgctgccaacgtgctgcaacaaaaccatattcgggtcgtcaacttctcgttagaaagcgcggttccggaaacgattttcgaaaaggtttcttttgatgagtactttaaaaataagtaa

SEQ ID NO: 188051 - DNA, 972 bp, Klebsiella oxytoca
atgcgggtactgatcgtaaaaacctcgtccatgggcgacgtgctgcacacgctgcccgcgctgagcgacgccgcgctggcctttcccggcattcgtttcgactgggtggttgaagaaggcttcgcgcagatcccttcctggcatgagagcgtcgaccgggtcatcccggtggcgattcgccgctggcgcaaggcgtggttttccgcgccgatcaaagccgagcgcaaggcgttccgcgaggccgtgcgcgcggaaaagtacgacgctatcatcgatgcccaggggctggtgaagagcgccgcgctggtcacccgactggcccgcggcgtgaagcacggtatggactggcagaccgcccgcgagccgctggcaagcctgttttacaaccgtcgtcaccatatcgctaaacagcagcacgccgttgagcgcacccgcgagctgttcgcgaaaagcctcggctacgcgaagccggaaacccagggcgactacgcgatcgcccgccattttttgcgtcaggctgacccgtccgctgcgccgtatctggtgttcctccacgccacgacgcgcgatgataaacactggccggaagagaactggcgggcgcttatcgccctgcttgccgacagcggcatacgcatcaaactgccgtggggcgccccccatgaagaggcgcgggccggacgcctggcagaagggcacgatttcgtcgacgtcctgccgcgcatgagcctggagcaggtagcccaggtgctggccggcgcgcgcggggtcgtttccgtcgacacggggctgagccatctcaccgccgcgctcgataaaccgaacttcacgctgtacggcccgaccgatccggggctaattggcggctacggtaaaaatcagcacgtggtgcgcccggaaagcggcagcagcacgggcgatattcccgcgtcccgggttcggcaactgttgaaatctcaggaactggcttaa

SEQ ID NO: 188052 - DNA, 1059 bp, Klebsiella oxytoca
atgaaaatattggtggttggcccgtcatgggtgggcgacatgatgatgtcgcaaagtctttaccgtacgctcagggcgcgctatccccaggcgataatcgacgtgatggcgcccgcatggtgccgtccgctgctatcgcgcatgccggaagtcaacgaagcgatcccgatgccgctcggccacggcgcactggaaatcggtgaacggcgtaagcttgggcacagcctgcgcgaacgtcgctacgatcgcgctttcgtgctgcccaactcgtttaaatcggccctcgtgccgttctttgcgggaataccgcatcgcacaggctggctcggcgaaatgcgctacggcctgctgaacgacgcccgtaagctggataaagacgcctggccgctgatggtcgaacgctacgtcggtctggcctacgacaaaggcgtgatgcgctgcgcgaaagatctgccgcagccgctgctctggccgcagctgcaggtgcatgaaggcgaaaaatcgcaggcctgcagcgcgtttaatctctcagccgagcgcccgattatcggcttctgccccggcgcagagttcggcccggcaaaacgctggccgcactatcactacgccgagctggcgaaacagctgatcgacgaaggctttcagatcgtactgtttggctccgcgaaagaccacgaagcgggcaatgaaatcctcgccgcgctcacgaccgaacagcaggcatggtgccgcaatctggccggcgaaacccagcttgagcaggccgttattctgatcgccgcctgtaaagcggtggtcagcaacgattccggcctgatgcacgtcgccgcggcgctggaccgtccgctggtggcgctctacgggcccagcagcccggacttcactccacctctgtcgcacaaagcgcgcgtgatccgcctgatcagtggctaccacaaagtgcgtaaaggcgacgccgccgaaggctatcatcagagtttgatcgacattacgccgcagcgcgtactggaagaattaaacgacctgctgctggaaaaaacggaacaagaggaagcctga

SEQ ID NO: 188053 - DNA, 945 bp, Klebsiella oxytoca
atgatcatcgttaccggcggcgcaggctttatcggcagcaatatcgttaaggcgctgaatgaccagggtattaccgacattctggtcgtagataatctgaaagacgggaccaaattcatcaatctggtggatttgaacattgccgactacatggataaagaagactttctgatccagattatggcgggcgaagagttcggcgatatcgacgctattttccatgaaggcgcctgctcttccaccacggagtgggacggcaagtacatgatggataacaactatcagtattccaaagaggtactgcactactgtctggagcgtgaaatcccgttcctgtacgcctcttccgcagcgacctacggcggccgcaccagcgactttattgaatcccgcgaatacgagcagccgctcaacgtttacggctactccaagtttctgtttgatgaatacgtccgtcagatcctgccggaagcgaactcgcagattgtcggcttccgctatttcaacgtctacgggccgcgcgaaggtcataaaggcagcatggccagcgtcgctttccatctgaacacccagctgaataatggcgaaagtccgaaactgttcgaaggcagcgacggcttcaagcgcgacttcgtctacgtcggcgacgtcgcggcggtgaacctgtggttctgggaaaacggcgtttccggcatcttcaacctcggcaccgggcgcgcggagtctttccaggccgttgcagacgcaacgctggcttatcaccagaaaggcagcatcgagtacattccgttcccggataaactcaaaggccgctatcaggcgtttacccaggcggatctgactaacctgcgcgcagcgggctacgataaaccgtttaagaccgttgccgaaggcgtaacggaatatatggcctggctcaatcgcgacaatcatgcgaattcataa

SEQ ID NO: 188054 - DNA, 1194 bp, Klebsiella oxytoca
atgcgtggggatttctacaaacagttaaccaatgacctggataccgcgcgtgcggaagggttgtttaaagaagaacggattatcacttcggcgcagcaggcggatatcaccgtcggcggcagccaggtcattaacttctgcgccaataactatctcggcctcgcgaaccacccggaactgattgccgccgcgaaaagcgggatggacagccacggcttcggcatggcctccgtgcgctttatctgcggtacccaggacagccacaaagcgcttgagaagaagctggccgattttctcggtatggaagatgcgattctgtactcctcctgcttcgacgccaacggcggcctgtttgaaaccctgctcggcgcagaggacgcgattatctccgatgccctgaaccacgcgtcgatcatcgacggcgtgcgcctgtgtaaagcgaagcgcttccgctatgccaacaacgatatgcaggagctggaagcccgtctgaaagaggcgcgtgaagccggcgcgcgccatgtgctgatcgccaccgacggcgtgttctccatggacggggtgatcgccaacctgaagggcgtctgcgatctggcggataaatacgacgcgctggtgatggtcgatgattcgcacgccgtgggttttgtgggtgaaaacggccgcggctcccatgagtactgcgacgtgatgggccgcgtcgacattatcaccggtacgctgggtaaagcgctgggcggcgcgtccggcggctataccgccgcgcgtaaagaagtcgtcgagtggctgcgccagcgctcgcgtccgtatctgttctccaactcgctggcgccggcgattgtcgccgcctccatcaaagtgctggagatggtggaagcgggcagcgagctgcgcgatcgtctgtgggctaacgcgcgcctgttccgtgaaaaaatgaccgcggcagggtttacccttgcgggtgccgatcacgccattatcccggtgatgctcggtgaagccaccgtggcgcagcagttcgcgcgcgagctgcaaaaagaaggtatttacgtcaccggattcttctacccggtggtaccaaaaggccaggcgcgtatccgtacccagatgtctgcggcgcatacccctgaacaaattgaacgtgcggtggaagcctttacccgcatcggtaaacaactgggcgtcattgcctga

SEQ ID NO: 188055 - DNA, 1026 bp, Klebsiella oxytoca
atgaaagcgttatccaaactgaaggcggaagaaggcatctggatgaccgacgtaccggaaccggaagtcggccacaacgatctgctgattaaaattcgcaagaccgcgatttgcggtaccgacgtgcacatctacaactgggacgagtggtcgcagaagaccattccggttccgatggtggtggggcatgaatacgtcggcgaagtggtgggtatcggtcaggaagttcgcggctttaagctgggcgaccgcgtttccggcgaagggcatatcacctgcggccactgccgtaactgccgcgccgggcgtacgcatctgtgccgcaatacgacgggcgtcggcgtcaaccgtccgggctgttttgccgaatatctggtgatcccggcgtttaacgcctttaaaatccccgacaatatctctgacgatctggcgtcgattttcgatccgtttggcaacgccgtgcataccgcgctttcattcgacctcgtcggtgaagatgtgctggtttccggcgccggcccgatcggcgtgatggccgccgcggtggcgaaacacgttggcgcgcgcaacgtcgtgattaccgatgttaacgaatatcgcctggagctggcgcgcaaaatgggcgtcacccgggcggtgaacgtggcgaaagagaaccttaacgatgtgatggccgagctgggcatgaccgagggtttcgacgtgggtctggagatgtccggcgcgccgccggcgtttcgcaccatgctcgataccatgaaccacggcgggcgtattgccatgctgggtattccgccgtcggatatgtctatcgactggaccaaggtgattttcaaggggctgtttatcaaagggatttatggtcgcgaaatgttcgaaacctggtacaagatggccgcgctcatccagtccgggctcgatctgtcgccgatcatcacccatcgctttggcattgatgatttccagcagggctttgacgcgatgcgctccggccagtctggcaaagtcattctcagctgggattaa

SEQ ID NO: 188056 - DNA, 798 bp, Klebsiella oxytoca
atgcttaaactttctgtatgcttattgacctgtaattcatcccgcttattacgggaggtgttaccaccgctgctcagggtggctgatgaatttatcgtcgtcgattcaggcagtacggatgctacgctgcagatttgccaacagttcggtctctccgttcaccatcatccttatacggctcacggtacgcagatgaattatgcgacctctctggcccgccacgactgggtgctgtgtgtggacagcgatgagatccttgacgacgaggtggtggcggcaattctggcgctcaaggccggcgatgagccggaccccgcctgcgcatggcgtctgccgcgctactggttcgtgctgggtgaagaggtgcgcaccatttatccggtatcatcgccggatttcccggttcgcttgtttaatcgctccgtcgccaggttcaacgatcggccggtagacgatcaggtggttggctttacgcactctgcccggctaccgggattcgtgcgccacgataccttctactccctgcatgaagtgtttagtaagctcaatagctacaccacgcggctggttaaacaccagaaaatcaggccgtctcttgcgcgcggagcgatcagcgcgattggcgctttctttaagtggtatctgttcagcggagcgtggcgaaagggcaaggttggcgtggtcaccgggctttacgcgaccttttacagctttcttaaatactttaaagcctggtatgcccatcaggacaagccggaatccgcggcggataagcacacggactcccggatgatttag

SEQ ID NO: 188057 - DNA, 888 bp, Klebsiella oxytoca
atggcgtcgccggtttttgccggcaaactctccattgttatcgacgactttggctatcgtccacaaacggaaaaccaggtgctggcgctgccagcgacgatctccgttgccgtccttcctaatgcgccccacgcccgagaaatggcgaccaaagcgcataatctcggccacgaggtgctcatccacctgccaatggcgccgctcagcaaacagccgctggaaaaagacaccctccgcccggatatgaacagcagcgagatagagcgcattatccgcgaagcctacggtaaggttccgtacgccgtggggctgaataaccatatgggcagcgccatgacgtcgaatctcttcggcatgcagaaggtgatgcaggcgctcgagcgctacaatctctacttcctcgatagcgtcaccatcggcaatacccaggccatgcgcgcggcgcagggcaccggcgtaaaggtgattaagcgtaaggttttcctcgacgatacccaaaacgaagcggatatccgctatcagttcagccgcgctatcgctttggcgcggcgcaacggttccgccattgctatcggccacccgcacccgacgacggtgcgcgtgctgcagcagatggtgtataacctgccgccggatatcactctggttcgcccgagcagcctgctcaacgagccgcaggtggatacctcaacgccgaacaccgcgccgccgtccgttcagccgccgcgcaatccgttccgcggcgtgaaacagtgcaaatctaagcgtccgccggagccggtcaacgccagccgcttctttaccattctgagcgaaagcatcactcagagcacgctggtgcagtattaccagctgaagtggcagggctgggataagcctaccaactaa

SEQ ID NO: 188058 - DNA, 1272 bp, Klebsiella oxytoca
atgaggggaaaggcgacgtattcaactacatggatcgcaacggcagttcgatccgtcttttacgccagcgcgcttagcgctggcgtattgctgtgcgcctcatctgctcacgccgacgatcgcgaccagcttaaatccattcaggccgatatcgccgctaaacagcgggcgattaagcagcagcagcagcagcgcgcttccctggtcgcccagcttaaagcgcaggaggaggccatctccgccgccgcgcgcaagctgcgcgaaacccaggaaacgctgaaccagctgaataagcagatcgatgaaatgaacgccgcgctggccaagctggagcgtcagcgcgcctcgcaggagcgtaacctttccgcgcagctcgacgccgcgtttcgtcaggggccgcataccggcatccagatgatcctcagcggcgaagaggggcagcgtaatcagcgcctgcaggcctactttggctatctgaaccaggcgcgccaggaaaccatcgcccagttgaagaaaacccgcgaagacgtggcggtgcaaaaatcgatgctggaagagaaacagagccagcagcaaaccttggtgtacgaacagcgcgcccagcagagcaagctggagcaggcgcgcaacgagcgtaaaaagaccctcgccagcctggaatcctccattcagcaaggccagcagcagctcagcgagatgcgggctaacgaatcacgcctgcgcggccgtatcgcccaggcggcggcggcggccaaagcgcgggcggatcgcgaagcccgcgaagcgcaggatgtgcgcgatcgccagcaggaagcctcgcgtaaaggcaccacctacaaacctaccgaaagcgaacgctcgctgatgtcccgcaccggcgggcttggctcaccgcgcggccaggcattctggccggttcgcggctcaattctccatcgctatggcgaacagctgcaaggtgaactacgttggaaggggatggttatcgctgcgtctgaaggcaccgaggtcaaagccgttgccgatggtcgggttattctcgccgactggctgcagggctatggcctggtggtggtcgttgaacacggcaaaggcgacatgagtctttacggctataaccaaagcgcgctggtcagcgtcggcactcaggtccgggcgggccagccgatcgctctcgtaggcagcagcggcggtcagggccgtccgtcgctctatttcgaaattcgccgccagggtcaggcggtcaatccacagccgtggttgggaagataa

SEQ ID NO: 188059 - DNA, 1545 bp, Klebsiella oxytoca
atgtcggtttctaaaaaacctatggtactggtgattctggatggctatggctaccgtgaagaccagcaggataacgctatttacagcgccaaaacccctgttatggacgcactgtgggcgaaacgtccgcataccctgattgatgcttcaggcctggaagtcggtctgccggatcgtcaaatgggcaactccgaagtgggccacgtcaacctcggcgcgggccgtatcgtgtatcaggatctcacccgcctggacgttgaaatcaaagaacgtaccttcttcgccaacccggtactgaccggcgcggtcgataaagccgttgccgcaggcaaagccgtgcatatcatgggcctgatgtctccgggcggcgtccacagccacgaagaccacatcatggcgatggttgagctggcagccgaacgcggcgcggataaaatctatctgcacgccttcctcgacggccgcgatactccgccgcgcagcgctgaaaagacgctggcgaaattcgaagacaaatttgccgcgctgggcaaaggccgcgtcgcctcgatcgttggccgctactacgccatggaccgcgacaaccgttgggaccgcgttgagcaggcttacgatctgatgaccctggcaaaaggcgaattccaggccgataccgccgttgcgggcctgcaggccgcttatgcgcgcgatgaaaacgatgagttcgtgaaagcgaccgttattcgcgctgaaggccaggccgatgcggcgatggaagacggcgatgcgctgattttcatgaacttccgcgccgaccgcgcgcgcgaaattacccgcgccttcgttaacgccgatttcgacggcttcgcccgtaagaaagtggtgaacctcgatttcgtcatgctgaccgagtacgccgcggacattaaagtcgcctgcgcttatccaccggcatctctggtgaacaccttcggcgaatggatggcgaagaacgacaaaacccagctgcgcatctccgaaactgaaaaatacgctcacgtgaccttcttcttcaacggcggcgttgaagagccgttcaaaggcgaagagcgcattctgatcaattcaccgaaggtcgccacctacgatctgcagccggaaatgagctccgctgagctgaccgaaaaactggttgccgccatcaagggcggtcagttcgacaccatcatctgtaactacccgaatggcgatatggttggccacaccggcgtaatggaagccgccgttaaagcggtcgaagcgctggatgactgcatcgaccaggtgagcaaagccgttgaatccgatggcggacagctgctgatcaccgcagaccacggcaacgccgagcagatgcgcgatccggccaccggccaggcgcacaccgcgcacaccaacctgccggttccgctgatttacgttggcgataaaaacgtcaaagcggtcaacggcggcaaactttccgacatcgcgccgaccatgctgacgctgatgggaatggaaatcccgcaagagatgactggcaagccgctgttcatcgtggaataa

SEQ ID NO: 188060 - DNA, 432 bp, Klebsiella oxytoca
atgcaagaaattatgcaattcatcagccgtcaccccgtcctgagcatcgcgtgggtcgcgctgctggtggcggtgctgttcaccacctttaaagggctgatgtcgaaagttaaagtcatcacccgcggtgaagcgacgcgcctgatcaacaaagaagatgccgtggttgtcgacctgcgtcagcgtgacgatttccgtaaaggccacattgcgggttctattaacctgctgccgagcgatatcaaagcaaataacgtcggcgagttggaaaagcacaaagcacaacccattatagtggtagacggctcaggtatgcaggcgcaagaacccgccagcgcgctgaacaaagccggttttgaaaaggtcttcgtactgaaagaaggcatcgctggctggagcggcgagaaccttccgctggtacgcggtaaataa

SEQ ID NO: 188061 - DNA, 252 bp, Klebsiella oxytoca
atggccaatattgatatctataccaaagcgacctgcccgttctgcgtacgtgcaaaagcgctgctgaacagcaagggcgtgacgttcaacgagttgcctatcgatggcgatgctgcgaagcgtgaagagatgattcagcgcagcggtcgaacgacggttccgcagatttttattgatgcgcagcacattggcggctgtgacgacttgtacgcgcttgattcacgtggtggactcgatcccctcctgcgctaa

SEQ ID NO: 188062 - DNA, 468 bp, Klebsiella oxytoca
atgtcagaacaaaacagcaccgaaatgactttccagattcagcgcatctacaccaaagatatttcttttgaagcgccgaacgcgccgcaagttttccagaaagattggcagccggaagttaaacttgatctggataccgcttccagccagctggctgaaggcgtgtatgaagtggtgctgcgcgtgaccgtaaccgcctctctgggcgaagaaaccgcattcctgtgcgaagtacagcagggcggtattttctccatcgaaggcatcgacggcacccagatggcgcactgcctcggcgcatactgcccgaacattctgttcccgtacgcgcgtgagtgcatcaccagcctggtttctcgcggcaccttcccgcaactgaaccttgcgccagtgaacttcgatgcgctgtttatgaactatctgcagcagcaggctggcgaaggtgctgaacaacatcaggatgcctga

SEQ ID NO: 188063 - DNA, 1017 bp, Klebsiella oxytoca
atgaacgcgcttaacgctgcaatgactgtgatcggtgccggctcttacggcaccgctcttgccatcaccctggcaagaaatggccaccacgttgtgctgtggggccatgacccgaaacatattgcgacgctgcagcacgaccgctgcaacgccgcatttcttcctgacgttcctttccccgacacgctgcatctggaaagcgatctggcgaccgcgctggcggccagccgcgatatcctcgtcgtcgtgccgagccacgttttcggccaggtgctgcggcagattaaaccgctgatgcgccccgacgctcgcctggtatgggcgacgaaaggtctggaagcggaaaccgggcgcctgctgcaggacgtggcccgtgaagcgctgggcgacgcgatccccctggcggtgatttccggcccgaccttcgcgaaagagctggcggcaggcctgccgacggcgatctcgctggcgtcgacggatccgcagttcgctgacgatttgcaaagcctgctgcactgcggcaagagcttccgcgtctatatcaacccggactttatcggcgtgcagctcggcggggcggtgaaaaacgtcatcgctatcggcgccggcatgtctgacggcatcggctttggcgccaacgcgcgtaccgcgctgattacccgcgggctggttgagatgtcgcgcctcggggaggccctgggcgccgatccggagacctttatgggaatggcgggcttaggcgatctggtgctcacctgcaccgataaccagtcgcgtaaccgccgcttcggcatgatgctcggtcagggcatggatgtgcaaagcgcgcaggagaagattggccaggtggttgaaggctatcgcaataccaaagaggttcgcgttctggcgcagcgtttaggcgtcgaaatgccaataaccgaggaaatttatcaggtattgtattgcggaaaaattgcgcgcgaggcagcattgaccttattaggtcgtgcacgcaaggacgagcgtagcaactaa

SEQ ID NO: 188064 - DNA, 822 bp, Klebsiella oxytoca
atgccgtgtgaagaactggatatcgtctggaataatattaaagccgaagctcgggctttagctgactgtgagccaatgctcgccagtttttaccacgccacgctactcaagcacgaaaatctcggcagcgccctgagctatatgctggcgaataaactggcttctccgatcatgcccgccatcgcgattcgtgaagtggtggaagaggcctacgccgccgacccggaaatgattgcctccgccgcctgcgatattcaggcggtgcgaacgcgcgacccggcggtggataaatactccaccccgctgctctatctgaaaggattccacgcgctgcaggcctatcgtatcggccactggctgtggaatcaggggcgtcgggcgctggcgatcttcctgcaaaatcaggtttccgtatcgttccaggtggatatccacccggcggcgaagattggtcgcgggatcatgctggaccacgccaccggcatcgtcgtcggcgaaacggcggtgattgaagacgacgtatcgattctgcaatccgtgaccctgggcggtaccggtaaaaccagcggcgatcgtcatccgaaaattcgcgaaggggtgatgattggcgccggggcgaaaatcctcggcaatatcgaagtcgggcgcggggcaaaaatcggcgcgggttcggtggtgctacagccggtgccgccgcatactaccgccgcaggcgttcccgcccgaatcgtgggcaagccggagagcgataagcccgcgatggatatggatcagcactttaacggcatacaccataccttcgagtacggcgacggtatttga

SEQ ID NO: 188065 - DNA, 474 bp, Klebsiella oxytoca
atgcttaacatcgtcttattcgaaccagaaatcccgccaaataccgggaatatcatccgcctgtgcgccaacaccggcttcaatctgcatattatcgaacccatgggttttgcctgggacgataagcgtcttcgccgcgcaggtctggattaccacgagtttgctgccgtccagcgccatggtgattacgccgcctttattgaaagcgcaaagccgcagcgcctgttcgccctgacgaccaaaggcacgccggcgcacagcgcggtaagctatcaggacggcgattttctgctgtttggcccggaaacccgcggactgccgggcagtattcttgatgctctgccggcagaacaaaaaatccgtattccgatgatgccggacagccgcagcatgaacctgtcaaatgcggtgtcggtggtggtctatgaagcctggcgccagctgggctatcccggcgcggtgctgcgcagctga

SEQ ID NO: 188066 - DNA, 1236 bp, Klebsiella oxytoca
atgattatttccgccgccagcgactaccgcgccgccgcacagcgtatcctgccaccgttcctgttccactatatcgacggcggcgcttacgccgagcacaccctgcgccgcaacgttgaggacctgtccgacgtcgcgctccgccagcgcattctgcgcaatatgtcggacctgagcctggaaaccaccttattcaacgagaagctggcgatgccaacggcgctggcgccggttgggctgtgcgggatgtacgcccgccgcggtgaagtgcaggccgccggcgcggcggatgaaaaaggtattccgtttaccctctctaccgtttccgtctgcccgattgaagaggtcgccccgaccattaagcgcccgatgtggttccagctgtacgtcctgcgcgaccgcggttttatgcgcaatgcgctggagcgggcgaaggcggcgggctgttcaacgctggtctttaccgtcgatatgccgacccccggcgcgcgctatcgcgatgctcactccgggatgagcggcccgaacgcggcaatgcgccgctactggcaggcggtgacccatccgcagtgggcatgggacgtcgggttaaacggccgtccgcacgatttgggcaacatctccgcctacctcggcaagccgaccggtctggaggattatatcggctggctggcgaataacttcgatccttcgatttcctggaaagaccttgagtggatccgcgacttttgggacggtccgatggtgatcaaggggatcctcgatccggaagacgcccgcgatgcggtgcgcttcggcgctgacgggatcgtggtttctaaccacggcggccgccagctcgacggcgtgctctcttccgctcgcgctctgcccgcgattgccgacgcggttaaaggcgatatcacaattcttgccgacagcggtattcgcaacggccttgatgtggtgcggatgattgccctcggcgccgatagcgtgctgctgggccgcgcttatctgtatgcgctggccacgcacggcaaacagggtgtcgccaatctgctgaacctgatcgagaaagagatgaaggtggcgatgacgctgaccggcgcgaaaaccatcggcgaaatcagccgtgaatctttagtccagaacgccgatgcgctgcggacctttgatgcgatcaaagcgggaaacgcggcggttatccctgaccctctcccacagggagagggaaccgtccggcaggcgggttaa

SEQ ID NO: 188067 - DNA, 774 bp, Klebsiella oxytoca
gtgatagtgatgccaaaacgccttgccgacgacgtcgcccgtcgcgtgcgggcgctgattgaagaacaaaagctggaggcgggcatgcgattgcccgccgaacgtcagctggcggcgcagctgggcgtatcgcgcaattcgctgcgcgaagcgctggcgatgctggtcaacgaaggggtgctgctcagccgtcgcggcggcggcaccttcgtgcgctggcagcacgaagcgtggtcggagcaaaacatcgttcaaccgctgaagacgctgctctccgacgaccccgattacagctttgatattctcgaagcccgtcacgccatcgaagccagtaccgcctggcatgcggcgatgcgggcaaccgatgccgaaaaagagaaaatccgcctctgctttgaagccacccaaagcgaagaccctgacctggcctcgcaggccgatgtccgcttccatctggcgatcgccgaagcgtcgcacaacgtggtgctgctgcaaaccatgcgcggtttttttgaccttttacagtcctcagtcaaggagagccgccagcggatgtatctcgtcccgccggtcttcgctcgcctgaccgaacagcaccaggcagtcatggaggcgattatcgccggtgacccggaaggtgccagacaggcgatgatggcccatttgggctttgttcacgccaccatcaaacgctttgatgaagaccaggcccgccaggcgcgaattacccgcctgcccggtgaccataacgaaaattccagggagaacttgtga

SEQ ID NO: 188068 - DNA, 1656 bp, Klebsiella oxytoca
atgaacctctggcaacaaaattacgatccggccggcaacatctggctatcgagtcttatcgcatcgctaccgattctgtttttcttttttgccctgataaagctcaagctgaaagggtacgttgccgcgacctggaccgtgctcattgcgctctccgtcgctctgctgttctacaaaatgccggttgaccacgcgctggcctccgtcatctacggcttcttctacggcctgtggccaatcgcgtggattattatcgctgcggtcttcgtctataaaatctcggtgaaaaccgggcagttcgacattatccgctcatcgattttgtcgattaccccggatcagcgtctgcaaatgctgattgtcggtttctccttcggcgcgttcctcgaaggggccgccggttttggcgcgccggtcgccatcaccgcagcgctgctggtggggctcggctttaacccgctgtatgcggcgggcctgtgtctgattgttaacaccgcgccggtcgcgtttggcgcgatgggcattccgattctggtagccggacaggtgacgggcctcgacagcttcgaaatcggccagatggttggccgtcagctgccgttcctgaccatcatcgtcctgttctggatcatggcgattatggacggctggcgcggcattaaagagacctggcctgcggtcatggtcgccggcggctcctttgctatcgctcagtacctcagctctaacttcctcggcccggagctgccggacattatctcttcgctggtatcgctggtctgtctgacgctgttcctcaaacgctggcagccggtacgcatcttccgcttcggcgatatgggcgcatcgcaggtcgatatgaacctggcccgcacgcattacacgccgggacaggtgattcgcgcctggtcgccgttcctgtttctgaccgcgacggtgaccctgtggagtgtgccgccgttcaaagcgctcttcgcccccggcggcgcgatgtacgattttgtgattaatatttccgtgccgttcctcgacaagatggtggcccgcatgccgccggtggttagcgaagccacgccgtacgccgcggtctataagtttgactggctctccgccaccggcaccgccatcctgttcgccgcgctgctttccatcgtctggctgcgcatgaagccgaaagacgcgatctcgacctttggcagcacgctgaaagagctggcgctgccgatttactccatcggcatggtgctggcgttcgcctttatttccaactattccggtctatcctcaacgctggcgcttgcgctggcgcacaccggtcatgcgtttaccttcttctcgccgttcctcggctggctgggggtatttctgaccggttcggatacctcgtctaacgcgctctttgccgcgctgcaggctacggcggcccagcagattggcgtctccgatatcctgctggtcgcagcaaacaccaccggcggcgtgaccgggaaaatgatctctccgcagtctatcgccatcgcctgtgcggcggtcggtctggtaggtaaggagtccgatctgttccgttttaccgtcaaacacagcctgattttcacctgtatggtcggcgttatcaccacgctgcaggcgtatgtcttaacctggatgatcccgtga

SEQ ID NO: 188069 - DNA, 363 bp, Klebsiella oxytoca
atgaaagaagtcgaaaaaaacgaaattaaacgtctgagcgatcgtctcgacgctatccaccaccagcaggccgacctgtccctggtcgacgccgcagaaaaatacgccgagctggaaaaagagaaagccaccattgagacggaactcgttcgcctgcgtgaggttcagggccagaagctgagcaaagaagcgcaaaagctgatgagcatgccgcatcgccgcgccatcaccaaaaaagagcaggccgatatgggtaagctcaagaaaagcgtacgcggtctggttgttgtccacccgatgaccgcgctgggccgcgaaatggggctcaaagagatgaccggcttctcaaaaaccgcgttctga

SEQ ID NO: 188070 - DNA, 225 bp, Klebsiella oxytoca
atggcgaaaataggcgacagcgtaccgcgcattattgataaagccgtagattttatggcttcaagtcaggcttttatggaatatctaaaaaaatctccgcgtttgcagcatataccgccggatattccggcagataaagaagcgctatttctgcggcgtcttgagtattatcgtcagctttatcggccgacgtgcgaccagcaagagccagaatcagagcgttga

SEQ ID NO: 188071 - DNA, 534 bp, Klebsiella oxytoca
atggaagaaacacaggcatttgaaaaccgtgtgcttgaacgtctgaatgctggcaaaaccgtaagaagcttcctgatcgccaccgttgaactgctgacggaagcggtcaatattctggtgcttcaggtattccgtaaagacgactacgcggtgaaatacgcagtggagccgttgctggacggcgacgggccgcttggcgacctttctgtacgcctgaagctgatttacggccttggggtgattagccgcgccgaatatgaagacgctgaactgctgatggccctgcgcgaagagctgaatcacgacggtaatgagtatagctttaccgacgatgagatcctcggaccgtttggcgagctgcactgcgtcgccgccctgccgcccacgccgcaatttgatgagagcgatgctgaactgctggcaatgcaaaagctgcgctaccagcaggtcgtacgttccacaatgatgctatctctgaccgagctgatttctaaaatcagcttaaaaaaagcctttcaaaaatcaacgctctga

SEQ ID NO: 188072 - DNA, 1149 bp, Klebsiella oxytoca
atgaaagcattacattttggcgcaggtaatatcggtcgtggctttatcggcaaactgctggcggacgcggggatacagctgacgtttgcggatgtaaatcaggtcgtgctcgatgccctgaatgcccgtcatagctaccaggttcatgtggtcggcgagaatgagcaggtcgataccgtttccggcgttgatgccgtcagcagcatcggcgacgaagttgtagagctgattgccagcgtggatctggtgaccaccgccgtcggcccggtcgtgctggaacgcatcgccccggcgattgccaaaggtctggccaaacgtaaggcgcaggggattaccgccccgctgaatatcatcgcctgcgagaacatggtccgcggcaccacccagctgaagggtcacgtttttaacgccctcgccgaagaagacaaagcctgggttgaagccaacgtcggcttcgttgattccgccgttgaccgcatcgttccgccgtcggcttccgccactcacgatccgctggaagtcaccgtggaaaccttcagcgagtggattgtcgataagacccagttcaaaggcgaactgccgaacatcccaggtatggaattaaccgataacctgatggcatttgtcgaacgtaagctattcaccttaaacaccggacatgctataaccgcctacctcggaaaactggcgggtcatcagacgattcgcgacgcgattcttgatgagcacattcgcgccgtggtcaaaggcgccatggaagagagcggcgcggtgctgatcaaacgctatgcctttgatgcgcaaaagcacgccgcttacatccagaaaattatcggtcgttttgagaacccgtatctgaaggatgacgttgagcgcgttggccgccagccgctgcgcaaactgagcgcgggcgaccgcttaattaagccgctgctcggtacgctggaatacggcctgccgcaccgcaatctggtgaaagggatcgccgctgccatgcacttccgcagcgaagaagacccgcaggcgcaggaactggcggcgctgattgccgagaaaggcccacaggccgcgctggcgcagatttcgggtctggacgcagcaagcgaggtggtggcggaagccgttaacgactataacgccaccaaatga

SEQ ID NO: 188073 - DNA, 1911 bp, Klebsiella oxytoca
atgtcatccgatatcaagatcaaagtgcaaagctttggtcgtttcctcagcaatatggtgatgccaaatatcggcgcgtttatcgcgtggggtattatcaccgcactattcattccgacaggatggttaccgaacgaaacgctggcgaagctggtcggtccgatgatcacctatctgctgccgctgctgatcggttataccggcggtaagctggttggcggcgagcgcggcggcgtggtcggcgcgattaccaccatgggcgttatcgtcggcgcggatatgccgatgttcctcggctccatgatcgccggtccgctgggcggctgggcaattaaaaaattcgacgtctgggtagacggtaagatcaaatccggttttgagatgctggtgaataacttctccgcgggcatcatcggtatgatcctcgccattctggcgttcctcggcattggcccggcggttgaagtcctgtcgaaaattctggccgcaggcgttaacttcatggtggcgcacgagatgctgccgctggcctctatctttgttgaaccggcgaaaatcctgttcctcaacaacgccattaaccacggtattttctcgccgctgggtattcagcaatcccacgagctgggcaaatccatcttcttcctgattgaagctaacccgggtccggggatgggcgtcctgctggcgtatatgttcttcggccgcggcagcgcgaaacagtctgcaggcggtgcggcaatcatccacttcctcggcggtattcacgagatttacttcccgtacgtgctgatgaacccgcgtctgattctggccgttatcctcggtgggatgaccggcgtattcaccctgactatcctcaacggcgggctggtctctccggcttctccgggttctatcctcgccgtgctggcgatgacgccgaaaggcgcttactttgctaacatcgcggcgattattgcggcgatggccgtctccttcgtggtcgcagccgtgctgctgaaaaccagcaaagttaaagaagaagatgatatcgaagccgcgacccgtcgcatgcaggatatgaaagcgcagtccaaaggcggcgccacgccgctggccgctggcgatgtcgcgaacgacctgagccacgtgcgtaaaatcatcgtcgcctgcgacgcaggtatgggctccagcgcgatgggcgcaggcgtgctgcgtaaaaaagtgcaggatgccgggctgagcaacatctccgtgactaacagtgcgatcaacaacctgccgccggatgttgacctggtcatcacccaccgcgacctgaccgagcgtgcgatgcgtcaggtgccgcaggcgcagcatatttcgctgaccaacttcctcgacagcggcctgtacaccagcctgaccgaacgtctggtttcggcgcagcgccacacggataacgaagagaaagtccgcgacagcctgaaagacagcttcgatgcgtctgacaccaatctgttcaaactcggcgcggaaaacatcttcctcggtcgtaaagcggcgaccaaagaagaagcgattctgtttgccggcgagcagctggtgaaaggcggctacgttgagccggaatacgtccaggcgatgctggatcgtgaaaagctgacctccacctatctgggtgagtccatcgcggtcccgcacggcactatcgaagccaaagatcgcgttctgaaaaccggcatcgtcttctgccaatacccggaaggcgtacgcttcggcgaagaagaggacgaggtggctcgcctggttatcggtattgccgcgcgtaataacgaacatatccaggtgattaccagcctgaccaacgcgctggacgatgaatcggtcattgagcgtctggcaaaaaccaccagcgttgaagaagttctgacgctgctgaaagcgtaa

SEQ ID NO: 188074 - DNA, 372 bp, Klebsiella oxytoca
atgtttctcaattattttgcgctcggcgttctgatctttgtatttctggtgattttttatgggatcatcattcttcatgatattccttacctgatcgcgaagaaacgtaatcacccgcatgccgatgcgattcacgtcgcgggctgggtgagcctttttacgctgcacgtcatctggccgtttttatggatctgggccacgctttaccggccagaacgcggctggggcatgcagcatcggcgggacgagacgccgtctgaggcggcggaagagggggacgacatcagcgaactgcgccagcgggttatcgcgctcgagcagcaaataaccggtctcagaccgtcagctcaacctccttcggtggagaaataa

SEQ ID NO: 188075 - DNA, 1137 bp, Klebsiella oxytoca
atggatctgctgattattttgacctatgtggcgattgcctggtcgatatttaaaatatttaagatcccggtaaataaatggacggttcccaccgcggcgctgggcggcgtatttattgttagcgcgcttatcttattaatgaactacaaccacccgtatacctttaccgcacaaaaagcggttatttctattcctattacgccgcaggttaccggggtggtcagcagcgtcacggataaagcaaatcaacgggttaaaaagggcgaggtgctgtttaccatcgatccggtgcgttatcaggcgcgggtggaccggctacaggccgaccttgttaccgcgctgcacagtatcaatacccttaaagcccagctttctgaggctcaggccaacaccacgcgcgtttcggcggagcgcgaccgtctgtataaggattatcagcgctacctgaaaggaagccaggcgcgggtcaatccgttttcggaaagcgatatcgataatgcccggcaaaactacctcgcccaggatgcgatggtgaaaggatcggtggcggagcaggcgcaaattcagagccagctcgacagcatgataaacggcgaacagtcgcaggtggtaagcctgcgcgcgcagctggcggaggcgaaatataacctcgatcagacgaccgtgcgcgcgcccagcgatggctatatcacccaggtgttaattcgccctgggacctatgccgcctcgctgcctctgcgtccggtgatggtctttatcccccagcaaaaacggctgattgtggcgcagttccggcaaaattcgctgctcaggctggagaagggcgacgatgctgaagcggtgttcaacgcgctgccgggacaggtctttcgcggcaagctggtgagcatcctgccagtcgtaccggggggaacataccaggcgcagggcacgctgcaggcgctgacggtgacgccgggcaccgatggcgtgctggcgaccattgagctggagcccgatgccgccgtagacgccctgcctgacggcatttacgcccaggtggcggtctactccgatcatttcacccacgtttcggtgatgcgcaaggtgctgctgcggatgaccagctggatgcactatctctatctggaccattag

SEQ ID NO: 188076 - DNA, 609 bp, Klebsiella oxytoca
atgaaactgatcggcagctacaccagtccctttgtgcgcaaaatttccgtcatactgctggaaaaagcgattcccttcgagttcgtcaacgaattcccgtaccacgagaccaacggcgtggcgcagtacaatccgctgggaaaagtccccgcgctggtcaccgacgacggtgaatgctggtacgactcgcccattattgcgcaatatctggagctgctcggcatcgcgccggatatgctgcctgcggcgccgaaggctgcgctgaaattgcgtcaaattgaagcgctggctgatggcgtgatggaggctgcgcaaacgctggtacgggagaaaacgcgcccggcggcccagcagtcggaaagcgaactgctgcgccagcgtgaaaaaattgcgcgcgggcttgatgcgctggaagggtatgccagtgacgggacattacgtcctgatgaggttaatctggcaaccatttccgcagcctgcgccattgcttatctcaatttccgccgtgtcgcgccgggctggtgcgccacccgaccgaagctggtgcgcctggtggattccctctttcagcgcgccagctttgcgcgcactgaaccgccggtgagttga

SEQ ID NO: 188077 - DNA, 1389 bp, Klebsiella oxytoca
atgactagcgaaattcgtgcgctttatacccggcttccggccatcgaccgtttactccgcgaccccgcattttcaccgctgttgatgcaatacggtcacgcccagacggtggcgcagctgcgtcagatgctggacgaggcgcgggaatacatccgcctgaaccaggcgctgccggactggtgcgaagcatggctaatggagacctcgcgtcgtttgacgcagcgacagcagagcgcgctgcgcccggtgttcaacctgaccggtaccgtgctgcacaccaaccttgggcgggcgattcaggcggaagcggcggtagaggcggtgacccaggcgatgcgcgcgccggtgacgctggaatacgatcttgacgatgccggacgcggccaccgcgatcgcgcgctggccgacctgctttgccagatcaccggcgcggaagacgcctgtatcgtcaacaataacgcggcggcggtgctgctgatgctggcggcaaccgccggcggcagtgaggtggtggtgtcgcgcggcgagctggtggagatcggcggcgcgtttcgtattcccgacgtgatgcgccaggcgggctgcgttctgcatgaagtcgggaccactaaccgcacccacgcgaaagattatcgtcaggcggtgaatgacaataccggcctgctgatgaaggtgcacaccagcaactacagtattgagggctttactaaagcggtcgatgaagcggcgctggcggagattggccgcgaactcaatatcccggtggtggccgatctcggcagcggctcgctggtggatttaagccagtacggcctgccgaaagagccgatgccgcaggagatgattgccgccggcgtcagcctggtgagcttctccggcgataaactgctgggcggcccgcaggcgggaattatcgtcggtaaaaaagcgctgatcgcgcgtttgcagagccatccgcttaagcgcgccctgcgggcggataaaatgaccctcgcggcgctggaggccacgctgcgcctctatctgcatccggaaaagctggccgctgaactgccgaccctgcgtctgctgactcgccaggcggacgagatccgcctgcagggcgagcgcatgcgggccgcgctggctgcacattatgctgattttgacctgcgggtcgagccatgcctgtcgcagatcggcagcggctcgctgccggtggaccgcttgcccagcgcggcgttgacgttgactccgcgcgatgggcgcggcagtcggctggaagctctggcggcacgctggcgtcagttgcccgtgccggttattggcaggatctacgatggccgcctgtggctggacctgcgctgtcttgaggatgaatcccggtttatggagatgttattgagatga

SEQ ID NO: 188078 - DNA, 1842 bp, Klebsiella oxytoca
atgattattgccaccgccggacacgttgaccacggcaaaaccacgctgctgcaggcgattaccggtatcaacgccgatcgcctgccggaagagaaagcgcgcgggatgactatcgacctcggctacgcctactggccgcagcccgacgggcgggtgctgggttttatcgacgttcccggccacgaaaagtttttgtccaatatgctggccggcgtcggcggtatcgatcacgcgctgctggtggtggcctgcgatgatggcgtgatggcgcaaacccgcgaacatctggcgatcctccagcttaccgggcagccaacgctaaccgtggcgctgaccaaagcggaccgcgtagaagcggcgcggattgaggaggtggaggcggaaatcgacgcggtgctggcggagttcggctttaccggcgcgaccctgtttgccgtcgcggcgacggaaggacggggcatcgcagagctgcgcgaacatctcctgcagctctccgcgcgcccgcgcccgcagcatcagcgctttcgcctggccatcgaccgggcatttaccgtcaaaggcgcggggctggtggttaccgggaccgcgttatccggcgaggtcaacgttggcgatacgctgtggctgaccggcgtggataaaccgatgcgcgtgcgcggtctgcacgcgcagaatcagccggttgagcaggcctgggccggccagcgcattgccctgaatattgccggcgatgcgcaaaaagaggagctcaaccgcggcgactggctgctggcggtaccgccgccggaagcctctgagcgggtcatcgttgaactgcagtgccatacgccgcttagccagtggcagccgctgcatatccaccacgccgccagccatattaccggccgcgtgtcgctgctcgaaggcgcgctggcggagctggttctcgatacgccgctgcggctggcggataacgaccgtctggtactgcgcgatatttccgcgcgcctgacgctggccggtgcgcgagtggtgaccctcaatccgccgcgccggggcaagcgtaagccggagtatttacagtggctgcacgcgctggccgccgcgcagggcgatgacgtccaggcgctggatattcaccttcagcgcgatgcggtgcgcctcgatgattttgcctgggcgcgtcagctcagccgcgagggcctcaacgcgctgattcaccgccctgactatctgcaggcgggaaatagcctgctgagcgccccgctcgccgcgcgctggcagcggaagctgctcgatgccctggcgcgctatcacgatcagcatcgcgatgagccaggaccgggccgcgaacgcctgcggcgtattgcgctgccgatggaagatgaagcgctggtgctgctgttgattgagcagatgcgcgaaagcggcattgttcacagccaccacggctggctgcatctgccggagcataaagcgggctttaccgacgagcagcaggccatctggcagcgggttgccgggctgtttgccgatgagccatggtgggtgcgcgatctggcgcgtgaagccaacgtagaagagtcgttaatgcgggcggtattacgccaggcggcgcagcaggggatgattaccgcgatcgtgaaagatcgctactatcgcaacgatcggattgtggcgtttgccaaaatgatccgcgatctggatctggaaaggggctcaacctgcgcggcggatttccgcgatacgctgaacgtcgggcgcaagctggcgattcagatcctcgaatatttcgaccgcatcggttttacccgccgtcgcggcaacgatcatattctgcgcgataaggccttgttcctttag

SEQ ID NO: 188079 - DNA, 1962 bp, Klebsiella oxytoca
atgtctgttatggaagtcgatctgcacaaactgaaaatcaacgacccgttcctcggccagtaccagcagctggtgcgcgatgtggtgatcccttatcagtgggatgcgcttaacgaccgtatcgaggaggcggacccgagccatgcgatagagaacttccgcatcgccgccgggcgacaggagggtgaattctacggcatggtctttcaggacagcgacgtggcgaaatggctggaggcggtggcctggtcgctgtgtcagaagccggaccccgggctggaaaaaaccgccgatgaggtgattgaactggtcgcggccgcccagtgtgaagatggctatctgaatacatatttcacggtcaaagcgccagaggagcgctggaccaacctcgccgaatgccacgaactgtactgcgccgggcacatgattgaagcgggtgtcgccttcttccaggccaccggcaaacgtcgtctgctggatgtcgtctgccgcctcgccgaccacatcgatagcgtgtttggccccggagataaccagctgcacggctaccctggccatccggaaatcgagctggcgttaatgcgcctgtatgacgtcactcaggagccgcgctatatcgccctggttaagtacttcgttgaggcgcgcggaacacagccgcatttttacgatatcgaatatgagaagcgcgacaaaacctcttactggaacacctacggtccggcgtggatggtgatggataaaccctacagccaggcgcatcagccgatttccgaacagccggtcgccatcggccacgcggtgcgtttcgtctatctgatgaccggcgttgcccacctcgcccgtttaagtcaggacgagggcaagcgccgggattgcctgcgcctgtggaaaaatatggcccggcgtcagctgtatatcaccggcggaatcggttcgcagagcagcggggaggccttcagcagcgactatgacctgccaaacgacacggtctatgccgaaagctgtgcttccattggcctgatgatgtttgcccgccggatgctggagatggaagccgacagccaatatgccgacgtgatggagcgcgcgctgtataacaccgtgctgggtggaatggcgctcgacggcaagcacttcttctacgtcaatccgctggaagtgcatccaaaatccttaaaattcaaccatatttacgatcacgttaagcccgtccgtcagcgctggttcggctgcgcctgctgcccgccgaatatcgcacgggtgctgacctcgctggggcactatatctacacgccgcacggcgacgtcctgtacatcaacctgtatgtcggcaacagcgtggagatcccggtgggcaatgaggcgctacgcctgcgcatcagcggcaactatccgtggcaggaacaggtgaagatagtcatcgattcatcttcaccggttaatcataccctggcgctgcgtctgccggactggtgcgataagccgcaggtcacgctcaacggcgcgccggttacgcaggacgtgcgcaaagggtatctgcacatcagccatctctggcaggagggcgacacgctacagttaaccctgccgatgccggtgcgccgcatttacggtaacccgctggtgcgccaccaggcaggccaggtcgccgtccagcgcggtccgctggtttactgcctggagcaggcggataacggcgagcaattgcataacctgcagctgccgcgcgacgcccggtttagcactgtcgaaggcaaagggatttttgcccgcaagatacttctccaggcgccgggctataagcaaacggcggaagatgccgaaaaccaggccctatggcactatgaccgcgcgccgtcctcccgtcagccgcaagtattaacctttattccgtggtttagctgggccaaccgcggagaaggcgagatgcgcatctgggtgaacgagacggaagcgtaa

SEQ ID NO: 188080 - DNA, 1401 bp, Klebsiella oxytoca
atgacttcggctccgattaccacaactgatttggcacagcgtgcccaggacgacaaattatcccttcgggaaaaaataggctacggattgggcgacgcgggcgggacggtgattacctgcctgatcatgaactttttaacttttttctataccgatgtcttcggcctgacgcccgcgctggtcgggaccctgtttctggccctgcgcgttttcgacgccgtttccgacccgattatgggcgtgctggccgaccgtacccagagccgctggggacgctttcgtccctggcagctgtggattgccgtgccgatcggcgttatcggcgtcctgacgtttaccgtgcccgacgccagcatgggggtaaaaatcgcctgggcgttcggcacctatctgctgctgtcggtgagctacaccgcgataaacgtcccctactgcgcgctgatcaacacgatgaccacgcgtcatagcgaggttatctcgtgccaggcatggcgctttgtcctgtgcggcgtggcgggattcttagtctccgttgggctgccgtggatggtaaaagcgctcggccagggcgataccgcacaggggtatcagtacggcgtcggcgtactctgcgccatcgcggtagcgatgttcctgtgctgcttcttctgggttcgcgaacgcgtctcgctggatgtcatggggaaatttaccctgcgcgagcacatcgccgggctgcgtaaaaacgaccagctgctgctgatgctggtgatgtcatttctgctcatcaacgtcttcaatatccgcggcggcggctacatgtacttcatcacctacgtgctgggcggctctaccggctacacctcgctattcttcaccatggtaaccttcgcctcgattgcgggctccgtcatcatcaacctgctctcgcgccgctttgataccgtcaaactctactactacaccaacctggtgctggccgcgctggccgtggcgatgtggtttttgccaaccgggcaggcgtaccagatcctgtggctggtcgtcatcctcggcaacggcattattctcggctttaccctgccgctgcacttttcgctgatggccttctccgacgactacggcgaatggaaaaccggcgtgcgttcttccgggatgaacttcgcctttaacctgttctttatcaagctggcgtgggcctccagcgccggcattatcagcctcgtgtttatctacgtggcctatcagccgggcgtggaaaaccaaacggcatcatcactggcgggtatcgcctccatggagaccctgctgcccgccctgttccatctgctgctggccttcactattcgcgcctgcaagctcaacaattctatgatggcgcgcatcgccagcgacctgcgcacgcgtcacgttcagccttaa

SEQ ID NO: 188081 - DNA, 822 bp, Klebsiella oxytoca
atgtctatgcttgaattgtccatgtcacttccgattaaggtgcaaaatggtggattgtttatttcacgaggcatcggcagccatccggctcgtcagcttcactcctgggaaataatctttgtggaaaaaggaacattaacgatccgcgaaaacaacgagatttttagcgtcaacgccggggaaagtttattgctctggccgcggcgtttacacgtcggaatcgggcaatttccggcagatttaaaattctactggctgcattttgaagtgacctcaggtgaaaacgtttcgctgcctgaggcgctgctgtcgattccgcagcacacgcgcgtcagcgagccgcagtatattatttcgttgttccgccaattcttacgcgagcaggaaaatattcatcgtagcgtggcgctggagctgatcctgctgctgattctgcagcaagtttcggcggcagcgggcgaacagcccgccgacagccccggcaacgcgctggcgtggagagcgcagcaaatcattcgtacccggtttcatttgcccctttccgcatccacgctggcgcaggagctgcactgcaacgccgattatctggggcggatttatcgccatgttttccggctgaccttaaccgaagcgctgcaccgtcagcgggtgagggcggcggaaaagctgcttatcagcgattccctgtcgctcaccgaggtggcgatgaaatgcggatttaacgatgtcggctattttcgcaagattttccgtaagcataccagcctgacgcccgcggcgtggaagcgtcgttactgcaaggaacatattaattcggcgtag

SEQ ID NO: 188082 - DNA, 699 bp, Klebsiella oxytoca
atgttagagcaactgaaagccgaggtgctggcggcaaacctggcgctcccggcgcaccggctggtcacctttacctggggcaacgtcagcgcggtggatgaaacgcgtcgtctgatggtcattaagccctccggcgtcgaatatgaggtgatgaccgccgacgatatggtggtcgtagagatcgccagcggtaagatcgttgaaggcgctaaaaaaccctcttcggatacgccaacgcatctggccctttatcgtcgctatccgcagatcggcgggatcgtgcatacccactcccgccatgcgacgatctggtcgcaggccggtctcgatctccccgcctggggcaccacccacgccgactatttttatggcgccatcccctgcacccggccgatgaccgttgaggagattaacggggagtatgagtatcagaccggcgaagtgattatcaaaacctttgaacagcgcggtctggatccggcgcaaatcccggcggtattagtccattcgcacggcccgtttgcctggggtaaagatgcggccgacgccgtacataacgccgtggtacttgaagagtgcgcctatatgggcctgttctcacgccagctggcgccacagctgccggatatgcagtctgaactgctcgataaacactacctgcgtaaacacggcgcgaatgcctattacgggcaaaactaa

SEQ ID NO: 188083 - DNA, 861 bp, Klebsiella oxytoca
atgcgtaaccacccgttaggtatttatgaaaaagcgctggcgaaggatctcagctggcctgaacggctggtgctggccaaaagctgcggttttgattttgtcgaaatgtcggtggacgagaccgacgaacgcctttcgcgcctggagtggacatcggcccagcgggcatctctggtgagcgcgatgctggaaaccggcgtcgctattccctcaatgtgcctgtccgcccatcgccgtttcccctttggcagccgcgacgaggcggtacgcgagcgggcgcgggagattatgactaaagccatccgcctggcgcgcgatctggggattcgtactattcagctggcgggttacgatgtctattacgaagagcacgatgaaggcacccggcagcgttttgccgaagggctggcctgggcggtagaacaggccgccgccgcgcaggtgatgctggcggtggagatcatggacaccgcctttatgaactccatcagcaaatggaaaaagtgggacgagaggctttcgtcaccgtggtttaccgtctatccggacgtcggcaacctcagcgcctgggggaacgacgtcaccgccgagctgaaactgggtatcgatcgtatcgccgccatccacctgaaggacacgctgcccgtgaccgacgatagcccgggccagttccgcgacgtgccgttcggtgaaggatgcgttgattttgtcggcatctttaagacgctgcatgagctgaactaccgcggttcgtttctgattgagatgtggacggagaaggccagcgaaccggtgctggagattatccaggcccggcgctggattgaatcacggatgcaggaaggaggtttcacatgttag

SEQ ID NO: 188084 - DNA, 663 bp, Klebsiella oxytoca
atgagccgaccattactgcagctggcgctggaccacaccagccttcaggctgcgcagcgcgatgtcgccctgctacaggatcacgttgatatcgtggaggcggggaccatcctctgtttgaccgaggggcttaacgcagttacagccctgcgcacccagtgtccgcagaagatcatcgtcgccgactggaaagtcgccgacgccggtgaaaccctggcgcagcaggcctttggcgctggcgccaactggatgaccatcatctgcgctgcgccgctcgctacggtcgagaaaggccacgccgtggcccaggcctgcggcggtgaaattcagatggagctgttcggcaactggacgctggatgacgcccgcgcctggtaccgtaccggcgtccatcaggcgatttaccatcgcggacgcgatgcccaggccagcgggcagcagtggggggaggcggatctggcgcgcatgaaagcgctctccgacattggccttgagctatcgatcaccggcgggattaccccggccgatctaccgctgttcaaggatatcaacgtcaaagcgtttattgccgggcgcgcgctggcaggcgctgcccatccggcacgggttgccgccgaattccacgcgcaaatcgacgctatctggggagaacagcatgcgtaa

SEQ ID NO: 188085 - DNA, 1506 bp, Klebsiella oxytoca
atgagcaagaaacaggccttctggctgggtattgattgtggcggcacgtatctgaaagccggtttatatgatgccgaaggtcatgaacatggcattgtgcggcaagcgctacagacgatgtcgcccctgccgggttacgccgaacgcgacatgcatcagctctggcaacactgcgcggcaaccattgccggactattacaacgggcaggggtatccggtgaacagattaaaggcgtgggcatctccgctcagggtaagggtctctttctcctcgataagcaggatcggccgctgggtaacgccatcctctcgtccgatcgtcgggcgctgaatatcgttcagcgctggcagcgagaccgaattcccgaacggctctatcccgttacccgccagacgctatggaccgggcatccggcttctctgctgcgctgggtcaaagagaatgacccccagcgctacgcgcaaattggctgcgtgatgatggggcatgactatctgcgctggtgcttaaccggcgtgaaaggctgcgaggagagcaacatctccgagtccaacctctacaacatgtccacgggccagtacgacccgtgtctgacccaatggctggggatcggcgaagtggatagcgcgctgccccccgttgtagggtcagccgaaatatgcggggagatcaccgctcaggcagccgctttaaccggtctggcggcgggtactcccgtcgttggcggcctgtttgacgtggtctccaccgccctttgcgccgggattgaggatgagtcgaccctcaatgcggtgatggggacctgggccgtcaccagcggtatcgctcacggtctgcgcgaacatgaggcccacccttacgtctatggccgctacgtcaatgacggccagtatatcgttcacgaagccagcccgacctcatccggcaacctcgagtggtttaccgctcagtggggcgatctctcgtttgatgagatcaatcaggccgtagacagtttgccgaaagccgggagcgagctgttttttctgccgtttctctacggcagcaacgccgggctggagatgacctgcggcttttacggcatgcaggcgctgcatacccgcgcgcacctgctgcaggcggtttatgaaggcgtggtattcagccatatgacccatctcaaccgtatgcgcgaacgctttacaagcgttcaggccctgcgcgtcaccggcggcccggcgcactccgacgtctggatgcaaatgctggcggacgtcagcggcttacgcgttgaactgccgcaggtggaagagaccggctgctttggcgctgccctcgcggcgcgcgtcggcactggcgtataccgcagctttagcgaagcccggcgcgcccggcagcacccggtacgcacgctgctgcccgatatgaccgcccacgcgcgctatcagcgcaaataccgccactaccaggatttgattgaagcactacagggctatcacgcccgtattaaggagcacgcattatga

SEQ ID NO: 188086 - DNA, 1320 bp, Klebsiella oxytoca; identical to SEQ ID NO: 178200

SEQ ID NO: 188087 - DNA, 930 bp, Klebsiella oxytoca; identical to SEQ ID NO: 178199

SEQ ID NO: 188088 - DNA, 465 bp, Klebsiella oxytoca; identical to SEQ ID NO: 178198

SEQ ID NO: 188089 - DNA, 999 bp, Klebsiella oxytoca
atgaaagtaacgtttgagcagttaaaagaggcattcaatcgagtactgctggcgcggggtatcgccgcagaaaccgccgatgcctgcgcagaaatgtttgcccgcaccaccgaatccggcgtctattctcacggcgtgaaccgctttcctcgcttcatccagcagctggacaacggcgacatcatccccgaggctaaaccgcagcgggtgaccagcctaggcgctatcgaacagtgggatgcccagcgctccatcggcaacctgacggcgaaaaagatgatggaccgggccatcgaactggcttccgatcatggtatcggcctggtggcgttacgtaacgccaaccactggatgcgcggtggcagctatggctggcaggcggcggaaaaaggctacatcggcatctgctggaccaactctatcgccgttatgccgccgtggggcgctaaggagtgccgtatcggcaccaatccgctgatcgtcgccattccgtcaacgccgatcaccatggtggatatgtcgatgtcgatgttctcctacggcatgctggaagttaaccgccttgccggccgcgagctgcccgtggacggcggattcgacgatgaaggtcatttgaccaaagaaccgggggttatcgagaaaaaccgccgtattttgccgatgggctactggaaaggttccggcctgtcgatcgtgctggatatgattgccaccctgctttccaacggctcttccgttgccgaagtgactcaggaaaacagcgatgaatatggcgtttcgcagatcttcatcgccatagaagtggataagctgatcgatggcgcaacccgcgacgccaagctgcagcgaattatggatttcatcaccaccgccgaacgcgccgatgaaaatgtggcggtccgcctgcccggccatgaatttacccgactgctggatgaaaaccgccgcaacggtattaccgtcgatgacagcgtatgggccaaaattcaggcgctgtaa

SEQ ID NO: 188090 - DNA, 819 bp, Klebsiella oxytoca
atgggcacaaaagagagcgatgtaacgcaagacaaagagaggcctgccggaagccagagcctttttcgtgggttgatgctgattgagatcctgagtaattacccaaacggatgcccgctggcgcatctgtcggaactggcgggcctgaacaaaagcaccgttcatcgcttattacaggggctgcaatcctgcggctacgtgacgccagccccggcggcggggagctatcgtctgacgacaaagtttatcgccgttggccaaaaggctttgtcgtcgctcaatatcatccacgtcgcggcgccgcatctagaggcactcaacctggccaccggcgagacggtgaacttctccagccgtgaagatgaccacgctatcctgatttataagctggagccgaccaccggcatgctgcgtacgcgcgcctatattggccagcatatgccgctgtactgctcggcaatgggcaagatttatatggcgtttggccatcctgactacgttgagagctactggaattcacaccaggatattattcagccgctgacccggaataccattaccggcttacctgcgatgcatgatgagctggcgcagatccgcgagcgtaatatggcgatggacagggaagagaacgagttgggcgtgtcctgcctggcggtcccggttttcgatattcatggacgcgtgccttatgccatttctatctccttatcaacatcgcgcctcaagcaggtaggagagaagaatttactcaagccgctgcgcgatacggcagaggcgatttcccgcgaactgggcttttccgtgcgggaagggtaa

SEQ ID NO: 188091 - DNA, 489 bp, Klebsiella oxytoca
atgaaccggtttattatcgcggatgcgcaaaagtgcatcggctgtcgtacctgtgaagtcgcctgcgtggtatcccatcagcgggaccaggactgttctggcgtttccgccatgcgctttgcgccgcggatccgcgtggtgaaaaatgacgaactctcgacggcgacgctttgccgccagtgtgaagatgcgccctgcgccaacgtctgccccgagggcgctatccgccgggaaaattcggtctggcgcgtggatcagcgccgctgcatcggctgcaaaagctgcatggtggcgtgcccctatggcgcgatgacggtgatgcgggtggaggagggcgtacaggcgctgaagtgcgatttgtgcagccatcgggaagaaggcccggcctgcgtggcggcatgcccgacgcaggcgctgcgctgcatggaaccgatggaactggagagaatagccgctgaacgtcgccagcggatggcgctggcgatgtag

SEQ ID NO: 188092 - DNA, 1257 bp, Klebsiella oxytoca
atgacattttcactttttggcgacaaatttacccgtcattcgggcatcacccgcttgatggaagacctcaatgacggcctgcgtaccccgggcgccatcatgctgggcggcggcaatcccgcgcagattccggaaatgaatgattacttccatagcctgctggccgacatgctgaacagcggcaaagcccttgatgcgctttgtaattatgacggtccgcagggtaaaagcgagctgctggccctgctggcgcagatgctgcgtgatgaactgggttgggagatcgaaccacagaatattgcactgacaaacggcagtcagagcgcgtttttctacttgtttaacctcttcgcaggccgtcgcgcggatggaaccacccgtaaagtgctgtttccgttgacgcccgagtacatcggctacgccgatgccggcctcgaagaagatctgtttgtcgccacccgcccgaacattgaactactgccggaaggccagtttaaataccacgtggatttcgaacatttgcaggtcacggacgagacgggaatgatctgcgtttcccgccccaccaacccaacgggcaacgtgatcaccgacgatgagctgatcaagctggatgcgctggccaaccagcacggcatcccgttggtgattgataacgcctacggcgttccgttcccggggattattttcagcgacgccaggccgctgtggaatccgaatatcgtgctgtgcatgagcctctccaagctgggcctgccgggtagccgctgcgggattatcatcgctaacgaaaaaatcatcaccgccatcagtaatatgaacggcgttatcagcctcgcccccggcggaatggggccggccatgatgtgcgagatgattaaacgcaacgatcttctgcgcctgtcggaaacggtgattaagccgttctactaccagcgcgttcaggagactatcgccattattcgccgctatttgccggaagatcgctgcctgatacataaaccggaaggcgcgatttttctctggctatggtttaaggatctgccgatttctaccgagctgctgtaccagcgcctgaaaaagcgcggcgtcctgatggtgccgggcgactatttcttccctggcctggataagccgtggccgcacacgcatcagtgcatgcgcatgaactatgtaccggacccggagaagattgaagcaggcgtgaagattctcgccgaagaagttgaacgcgcatggggtgaacagggcgcgtaa

SEQ ID NO: 188093 - DNA, 2031 bp, Klebsiella oxytoca
atgaaactcgctgcgcttgcgtcgctgctgttgcctgggatggccttcgccgcctggactaccgcagatttccccgcctttaccgaagaaggcaccggcagatttatcagtcaaaacgaggtagcaaagggtacgcgccctctgcggattaattttgaccaacagtgctggcagcctgccggcgcgatcaagctcaaccagatgctgtctatggagccttgccgcgatccggcgccgcagtggcgcgtattccgcgatggccgctataccctggaagtcgatacccgttcaggtacgccaaccatgatggtctctctggaggagaaacagaccgccgccgccgcgccgcagatgaagcagtgtccgaaatgggatggcaagccgctcaccattgacgtcagcaagtccttcgccgaaggcagtaaagttcgcgatttctacagcggtaatatcgcgaccgtcagcggcggtaaagttaccctccagccggcgtttaacagcaatggtctgctgctgcttgaacgcgcggaaacggaagccgccgcgccgttcaactggcataacgccaccgtctatttcgtgctgaccgatcgctttgtcaacggcaacccggccaacgacaatagctatggccgccacaaagacggcatgcaggaaattggcaccttccacggcggcgacctgcagggcctgaccagcaaactggattacatccagcagctcggcgttaacgcgctctggatcagttcgccgctggaacaaatccacggctgggtcggcggcggtacgaaaggcgatttcccgcactacgcctatcacggctattacacccaggactggacgaagctggatgccaatatgggaacggaagacgatctgcgccgcctcgtcgatgaggcccacaagcgcgggatccgcattctgttcgacgtggtgatgaaccataccggctacgcgaccctggccgatatgcaggagtttcagtttggctcgctgtacatccagggcgatgagctgaaaaagaccctcggagaacgctggaccgactggaagccccgcgcgggacaaagctggcacagctttaacgactacattaacttcagcgacaaagccggttgggaaaaatggtggggtaaaaagtggatccgcaccgatattggcgattacgacaaccccggatttgatgacctgacgatgtcgctggccttcctgccggatctgaaaaccgaatccacggcgccatccggcctgccaaacttctatcgccataagccggataccgcggccaaagcgatccccggctatacgccgcgcgattatctgacccactggctgagccaatgggtgcgcgactacggcatcgacggcttccgcgtcgataccgccaagcacgtcgagcaggccgcctggctacagttaaaaacccaggccactgaagcgctggcggaatggaaaaaagccaatccggataaagcgctggataacgcgccgttctggatgaccggcgaggcctggggccacggcgtgatgcagagcgactactatcgccacggttttgacgcaatgctgaattttgattatcaggatcaggcggcgaaagcgacaagctgcctggcgaatatcgacctgacctggcaacatatggcagagaagcttcaggatttcaatgtgttaagctatctctcctcgcacgataccagcctgttccgcgaaggcggcagcacggcggcggaactgctgctgctcgcgcctggcgcagtgcagatcttctacggcgatgaatcctcacgaccgttcggtccgaccggctccgatccgcttcaggggacgcgttcagatatgaactggcaggacgtcagcggcaaagccgcgcgcagcgtgacccactgggagaaactgggccagttccgcgcccgtcatccggcgattggcatgggtaaacaaaccaccctatcgatggcgaaaggctacggctttattcgcgagaccggcgatgacaaagtgatggtggtatgggcaggtcagcagtag

SEQ ID NO: 188094 - DNA, 564 bp, Klebsiella oxytoca
atgccttacattacgaaacagaatcaggtgattaccgccgatcgtaactggcttgtttccaagcagtacgatgcgcgctggtcgccgagcgagcgtacgcggctgaaagagatcgcctctcgctataaagtgaagtggtccggcaatactcgccatattccatggaactcgctgcttgagcgcgtcgacattatcccgaatagcatggtcgctaccatggcagcggcggaaagcggctggggaacgtcaaagctggcgcgggtgaacaacaatttatttggtatgaagtgtggcggtggaaactgccgcggtgcggtgaagggctactcccagtttgattcggtggaagagtccgttcaggcctatgtccgaaatctgaatacgcatccggcctactcgtcgttccgtaaatcgcgtgcgcagctgcgtaaagccgatcaggaagtgaccgccagcacgatgattcataagctgaagggctattcgaccaaagggtcgagctataacaactatctcttcgcgatgtatcaggataaccagcggttgatagccgcgcacatgtaa

SEQ ID NO: 188095 - DNA, 1179 bp, Klebsiella oxytoca
atgtttgaaaagcgtcaccgtattacgctgttattcaatgccaacaaagcctacgatcgccaggtcgttgagggcgtcggcgaatatttacaagcatcgcaactggaatgggatatcttcattgaggaagattttcgggcacgaattgaaaacatcaaagagtggttaggcgacggcgttattgccgattacgacgatccggaaattgaaaacctgctgatcgacgtgaatgttccgattgtcggcgtcggcggctccttccaccgcccggagtgctatccgccggttcactatatcgccaccgacaacgccgcgctggttgagagcgccttcctgcatctgaaggaaaaaggcattaaccgcttcgccttttacggcctgcccgcttccagctgtaaaggctgggccgccgagcgcgagcacgcgttttgccagctggtcgccagagagaaatatcgcggcgtggtctatcaggggctcgagacggcgccggaaaactggcagcatgcgcaaaaccgcctcgccgactggctgcaaaccctaccgccgcaaaccggcatcatcgccgttaccgatgcccgcgcgcgccacgtattacaggcctgcgagcggctgcatatccccgtcccggaaaagctgtgcgttatcggcatagataacgaagagcttacccgctacctgtcgcgcgtggcgctctcctccgttgcgcagggcacccgtcagatgggctaccaggcggcaaagctgctgcatcgcctgctggagaatgaagagctgccgcttcagcgtcagcttatcccgccgatgcgcgtggtagaacgccgctccaccgactaccgttcgctcactgatccttcggtcattcaggcgatgcactatatccgtaaccacgcctgtaaagggattaaagttgagcaggtgctggacgccgtggggatttcccgctcgaatctggaaaagcgcttcaaagaggaagtcggcgaaaccattcatacggtgatccacagcgagaagctggaaaaagcgcgcagtctgctggtatcaaccaccctatcgattaacgaaatctcccagatgtgcggctatccatcgctgcagtatttctattcggtgtttaagaaagagtacgacgtgacgccgaaggagtaccgcgaccggcacagcgaagtcatgatgtag

SEQ ID NO: 188096 - DNA, 1182 bp, Klebsiella oxytoca
atgtcgaagaacacgtcgtctgaaatgaaactcaccccacctgccgctggcgcgctatcggggctgaaggggatgaacctccaggtattcgtgatgatcgccgctatcgtggccattatgctgtttttcacctggaccaccgaaggcgcttatctgagcgcgcgtaatatctccaacctgctgcgccagaccgccattaccggcattctcgcggtcggcatggtgtttgtgattatttccgccgagatcgatctctccgtcggctcaatgatggggctgctcggcggcgcagcggcaatatttgatgtctggctgggctggccgctaccgctgaccattgtggtcaccctggcgcttggcctgctgctgggggcctggaacggttggtgggttgcctatcgtaaagtcccctcgtttatcgtgacgctcgccggcatgctggcatttcgcggtattttgataggcattaccaacgggaccaccgtctctcccaccagcccggcgatgtcgcaaatcggccagagctatctgcctgatggcattggctttggtatcggcgtggcgggcatggcggcctttatcatctggcagtggcgcggccgtatgcgacgtcaggctctcggcctctccacgcccgcctccgcttcagccgttggccgccagacgattaccgccgttattgtactgggcgccatctggctgttaaacgactatcgcggcgtcccgacgccggtactgattctcgccgcgctgctgctggcgggcatgtttatggccacccgtaccgcgtttgggcgccgcatctacgccatcggcggcaacctggaggccgcgcgtctatccggcatcagcgtggaacgcaccaagctggcggtgttcgccattaatggcctgatggtggcgattgccgggttgattctcagctcgcgtcttggcgccggttccccttccgccggcaacatcgccgaactggacgccatcgccgcctgcgtgatcggcggtaccagcctcgccggcggcgtcggcagcgtcgcgggtgcggtcatgggcgcttttatcatgtccgcgctggacaacggcatgagcatgatggacgtcgccaccttctggcagtacatcgttaaaggggtcattttattgctcgcggtatggatggattccgccacgaaacgccgaagctga

SEQ ID NO: 188097 - DNA, 1542 bp, Klebsiella oxytoca
atgtcctggttactcgaaatgaaaaacattactaaaaccttcggtacggtgaaggcgattgataatgtcagtctgcggcttaacgccggagaagtggtctcgctgtgcggcgaaaacggctccggtaaatccacgctcatgaaggtcctttgcggaatatatccgcacggtagctatgagggagagattattttttccggggaaacgttgcggccgggccatatacgcgataccgagcgcaaagggattgccatcattcatcaggagctggcgctggtaaaacatctgaccgttctggagaatatttttctcggcgcggagatctcccgccacggtctgctggattacgaaaccatgaccttacgctgcaaaaagctgctggcccaggtcaatttagccatatcacccgatacccgcgtcggcgatttgggccttggccagcagcagctggtcgaaatagcaaaagcgctgaataaacaggtacggttgttaattctcgacgaacccaccgcctcgttaacggagcaggagacggcaattctgctgaatattattcgcgatctgcaaaatcacggtattgcctgtatttacatttcccacaagctcaatgaagtcaaagccatctccgacaccatctgcgtgatccgcgatgggcagcatatcggtacccgtaacgctgacggcatgaacgaagatgacattatcaccatgatggtcggccgcgagcttaccgccctctatccaagcgaagcccacaactgcggcgaggaaatcctgcgggtggaaaacctgacggcctggcacccggtgaatcgccatattaagcgggtcaatgacgtctccttttcgctgcggcgcggtgaaatactggggatcgccgggctggtcggcgcgggccgtaccgaagcggtccagtgcctgttcggcgtctggccgggccgctggcagggaaaaatctttattgatggccagcaggtgacgattcacagctgccagcaggctattgcgcagggcatcgccatggtaccggaagacagaaagaaagacggtattgtgccggtcatggcagtgggtaaaaacatcaccctcgccgcgttaaaccagtttaccggtccgctgagcagccttgacgatgccggagagcagcactgtattcagcaatccatccagcgtttgaagatcaaaacctcatcgccggagctggcgatcggtcgcctgagcggcggcaatcagcaaaaggcgatcctcgcccgctgcctgctgctgaacccgcgcattctgatactcgatgagcccacccgcggcatcgacatcggcgccaagtacgaaatctacaagctgattaatcagctggtgcagcaggggatcgccgtcattgtcatttcatccgaactgcccgaagtgctggggctaagcgaccgggtgctggtgatgcatgaaggtaaattgaaggctaatttgatcaaccagggtctgacccaggaacaggtgatggaagccgcactgaggagcgaacgccatgtcgaagaacacgtcgtctga

SEQ ID NO: 188098 - DNA, 993 bp, Klebsiella oxytoca
atgaagataaagaacctttgcctaacgctctgtgcttcactcctcctcaccagcctgtcgggcattgcgaaagaagtcaaaattggcatggcgattgacgacctgcgccttgagcgctggcaaaaagatcgcgatatttttgtcaataaagctgaatcattaggtgcaaaagtattcgtccagtcagccaatggcaacgaagaaacgcaaatgtcgcaaatcgaaaatatgattaatcgcggcgtcgacgttctggttattattccctataacggtcaggtgctgagtaatgtgataaaagaggctaaacaggagggaattaaagttctcgcctacgatcgtctcatcaataacgccgacattgatttctatatttcgtttaataatgagaaagttggcgaaatgcaggcgcaaagcctggtcaataaagtgcctcagggcaactatttcttaatgggcggctcgccggtagacaataacgccaagcttttccgcgccggccaaatgaaagttcttaagccctatattgatgaaggaaaaattaaggtcgtcggcgatcagtgggtcgacggatggctgccagaaaatgcgttgaagattatggaaaacgccctgaccgccaacaataacaaaattgatgcggtcgtcgcctctaacgatgccaccgccggcggcgccattcaggcgttaagcgcccaggggctcgcaggcaaagtggcgatttccggccaggatgccgacctcgccggcgtgaagcgcattatcgctggcactcagacgatgaccgtttacaaaccgatcgctgaccttgccaccaccgcagcagagatcgccgtcgaactgggcaacgataaacagccgaaggccgacgccacgctcaacaacggcctcaaagatgtgccgtcccggctgctgacgcccattgaggtcaataaagacaacattgaccagacggtgatcaaagacggtttccacaaaaaaagcgagctgtaa

SEQ ID NO: 188099 - DNA, 1323 bp, Klebsiella oxytoca
atgcagacctattttgatcagctcgatcgcgttcgttatgaaggcccgaaatccgctaacccactggctttccgtcattacaatccggatgagctggtcctgggcaaacggatggaagagcacctgcgctttgcggcctgctactggcacaccttctgctggaacggcgctgatatgttcggcgtgggctcctttaaccgcccgtggcagcagccgggcgaagcgctggaaatggcgaaacgcaaagccgatgtcgcgtttgagtttttccacaaactgaacgtaccgtactactgcttccacgacgttgacgtttctccggaaggggcgtcgttgaaagagtatgccaataacttcgcgcagatggtggatgtgctggcggaaaaacagcagcagagcggcgtcaagctgctgtggggtacggcaaactgctttacgaacccgcgttacggtgccggtgcggcaaccaacccggatccggaagtgttcagctgggcggccactcaggtggtgaccgcgatggatgcgacccacaaactgggcggggaaaactacgtcctgtggggcggccgcgaaggctatgaaactctgctcaataccgacctgcgccaggagcgcgagcagattggccgctttatgcagctggtcgtggagcataaacataaaatcggcttccagggcacgctgctgattgaacctaaaccgcaggagccaaccaagcatcagtacgattacgacgcgtctaccgtctatggcttcctgaaacagttcggcctggaaaaagagatcaaactgaacatcgaagcgaaccacgcgacgctggccggccacactttccaccacgaaattgcgaccgccattgctctgggtctgtttggttccgttgatgctaaccgcggcgacccgcagctgggctgggataccgaccaattcccgaacagcgttgaagagaatgcgctggtgatgtacgaaatcctgaaagcgggcggcttcaccaccggcggcctgaactttgatgctaaagtgcgtcgtcagagcaccgacaaatacgacctgttctacggccacattggcgcgatggacaccatggcgctggcgttaaaagtcgctgctcgtatgattgaagacggcgagctggataaacgcgtcgccaggcgctatgccggctggaacggcgagctgggtcagcagatcctgaaaggccagatgaacctggcggacattgcccagtatgccactcagcataacctggcgccggagcaccagagcggccatcaggaactgctggaaaacgtggttaaccgttacctctttgatcgctaa

SEQ ID NO: 188100 - DNA, 1455 bp, Klebsiella oxytoca
atgtatatcgggattgatctgggcacctcgggcgtcaaggctattctgctcaacgagcagggcgaggtcgtggcttcgcataccgaaaagctcaacgtgtcgcgtccgcaccctttatggtctgaacaagatcctgagcactggtggctggcgacggaccgcgcgatgaaagcgctgggcgcgcagcactcgctgcgcgaagtcaaagcgttaggtattgcgggccagatgcacggcgcgacgctgctggataagcaacagcgcgtcctgcgcccggcaattttatggaatgatggccgctgcggtgaagagtgcgcgctgctggaagagaacgtcagccgttcgcggcagataaccggcaacctgatgatgccgggatttaccgcgccgaagctgctgtgggtacaacgtcacgagcctgagatcttcaaacaggtcgataaagtcctgctgccaaaagattatttacgtttgcgcatgaccggtgagtttgccagcgatatgtccgatgccgccggaacgatgtggatggacgtggcgcgccgcgactggagcgatgagatgctcgccgcctgcggtctgagccgcgataacatgccggcgctgttcgaaggatgtgaagtgacgggttcgctgcgcccggccgtcgcgcagtcgtggaatatgccggaagcgctggtggtggccggcggcggcgacaacgcggcgggggcggtgggtgttggcatggcggatgcgggccaggcgatgctgtcgctggggacctccggcgtctactttgccgtcagcgacggctttctgagcaagccggaaagcgccgtacacagtttctgccacgcgctgcccgggcgctggcatctgatgtcggtcatgctgagcgcggcttcctgcctcgattgggcggcgacattaaccggcctcggcacggttccggcgctgattgcggcggcggaagcggcgaacgacgatgccgatccggtctggttcctgccctacctctccggtgaacgtacgccgcacaataatccgcaggccaaaggcgtctttttcggcctgactcatcaacatggtccggcggaactggcgcgggcggtgctggagggcgtcggttatgcgctggcggacggtatggatgtggttcacgcctgcggcgtgaagcccgagagcgtcacgcttatcggcggcggcgcgcgcagcgcctactggcggcaaatgctggcggatattagcggccagcagctggacttccgcaccggcggtgacgtcggccccgcgcttggcgcggcgcggctggcccagctggcgttgcatcaaaatatcgcgttttccgatctacttcctcagctcccgctggaacaggctcatcgtcctgatgccgagcgctttgctcgttacgctcctcgccgggaaaccttccgccagatttatcagcagcttttaccgctgatgtcctga

SEQ ID NO: 188101 - DNA, 375 bp, Klebsiella oxytoca
atgaaaaacaatcttattgcaaggctgttgatgtctattggcgcactggtttatctggtgggaatctggcgaacctgcccattatttagcggtaaaggctattttctgggcgttctggtcatggggatgtttgctgtgctcacgcatcagcgaacggcgcaggaagcacagcgagacggcgattttatctccctgtgccggctggtgctgctgctgtcggcgggattgctgctggtcggcgcctggtttgtcccggctccgtggcgtgaaaaaagtatttacgtgatggcgtggtttgtctgtatgtacggcgcgtcggcaacgccttatcccgctaaagtcacggataaagctcgcaataactcagtggaataa

SEQ ID NO: 188102 - DNA, 441 bp, Klebsiella oxytoca
atggaaacgaaagcgacgacatattcacccgcgtttcatctgatctcatggattgcgctggttggcggcatactgacgtatctgattggcctgtggaacgcgcagatggagctcaatgaaaagggctactattttgccgtactggttctggggcttttttccgccgcctcttatcaaaagacggtgcgtgataaatacgaaaagatcccaaccactacgatgtattacttgtcctgcctgatcgcctttgcgattgctgtgggtctgctggcggtgggattgtggaacgcaacgctgatgctcagtgagaaaggcttttatggcctggcgttctttttaagccttttcggcgccgtggcggtgcagaagaatatacgtgatgtctgggatcgttcttctctaagcgaggtcggcgcagtcacggaagagcccgctgagtaa

SEQ ID NO: 188103 - DNA, 996 bp, Klebsiella oxytoca
atgcaggaaaaaattcactggattacccatttgcgcggcattgcctgcatgatggtggtcatgattcatagtaccacctggtatatcacgcatccgcacaccatcagcctgctggagtgggatctcgccaatatcctcaactcggcatctcgcgtcagcgtccccctgtttttcatgatttcaggctatctgtttttcggcgagcgcagcgcccagccccgccattttcggcgtatcgcactatgcattctcttttatagtgcgctgtcgctgctctatatcaccttgtttacccacatcaacgttgaactgtcgctgagaaatttgctgcagaaaccggtgttctaccatctgtggttcttcttcgctatcgtggtcatttacctgctttctccgctggtgcaggttaagcaggtgagcggcaggatgctgctggcgctgatgctggtgctgggtattctggcaaaccccaatatggtcccggtgaaagccgcaggcgttgaatggctgccgctcaatctctatatcaacggcgatacgttctactacgtgatgtacggcgtattagggcgggcaatcggcacgctggataccgataaaaaatggctgactgcgctctgcgctgggctattcatcacgggagtatgggtaatatcacgcggcacgctgcacgaactgcgctggcgcggcgattttggtgatacctggtatttatactgcggccccgcggtttttgtctgcgcgctcgccctgctgacgctggtaaaaaatacgctcaatacgcgtcagctgccgtttattgcgcttattgcgcgccattcgttaggcatttacggatttcatgcgctgattattcacgcgctgcgcgccagcggactggagctgacccgctggccaatgttggatattgcctggatattcagcgctgcgctgctgggcagcctggcgctatcaatgttggtacagcgcattgacagccgccggctggtgagctga

SEQ ID NO: 188104 - DNA, 306 bp, Klebsiella oxytoca
atggtgatgaaatatgtgttttctggactactgctgtgcctgctggcgggctgtagcgcgacgccgtctccgccagtgcagaaggcgcagaaagcacggataacgccgcaggctaccctcaatatggcgcagctttgcaaggataatgccgccgttcgttatagtacaggcgtgcgccaggttgacatcagccatttcgagcagtttcaggggagctacgagctttcgggcaagactgcgcggaatgaacgttttatctgttcttttgacccggacggacagtttttgcatctttccatgcgctaa

SEQ ID NO: 188105 - DNA, 912 bp, Klebsiella oxytoca
atgcaaaagtttgataccaggaccttccagggcctgatcctgaccttacaggattactgggctcgccagggctgcaccattgttcaaccactggacatggaagtcggcgcaggcacctctcacccgatgacctgcttacgcgcattgggtcccgagccgatggcgaccgcctacgtgcagccttcccgccgtccgaccgatggtcgctacggtgaaaacccgaaccgtttacagcactactatcagttccaggtggtgataaaaccctctccggataatatccaggaactgtaccttgggtctctgaaagagctgggtatggatccgaccatccacgacattcgcttcgtcgaagacaactgggaaaacccgacgctgggcgcctggggtctgggttgggaagtgtggctgaacggtatggaagtcacgcagttcacctacttccagcaggttggcggtctggagtgtaagccggtcaccggcgagatcacctacggtctggaacgtctggcgatgtatatccagggtgtcgacagcgtttacgatctggtctggagcgatggcccgctgggtaaaacgacctacggcgacgtgttccatcagaacgaagtggagcaatccacctataacttcgaatatgccgacgtggacttcctgttctcctgcttcgagcagtatgagaaagaagcccagcagctgctggcgctggaaaacccgctgccgctgcctgcctacgagcgcattctgaaagccgcccatagctttaacctgctggacgcgcgtaaagccatctccgtcaccgagcgtcagcgctatatcctgcgcattcgcaccctgaccaaagcagtggctgaagcttactatgcttcccgtgaagccctgggcttcccgatgtgcaacaagaataaataa

SEQ ID NO: 188106 - DNA, 2070 bp, Klebsiella oxytoca
atgtctgagaaaactttcctggtggaaatcggcactgaagagctgccaccaaaagcactgcgcagcctggctgaatcctttgctgcgaacgtgaccgcagagctggataacgctggcctcgcgcacggtaaagttgaatggtttgccgcaccgcgccgtctggcgctgaaagtggcgaatctggcggctgcgcaggcagaccgtgaagttgaaaaacgcggcccggcgattgcccaggcgtttgacgccagcggccacccgagcaaagcggccgaaggctgggcgcgcggctgcggtatcaccgtcgatcaggctgaacgtctgacgaccgataaaggcgaatggctgctgtatcgtgcccacgtgaaaggcgagagcaccgaagcgctgctgccgaacatgatcgcgacctcgctggcgaagctgccgatcccgaaactgatgcgttggggcgcgtccgacgtccacttcgtgcgtccggttcataccgtgaccctgctgctgggcgacaaagtgatcccggccaccattctgggcgtgcagtccgatcgcgttattcgcggccaccgctttatgggtgaggcggagttcactatcgacaatgccgatcagtatccgcagatcctgctggagcgcggtaaagtcatcgccgattacgaacagcgtaaagccaaaattaaagccgatgcggaagaagcggcgcgtaaaattggcggcaacgccgatctgagcgaaagcctgctggaagaggtgacttcactggttgaatggccggtggtcctcaccgcgaagttcgaagaaaaattccttgcggtgcctgccgaagcgctggtttacaccatgaaaggggaccagaagtacttcccggtttacgacaacgcgggcaagctgctgccgaattttatcttcgtcgccaacatcgaatcgaaagatccgacccagattatttccggtaacgaaaaagtggtgcgtccgcgtctggcggacgctgagttcttcttcaataccgaccgtaaaaaacgtctggaagataaccttccgcgtctgcaaaccgtgctgttccagcagcagctgggtacgctgcgtgataagaccgatcgtattcaggcgctggccggctggatcgctgagcagattggcgcggacgtcaatcatgctacccgcgcgggcctgctctccaagtgcgatctgatgaccaacatggtcttcgagttcaccgacacgcagggcgtgatggggatgcactacgcgcgccatgatggcgaagcggaagacgttgccgttgccctgaacgagcagtatcagccgcgctttgccggcgatgacctgccgtctaacccggtggcctgcgccgtggcgattgccgataagatggacaccctggcgggtatcttcggtatcggccagcacccgaaaggcgataaagacccgtttgcgctgcgtcgtgccgcactgggcgtgctgcgtatcatcgttgagaagaacctgaatctggatctgcaaacgctgactgaagaagcggtgcgtctgtacggcgacaagctgacgaatggcaacgtggtcgacgatgttatcgacttcatgctgggacgcttccgcgcctggtatcaggatgaaggctataccgtcgacacgattcaggcggtactggcgcgtcgtccaacccgtccggcagacttcgatgcgcgtatgaaggcggtttcccacttccgtaccctcgaagagtcctccgccctggcggcggcgaacaagcgtgtatccaacattctggcgaaatcagacgtgacgctgaacgatatcgttcacgcctccgtactgaaagaagcggctgaaatcaagctggcaggcaatttagtcgtgctgcgcgataagctgcagccgtacttcgccgaagggcgttaccaggatgcgctgattgagctggcgtccctgcgcgagccggtggatgagttcttcgagaacgtgatggtgaacgcagaagaccaggatgtgcgcgtaaaccgactgacgctgctgtccaagctgcgcgatctgttcctgcaggtagcggatatttccctgctgcagtaa

SEQ ID NO: 188107 - DNA, 213 bp, Klebsiella oxytoca
atgcatgaacaccataagagtagcctcttacctgttgaaaatcaacacgggaggcgaggaatgccgcaaaagtatctgttgtttagcttaatagtgatttgcttcactattttattatttacctggatggtgcgtgattcgctgtgtgaattacagctcaggcaggggaatattgagctggtggcgttcttagcctgtgggattaaaacgtaa

SEQ ID NO: 188108 - DNA, 1620 bp, Klebsiella oxytoca
atggctcattgtgcccggtccccctcttttcttttgcatcaggtcacctgtcagttagcgacgggagatacgctttttggtccgctgaatttatcgctggaaggcaccctctacgggcttgtcgggcgtaatggcgtcggtaaaacccgattattgcgtttgctggcgggcctggactcgccgtcgagcggccatatcgaacgtgtggcttcggtgagctacgttgctcagcagcatgtcatgtttcctgatacgacgctggcggaatggcttggcgtcgaattcgttttttctgctctggctcgtcttgaacggggcgaagggcgagccgacgatcttgaacgtcttgatggcttttgggatctcccggagcgcctgaatgcaggattccaggccgctggcttaggagaattttcccccggacggctcgcctcttcgatgagcggcggggaaagagtgaaggcgcagctgtgcggagcgttcctgtccgacgcggatttcctcctgcttgacgaacccaccaaccatctcgaccgacaaggccgcgcgtggctatatcagcagcttgagcaatggcgaggaggggcgttgatcgccagccacgatcgggagctactgacccaaatgccgcgcatcctcgagctggcatccgcggctttgcgcagctacggcggcaattatgtggattatcagcagcagcgtgagctggagcagcaggcggctcgcgccgcgctggagcatgcggttactgaaaggcgacgaacccgggcgcggatgcaaaaagagcacgatgcctgccggcgccgctcggcgcagacgttgcgcactatcgacacgctcaatatcgcttcatttgagcgtgttgcctggaaaggggcggcaaaagagcgtcccggcacccttaagcgccagcatcgtgaacaaagcagcatcctcaacgatgcgatagagcaggcgcgtgagcgggtagaggaagacaacccggtgatgtttactctgcccggtagccaggtcgctgcgggaaagcaggtgctggagctggacgcgttgcggctgacccattcaccgatggcagcgctggactggcgtatagatgggccgatgcgcgtggcgctgcgcggccctaacggctgcggtaaaacaacgttgcttaaaacgctgctgggcctgcagccgccgctctcaggaagctgccgcttatcggtcaacgcggcgtatctggatcagcatctgagccagctggacctgtcattgtccgtcatggcgcacctgaatctcggtgatacgcccttagaagaaggtgtgctgcgcagccagctggcgcagctacagctgggggcggacaaagtccatctaccgctatcggttctgagcggaggcgaaagattaaaagcggcgctggcctgcgtgctctggcgacgggaggctacgcagctgctgctgttggatgagcccactaaccatctggacctggcgtccactctggcgattgaaaaagcgctggcacagtttcccggcgcgatgctggtggtgtcgcatgatgaagcttttttacgggcgctgaagctgacccattgcctggcatggcgggaagagggctggagcgttgagaggctataa

SEQ ID NO: 188109 - DNA, 213 bp, Klebsiella oxytoca
atgtccggtaaaatgactggtatcgtaaaatggttcaacgctgacaaaggctttggcttcatcactcctgacgatggttctaaagacgtgttcgtacacttctctgctatccagaacgaaggctacaaatctctggacgaaggtcagaaagtttccttcaccatcgaaagcggcgctaaaggcccggcagctggcaacgtaaccagcctgtaa

SEQ ID NO: 188110 - DNA, 294 bp, Klebsiella oxytoca
atggaatataaagatcctgcatttgaactgctgagcaaccttgaacaaattatttttaaagatcaggctcaggcggcctcgctgacgcgtaagcccgccgcatgcattgaatttgaccagctacgcaaaggtaccgggctgaaaatagatgattttgccaacgccatgggcgtcagcgtagcaatggtacaagagtgggaatcgagacgcgtaaggccttctcccacagagcttaagctgatgcgcctgatccaggcgaatccgcagctttcaagacagcttattgattcataa

SEQ ID NO: 188111 - DNA, 1359 bp, Klebsiella oxytoca
atgaagaaaacaaccatcgatattcaggcttttatcaatgaacatcccttcacgaaataccagtggatgattctggccttatgttttatcaccgtcgcgatggacggattcgataccgcgataatcggctttatcgcctctgacctggtgcaggaatggggcgtcgaaaaatcggcgttaggcccggttatgagcgccgccttagtcgggctcgcggtcggtgcgctgaccgccggaccgctcgccgaccgcgttgggcggaaaaaagttctgattatgtccatcgtggttttcggtggcttcagcctgctgaccgcctttgctaccagccttaaccagctgacgttgctgcgttttcttaccggccttggcctgggcgccgccatgccgaacgccgcgacgctgatgagcgaatacgccccagagcggcgtagggctctgatggttaacctgatgttcgtcggctttccgatgggttcctcgctgggcggcttcctctccgcctggatgatcccccattatggctggcaaagcgtgctggtgcttggcggcgtgatgccgctgctgctggcggtagtgctgatctttcttctgccggaatccgcgcgctatatggtggtcaaacgccagcctgcccagcgtatcgccgcgatcctgcgccgcatcgcgcctgttcccgagcaggcggaatttgaactacgcgaagcgggccaggtaaaggagaaatcgtccatcggcgtgattttctcaccgcgctacgccgtcggcaccgtcatgctgtgcctgacctactttatgggcctgctgatcttctatttgctgaccagctggctgccgctgctcatccgcgaaaccggtgcgacgatgagccaggcctctattatcaccgcgctgttcccgctgggtggcgggattggtgtgcttatcctcggcgcgctgatggataagctcaacccaaacaaagtggtggccgtgggctggctgctgaccggcgtgttcgtttgtctggttggtttctcgacccataacctgctgctgatggggataatggtatttatcgccggcagcattatgaacggcgcgcaatcatcaatgcctgcgctggccgccggtttctatcccacccagggacgcgcgaccggcgtggcctggatgttagggattggccgctttggcggcattctcggcgcctttagcggcgcgttcctgatgcaggcccagctctctttcgaaacgattttctccttgctggcaatcccggccttcctgtcggccaccgcgctgctggtcaaatataagcttggccaacggcaacctccggcggtccagggtgaagtggagaagctccaaaaggcgtaa

SEQ ID NO: 188112 - DNA, 711 bp, Klebsiella oxytoca
atggcgacaggaaagtcctgctctcgctggtttgcggctattgcggccctgttaatggtggttagcctgagtgggtgttttgataaagaaggcgatcagcgcaaagcgtttatcgacttcctgcaaaatacggcaatgcgtagcggcgaacgtctgccgacgctgaccgccgatcagaaaaaacagttcgggcctttcgtttccgattacgcggtgatttacggctattcacagcaggtaagccaggcgatggatgcgggtttacgtccggtggttgatagcgtgaacgcgatccgcgtaccgcaggattatgttacccaacgcgagccgctgcgtcaggcaaacggcgctttgggcgtactgagccagcagctggagaacgcaaaaatacaggcggatgccgcccacggcgcgctgaaacagggcgacgatctcaagccggtcttcgaccaggtctataacaaagtcgtgacggcgccggcgaatgcgctacagccgttaattccggcagcgcaggtatttacccaacagctggtgcaggtgggtgattttatcgctcagcaagaaacccaggtcagctttgtggcgaacggtattcagttcccgacttcgcagcaggccagtcagtacaatacgctgattgggccgctggccgctcagcaccaggcctttaatcaggcgtggaccgcggcagttaacgcgacgcgttaa

SEQ ID NO: 188113 - DNA, 972 bp, Klebsiella oxytoca
atgaagccgtcagtcattctctacaaaacgcttcccgacgacctgcaacagcgtctggaacaacactttaccgtcacccaggtgaaaaacctgcgtccggagaccgtttcacagcacgccgacgcgttcgctgaagcggtaggtctgctgggttccagcgaaaaagtcgataccgcgttactggagaaaatgcccaagcttcgtgcgacctcgaccatctccgtcggctatgacaacttcgacgtcgatgcgctgaatgcgcgcaaagtgctgctgatgcacaccccgacggtactgaccgagaccgtcgccgataccgtgatggcgctggtattaagcaccgcgcgtcgggtggttgaggtggctaaccgcgtgaaggccggcgagtggaccaaaagcatcggtccggactggtttggcaacgatgtgcaccataaaaccctcggtatcgtcgggatggggcgtatcggaatggcgcttgcccagcgcgcccacgcgggctttggtatgccgatcctctacaacgcccgccgccagcaccctcaggcagaggagcgctttaacgcccgctactgcgatctcgataccctgctggaggaagcggattttgtctgtctgatcctgccgctgaccgacgagactcatcatctgttcggcaaagcgcagtttgccaaaatgaagtcctccgccatctttattaacgccgggcgcggcccggtggtggatgagaaagcgctgattgccgcactgcaggaaggtgaaattcatgccgccggcctcgacgttttcgaacaagagccgctggcgaaagactccccgctgctaaatatgccaaacgtggtcgccgtgccgcatattggctcagccacgcatgaaacccgctataacatggcggcctgcgcggtggataatctgattgatgccctgaacggcaacgttgagaagaactgcgtgaatccgcaggtgaagtga

SEQ ID NO: 188114 - DNA, 1281 bp, Klebsiella oxytoca
atgaatagttcgacgaatgcaacaaaacgctggtggtacatcatgcctatcgtgtttatcacgtatagcctggcatatcttgaccgcgctaacttcagcttcgcttcggcggccggtattactgaagatctggggatcaccaaaggtatctcctccctgctgggggcgctgttcttcctcggctacttcttctttcagatccccggcgcgatttacgccgaacgccgcagcgtacgcaaactcatttttatctgcctgatcctgtggggcgcctgcgcctcgctgaccgggatggtgcacaatattcccgcgctggcggcgattcgctttattctcggcgtcgtcgaggccgcggtcatgccggcgatgctgatttacatcagcaactggtttactaaatctgaacgctctcgcgccaataccttcctgatcctcggcaacccggtgacggtgctgtggatgtcggtggtgtccggttacctgattcaggccttcggctggcgggaaatgtttattatcgaaggcgttccggcggtgatttgggccttctgctggtgggtgctggtaaaagacaaaccttcgcaggtcaactggctagcggaaagcgaaaaagccgcgttgcaggagcaactggagcgtgaacagcagggaatcaaaccggtgcgcaactacggcgaagccttccgctcgcgcaacgttgtcctgctgtgcatgcagtatttcgcctggagcatcggggtttacggtttcgttctgtggctgccgtcaattatccgcagcggcggcgagaatatgggcatggtcgaggtcggctggctctcatccgttccctatctggcggcgaccatcgcgatgatcgtggtctcctgggcctccgataaaatgcagaaccgcaagctgtttgtctggccgctgctgctgattgccgccttcgcctttattggttcctgggccgttggcgccaaccatttctgggtctcttataccctgctggtgattgccggcgcggcgatgtacgccccctacggaccgttcttcgccatcattcctgagatgctgccgcgcaacgtcgccggaggcgccatggccctgattaacagcatgggcgcgctgggttcgttcttcggctcatggtttgtcggttacctgaacggcaccaccggcagccccgcagcctcgtacattttcatgggagtggcgcttttcgtctcggtatggcttactttgattgttaagcctgctaataatcaaaaacttccgctcggcgcacgtcacgcctga

SEQ ID NO: 188115 - DNA, 939 bp, Klebsiella oxytoca
atgcaaaaagcgttagatgtcatcacgataggcgaagccatggcgatgtttgtcgccaccgaaaccggcgaactggctgaagtagaacattttatgaagcgcgtggcgggcgcggaactgaacgtcgcgaccgggctggcccgcctcggcttaagcgtcggctgggtaagccgcgtcggcgcggacagctttggccgcttcgtcctcacggcgctggcgaaagaggggatcgacgcccgcggcgtgagcaccgatggccgctacgctaccggctttcagctgaaatctaaagtcgaaaatggaaccgatcccatcgtggaatattttcgcaaaggctctgccgccagccatctgtcgccggatgattttaacgaatcatacttcgccagcgcccgtcacctgcacttaagcggcgtggccgccgcgctgtcggaaagctcatacgccctgctggaccgcgcggcgcgcaccatgaaagcgcagggaaaaacgatttcgttcgaccccaacctgcggcccacgctgtggaaaagcgaagccgagatggtcgagaagcttaaccgccttgcgtttcaggccgactgggttctgccggggttgaaagaaggcatgattctgaccggccagcaaacgccggaagccattgcggacttttatctcagccacggcgttcgcgcggtcatcataaaaaccggctccgacggcgcctggtataaaaccgccgatggcgaacagggggccgttgcggcgataaaagtggataacgtcgtcgataccgttggcgccggcgatggctttgccgtcggggtgattagcgccctgctggaaggaaaaccgctgccgcaggcggtgaaacgcggaaacaaaatcggctcactggccattcaggtccagggcgatagcgaaggcttacccacgcgtgaggcgctgggcgagtaa

SEQ ID NO: 188116 - DNA, 750 bp, Klebsiella oxytoca
atggccagaaagattattgtcgttaccgccgcgtacgggaatgaccgtgttaaagcgctgggcgggcagtccgccgtcctgccgtttatcgccggctccggcgccgacggcgtagagatccgccgggaactgttcagcgcggatgagctgaaccgcctgccggaactggccgccgatattgagcgccgcggcctgctggtttgctattccgcgccggaagccctgtttaccgctgacggctcgctcaacccgcgcctcgccgactttttgcaggaagcgcagacccttaacgcgctgtggctgaagctctcactgggccgctttacccaccaaaacgatctggacaccctgcgcgatatcctgcgcgagagcggcatggcgctggtggtggaaaacgatcaaaccgactgcggccagctggcgccgatgcagcgcttcaaggccgcctgtcgggttaaccagctgccgatcaccctcacctttgatatgggcaactggctatgggttggcgactcgccggaagaggccgcgcgccacctggcgcctgccgtcagctatattcatgtaaaggcggctgagccgcaccattcgcagtttcgcgccgtaccgccggatgaagcgtccgggcgctggctggcgctgctcgacaatctgcccgcagacgccccgcgcgggatcgaatttccgctgactggccatgacctgacggccgtgacccgccgctacgtcaacctgttacgcgaggattaa

SEQ ID NO: 188117 - DNA, 1017 bp, Klebsiella oxytoca
atggcgaaagcggcgcgagcaaccattagcgatgtggcgaaagccgcaaagaccggcaaaaccagcatttcacgctatctgaacggcgagaagcatctgctttccgacgatctgctggggcgcattgaaaaagccattgccgagctcgactatcgtcccagcctgatggcccgcggcctgaagcatggccgcacccggctgatcggcctgatcatcgccgatatcaccaacccctactccgtcaacgtgctcagcggcattgaagccgcctgtcgcgaaaaaggatttacccttctggtatgtaataccaacaatgagctggaccaggagctgcactatctcgacctgctgcgcagctatcaggtggaggggatcgtggtcaacgcggtcgggatgcgcgaggacggcctcaaccgcctgcagcagtcggcgctgccgatggtgcttatcgaccgcaaaattccggaattcgcctgcgatgtcgtcggcctcgataatacccaggccgccaccaccgccaccgaacacctggtggaaaagggcttcgaagccctgctgttccttagcgaacccctcggctcggtcaatacccgccgcgagcgcctgagcgcgtttcgccagaccctcctgcgccataccggtattgtcgcggaaaacgccgaagtaccgttgaacgatggcgcgatgctggataacgtcctgcgtcacttccactcccaccatcgcggcatgcgcaaggcggtgatttccgccaacggcgcgctgaccctgcaagtggcacgctcccttaaacgcgttggcctgatttggggcagcgatatcggcctgctgggcttcgatgaactggagtgggccgagctggctggcgtggggatcaccacgctcaaacagccgacctggcagattggcttcgccgccgtcgagcaggtggtgcgtcggattgaaggcagcaacgacccggtctgcgaacgggtgttttccggcgagctgatcgtcagaggctccacctcccgctaa

SEQ ID NO: 188118 - DNA, 663 bp, Klebsiella oxytoca
atgaaaaaacgcgtactcatgattgcggctgtcgttagcggcgcactggccatttctggctgtaccaccaatccctataccggggagcgcgaagcgggtaaatccgggatcggcgcgggcattggttcgttagtcggcgcaggcgttggggcgctctcctcttccaaacatgaccgcggcaaaggcgcgctgatcggcgcggcggccggcgcggcgctgggcggcggcatcggttactatatggacgtgcaggaagcgaagctgcgcgagaaaatgcagggaaccggcgtaagcgtgacgcgaaacggcgacaatatcgtgctgaacatgccgaacaatgtgaccttcgacagcagcagcgccaacctgaaacccgcgggcgccaataccctcaccggcgtggcgatggtgctgaaagagtatgagaaaaccgccgttaacgtagtgggttataccgacagcaccggcagccaggatctgaacatgcgcctctctcagcagcgcgcggagagcgtcgccagcgcgcttattacccagggcgtggcggctaatcgcatccgcacaaccggtatgggcccggcgaacccgatcgccagcaacagcacggcggaaggcaaagcgcagaaccgccgcgttgaaattaccctcagcccgctgcagtaa

SEQ ID NO: 188119 - DNA, 1695 bp, Klebsiella oxytoca
ttgccaacctcatctgctaccaaaactatcctgaccgcagcccattgggggccaatgctggtcgaaaccgatggcgagaacgtcatctcttcgcgcggggcgcttgatacccctttccccaactcgctgcaaaccgcagtgcgcgatcaggtgcatagcaaaacccgcgtacgttatccgatggtgcgtaagggatttctcgcctcgccagaaagcccacaaggcgtgcgcgggcaggatgagtttgtgcgggtgagctgggagcaggcgctggatctgattcacgcccagcaccggcgcattcgcgaaagctacggcccggcgtcgatttttgcgggctcctacggctggcgctcaaatggcgtactgcacaaagcggcgacgctgcttcagcgctatatgagcctggcgggtggctataccgggcatctgggcgattattccaccggcgcggcccaggcgatcatgccgtacgtggttggcggtaatgaggtttatcagcagcagaccagctggccaatggtgttggaacatagcgatgtcgtggtgctgtggagcgctaacccattaaatacgctaaaaattgcctggaacgcttccgatgagcagggcatcccgtggttcgatcgtctgcgtcagagtgggaagcgggtgatctgcatcgatccaatgcgatcggaaacggcggaattctttggcgacgcggcggagtggatcgccccgcatatgggcaccgacgtggcgctgatgctcggtatcgcccatacgctggtggaaaacggctggcaggatgacgcgtttttggcccgctgcaccagcggctatgacgttttcgcccgctatctgaccggggagagcgacggaacggcaaaaacggcggaatgggcggcggcgatctgcggcattagcgcggagaaaattcgcgaactggcacaacttttccacgaaaacaccaccatgttgatgtccggctggggaatgcagcgccagcagtttggcgaacaaaaacactggatgctggtgaccctcgccgccatgctcggccagataggcacccggggcgggggctttggcctttcctatcactttgccaacggcggcaaccctacgcgccgcgcggcggtgctggcctcaatgcagggcagcgtggcgggcgggaccgatgcagtggaaaaaatcccggtcgcgcgtatcgttgaagcgctggaaaaccccggggcgtcttatcaacataacggtatggaacgccgcttcccggatatccgctttatctggtgggcgggcggcgccaactttacccaccatcaggataccaaccggctgatccgcgcctggcaaaaaccggagcttatcgtcatttccgaatgcttctggaccgccgcggcgcgccatgccgatatcgtgctgcccgcgacgacctcatttgaacgcaacgatatgaccatgaccggcgactacagcaaccagcatctggtgccgatgaagcgggtggtcgcgccgcgcgatgaagcgcgcgatgatttcgaggtcttcgccgacctcagcgagcgctgggaagcgggcgggagcgcttcaccgagggtaaaaacgatctgcagtggctggagacattttaccagattgccgcccagcgcggggcggcgcagcaggttacgctgccgccgttcgcccggttctggcaggataatcagctga

SEQ ID NO: 188120 - DNA, 627 bp, Klebsiella oxytoca; identical to SEQ ID NO: 182674

SEQ ID NO: 188121 - DNA, 447 bp, Klebsiella oxytoca
atgattcgtaactgggacgctaacgaaaccggcccactgctcgagctgtggctagagagtacgatccacgcgcatccgtttatcgccgaaagctactggcatgacagcctggcgatagtgcgcgacgtttacctgccctccgcgcaaacctgggtatgggagcaggacggcgtgctgaagggttttatcagcgtgatggagtcacgcttcatcggcgcgctgttcgtcgcgccggatgccgccaggcagggtatcggcagcgcgctgatcggcgaagtcaaaaaacactacggttggctaacccttgaggtataccagaaaaacgttcaggcggtgaatttctaccatgcgcagggcttccgcattgaagactgcgcatggcaggatgaaacccagcatccgacctggattatgcattggtcggcggatcaaatgccgtcagcgtaa

SEQ ID NO: 188122 - DNA, 570 bp, Klebsiella oxytoca
atgcaacgttgcggatgggtcagtcaggatcctttatacattgagtaccacgataaggagtggggcgttgctgaaaagaatccccgcaagctgtttgagatgatttgtctcgaaggccagcaggccggactgtcgtggatcaccgtgctgaaaaagcgtgaaaactaccgccgcgcttttcaccagtttgatccggttcgcgtcgcggcaatggacgaagaagacattgaacgtctggttctcgacgccggtattattcgccatcgcggtaaaattcaggccatcatcggcaacgcccgcgccttcctggcgatggaaaaaaatggcgaacctttcgcagatttcgtctggtcattcgtcgataatcacccccaggtgacggccgccgccacgctggcggagatcccgacaaccaccccggcttctgacgcattgtcgaaagcgctgaaaaaacggggctttaagtttgtcggctccactatctgctactcctttatgcaggcctgcggtctggtcaacgaccacgtcatcgactgtttctgtcgctcaggaggccaggatgattcgtaa

SEQ ID NO: 188123 - DNA, 645 bp, Klebsiella oxytoca
atgataataaagaaatgcaatggcctccgggtattcctggtcccggcgtgcgtatccgtctgggcgtcgtgtgttgccggggcgaatgcctggcaacaggaatatatcgctatcgatacaaaaagtaatactgcggaacgctatacatgggacagcgatcaccaaccgcgctatgaagatattctcgcggagcggataaatgcgtccgacgatccttccggactggcgtttaatcaggcggtctccccggtggatagcgcacgcggtatgagcgtcggctggaatttctctctgaccgaggggatgacgtccggcccggtcgccagtttacattccgatctgacgtcgccgccgcttacccgcaatgcggccggaaccggttacgtgaatacgctgggctggcgggtcgattatcagaagctatggggcgtacatccgtgggctcaggtgagctataaccaggagttgacgacggatttcggcggggcgaaccgcgctcaggacggtgcctggcgggacgtgacgctgggcgcagatatgtcgctcaactctcatcttgccgcctgggcggcgctatcccaggcggacaatttacccaccggggcaaactatctctatttaatgggcgtgagcgccaatttttaa

SEQ ID NO: 188124 - DNA, 1203 bp, Klebsiella oxytoca
atgaacgctgcaaaccgtcaatacatccgctggcttacgctgctcggcactatcattacgcaatttgcgctgggatcggtttatacatggagtttgttcaatagttcgctttccgccaagctggacgaaccggtaagccaggtggcgttttcattcggcctgttaagcctcggcctggcgctctcttcatccgtggcaggtaaattacaggaacgtttcggcgttaaacgcgtcaccatggcttccggcgtcctgctgggcctcggattcttccttaccgcgcattcaaacagcctgatgatgctgtggctgagcgcgggtctgctggttgggctggccgacggtgctggctatttgctgacgctgtcgaactgcgtcaaatggttcccggaacgtaagggactgatttcggctttttccatcggtgcttacgggcttggcagcctgggttttaaatttattgactcccatctgctggcgacggtcggcctggaaaaaacctttattatctggggcgctattgtgctggtgatgatcgtttttggcgcgacgctgatgacagacgcgccgaaccacaccgctaccgccaacaacggcgtcgtcgaaaatgacttcaccctcgccgaatcgatgcgtaaacctcagtactggatgctggcggtgatgttcctgaccgcctgcatgagcggcctgtacgtgattggcgtggcgaaagatatcgcccaggggatggtgcacctcgatgttgcgacggctgccaacgcggtgacggtgatctctatcgctaacctgagcgggcgcctggttctgggcattctgtccgataaaatgtcccgcatccgggtgattaccatcggacaggttgtctcgcttatcggtatggcggcgctgctgttcgctccgctgaacgccatgacgttcttcgccgctatcgcctgcgtggcctttaacttcggcggtacgattaccgtcttcccgtcgctggtcagcgagttctttggtctcaataacctggcgaaaaactacggcgtgatttatctcggctttggtatcggcagcatctgcggttcgctgattgcttccctgttcggcggtttctacgtgaccttctgcgtcatctttgcgctgctgattctctctctggcgctttcgacaacgattcgccagccgaaaagtgaaatttaccaccaggctcacgcctga

SEQ ID NO: 188125 - DNA, 1689 bp, Klebsiella oxytoca
atgaaatacattaaaacgatgacgcagctgaagctcagtatctggctggcgctgtacatcggctggtttatgaacgccgccgtattcttccgccgcttcgaggggtacgctcaggagtttaccatctggaaaggactctcaggtgcagttgagctgatagggacctttctggtcaccttctttctgctgcgtattttgtcgctgtttggccgccgggtctggcgtattctcgcgaccatcgtcgtactcttctccgccgccgccagctattacatgaccttcctgaacgtggtgatcggctacgggattattgcctcggtgatgaccactgacatcgacttgtccagagaggttatcggctggcacctgattctctggctggtgctgatgagcgcgctgccgctggtgcttatctggagcaaccgctgtcgcttcaccctgctgcgtcaaattcgtacgcccggccagcggatgaagaatattactatcgtgctgctggctggcctgatggtctggggccctattcgcttgctggaggttcgtcagaagaactttgagcgcagttccgaagtcgatctgccaagctatggcggggtggtggctaactcctatctgccgtctaactggctatcagcgctggggctttacgcgtgggcgcaggtggacgagtcttccgataataaatccctgatcaatccggcgaaaaaattcacctacgttgagccgcaagggctggatgatacttacgtggtgtttatcatcggcgaaaccacccgctgggaccatatgggcatcctgggctatagccgcaataccacgcctaagctggcgcaggaaaaaaacctggtcgctttccgcggatactcctgcgataccgccacgaagctgtcgctgcgctgtatgttcgttcgtcagggcggggcggatgataacccgcagcggacgctgaaagaacagaacgtctttgccgtcctgcaccagctcggctttaccggcaacctgtacgccatgcagagcgagatgtggttctacagcaacacgatggcgaacaatatcgcctatcgcgagcagattggcgctgagccgagtaaccgcggcaagagcgttgacgacatgctgctggtggatgaaatgaagcgcggtctggcgaagaatcccaatggtaagcacctgattattctgcataccaaaggatcgcactttaactatacccagcgctatccgcgcagctttgcgcagtggaagccggagtgcgtcggcgtcgataataaatgctcgaaggctgagctgattaactcgtacgataacagcgtgacctacgtcgatcactttatcgtcagcgtgctggatcagctgcgggacaagaaggcgattgttttctatgcggccgaccacggcgagtctatcaacgagcgcgaacacctgcacggtacgccgcgcaagatggcgccgccggagcagttccgcgtgccgatgctggtgtggatgtcggataagtatctggcgtcgcccgaccacgcagcttcttttgcgcacctgaagcagcaggcggccatgaaggtaccgcgtcgtcacgtagagctgtatgacaccattatgggctgtcttggctatacttcgccggacggcgggattaaccaatataacaactggtgccacgttcctgacgctgcggcgaagaaggagtag

SEQ ID NO: 188126 - DNA, 1608 bp, Klebsiella oxytoca
atgagtatttccttgaagaaatcagggatgctgaagcttggtctgagcctggttgccatgaccgtcgcagcaagcgtacaagcgaagaccctggtttattgttcagaaggttcgccggaaggctttaacccgcagctcttcacctctggtaccacctatgacgccagctcagtgccgatttataaccgcctggtggaattcaaaaccggcaccacggaagtcatcccgggcctggctgaaaaatgggaagttagcgaagacgggaaaacctataccttccatctgcgtaaagacgtgaagtggcaggataataaagattttaaaccgacccgcacgctgaacgccgatgacgttgtcttctccttcgacagacaaaaaaataccaataacccgtaccataaagtgtctggcggcagctatgaatactttgaagggatgggattacctgacctgattagcgaagtgaagaaagtggacgataacaccgtccagttcgtgctgacccgtccggaatcgccgttccttgccgatctcgccatggacttcgcctctattctgtcaaaagagtatgccgacaacatgctgaaagccggtacgccggagaaagtggacctcaacccaatcggtaccggcccgttccagctgctgcagtaccagaaagactcccgtattctctataaagccttcccgggctactggggcaccaagccgaaaatcgatcgcctggtcttctccattacccctgatgcttccgtgcgctacgctaagctgcagaaaaacgaatgccagattatgccgtacccgaacccggcagatatcgcgcgcatgaaggaagacaaaaacatcacgctgctggaacagccgggcctgaacgtcggctacctctctttcaacaccgagaagaagccgctggatgatgtcaaagttcgccaggcgctgacctacgcggtcaacaaagaagcgattatcaaggccgtttaccagggcgcaggccaggccgcgaagaacctgatcccgccgaccatgtggggctataacgacgacgttaaagactacacctacgatccagagaaagcgaaagcgctgctgaaagaagcaggcctggaaaaaggcttcaccatcgacctgtgggcgatgccggtacagcgtccgtataacccgaacgcgcgccgtatggctgagatgattcaggccgactgggcgaaagtcggcgtccaggccaagatcgtgacctacgagtggggtgaatacctcaagcgcgcgaaagcgggcgagcatcagaccgtcatgatgggctggaccggcgacaacggggatccggataacttcttcgccaccctgttcagctgcgcggcggcaaaagacggttctaactactcccgctggtgctacaagccgtttgaagacctgattcagccggctcgcgccaccgatgaccacaacaaacgcattgagctgtataagcaggctcaggtcgtgatgcacgatcaggctccggcgctgatcgtcgcccactccaccgtctatgagccggtgcgtaaagaggtcaaaggctacgtggtcgatccattaggtaaacaccacttcgataacgtctctatcgaataa

SEQ ID NO: 188127 - DNA, 1020 bp, Klebsiella oxytoca
atgttgcagttcattctccgacgtttgggacttgtcatcccaacatttatcggtattacccttctcacttttgccttcgttcatatgatccccggcgacccggtgatgattatggcgggcgaacgtggtatttcccctgaacgtcacgcgcagctgctggccgaaatgggcctcgataaaccgatgtggcagcagtacgtcaactatatttggggcgtgatgcacggcgatttgggcatctcgctgaaaagccgtattcccgtttggcaagagtttgtaccgcgctttaaggccacgatggagctgggcgtctgcgcgatgatttttgccgtcatcgtcgggatcccggtgggcgtgctggcggcggttaaacgcggctctatcttcgaccacacctccgtgggcctcgcgctgacaggctactctatgcccatcttctggtggggcatgatgctgatcatgctggtgtcggtacagcttaacctgacgccggtttccgggcgcatcagcgataccgtcttccttgacgataccctgccgctgaccggatttatgctgatcgataccgcgatttggggcgagccgggcgactttattgatgcggtaatgcatatgatcctgcccgccgtggtgctggggacgattcccctggcggtgatcgtgcgtatgacccgttcatcaatgctggaagtgctgggcgaggattatatccgtaccgcgcgcgcgaaaggcctgacgcggatgcgggtgatcatcgttcatgcgttgcgtaacgcgatgctgccggtggtcacggtgatcggtctgcaggtcggtacgctgctggcgggggccatcctgaccgaaaccatcttctcctggccgggccttggccgctggctgattgacgcgctgcagcgccgcgactatccggtggtgcagggcggggtgctgctggtggcgacgatgattattctcgtcaacctgctggtcgacctgttgtacggcgtggtgaacccgcgtatccggcataagaagtaa

SEQ ID NO: 188128 - DNA, 903 bp, Klebsiella oxytoca
atgtcacaaattactgaaaataaagttgtcgccgcgccggtgccaatgacccctctgcaggagttctggcactattttaaacgcaacaaaggcgccgtcgtggggctggcctatgtcgtggtgatgattatcatcgccatcttcgccaacttcctcgcgccctataatccggcggatcagttccgcgatgcgctgctggctccgccgttctggcaggagggtggcagcgtgagccacctgctcggcaccgatgacgtcggccgcgatatcctgtcgcgcctgatgtacggcgcgcgcctgtcgctgctggtcggctgtctggtggtggtactgtcgctgatcctcggcgtggtgctcggtcttgtctcgggctactttggcggcgtggttgactcggtcattatgcgcgttgtcgatattatgctggcgctgccgagtctgctgctggcgctggtgctggtagccatcttcggtccgtcgatcgtcaatgcctcgatagcgctgacctttgtcgccctgccgcactacgtgcgtctgacccgagcggcggtgctggtagaggtaaaccgcgactacgtaaccgcttcccgcgtggcgggggcaggcgcgatgcgtcagatgttcatcaacattcttcctaactgtcttgcgccgctgattgttcaggcgtcgctgggcttctctaacgccattctcgatatggccgctcttggcttccttggcatgggtgcgcagccgccgacaccggagtggggcacgatgctctccgacgtgctgcagttcgcgcagagcgcctggtgggtcgtcacctttccgggtgtcgctatcctgctgacggtgctggcatttaacctgatgggtgacggtctgcgtgacgcgctcgatcccaaactgaagcagtaa

SEQ ID NO: 188129 - DNA, 984 bp, Klebsiella oxytoca
atggcgttattaaatgtagataaactctcggtgcacttcggcgacgaagggacgccgttccgcgccgtagatcgcgtaagctacagcgtaaatcagggcgaagtggtcggtatcgtcggcgagtccggctcgggtaaatcggtcagctcgctggcgattatggggctgattgactatcccggccgggtgatggctgaaaagctggagtttaacggtcgcgacctgaagcgcatttccgaaaaagagcgccgccagctggtgggcgcggaagtggcgatgatcttccaggacccgatgaccagcctgaatccgtgctataccgtcggttaccagattatggaagccattaaggtgcaccagggcggcaacaagaaaacccgcgtgcagcgggcgattgacctgctgacgctggtggggatccccgatccggcttcgcgtcttgacgtctatccgcaccagctttccggcggtatgagccagcgcgtgatgatcgcgatggccatcgcctgtcggccaaagctgctgattgccgatgagcccacgacggcgctggatgtgaccatccaggcgcagatcatcgagctgctgctggagctgcagcagaaagagaatatggcgctgatcctgatcacccacgatctggcgctggtggccgaagcggcgcacaaaatcatcgtcatgtacgcggggcaggtggtggaaaccggcgatgcgaaggatatcttccgcgcgcctcgccatccctatacgcaggcgctgctgcgcgcgctgccggagttcgctcaggataaagcgcgtcttgcctcgctgccgggcgtggtgccgggcaaatacgaccgtccgagcggctgtctgctcaacccgcgctgcccctatgcgaccgacaaatgccgcagcgaagaacctgagctgaacctgcttaacggcggtcgccagtcgaaatgtcattacccacttgatgatgccgggaggcctgggctatga

SEQ ID NO: 188130 - DNA, 1014 bp, Klebsiella oxytoca
atgagtacgcatgaggccaccacgcaacagcctctgttgctggccaccgatttgaaaaaatactatccggtgaagaaggggctcttcacgccggaacgcctggtcaaggcgctggacggcgtctcgtttacccttgaacgcggtaaaacgctggcggtagtgggggagtccggctgcggtaaatccacgctcggtcgtttgctgacgatgattgaaatccccaccggcggcgagctctattaccagggacaggacctgcttaagcacgatccgcaggcgcagaagctgcgccggcagaaaatccagattgtgttccagaacccctacggttcgctgaacccgcgtaaaaaggtggggcagattctggaagagccgctgcagatcaacaccagcttgagcaaagaacagcgccgggagaaggcgctggcgatgatggccaaagtgggcctgaaaaccgagcactacgaccgctatccgcatatgttctccggcggccagcgtcagcgtatcgccattgcccgcggtctgatgcttgacccggacgtggtgatcgccgacgaaccggtttccgcgctggacgtttcggtgcgcgcgcaggtgctgaacctgatgatggatttacagcaggatctggggctttcttacgtctttatctcccacgatctgtcggttgtggagcatatcgctgatgaagtgatggtgatgtatttaggccgctgcgtggagaaagggacgaaagatcaaatcttcaacaacccgcagcatccgtacacgcaggcgctgctgtcggcaacgccgcgtctgaatccggatgaccgccgcgagcgcatcaagctcaccggcgagctgccgagcccgctgaatccgccgccgggctgcgcgtttaacgcccgctgccgtcgccgtttcggcccgtgcacccagcttcagccgcagctgaaggactacgatggccagctggtagcctgctttgcggtcgaccaggatcagaacggcgagaagcccctgagctga

SEQ ID NO: 188131 - DNA, 579 bp, Klebsiella oxytoca
atgaaccattatgatgatttgcagcgcttcaaggaaaagacgcggacacacagtctaaaatttaaggacctctcatcagaagccgccgccggcgaaaaaggggattgggttattctcaatcaacttattccggcggaggaagcgtcttctttggccatgggtgggtcagtttccttacctctgccgcagcgggttcctgccgatatgtttcacaaggtggagcctgcggtcgttcaggctcccccggcgccctctttggctgcaccgtccctgattatcccgccctccgcgccgcagcccgcccccctgacggacatgactgctgcagtggccgtagagcctgcgctgccgcaaagcctggcagcggctacgcccgcttcccagccggcggtttctcaggctgctgcgcagccggtaccggtcagcgtccctgctccggcagtcaggcctcgttcggcggccgcgccgacgacggagggttttgcccatctttttgcggccaaaaccgcgcagccggtagcaaaagataaagatcagtcactgaaatcactcctggagaggattgcgacatgccgttga

SEQ ID NO: 188132 - DNA, 2409 bp, Klebsiella oxytoca; identical to SEQ ID NO: 187990

SEQ ID NO: 188133 - DNA, 4053 bp, Klebsiella oxytoca
atgaaaagagtcggtaaaatgaatacgaaggcggcccgtcaattttccacgctgtgcctgtccggcgcgctgacgcttggcgccttcggcgaggcgcaggcggcgggtaacgatgcggcgctgcaggcgctgtttgcgcaggccaactactggcacgaaaaatcgcacgacgagctggcgatggaatcgctgcaaaaagtgttatcggtggatgccaacaacgctcaggcgctgtacctgatggcgctgtgggcgcagcaggggggcaacctgcaggccgcggcccagtggcgggcgcgactggagaaagcggcgcccaacagtcccggcttgcaggatctggatagcgccaaaaaaatggcgcaggtcccgcaggggcagctcaatctggccagacagcaggcgcgcagcggcaacgtgcctgccgcgctggcgacctggcggagtatgttcaacggcagcgttccgccttccggactggcggcggaatactacatgacgatggccagcgacaaatcgctctatccgcaggcgttgagcgaactgcgtcagtacgtcgctcagcatccgcaggaaaacgggccgcgcgtggccctgggcaaggcgctgacctggcgcgaagagacccgccgggaagggatcgccatgctggagccgatggccagcggcagcaaagaagccgatgcgggactgcgtcaggcgctgctgtggatggggccgcagccgggagatgagccgttttacgatacctggatgcagcgccacccgcaggatagcgaagtgcagaactacttccgcgaacggcgcagcggccaggcgcgcggtcagggttacgctgacctgaacagcggcaataccgccgcggcgaagcagcagtttgaacaggtcctgcaaaccaatccgcaggatgctgacgcgcttgccgggatgggctatatcgcccagcgcagcggcgattttcaggcggcctctcagtatttgggccgggcggcggatctcggcggcgagggctctgaaacccggcgtcagcaggcaggggatgcgctgttttacggccagcttgctcaggcgcagcaggcctataagcaaggcaacattagccaggcgctggcgctctccgcgccgctggcgcagcagagcgggacgcagggctcggcggcgaagctgttccgcgccgacgttctgcgccacaacaaagacctgccccaggccgaacaaacgctgcgggcgctgctcaacgagcagccgcaaaatggccccgcccgggagaatctctattacgttctgcgtgaacagaataaaaccgcagaagcccagtcgttgctgcgaacgctgccggaaagcctgcagcaaaagctgcagccgcgcgtggtcaccgggacgccgggagactccctgcgtcgacaggcccaggagcaggccagcggcggtaacgtgtccggggcgatcgccacgctgcgccagggcgtttctcgctatccggacgatgcgtggatgcgcctcgatctggcccgactgctgcaaaaatccggcaacgacggcgaggcgaatgcgattatgggcgccgcgtatcgtcccggcgccagcagcagctcgctgtacgccgccgcccttttcgccagcgagaacggcggctggcagcaggcgcaaacgctgctggcaagaattccccccgccagccagaccagccagatgcgcgatttgcaccagcgggtgaactacaacctgcagctggcgacggccgaggggtatctggcgcagggtaattccgtcgcggcgtccaatacgctgagggcgatggccgcgacgccgccaaaagccccggcggatgtcggtaaactggcgcgcctgctggcccagagcggcgatgtcactaccgcggtatcgctggtgcgtaacaatattaacggcggtatctccggcaacgccggggattacgccgatcaggtgacggtgcttaaccaggctggcctgaccaacgaagcgcagaggctgctcactaatccgcagctgcaggcaagcagtacgccgacgcagctggccagcattcgcaacggctatgtgattaacgacgcggatcgcctgcgcgagcagggtaactacgcggcggcgtatgacaagctgatgggcgccatgcagagcgacccgcaaaataccgacctgatgttcgccatggcgcgtctctatcagagcggcaaaatgaataaagaggccggggtcgtctatgactacctgatgacccgcgatacgccgacccaggacgcgcgcagcggggctattgatgtcgcgctgtcggcgggcgataacgaccgggcggcgcagctggcaggcgggctgcgcccggataattcgccggaccgtttgctgctgctggcgcgcgtggccgaatcgcagggccatcatcagcaggcgatgacctatctgcgcagcgctcgcggcaggctgctggggttacagagcagcaacggtacgcaaacgccgaccgtgggcggcgtgctggcggcggataatccgttcgtcggcgtctcgcgcacgccggcggcgacgcgtaccgcttccacctacgggcaatatatgccgtggcaggtttctcaggtatcgacgggcgatggcagcacgctgccggggatccagcgcaccgatctgccggtcgaaaccgcgcagacccggatgctgcgccaggtggataccatgatggagacgttgcaggaaaaaaccgggacctggctgcaggggggcatggaggttcgcggccgcgatggcgaatccggaaccagcaagctgaccgaaatcaaaaccccgctgacctggtcctcttcgccgttcggtgattcgcgtttcgactttaccgtgacgccgattacgttgaacgcagggacggcaaccggtgacgcctggcggcgctatggcgcgaatccgctatcaaacgcggtctccaatatgatctccaccgccaccagcgagcaggcggcgattgcggcgatgaccgataccgagcgcacgacgtactttgccaacaatccgggggcggagaccttgagcggtctcggcacgctgaatgcttcagactttaacgccaccaccagcagcggcatggagaatctggcgaagctgggcgcttacgattccgggcaggtcgccagctatctggcttcttcaaatctgaaacctaacgttgatcgagccagcggctcaaccgattcacaaaaagccaacggcgtggcgctggcgctggcgctgagcggcgacgaatatcgcgtcgatatcggcagcacgccgctgggtcaggatctgaataccgtggtgggcggcgtgaagtggtcgccgaagctgactaactatctgtcgctgatttttaccggcgagcgtcgttcgctgaccgacagcctgctctcctgggtggggctgaaggattcctactccggcaaaacctgggggcaggtgaccaaaaacggcggtaccctgcagctcagctacgacgacggcgatgccggtttctacgtcggcggcgggggctatagctacctgggacaaaacgtcgccagcaataccagcatcaacgccaacgccggggtttatctgcggccttaccacgatgagtatcgtcagctgcagaccggcctgagtatgagctacatggattactcgaaaaacctgagctacttcacctacgggcaagggggctacttcagcccgcagaactacgtcagcgtgtcgctgccggtgagcctgacggagaaatatgataactggacgatgaagcttggcggttcggtgggctatcaatcttacagccaggataagagcgcctatttcccgaccaacgccgagtggcagcaaacgctcgagaccgctgtgagcaacggttttgctaaagaggcctactattcagccacctcgaagagcggcatcggctataccctgcgcgccggcgcggattacaaagtcaataaacagatgacgctcggcggccaggtgggctatgacaccttcggcgattacaacgagagcaccgccggcctctatatccgctacatgctgggagatcgctga

SEQ ID NO: 188134 - DNA, 930 bp, Klebsiella oxytoca
ttggctatttttgatttgttttcgaaaagacaaaaaagattgagaggagaggttcctgatgtgtatcagtacacgaaccttcctaacaattttcgtgtgcaggttattcatatcgtcaaggagacaattggtgaggactacgggagggggagtgacccgggtggcatttacaaagcgataaatgacacgctatgccgcgagtatggtgtttttaaattaagggattacccaaagagtaacttcgaagctgtatatgatttctttctgaatgaaaaagatattgaaaaatgccttgatgtgattgaattaagtttcaaagcaattgatggatatgtcagagagaatcactggcgtttccacggacatgaacaaaaatccgactctgcgatagaagagctaaatatcagatttaaagaatcaggcattgggtttcagttcgaatcaggggagttggtgagagttgattctcaattcattcactccgatgcggttaagcctacccttcagattttagggcgttctaaagcattcgaaggggctaatgacgagttcctctcagcgcacgagcactataggcatcaaagattcaaagaatgtcttaatgattgcctgaagtcgtttgaaagccttatgaaggccatccataaaaaacgctcatgggaatatggaagtactgatacagcaaagaaactaatttcgagttgcctttcaaatgggcttgttcctgactacatgcaaaatcaattttcatcactgaggattttgctcgaaagtggtgtgccaactatcagaaataaagagggtggtcacggtcagggggatgaggtgacgaatgtaccagagcatttggctagctatacattacatctgacagcatctaatctactatttttagcaaaatgtgatgagaatttcacaaagaaaaaataa

SEQ ID NO: 188135 - DNA, 135 bp, Klebsiella oxytoca
atgtttaaaaattttacccgccagctgtttgcccagcttggccgtcatttaccgcgtcgtttagtacaacgcgatccgctacccgatgcccgcatgatgcgcggcgcgataaatgcgcttcaaaatgcgcgataa

SEQ ID NO: 188136 - DNA, 4110 bp, Klebsiella oxytoca
atgtcaaatttgcaggaaagtcctgtctgggtcgatggtatttatcagctaacggatgaaaccccggtacttggtgctcaggagaatgttccgggtaatggtccctctaatgttcaggctgaacaactggctaatcgcaccctgtatttaaaagcattcatggagtcaattgctgacggaaaggaatacacatttttcaaaacagtatcagatcccgatggtacgcttgcaggtcttcaggcaactgaaaatgggaaagtctttagagtcgcccagggcgacgagggtaactcgtcgtttatttattattataataataatggtatagctgtagaaatatcccgccttgccagcgataacgcaattcgggaaattgccagtggctattacacattaaacggaaaggatgtggcagagattgttaatgggctggtcatttatagtgacggctccatggaatcgactcctgcatgggatgcctggtatcttaaagttgaggcaggagaaactgttacttatgacggtaccgttggctcaaatacagtcggcgagcagatggcttatctcattcagttagatgaaaacaaatcctttgtatcctctctggcatactggacctcaaccggtaattcaacagataaagccaggctatctggtatcgctacaactaatggttttatttatatccgtatccgttctggagcgaacttcagccttacctaccgaaaaaaaacattactggcgaaatctgatattgacgcagccgggggcgtagcgagctatgccagctatcagaacgtgctggcgaataagcctcttgtcgatattacttcagctcagagtactgcatgggtgaacgggcgagtgatttatgccgatggtacccattcagatgccgccggacaggcatggcgtgccgcttacgttccggtaagcaaaggagatattctcgagtatcacggtgagattggaagtgccactccggatgagcttctggcctacattattcagctcgacaccagccttaatgtggtgggtaatctgacgacgtacctctccacgggaacgccaaaaacaggtgttttatcaggtgttgccacccaggatggcttcgtttacatccgtgtacgggtgacaacaccagcagctgtcatttatcagagcaggcagcgtttcatgcctggcgctgatgtgtttggtgttaaaaccgattctaatgtggccgaggctaatcgcgtgactacagatatcaccgaagcttcaaccactacgtacattcccggtcgggtcatatactctgatgggctggtttctgattcagcgggcgaaagctggaaagcggcgtatgttccggttaagaccggggatatcgtgcgctacttagggcagatcggctctgctacggcaggcgaggtcattgcctacatcattcagctggatgcgacaatggcggtggtagccaacctcgccacttatacctcaccggggggattcagtaatggggtcatgaccggtgtcgccacgcaggacggtttcgtctatgtgcgcgtgcgcgtcactaccccggccgctacgatcaccaaaacgtcgtcgctatttgtgaccgtagaagaccctctcactctgcgcacgaaggcttcgcttactgcgaccaacaggacaactaccgacgtcactacatccgacacaagctacaccgtaaccgggcgggtgatgtacgcggatggaacggtaaccgacaatgccggcgccagctggcaggccgtataccttccggtgaaggccggagatctcgttacgtataaagggcagctagggtctggtaactcaggagagttgatggcttacgttatccagttggataacgcgctgaggtacgtggggaatttaggcgtgtatacctcgccggggtacacgagcgacgggaccatatcgggtaaggcgactcaggacgggtacgtatatgtccgcgttcgtgtgactccgacggccgctacgattacgaaaacggcccagttgtacgctttctccgacaatatcacgggcgcaccagtaaccgttgattacaccagcaatgcatcagctattgtggataactccgtgatgtatagcggaggacgtgtagtatcgggttccgcttatattgcgtggcggatgtattacatcccggttcgtaaaggcgacattgttctgatgtacgggcagtacgggtcagcgattgtcggtgagcagatcgcctatatgatgcagtgcgacatgaaccgcggatgggtcgaagacctgtatgttttctccagtgccggaggttatgtctccgctaccaggcgagccgcggccactcaggacgggtacatagctgtaagggtgagaaagactatagaccccgtgtacagtgttaagcggcagtaccctaacagcctcgcccgggtagacgacgtttctgcaatgatcgcgcaagcagcctacagtactcgtcctgtagcgaaagtattcaatgcgcctcatcacgttgacctgtcagggcttcctgagaggaccccgggatttgagagtttcagcaaccctctgggatacactttcactaagcaatgggcccgccgggatttttacaatgcagctgactcgttcatgctctctttcatggacctggaaaacaatccctggaacctgcagagcaatatctacgatattcccgccgggaatgtgtttacttattcctggtcagcaggaaaagtctctttccgcaacccgacagcaaatggccgggtggtgatgttcgcggaccgctatatgccctttgcaaccagtgagattgcgatcgaccggctggcaggtaatgccacaatggggattatgtttgcggatgttgaccagcagaacagtgtttcggtccgcgtctcaaacagccaggttatctgcgaaatttacgccgccgggagtctgcttgatacgaccacgttcaccggctcggatatgaccggcgcagtgcttcaggtgcagaataccggggtgtcactgctgctgaaaaaagtgaacgctgacgggacatggaaatggatcggtcgctatgaacattacgccatttttgatgcacgaaaactggaatacctcgatacatggaaaacctgtgtgtttgcgcagaccgatgcatattcttccagtgatgtggctgtcttcagtggtttttcaaaccgcattgccagcggggcaaattccgtctccattcgctttctgacctatgaagacggaacgtttattcagcgcgggaactggctttattttctcgttgagggaacagggaccactatctccgacctgtacacacagatagtacgtatcaacttcaacagcggtgaagtacagatgatcggcgctattttccaggtgcggactgacggaaccgatgaggatgtcgtgctgggtgatgacagtatcaaggcggtgtatgaccggaacagtcagagctggaaaggtatctcgtgcggtatggactatcagggtaaagggctggccgataacaaccggccaaaactctattttgagacgaaacaagacttactgcagggcggcgtgatcatcgtcagaaactccgtgcaactgaagaacgcaaacggcaacttctttggcatcggctccagctatgtggaagacatcgacttctactatgaggcgtcaagcagtcagtgggtgatgacgggaaacaccatctccagtggatgcaaaaccttccggagcccgacgctgtacgacggtattgtgccggaatatacgacggcagaagtcccggctggcgtgcgcgataccgggaatcagttcgttcatttcggcgagacaacctacctgacaagcggaggaacggccaaccgactgcatctgcgcaagtatgaggcaggtctgaccttcttgggggaatttgtgcaggatgtgtatctggcccctaataccaccgggccgtggtgcacgctggtcccattcaccaatggtgatgaaacggaacttttcatgctttcctttgaccgttcagatttgtatgaagggctgggcaacggcgctgcaacgtacgatcacgggggtctgtactgctggaaagcgaaccgtactccagcttaa

SEQ ID NO: 188137 - DNA, 204 bp, Klebsiella oxytoca
atgtcgcgtattgtactgaccctcgaccagatacggagtcttgcctcctttgccgagggtgaaggtcagcccgcttacatcatcaccgacggaagcatcccggcttttgaggctgacgatggttcggtggttcccgaatataccggcctgattgtttattccgaatcagagcaaagcggcgtactgcagttagctgaccagtaa

SEQ ID NO: 188138 - DNA, 1137 bp, Klebsiella oxytoca
atgacgacagccatgacgacgagcactgctaaagcgacacttgcggtttttgcacccggcacccataccgcgatggatggccggaccatcaccttcacgccggaaaactgcatcgacctggccaacagctatgacccttcagtatcggaagccccttttgtcatcgggcatcctagcctgaccgcaccggcgtatggctgggccgaacgcctcgaattccgtgacggcatcgtctatgccgcgccgcgtcaggtgaatccggcctttgcggaagccttcaacgcgggcagctacaaaaaacgctccctctctatttatcagcctgacagccccggcaacccgaaacccggtcattactatgcccgccacgtgggttttctgggggccgtccctcctggcgtcaaagggctccctgatgcgcagttcgcagaggccagcggcgataacggtccgctggagttcgcgttgccgtgggaagccgacaatctggccagcctgtttcagtcgattcgagactgggtgattcaggaaacaaccatcgagcaggctgattccatcattcctcagtggcgtatccagtcgattctggactcggccaccgatgaacgtaagtcaatctcaccactggcatatgccgaggagaataatgtggacccgaaccaaacgcccaccgttacggcggaggagctcgcccggcgcgaaacagcgctggcagagcgtgaagagaaactacgcaaggatgaagaagccgcaaaactacgcgatgcgaaggtgcgccgcgacgcggttgtcagctatgcagacgggctggttaaagcgggatctatcctgccacgccagaagaatactgtggttgaggtactgctcagccttgataccacgccgctgtcttttgccgatggtgatgccacggtgaacaaaaccccggaagagctgctgcgtgatgtgctgagccagaagcccaaagtgatggacttcagcgaaaaaaccggcacggctgatgctccggtcgatttcgccgacgcttccgcgctggccactgccgcacagaactatcaggcagagcaggctaaacagggtcgcaccatctccatgacggacgccgttaaccacgtgaagaaaggagcccagcaatga

SEQ ID NO: 188139 - DNA, 561 bp, Klebsiella oxytoca
atggctggcgtaacgctaacgtttgattaccaggaaacactggcgaagctctgggatgcacggtcggagctgatgcgcccggaaccgctgctccgttcaatgggggagcgcctgcttgaatttcaccagcaacggttcagggaccaaacatcacctgacggggtgaaatggaaagagctgtcctggcgctacaagcaacgtaagcgaaaaaaccgggaccaaatactgacccgcgatggctatctgcgaaacaccctgcgctggcaggtgaatgctgatgagctgctgttcggtactgaccgggtctacggtgctatccaccagttcggcgggaccatcgaaatcgcggcgcgtagtcagcaggcgtactaccgtcagaaaaaagacggcgagatcgacaatcagtttgttcgtaagaacaagtcgaattttgcccagtggcacaccatcccggcgtataaaatctccatacctgcacgtacgtggctgggagtctcaaaagcagagggggtgacccttatcgatatggcgaaaaactacctgcagggggcgtttaactga

SEQ ID NO: 188140 - DNA, 381 bp, Klebsiella oxytoca
atgtcactacttcacaaagtccgtcaccagcggctgcgcaactggatcatccttgccgttgcgctgctggccgctatcgccgtcatttcgcccgaacagcttggcgtcacgctgtacaagttgagtctcgtatccatcgcagccattctcggctaccaccttgatcgggctctgttcccctatgccagcccgggtgggtacctggctaacgactggaaaaagcaaaacaccaggcaagttagcaagttcagtggtgttgagtatttcagtggacctgaatatccagtcgcaaaaggctatgagctgattttcgctgtggtactgattcgccgggcgctgattgtcgcggcgatctgcctcggcgtgacgatggggctctga

SEQ ID NO: 188141 - DNA, 771 bp, Klebsiella oxytoca
atgaaatctcagtttttgccggtattaccgtggatggggggcaaacgccgcctggccagacatattcttccgttatttccgtcacacacctgctacgtggagccgttctgcggcgctgcggcgctgtacttcatgaaagagcccagcaaggttgaggtcatcaatgatattcacggcgagctgatcaatctctaccgtgtgatcaagcatcaccttgatgagtttgtccggcagttcagatgggcgctggtcagtcgccagatataccgatggatgaaggataccccggaagaaacactgaccgacattcaacgggcggcccgcttcttctacctgcagaaacaggcttttggcggtaaggtggccgatcatacctttggcaccactaccaccagcgcaccacgccttaatctgctacgcatcgaagaggaactgtcgcttgctcacctgcgactttccagaaccacgattgagcatctggactgggctgcctgcattaagcggtatgaccgtccccatacgcttttttactgtgatccgccgtacctgaaaacggaggggtatggggttgaatttgggctagatgaatatgtacgcatggcggaactggcacgaaccatcagcgggaaaatggttatttcggtgaacgatatcgaggaaatgagggaaacctttgccgggctgcggcttcagacggtcgatatccgctacaacctgcagacaacgggtaaagctgaactcaagcgagagctaattatctgcaatttctaa

SEQ ID NO: 188142 - DNA, 357 bp, Klebsiella oxytoca
atgagcatttctgtgggtgagagagtgatttctattcgaaaacaagctggattaaaccagcgtgattttgccgctcgcctggggatatccaatggaggcattagccaaattgaaaatggtaaagctatgcctggcggagatttcctcctacggatacatcaggagttcggcgttgatataacatggttgctcacaggagtgagcaatgatcattctgtaaaggaggtgcaggtgatgtctccagaaaaaaaagagttactggatgcattcgatgggatgacaccagagcaacggagggcgattcttgaggtcggtaaagggcttgcacaaccaaaaccaagcaagttcgcaagctag

SEQ ID NO: 188143 - DNA, 480 bp, Klebsiella oxytoca
atgcgtaaaacgacggatgttattgattcacctgaagcgctgggcgctgccctgtgccgctatgtacccgatatggccaacggtttcaccatcaccactcgcgacagccagctgcagctgatcgtaactgctgaagataccagacccttcatggcggcgatggaacgtctgctgaagggaaaaattcgccagatccagcgtgggcatcaggagcgcgttctggatgaacggtgggctcagattgaggcaactaaccagatgtttgccgagcaggtcagacgagaagacaagactgtagctaacaacctgcagatcatcgagcggattaaaagtggtggtgaaagactgaacgagctggcaatcaaacaaatcgtccaaattagttttcccacgttgacatccgaagaatgggaacgcatcgaccagattattcgggcggcggcgttacgcaaaaatactgagtccacgaccagtatctga

SEQ ID NO: 188144 - DNA, 195 bp, Klebsiella oxytoca
atgtctctgttatgcaaacgttgtgacaatccggtcgatgatctggattttgaaaaagcgaccattatgaaaaattcggatggtacgtggtgtgtcgatctgacgctgaaatgcccttactgcgtgctttcttataaagccattatccccacctctgaattacaacctctgacaggtgatgaaaatgacaaatga

SEQ ID NO: 188145 - DNA, 129 bp, Klebsiella oxytoca
atgaataaaaaacttatagctgaagcctcccgctttcagtcatcgcaagagcgaaaagaatgctggtgtttgattattggcacgttaacagcagccttaacgctctttattcttttcaatttccagtaa

SEQ ID NO: 188146 - DNA, 198 bp, Klebsiella oxytoca
atgatgtggattctaattatctggatgttcgggagttacagctattcagaagctaaaccgacaataacaactcaggaatttaatacagaatcagcctgccgtgctgcgtttgccaaaattaaagaacttaacggtggtgagctagcgctgcgtggtgtgtgtacgaccaaaggagccaaccaatggccaacaaattaa

SEQ ID NO: 188147 - DNA, 567 bp, Klebsiella oxytoca
atggccaacaaattaaccataaccagagagcagttaacaaaatgggtttcacagcttgatagtgatggtggctgtgatgcaactgatcgccagttagaagctctgattcgtcagtcgctggccacaacgcacagcgagccggtggcgtggacagacgaggaagaattaaatgacctgaaacgcgacggttatgcggcaatgctgtccctggaccgcaaggattgtgagtacgccgacccacgtcgtcagataatactctatcgtcaggaacagccagctcgggatagttgcgcgatcgccgatgttatcgctgaacgtcaacgacagcagtctgtagagggattttcgacagagcaggatgatacgtatgttggttgccagctggcggcagctgcaatctgttatatcgaaccgatggaggcgatgagttactggcccgctgactggcatgacgacagtttcaagccgacaaacgagcgacggaacctggtgaaagcagctgcgcttattatcgctgaaattgagcgtatcgaccgtaaatctgatgcggagctgaaaaatgaataa

SEQ ID NO: 188148 - DNA, 312 bp, Klebsiella oxytoca
atgaataactatcgctgttctgtatgcgacaaatttcttccaatagataaatcgcaaataaagacaggagataaagtcagtattagtgtcgggacggctaataaaaacggaacaagaattcgttacaccagcaaacgtgcttgcgtcgttgatattaccggagactccgtaaccgttacgtctggacggaaagaaatggtggtatctcttgatgtggtatcgcccgtggacgctcctaatgccctgacagtagccttcattggtgaatgtaattgcgggaggcaggcaaatgacccgaacccagctgattaa

SEQ ID NO: 188149 - DNA, 327 bp, Klebsiella oxytoca
atggctagaacgactgctgtagataagttaccaccggaaattcgtcaggaactgaatgacgtattgatcagaaccaactttagtaactttgattatttaactttctggcttgaagagaaaggctatccaatcgcgaggtccgcgatcaaccgttatgctataaagcatcgggaggagatcttgggccttcatgtaggcagtcgatatgagctggcaagcctaaagctatcagcgttacagattgccgctaagctctcaccagagcatagccttgaggagttgaaaaaggatgctgaatccatacttgaatgggcgataaagcaataa

SEQ ID NO: 188150 - DNA, 2688 bp, Klebsiella oxytoca
ttggaacctgccacagaatcccacaattatctcgcttatccctgtccatttatctcacttctaatcacccgcaatctggcgagcgcgccgatcccggactccctcggcaagcagtgcctggacgtggcggcaatggatgagaatgaaatctggcgcgccttcgccagccatccggaagggctaaatgcgggcgaagtggcgcagaaaatcgctcagtatggcgaaaaccagatcccggcgcagaagccgtcgccgtggtgggtgcatctttggagctgctaccgcaaccccttcaacctgctgctgaccgttctgggtatcgtctcctactcaacggaagatctgtttgccgccgcggttattgccctgatggtggggatctccacgctgctgaactttattcaggaagcccgttcaactaaagcggcggacgccctgaaggcgatggtcagcaacaccgcgacggtcctgcgggtggtgaacgaacagggcgagagccgctggtgcgagctgcccatcgaccagctggtgccgggggatatcgtcaagctatcggcgggagacatgatcccggcagacctgcgcgtcattcaggcgcgcgacctgtttgtcgctcaggcctcgctgaccggtgaatcgctgccggtcgaaaaagtggcccgcacccgcgacccgctgcaggcaaacccgctggagtgcgacaccctgtgctttatgggcaccaacgtggtcagcggttcggcgcaggcgattgttttcgccaccggcggcggcacctggtttggccagctggctggccgcgtcagcgagcaggaaagcgagccgaacgcctttcagaaaggcatcagccgggtcagcatgctgctgatccgctttatgctggtgatgaccccgatcgtgctgctgattaacggctacaccaaaggcgactggtgggaggcggcgctgttcgcgctctccgtcgcggtgggcctgaccccggaaatgctgccgatgatcgtcacttcgaccctggcgcgcggggcggtgaagctgtcgaaacagaaagtgatcgtcaagcacctcgacgcgatacagaactttggcgcgatggacattctgtgcaccgataaaaccggcaccctgacacaggataaaatcgtgctggagaaccacaccgatgtctccggcaaggtgagcgaacgcgtgctgcatacggcctggctgaacagccactatcagaccgggctaaagaatctgctcgataccgcggtgcttgagggcgtcgagctggagtcagcgcgcgggctggcggaacgctggcagaaagtcgatgagatcccgttcgattttgagcgtcgccgcatgtcggtggtggtgcaggagcaggacaacgtccatcagctgatctgcaagggggcgctgcaggagatcctcaacgtctcgacccaggtgcgctataacggcgacatcgtaccgctggacgacaccatgctgcggcgcatccgtcgcgtaaccgacaccctcaaccgtcagggactgcgcgtggtggcggtggcgacgaagtacctgcccgcacgcgaaggcgactaccagcgcgcggatgagtcagacctgatcctcgaaggctatatcgccttcctcgatccgccgaaagagaccaccgccccggcgctgaaggcgctgaaggccagcggtattacggtcaaaatcctgaccggcgacagcgagctggtggcggcgaaagtctgccatgaagtggggctggacgcgggtgacgtggttatcggcagccaggttgaagcgctgaatgatgatgagctggccgagctggcaaaacgtaccaccctgtttgctcgcctggcgccgctgcacaaagagcgtatcgtgaccctgctgaaacgcgaaggacacgtggtgggttttatgggcgacggcattaacgacgctccggcgctgcgcgcggcggatatcggtatttccgtcgacggcgcggtggatatcgcccgcgaggcggcggatatcatcctgctggagaagagcctgatggtgctggaagagggggttattgaaggccgccggaccttcgccaatatgctcaagtacatcaaaatgaccgccagctccaacttcggtaacgtcttcagcgtgctggtcgccagcgccttcctgccgttcctgccgatgctgccgctgcatctgctgatccagaacctgctgtacgatgtatcccaggtcgccattccgtttgataacgtggacgatgagcagatccgtaaaccgcagcgctggaacccggcggatctcggccgctttatggtcttctttgggccaattagttccatattcgatattctgacgttctgcctgatgtggtgggtgttccacgccaacacgccggaacatcagaccctgttccagtccggctggttcgtggttggcctgctgtcgcagacgctgattgtgcatatgatccgtacgcggcggatcccgtttatccagagccgcgcggcctggccgctgatcgtgatgacgctgctggtgatggtggtggggattgcgctgccgttctcgccgctggcgggctacctgcagcttcaggcgctgccgctcagctatttcccatggctgattgcgatccttgcgggctatatgacgctaacccagatggtcaaaggcttctacagccgccgctacggctggcagtga

SEQ ID NO: 188151 - DNA, 1209 bp, Klebsiella oxytoca
atgaaatctgtagagctatttgccggggctggcggtttagctatggggtgcgagattgcaggatttgagcaccttgctgttgtcgagtgggataaatgggcttgcgatacagtacgcgaaaatcagaagaatggtttccctttgcttaacaattggaacctgttcgagggagatgttcgagagtttgactggtcgcaaataccaaaaggtatagacctgttagctggaggcccaccttgccagccattttcaattggtggcaagcacaaagctaactctgatacccgagacatgtttccagcgacagcggaagcgatcagacaaatacgccctaaggctttcatcgttgagaatgtcaaagggctgactcgggcaacctttgcgagctatttccagtacattcagttgcagcttgagtttccagaagtagctccgcgaaatggcgaagactggagcgagcatttgaaacgcttgcaggaagaaaaaaccagtggaaagaacaaggggagagggctgacgtataacgttctggctacgttagtcaatgcagcagactacggcatcccacaaaaacgtgagcgtgtcttcattgttggtttccgcgatgatcttgaaattgagtggtcgttccctaaaccaactcatagttatgatgcacttgtttatgatcagtgggttactggtgattattggaagcgacacggtttagaaatgccagttgttccaaaccagatggttagtcgtatcgcaaaattgcgtaaaaatccgcccgatacacttccgtggaaaacagttcgagatgctattgcagatttgcctgatcctgaaacaaaggcggcaaatttgatcaggaatcatgcgttccaggcgggggcgcgaacttatcccggtcatacgggaagcccattagatttaccagctaaaacgctcaaagcaggtgctcatggtgttcctgggggcgagaacatgctcgtgcgtaatgatggttcagtacgctattttactgtgcgagaaagtgccagaattcaaacgtttcccgatagttatcgttttcatgggagctggactgaaactatgaggcagttgggtaacgctgtgccggttcacctggcgtattgtgttgccagcagtgtagcggaaaagctgctgacctctgaaattgggaacatcctcaagcagggtggtaataataaaagggcttctgcatga

SEQ ID NO: 188152 - DNA, 651 bp, Klebsiella oxytoca
atgacaggaaaggtcattccatttaatccacttgataagcaaaatttaggtgccagtgttgcggaagccttgttgagcaaagatgctcatcctctggaagagttaacctcatttccaggagcagggatttacgcgatttattacactggcgatcatcctgcttacaggcaactggcagaactgaatcgtgatgggcaatttcgattgcctatctatgtgggtaaagccgtaccagcaggtgcgagaatgggacttactaatccagataaggttggaaacgtcctatttagacgcttgaaagagcatgccgaaagtcttcgtgcagcggagaatctttcgattgaagatttttattgtcgatttttggttgttgatgacatctggattccgttgggagaatcgctggttatctctcgctttaaaccgatttggaattcatctatcgatggttttggcaatcatgatccaggtaagcaccgttacactggcttacgtcctcgctgggactttatgcacccagggagaggatgggctcaaaatttacgtgagcgtgatgaaactgtagatgaactgattcgtgattctgtacagtatcttcagaatttgccgccttgcctggctcagaaatttattgaagctgaaggcgattaa

SEQ ID NO: 188153 - DNA, 624 bp, Klebsiella oxytoca
atgaccaccagccgagtttatgcctatcttcgcgcctccactaaagagcaggacgctacgcgcgccaaagcagcattagcagagttcgccgccgctcatgatttgggccacgtcacatacttcactgagaacgtgagcggagccagcttacagcgcccggagcttatgcgcctgatagacatagccgcgcctggtgacattctgttagtggagcaagtagaccgcctgagccgccttaacgctgaggactgggagacactgaaaacccagatcgataataaaggcttgcgagtggtggctctcgacctgccaaccagtcacgtagtgttagccgcaaagggcgagtttatgcaatccatgatgaaagctatcaacggcatgatgttagaaatgctggcagcaatcgcccgtaaagactacacagaccgccgccgccgtcaggctgagggaatcagcaaggcaaaagctgagggcgcttataagggccgtccagtgaacgataagctacacgaacagatccgtgcattgcatacagcaggtaagacaaagagcgagatccatcgcctcacaggcgcagcccgaaccaccattaacaaagtgctggaggcgcaagccacggcttaa

SEQ ID NO: 188154 - DNA, 315 bp, Klebsiella oxytoca
atgaaaaagattctaattgcaacaacattgatagcagtggcctctaacgcttatgcattaactcaagggggcaatgcgaccctaaaggaaggtacatttaactgtaaaaagctgaccgatttttacgagatgattagttacatccaggacaaagaccaacaaggcatgatgagcctcattacctctggtaaatgtcgcctgttaaaagaatctatgacagtggagatccagaacatcgacgaaaagggtttcgtttccttcatcacccccggtggtcacggtggctgggcagttcaacagttttttgaagaataa

SEQ ID NO: 188155 - DNA, 387 bp, Klebsiella oxytoca
atgtcaggacgtacccacgcagcatacgtaaattatttccagaacggtcgcaaggcacagcggttagccgaagttgagcgccagcttgcaggagaagctatacagcaagagcaccagcttaaagcagaggcgcggagcactgagaacatcgcagaccatttccctcgcgtcattcctaacacgccaatcatcgaatggttgccgggttactacatccatcgtaatgagtgggaagcctaccgggacgggcatagcttggtagtcgtgaaagaaccgcgtcagacggttgatccggagttaatctcctaccagtggaatcactttgtagttaactcaaggtttccgtggaagctggaagatcacgccatcgtttacacgttcgtttag

SEQ ID NO: 188156 - DNA, 1230 bp, Klebsiella oxytoca
atgacagaaaagcaacaaataagaccactgattgaccatttacaagcagaaaagtacgcatttatcagcgctcaaggtaaaatactcctccaccacatccccacgaatacaaatcactgtctggacattctcgaaagggaataccatttatcaactggtagaaagtggcggcgggattatttaaaccttctttgggatcacattccattcatcaaagtttacgatttcaacccggcgaagccatacggtatcgatcagaatggaaccctgaatacgttcaggcgctggcacagcgacaaaacaccagccgcagatctgactctctggcttgagtatctggcgaggctcttccctgaccaggcagaccgcgacacagtgagcgcatacatggcgcacatgttccagcacccggaacagcgcccaagctggcacatcgttatgccgagtgataccgggacaggcaaaggttttttgttcaatcaaatcctctcgccgctcctgatgcaccagacaactctttactccaactacggcaccctgacgggcgtccacaatgatgcgatggcccgtacaatcctgatcctgtttgatgacccaccgccagccagacgtaacatggcagatcggttaaaaagcatccagactgaaccgatgatcgagattaacaggaagtatgagcagcctcgaaaggtagccacttacacccggtttttcacgttcagcaacagtgagagtccgattgaagtggaggcgaatgatcgccgccattactgcacccattacatacgccacagggcgaacagggaagaaacagcagagtttattgcccgtcttgctaattggctcgccgtgggcggtctggaagccgtacacgcctggctaatggcttacccgttggaatccttcaatccgtatcgcccaccgttcagtttggcacttgagcgcatgaaacaagccagcatcacggaagagcagaacgaagcggagatcttcaccggagaaaatccggcgtttgcattccaggcatttcatgacgcttgcccatcattcccacgaccacaggatgcgagtcaatggttacgtgacaacggctatgtcagtgccagagtgaacaccagagcagggttaaaatcagtttggtatcgagcgcctcaggacggcagcgggaaaattccggagagcgccctttcctggtttgtcgataaatactacccaaccccgacgaaatga

SEQ ID NO: 188157 - DNA, 153 bp, Klebsiella oxytoca
atgttgaaactcattattgcacgcgacgtgctcagctggattgatgcaaataagggcgaggacagccgcccaacattcattattaaaactttacgaaatgctatgaacgagggcactgatgacagaaaagcaacaaataagaccactgattga

SEQ ID NO: 188158 - DNA, 207 bp, Klebsiella oxytoca
atgaccaaaaacccgcaacaatccttagcctggttaaagcactattggagccaccagcaacaggacatgcagaaatcagaaatcaagctcgaaccactgaacaagccagagctattcgacaaagcagtagataaaatcaccattggtcagttctatcagtggttactttccgaaggctacatcttcaaaactaaggataacaaataa

SEQ ID NO: 188159 - DNA, 435 bp, Klebsiella oxytoca
atgtttgaatcttatgcgcagaagcgcaaccctgcgaaactcgcccagaggagtgccagcgactatcggaaaatgatgatcgccgagcaggacgggagggacttcataacaggctcaccactgacagatccggttattgaccatgaccacagaacgggacattgccgcctaatccttaaccgtgtaacgaatgccattgaaggcgatttcaatcgcatcttgtctcgcattgcctaccgtgaagacttcacaccgctcttgtgggaagtttatttcggtcatcatagcgatctgtacgatgagttatacgacgcagcgctcgaccgcaggaagggctttctcaaagaagatgacttcggatttatcttgaaacagtttgcggtgtattacgccgtccgctttgaccaacttcaccacctggagtattaccgatga

SEQ ID NO: 188160 - DNA, 468 bp, Klebsiella oxytoca
atgactaagctaccagcagcattcaccagagaaataaaagccgagtttaaaatacaacgtgatcaatacgtagctgattacatcgaatcccatctcacggatgttttcagtatctctgatttttatccggtagtgctgattaagctacagaccgctattcaagatgggtacgaaatcgcggagtttgaccgccagccattctacaacattggtgatcctgcaatgcgtatcgtaatgaacaaaaagccgcaggaaatcgacacagagcgccgttccctcacagaggcagcagaatcagctttaatggcctcccttgaggctcaagcggaagagctataccaacagatggttgcagaggaagaacgccgtaaacatgcagaagcagccgcgcaagcagcagcagaagccgaggctctcaccttctctggtcgcctacgtgcatccctcgtgaaaggctcccatgtttga

SEQ ID NO: 188161 - DNA, 258 bp, Klebsiella oxytoca
atgtactgggccgaagaaattatgaaacattgcttcacgttcgaggacttcgtagatgaatggagcaacggcaatgagcaccgagaaataaatagatgggtggatagtggagttatcagcatggaatactttgaaggaaaatcctattacgtcacctcatacattgttggaggtgtaagcccattttattgtcacacctgcaaccgaataaacattaagaaacttctatctataaaggagcaatgtcctcatgactaa

SEQ ID NO: 188162 - DNA, 1281 bp, Klebsiella oxytoca
atgatttacaagagagatcgttatctggttttagatccttgcggaaactatctggtgaggatcgctataccaaagtacatgcgccaccttttcggagggcggcgcaactatgtgaagagcacaggcacacgcgatgtgcgcgaagcccgtctctttcgtgatgcggttgctttggaatgggtgaagatacgcagtcagttaaagccacagcgtgatcggggctcgaaggtggagcaaatactcaatgagctacgccgggtcgggacgtatgcacacgaagcgccggaaccattaagcccccctgtaatgagttgcccttcccttttgaggatgcgggatcagtacattctccagttcagcgagaagcggaagctcaccacactatcgaagaccaacaaagccgtagaagtgctcttagaccatcttaaaaagaaagatgttcagcttcgtgacattaaccgaaccaccgttacaggctggcttgataagctcaaatcggagaaagcgccacagaccatacaaaattacgtcagcgcactggctcaaatctgggatctggctcgtaaccgctaccacgatgcaccgcaagaaaacatctggcgcggtcatgcgctggaggccaaaagtagcaaggtgagctatgaggtatttgagcctggcgaattggcgaaagtgttcgcggtgatggatggtgatgaagagatgcagagcgtaacgctcatcggcatgtacagcggtatgcgccttaatgaaatctgttcgttacgtgcagccaacatccgagaaattgaaggggtgttatgttttgaagtaacggaaggtaagaccagatcggcatccagggtcataccatgccacagcctgatcacaccgttggtgctgtcgcttcgtgagaagccctataacggctttttattctaccgtgcgtcaatcactgaccgtgcagacggcaagcgctcaacgtggcattcacagcgttttacaagggctaaacgtaaggctttgggcgaagtaggatcagagaagaaagttttccacagcctacgccaccaggtggcccaaatactggacaggggcggcataggtaagaagttaaagcctgtaccagaagaccgaatcgcccttctcctggggcatgagcgcggcagcacagagagttttaagacgtacagcaagaatgccgcctctccggtagaacttcggcaatacatcgaattgctacgctatccagaagtagagagccaacatggaggagttaaaaaaacatgtggaaatcgttaa

SEQ ID NO: 188163 - DNA, 201 bp, Klebsiella oxytoca
atgaagacattagactttgaatacgatgcagtgattttgcatcaaacggagaccagcaaaccaatagtgttatttggagccccggctatggatatcgaaatttgggctggtgttccgcaaaagaaaactttccaaccagatggagccgagagctcaggctttcagcgggttgaaaatagggtgatgctgccaacttactga

SEQ ID NO: 188164 - DNA, 1953 bp, Klebsiella oxytoca
atgtgggcgagggaagcctcgccctctatcccggcagggcaaactctgttcttcgagttgcgggcttactcaaccgctcgtaataccaacggttccttgccggggcttactcctgcaggagtcggcaatagccaaatcaccgtagacggtttcacgctgaaattcactctgcagaatgatgtatggtcactttcgaccatcacagaccctgctacgactgttcatcgcgtcacttacggctcatgggtatgtggttcaacattttccgcagggtcctacgcagagagaccatttgaccgtggttcatcccttcgcctgatcaatacgggtccggtattcacagaactggagacggtggcgttctccccggcagtggatagtctcccggggaaagcggttcgatcagtggttcgctatcgtctgttcaggaacggtaagctgcagatcaaaaccgtgcattcaatggaggttggattgccagtcagcgtgctgtcaggggtgatcactcgcatgaatttcggcgatgccgaatatccatttgacaaaccgtcggccacactgttcttcaccgatgcaaccagcggggacaactggggggtgtcagttatccgtgccaacggagatcaacaccgtgacggagagacctatggcccgctgcgtcctgtgtatgtgaccgcgcttagcccctcaaacacatcaaggcgcatttacgctggatggaagttcccgacacaaaacgccagttcatttgtaaactggccagtaaatgacgggtgggcatggaccgtagagcattgggtggacatgaaggtagacctcacaaatccgcagtctattttatccagagcgattaaccgtcccgttggttttctgggggagtcctcatacccgtccgtgattgttcgtaaaattttatcggaaatcgaagaccatgttgatggatctatggactggtggtattcgggggacgcaaaaagtatgggcggaggaagtggaaccagtcggacattcagctatgcgcccgtgacatacgatatcctccgatatctgcgtgatggggttgggagcctggacacaatttataatcgtctcgcagcaatagccagcgtgttcggcgtaccaaccctgggtgatattggttcgcggtatttaagtggtaatcacctgctccagtttgcctctcgcatcacggttccggttctgcactggctgtatcgggttgcagtcctgaaagataacgccactgtacgggataacgtgaaagccgcgatcaagagcttcgcagatgcgattgttacccattataacgccaacggtggggttaacctgaacggctcggcgacaggtgttggtaactccaacagtaacgctacaggcctgcggatcgtggctatggggattatgaccggtcaggacacatcaggggcctacctcgccacgtacaacggtatcgagtcactcctgatgaacagtgatggatttatgtccacagaaaacgttctgaaagaaggggctgaagatacgcttacctcgaactggtggatccactatcaggtgttcgcctacaacaactatctgtttgggtgcaccgcagcggacaagtctccagcgttcgatatgcggaacctactcattcagtcggcatcacctgtcggcggatttgatgaggttgactactgcatttctgagagtcgtcgcggtagtttcaacacgctgtcatttgctgcctatccgatgctcctgtcgaaaagtgcgtcaatgatgaacgcgcttagcgcgtcaatacaactgtttagcgctgaatatggcccacaaccgggattaccgaggcgctattttggattcgacggctatcaggcagatgccaataccacgacagatgtagcatttgttgcaacaacgttttctgatttgtggatagatcagtatttccggcaacgcaaactggattaa

SEQ ID NO: 188165 - DNA, 948 bp, Klebsiella oxytoca
atgtttacagttgacagagcgactatcgactctaccggcgcctttgtagtcggtgagctggagcgcatggatcaaacgctgaacatgccgctggtgtccgttaagtggacccgtgatatgccactgcgtagcgatatctccattgcggacgaagtatcatccttcaccaacactgatttctccagcgttggcggcccaaacccgatgggtaaaaactggatgggtaagaagggcacggcaacgcctggccctgagctcaacattgaacctactcgtaacaacctgacgccgtgggcgacggaagtgtcatggaccgttcttgagctggcatccgctcagaagctgggacgtcctatcgatgtccagaagtacgaagcgatgaagctaaaatggaacatggataccgatgagcaggtgtatatcggtgactctggtctgggcgtggccggcatgcttaacctgccagatatcacgccgcttgctgccgccgcagcatggaccgctacaaccgatccggacgtcatcctgcaggatattaacctgctgctgaccgacgtgtggatgcgttctggttatgcggtatgcccggcaaaaatcggcctggcgccagagctttttggcctgctgaccattaaaaaggtttcctctgctggcaacatctccgttctggagtacgtgaaaatcaacagcatcgcatttcaggagaatggtgaaccgctggagatcgtctccatcaagtgggcgtcaaaacgtggtgctggtggctctcaccgtatcgtcgcatacactcaggacgaaaagtacattcgcttcccgatggtgccgctgctgaacacgccgctggagtaccgcagcatgcagcaactgaccgtgtactacggaaaactggggcaggttgaagtgccgtattccaatacgctctcttacctggacgttccggcatcctga

SEQ ID NO: 188166 - DNA, 504 bp, Klebsiella oxytoca
atggctggaaatgcatatttaacccgcatgccccttgggtttgtcggtgcagtaacgcgtccgcgtgatctgactattgagccggttactctggaccacaccaacttattttcaacctacggcctgccgggtaagtacgtcaacgatcaattcgtcccactggtggatggcgacaccatcgacaaagtgaaagggattttcgtacgtccattccctatcacgtcggcgccagacctggcctatctcggcgttaccgccaaccaggttggtgacaacctcaagcgcggttatatctgcgtcaaagcaactgcaggcaatgccgctacggcgaaaaaaggtgatccggtatacgtgcgcgtgactgcgggcacaactgcaagccctgtcggttcttttgtactgacgccggacgctactgcagagaacacacctcagctgacgaatgcagaggtaatggggccaggcgaagccgacggtcgtatcgaaatcgcatttaacatctga

SEQ ID NO: 188167 - DNA, 231 bp, Klebsiella oxytoca
atgcgcaccggtgacagcctgaaagcgtttggcgtggaagacttcagcaaggcgccaaagtccactgttgacgctgtatttaaggccgctgtcgaaatcaacaaggctaaaaaccacctgctgccgctgaataacggcgttcgtacaaccgacagcaaccacagcaccaaaaacatgtcaccggcagagctgaacaagatcaacgccgatttctggaacaagcgcaaataa

SEQ ID NO: 188168 - DNA, 207 bp, Klebsiella oxytoca
atgagtaaacacaactattacacgtatttcgagggtttaaacaaagacggagttgccgtgtataacggtaatagcggcttctacactgagccatcctgtgctgatggcgagattattgaagagcattccaggtacttgcttctcgttgctcaacaagcaaatcccaagctttttcgaatagtgataaagagcattacaaaactgtag

SEQ ID NO: 188169 - DNA, 210 bp, Klebsiella oxytoca
atgtcccgtaagaaacgccataacggcgcacaacagcccgttaggaccgctgacgggtacaacaatttcacagccaaacttggcaccaatacccagaacatccagaccggcggcacgtacgttccaggctatatcacgcgcaaccgtgtgatgctggaatttgcctaccggcgcactgacccaggcgagagcgctggcggttggttctga

SEQ ID NO: 188170 - DNA, 1617 bp, Klebsiella oxytoca
atgccgctgccctttaaattcgacttcaaaaatcctgactacaacatggtttttgaatggagaatggagcgcctgcagcgcatcaggcaaaaccctgatgtacttcctgcgctgaggcagttttaccgtaacgaccccgcgcaattcatcatcgactggggaatgactaccgacccgcgtaacctcgactatggattaccggcgaccattcccttcttgctattcccccgccaggaggaatggattaactggatcatggaacgtcgcagtcagctagaacacggcctaacggaaaagagtcgcgaaatgggcctgagctggacctcgatagggcttgcctgttcgctgtgcctcttcaacaaagaaatggtgattggtttcggctcccgtaaagaggagtacgtggacagcacaggtgacccgaaggcacttttctggaaggctcgaaagtttgttgagatgctgcccgttgagttccgcggctcatggacggaaaaaaagcacgccccttacatgcgcgttgagttcccggagacgggggctgttattaagggggaggctggcgataacatcggccgcggtgaccgtacgaccctttattttgtggatgaggcggcttttcttcagcgtccgctactgatagatgccgctctttctcaaactacgcgctgccgtatcgatctttcgtcggtcaacggcatgagtaacccattcgcgcagaagcgacacagcggaaaaatccctgtatttacttttcactggcgcagtgacccgcgcaaggatgatgagtggtaccgcaaggaatgcgagaaaattgataacccggtcatcgtcgcccaggaacttgacctgaactatcaggcgtccgctgaaggcatcctgatcccctctgagtgggtgcaggctgctgtcgatgcgcatattaagctgggcattcagcccagcggccagcgactcggcgcgatggatgttgcggacgagggtaaggataaaaacggcttctcggcgcgttacggcttcctgctgcaggacgtcaaagaatggtctggtgaagggagcgatatttacgcctctgtcgttaaggtctttggctattgtgatgatttcggcctcgatgagttccgcttcgatgaagacggactcggtgccggcgcccgcggtgatgcgcgggtgattaacgaacttcgccaagccgaacggctgggttacatcactgcgaccccattccgaggtagtggcagtgtctttgatccagaggatgaagctgtgcccggcgataacggcaaacctgcccgcctgaacaaagatatgtttgcgaatgctaaagcccaaagctggtggcatctccgcaagctgttccgtaatacctttcgcgcgctgcagggaatggactataaccccgatcatattatttccatcagtagcactatggaaaataaagaccggcttctgatggaactgtcgcagcccacatggtccaaaaacgccgtcggtaagatcctggtggacaagcagccagaaggaaccaagtcacctaacctggccgactccgtgatgattaactacgcgccaatggattcatccctcgatatctgggccaaactggctggagcttaa

SEQ ID NO: 188171 - DNA, 192 bp, Klebsiella oxytoca
atgggttacttcgaaatacataaaactcagaaagactactcacagcgttattacttcgtcctcaaagctggtaatcatgagattattgcgacaagtgaaatgtattacacaaagggaggtgcggaaaacggcattcgctctgttcagataaacggctcttctacagatgttcgtgatcgcaccggtgaataa

SEQ ID NO: 188172 - DNA, 618 bp, Klebsiella oxytoca
atggcatcgaaaaagctcacggcagagcagcagaagcttttcgatgtgctgactccgctacaaaaaagattcgcacttgcaatcatcaaaggcaggaaccagacggacgcttacaagacggccaaagggaaagccaaaggtgatgcgatgcgagcagcggcgtcacgaatgtatgcaaatgttaacgttgtggcattcctgcaagccgtccagggtgaagttgtcgatgaggcaatcatgacccgagaggaggcgttaaagcgcctttctaagatgggtcgaacatccatcgccgatatagccgagttcagcaacagcatcgttggcgaagatgacgatggcaatcctgtgttccaggccgtgtggagcttcaaagattccgttcttcaggactctgacgcaatgagtgcaatctctgagctaactacgggaaaggacggcattaagctgaagatgcacgatccgaaagcggcgattaagcagttggcagaaatgcagggctgggaagcgcctaagaaatcagaagttagcgggccgggtggcgggccggttaaaacagagaccgtggcaatgacgccgcaggaagcagccgacgcctacaaaaagctgatggggtaa

SEQ ID NO: 188173 - DNA, 144 bp, Klebsiella oxytoca
atgcgcactactgggatcctaatggcggaaattacgcttcgcccacatatgaagccgctgctcatcctttcagtgcttttgcgctggggctggctcactaagaagtgcatccggattacccctgtaattggcaagcaggcgtaa

SEQ ID NO: 188174 - DNA, 540 bp, Klebsiella oxytoca
  misc_feature (4)..(13): n is a, c, g, or t
atgnnnnnnnnnntcaatatctcaggttcaatgccttttatcgatcgtccagaagcaaaaaaactcttaaactatctcaacaagggtgatactgttgttatagcaaaattagacagaggtttccgagatactgctgattgcttgaatacagtaaatttattgaagaagaaaaaagtacttcttaaagtattagatatttctctggatctatcttcacctattggtgagatgattcttactataatggcttcagttgcaacttttgaaagaaaaagaatcgctgagcgaataaaagacggtttcagtgctggtcgtagcaaagggaaaaagtatggctataataataaaaatacaaaagcaggagtgataaagaggaactcaaagagacaaattgaaactcaacttaggtacgaatcaatactggaatgccttaaaggattactcaccgaaaaaccatctgaacgagttatgcttgctcacttggagcaagccgggtatccggtgagtagaaatactttacgtaaggctttaggtaaataa

SEQ ID NO: 188175 - DNA, 501 bp, Klebsiella oxytoca
atggttttaacaaatcttatacaaggagttttcaacgtgttacaaacagtacttttccataaagctaaatcaatcttctcttcaaagctgactctggctgtgatactaacgtttccatcaatcgcgatgagtgcgcaaacaacacaggctgatatcgacaggttgatgaatttcaacccaagagcagagatagaacaggcaataagaaatcgagaggctttggagcatcagaatgcacgaagagatccagctaatccacgctggacatgcaatggaaaactaacgaacgagcagacaggaacctggaaaaaagtgactgtaccaacttttggtacaggtgttgaaacaactcaaactgctactgagtatcactttgaagagcaagacgatacaggagctacttcattaaccattaataaacgaaccagaaaaggctctgtgacgatttttgatgcgaatggtagggttactcatactggtgcgttaagtaattgccgttaa

SEQ ID NO: 188176 - DNA, 123 bp, Klebsiella oxytoca
atggattttgaagaaattaaaagaatgtattaccttgcatcaaaaaaggtattttttctcataaagaaccttttaaatggttcattattcactatgatgaacttactgctgataaaaatataa

SEQ ID NO: 188177 - DNA, 1512 bp, Klebsiella oxytoca
atgatcgaagccttcagttatgtacgatttagtaccaaatctcaagcaacaggtacatcattagaacgtcagttaaatgcatcccgcctattttgcacacagcaaggattgaggctttcaaaccagtcttatcatgatctagggatttcagggttcaaaaatgtgcgtcgtcctgaacttgaacagatgttcgaagcgattcaaactggagttatcccagcaggtagttttattcttattgaagcgatcgaccgtttaagtcgtaaaggaattagccatacacaagatattctaaagaaaattcttcagcacgacataaaagtagcttttgttggagaggatgcaaagacactacaaggccaagtacttaataaggactctctaaatgatctaagctcagtcatcatggttgcattagcagccgatttggcccataaagagtcgcttagaaaatcaaaactagttagagagtctaaagcgatagcaagagaaagagtgcaaaatggtgttatactacccggaaaatccatgttttggcttgattacgataaggagcaaaggcattatgtcttaaacgatcgcgccaccatagctaaagagataattgaactaagattactagggcatgggccaagaaaaatagcaaaaatattaaatgaaagacaaatcccgggacctacaggaaaagagtggtatcaaccctcaattaaaagaataatcacaagccccgtactttacggagcatatcaatcacaccaagttatagaaggacaatatataccggtagctctggttgaaaattactacccagctcttatagattacaatttattttctcagattcagtttgacaataaaaatgcatcaaaaggacgcccatctcgagttaatccattcggaggggttttctattgtgaatgcggcaatgcaatatgttttaaaaagagttatagcaaaactgcaaaaaaagttaaaaatgaataccactatcactattgcatcgctgcgagagagggtcgctgtaaaaatacaaaagccatacccaattttacgccgatacttattaatttattagacaaacttgaaataaaaagcacatcaactaaaaatatcaggagtgaatcaataatatcaaaaagaaataagatagaacaattaaacgaaatgcttttaaaacttgactctcctccggtttcagtactaaagaccattagtaatttagaaaaagaactgcaaacattacttgaacgaccagaaattataccaccaaaacaagaagacatcgtggtattaagcacaatacaagatccatcaaaatataacatgtatctaaaacgactagtgaaacgtattactgtttaccaaatcgatggaccaaagaacttacgtataaaagttgacaaaacagatgggcattatcagaattttttgataaaagatggggagactatatttaagtctgatactgaaagattaaaaaaactacttgcaggatttaaagatggattttga

SEQ ID NO: 188178 - DNA, 369 bp, Klebsiella oxytoca
gtgactatcgcactcgaagcgcttgatgcgcgctatctctcgccgcagccgaggttaaatcatacctggcttaacgcggcaatcggcgaagtgctgacgcagctcgacgccatgctgccgcgctttacggcaacttttcccgccgccagtgcgacacggggccgctatgaaagcgtagagaaagtcgactggaccgagggattctggaccggcatgctgtggctcgcctgggaggtcaccggcgatgataaatatcgggcggtgggggaaagcctgctcgatagctttgaagaacgtctcgataagcagattaaagtggatacccacgacctgggctttctctatctcctctcctgcgttaacgcctag

SEQ ID NO: 188179 - DNA, 435 bp, Klebsiella oxytoca
atgcagttattacttatttttcttgtgattgccggcggcatggggttatccgtggaagccggactactcgggccgcttgccggtcaggtaggggacctgtgggccaccttcagcatttttagcgtcgggagcgcgctaacctttctgctgatgctgctgtttggccccaggcagggtccctcgttcttctccttaccgggctggcagcttaccggaggcgtactggggcccatttacgtcgtcatcttaaccatcgccgtaccggttatcggtatcgccatgacgatgatcggcattctggccggtcaggtatgcaaaagcctgctgattgaccactacggtctgtttggttcagcaaaacgtaaaatcgatggacggcgggttatcgcgctgctgtttatcatcgtcgccctgattctgatcgccacaagctga

SEQ ID NO: 188180 - DNA, 933 bp, Klebsiella oxytoca
atgagcgatgcgggtaatgtgaattttcgggcgctacagctgtttatcgccgtctatgacagccagagtttctccgtggtggcgaggcgggaaggcgtttcgccctcgatggtgtcgcgcgtcattcaccagcttgaggatgcgctcggccagcagctcttttatcgtaatacccgggcggtggttcccaccgaagcgggacgcctgtttgccgaacatgccagagggctcggcgaacggttcagcgttgccaggcgcgacctgcaggaccgtcgtcttgagccgggtggactggtgcggatcaacgccccggtctattttggccagcgccatatcgcgccgtggctgccggggctgacgcagcgctatccacagatgcaaattgcgctggcgctgaccgatgattttatcgatccgcaccgcgaagcgaccgacctgattttccgcatcggcagcctgccggactccagcgttcatgccagagtactgggtatgcagcatcactatctggttgcggctccagactatctgcagcgctgcggcacgccggagaaaccggaagatcttcgccatcacagcacgctggtctacagcggttcaaatggacctaaccgctggctattccgcctcgcggagggagaatgggttcactatccgcaaacgccgcggctggcatcaaataacgccgatgcgctgctgaccgctgcgctgggaggcatgggggtggtgctctttcccgattggatggtcaatgaagccatgggggctggaaggctggttcagctgatgcctcactacagcgcggcgatcggcagcagcccctcgccggtgtcggcgatctaccctcacgcccgtcatccttcgttaaacgtacgtgcggtaatagactattttatcgacgtttttggtacgcctttatactggcagcgctaa

SEQ ID NO: 188181 - DNA, 2733 bp, Klebsiella oxytoca
atgactgacatgaaaatagaaaaccggaaaataaaccggtctgcgtcagaaaatgataagcagcataaaaaaagcttcgccattgaaaccgaggcatttaacagcccggatcatacgctggcgcggctcaacagcagccgtcaggggctcaccaccgaagatgcccttgaacggctgaatgaatatggccgcaatgaagtcgcgcacgagcaggcgccgccggcgctaatccagcttttgcaggcattcaataacccgtttatctatgtcctgatggcgctggccgccgtcagcttcgtgaccgattactggctaccgctgcgtaacggcgaagagaccgatctgaccgggattatcattatcgtcacgatggtcagcctgagcgggttattgcgtttctggcaggagtttcgcaccaacaaagcggcgcaggcgctgaaatccatggttcgcaccacggcgacggtactgcgtcgcggtcctggtaacatggggccggcgcaggaggagattgccattgaggaactggtgcccggtgacatcatcttcctggcggcgggggatctggttccggcggatgtccgcctgctggagtcccgggacctgttcgtcagccagtcgatacttagcggcgaatcgctgccggtggaaaagtatgacgttctggccagcgtgtccggcaaagggtgcgacaggcttcccgagccgaacaaagataaaagcctgctggagatgggcaatatctgtctgatgggcaccaacgtgaccagcggcagggcgcaggcggtggtggtggctaccggaaaccgcacctggtttggttcgctggcgaagtccattgtcggtacgcgcacccagacggcgttcgaccgtggggtaaacagcgtcagctggctgctgatccgttttatgctggtgatggtgccgattgtgctgctgattaacggcttcagcaaaggagactgggttgaggcatcgttgtttgccctggcggtcgcggtgggcctgacgccggaaatgctgccgatgatcgtcagctcaaacctggcgaaaggcgctatcgccatgtcgcggcgcaaagtgatcgtcaagcggctgaacgctattcagaactttggcgccatggacgtgctgtgcaccgataaaaccggcacgctgacgcaggacaatatcattcttgagcatcatcttgacgtcagcggcagcgagagcgaccgggtgctgacgctggcgtggctcaacagcagcagccagagcggggcgcgcaacctgatggaccgggcggtgctgcgctttggcgaggggcggattgcgccagcgaccaaagagcgcttcgtgaagcttgatgaactgccgtttgattttgtccgccgtcgggtctcggtgtcggtggaagatgtccgccacggcgataaaagcctgatctgcaaaggcgcggtcgaagagatgctgatggtggccacgcatctgcgcgaaggcgaccgcgtggttgcgctggatgaaacccgccgcgatctgctgttagccaaaacgcaggattacaacgcccagggtttccgcgtgctgctggtcgcgacccgcaagctggatgactccgccctgacaaccccgctgtgcgccgcggatgagcaggggctgacggtcgaagggatgctgaccttcctcgatccgccgaaggagagcgcgggaaaagcgattaccgcgctgcgcgataacggcgtggcggtcaaagtgttgaccggcgataacccggtggtcacggcgcgtatttgcctggaagtggggattgatgcccacggtatcctgaccggcgcgcagattgaagcgatgacggataacgaactggagcgcgaagtggaaacgcgttcggtattcgccaaactgacgccgctgcagaagtcgcgcatcctgaaaacgctgcagaaaaacggccacaccgtcggcttcctcggcgatggcatcaacgatgcgccggcgctgcgcgatgcggacgtcggtatttcggtcgacagcgcggcggatatcgccaaagaggcatccgatatcatcctgctggaaaaggatttgatggtgctggaagaaggggtgatcaaagggcgtgagacctttgacaatatcattaagtacctgaatatgaccgccagctctaacttcggcaacgtcttctcggtactggtggccagcgcgtttattccgtttctgccgatgctggcgattcatctgctgatccagaacctgatgtacgatctctctcagctctcgctgccgtgggacaagatggataaggaattcctgcgtaagccgcgcaagtgggatgcgaaaaatatcggccgctttatgctgtggattggcccgacgtcgtccatttttgatatcaccaccttcgcgctgatgtggtacgtgtttgcggcgaatcacgtcgaagcccaggcgctgttccagtccgggtggtttattgaagggctgctgtcgcaaacgctggtggtgcatatgctgagaacgcagaaaattccgtttatccagagtcgggcgacgttgccggtgctgctcaccaccgcggtcattatggcgatgggcatctacattccgttctcgccgctgggggcgatggtcgggctggagccgctgccgctgagctacttcccgtggctgatcgcgacgctgctcagctactgcctggtcgcgcagggcatgaagcgtttctatatcaaacgctttggtcagtggttctga

SEQ ID NO: 188182 - DNA, 621 bp, Klebsiella oxytoca; identical to SEQ ID NO: 101383

SEQ ID NO: 188183 - DNA, 975 bp, Klebsiella oxytoca
atgaatgacatctcttctgacgacatccttctgctgaaacagcgccttgccgaacaggaagcgctgaaccgtgccctgctggaaaagctggcagaccgggagcgcgaaatagaccatctgcaggcgcagctggataaacttcgccggatgaacttcggcagccgttccgaaaaagtctcccgccgtatagcacaaatggaagccgatctgaaccggcttcagaaagagagcgatacgctgaccggtcgggtggatgacccggcagtacagcgcactctgcgtcagacccgcacccgcaaaccgttccccgaatcactcccccgcgatgaaaaacgcctgcggccagcgggttcctgctgcccggagtgtggtggtgcgctgagttacctgggtgaggatgccgctgaacagctggagctgatgcgcagcgccttccgggtgatccggaccgtacgggaaaaacatgcctgcacaaaatgtgatgccatcgtgcaggcccccgcgccttcgcgccccattgagcggggtatcgccggaccggggctgatggcccgcgtgctgacctcaaagtatgcagagcacacaccgctgtatcgtcagtctgaaatatacggtcgccagggcgtggaactgagccgttcactgctgtcgggctgggtggatgcatgctgccggctgctgtccccgctggaggaggcgcttcaggactatgtcctgactgacggtaaactccatgccgatgataccccggtccaggtgctgttgccgggcaataagaagacgaagaccgggcggttgtggacgtatgttcgtgatgaccgcaacgccgggtcagcgctggcaccggcggtgtggttcgcctacagcccgacagaaaaggcatccatccgcagacccatcttgcggggttcagcggtgtgctacaggcggatgcgtacgccgggttcaacgagctgtaccgcgatggccggttaa

SEQ ID NO: 188184 - DNA, 636 bp, Klebsiella oxytoca
atgaaaaaatttaattttgctgctctacttccgggatttttggcgctcaataattctgtatgggcaagtgattcatccaccggagcaagtgatttgcctggtatgacccttaatgaacatgatttagtgatagccccacttaacaccgaagttccattctacattgcagggcatcgcagtcatagctcccatcgaagccatagttctcaccgatcatcatcaggtggcgggtactatggtggcagcactccttattatccaaaaacatacagctcaccaagctcatctgagtcttcaagttcaggaacaagttcctcatcgtcctcttcctctgtgcgttcgcttcgttctaacgacaataacaactctactactacgaattctgttggaactacagaagctaaccgtgcaagtaatgggctgacttctggtacagagaagcgtaagcgcttaatcatgcgggttcaattcgctttgctggacaaaggttattacaacgggaatattgacggcataatggggccttccacaaggcagtccataaaaaattatcgcattgcgaacggactaccaacacctgcaactgaaacgctggatactcaattattgaactcgttaaatattttggctcgttaa

SEQ ID NO: 188185 - DNA, 1113 bp, Klebsiella oxytoca
atgtctgaggttattaggaacgatatctttcattttgcttcaaaaaagaatgtgcccacggggttctatcggttatgcaaacaaaaaccaatgaaccctttattctttttacccaatttactggtagttgctgaaggcaataatgatgccattcaaccatgctttgatttctctgttattagcactgaattatatgagtcaattgaagatggagatattgggataatcaacaatggcaatatgatacgcgtaattctgtcccgcagagccaatcataatactgtcttagtaacggaacgctgcaataacttgtgtctgttttgttcgcagccacctaagaaatcaaatgatgactggctacttacccaatcagctcttgctatagcttcatttggtttggatggagttgttggggtcagcggtggagaacctttgctgtatggagatgatttccttcacttcattgattttatcatcgagaattcaccagatactgctttgcatgttttaacaaacggacgcaaattttctgatatcaactttactcaggaaatggcaaagcgaagcaaaaagataaaaatcacctttggtatcccgctctactcatcaagaccacttgtgcatgatcatctggtagggaatgatggcgcatttaatgaaacggttaagggattaattaatgcaggaaactcagggattaatatcgaacttagagttattccgacactggctaactatacagaattggatgatattgtagagttcgttggccgtgtgttctccaacatcaatcagatttcccttatggggctggaatctatcggttgggcacgaaagaactggtcaacaatcttcattgagcacagcagttatagtgagaaaataatctccgccatagacgctgcgcacaggtcaggtatacctctaacaatttttaattatcctttgtgtcatcttcccgaaagagcttgggagcttgctgctcagtcgatctctgattggaaaaattactatcctaaagaatgtgatgaatgcactcagaagtcttcctgtactggttatttcagttcctcaacaggccgttttcatcaaccaccgagaccaattttatga

SEQ ID NO: 188186 - DNA, 138 bp, Klebsiella oxytoca
atgattgatgttctaggtccagagaagcgcagacggcgcagcgttcaggaaaaaatcgccattgttcagcagagctttgagcccggaatgaccgtgtcgctggtcgcccgtcagcatggcgttgctgccagtcgctga

SEQ ID NO: 188187 - DNA, 834 bp, Klebsiella oxytoca; identical to SEQ ID NO: 101380

SEQ ID NO: 188188 - DNA, 213 bp, Klebsiella oxytoca; identical to SEQ ID NO: 101377

SEQ ID NO: 188189 - DNA, 747 bp, Klebsiella oxytoca
atgaataacttcaagaatcaatgtgcagcgttctcccgccccattgatgcaggtcaactgctcaggcaaggcgcagcggggcggtctgatcaggcaatggacagcgcctggctcgtcagcctgcgtgtaccacaggcgcctcgatcaaacaccgatcctcacgttgtagccgagtgcccgcagccccttgctcgtctgcatgttccttggcggaaactcgtctgggcgcgcccagacgacgatttccccgaggctgctcaggctaacgtgcggaattgcccagtcgtcgctgcggatcgcgttccagagtcgggccgaaacacttccgttgccccagacaacgtagttcaacagtatccgtccggccagcacaccttcccgacaccgccgccgaaggccatggcccatcaagcggattttccatgcgccctcagcgccgtacctacagcaaatctttcaaggctcaggtcattcaggagtgttctgaacccggtgcctccatcgcaaacatcgccttgggctacagcctcaatgccaacctcgaccacaaatggattcggctgcctacccagaaaaccacggctatccagccagcgttcatcccgttgccttctcaaatgctcggcgtgggttcgcatactcaagcgcgctgctgcgatcatgagtttgatccagtcggcccgtaataatgggcacgatccgtatgcctatctcaaggatgtgctgacacggttgccgtccctgtaa

SEQ ID NO: 188190 - DNA, 429 bp, Klebsiella oxytoca; identical to SEQ ID NO: 101359

SEQ ID NO: 188191 - DNA, 222 bp, Klebsiella oxytoca
atgaattcatcagtaaccgttccggccgtctacgtgggcacatatcaccagtacaacggcggcagtatttttggcaaatggtttgatttgaccgattttgacgacgaagacgaattttatgacgcctgccgggcgttgcatgccgccgaggatgaccccgagtttatgttccaggactgggaagggatcccgtctcagtttgcctctgaactctctgtttag

SEQ ID NO: 188192 - DNA, 192 bp, Klebsiella oxytoca; identical to SEQ ID NO: 101358

SEQ ID NO: 188193 - DNA, 282 bp, Klebsiella oxytoca; identical to SEQ ID NO: 101482

SEQ ID NO: 188194 - DNA, 249 bp, Klebsiella oxytoca; identical to SEQ ID NO: 101481

SEQ ID NO: 188195 - DNA, 588 bp, Klebsiella oxytoca; identical to SEQ ID NO: 101480

SEQ ID NO: 188196 - DNA, 1830 bp, Klebsiella oxytoca; identical to SEQ ID NO: 101479

SEQ ID NO: 188197 - DNA, 2688 bp, Klebsiella oxytoca
atgacggtaggatcacgctggtttaaatttgattttcataaccataccccggcctcagatgattatagagtaccggatctccagccccgggaatggctgctggcttacatgcgacagcaggtcgactgtgttgtcatcagtgaccataacagtggggcctgggttgacgtgttgaaagcggaactggcaaacatgtatcgggatgccagttccggtgaactggcagacttccggccgctggctctgtttccgggggtagagctcacggccaccggcaatgtccatatcctcgccgtgttgcacactaagagcaccagtgccgaggtggaacgactactggcacagtgcaacaacaactgccctatttcgcgtgaaacccctaatcatcagcttgtgcttcagctgggatccgcaggcatcatcagtaatatccgtcgtaacccggaagcgatttgtatcctcgcacacattgatgcggcgaaaggcgttctgacaagccttactaatcagggagaactgacagccgcttttcagtcaaagcctcatgcagtggagatcagacaccgggaggaagatattacgaacgggactcaccggcgtctaattgcggatttgccatggctccggggatcagatgcgcaccaccctgaacaagcgggagcgcgcacctgctggctgaagatgtcagcccctgattttgacggtctcaggcatgcattactcgatccggaaaactgcgtgctgttcgatgataatccaccggaggcaccagcttcacatttacgcagcctgacattcagaacccgtctttgcaagccggtggatcagaatggagcctccgttgagtttagccctttttacaacgcggtgattggctcccggggcagtggtaagtccacgcttatcgaaagtattcgtctggccatgcgaaaaaacgaagggctgactgcgtcacaaatcaataagctgaacctgtttagtcagacaggaatgggcatggatacagattctttcatcgaatgtgtgttccacaaagagggcaccgattttcggctcagctggcggcccggtggttgtcatgaattgcatatcttcagcgaaggtcagtgggtgccggacaatcactggtcagcagaccgttttcccctctcgatatacagccagaaaatgctctacgaactggcatcggacacaggggcattcctgcgcgtctgtgacgagagtccgatggtcaacaaacgagcctggaaagagcgctgggatcaactggaaagggactacctgaatgagcaaatcacgctacgtggtcacctggccagccagacgattgcgggaaaactacagggggagttgtctgatgctgaacgggccatcagtcagttgcggtcgagcgcttactatcctgtttgcacccgtctggccacggcccgagctgaactgtctgcggcaacgcttcctctggagcataatgaactgcgtgtcgctggtctgagggcgcaggagaaagaacccgtgcaagtccctgagctccaggtggagtcgtctgcgccactgacagcatttatgacgcgtcttttggacgtacagcaaaagtatgaccagcgtcttgacactctgttgtcgggctatgccgcggaactccgtaccattaagcaggagcccccttttctcgcattggaagaggcggttcgcaaccaggaggaaaccgtacaacgtgaggccatggtgttacgagaacaggggctcaatccggacgtcctcgatgagctgatgacgcgcagtgagtcgctgaaatcggaactgagaaattacgccgatcttgacgggacgatcgcggcctccgcagcgaggtccaaaggattactggctgaaatgcgtaaccatcggatggtattgacggaaaagcgaaaggtgtttctgtcctctctgtctctcagcgcactggaaattaaaattctgccgctctgtgccccgcatgaagacaccgtatctggttatcaggcagtaaccggcatcggaaactttgccgatcgtatctatgataatggtgacggtagcgggctacttcatggcttcatcagcctgcgcccgtatagtccgctaccgtcggctacggaaaacaaatatcttgcgctggatacgcttaaagcgctgcatcttgctatccatcgcgaggagcctggggtcggggctgagctccacggtgctttcagaaatcgccttaaaggtctgaatgaagcgcaactggatgccctgcaatgctggtatccggatgatgggatacacattcggtaccagacacccggaggagggatggaagatatttcctctgcttcgccgggacaaaaaggagctagcatgttgcagttcctcctgtcgtatggcaccgatcccctcctgctggatcaaccagaagacgacttggactgcctgatgctgagcatgagtgtgatcccagccatcatggcaaacaagaaacgccggcagctgattatcgtgtcgcattctgccccaatagtggtcaatggtgatgcggaatacgttatcagtatgcaacacgatcgctctggcctgtacccgggactttgtggagcgcttcaggaaacgccggtgaaggagctgatttgccggcaaatggagggtggggaaaaagcatttcgttcccgctatgagcggatactcagctaa

SEQ ID NO: 188198 - DNA, 426 bp, Klebsiella oxytoca
atggctgaagataatgagggactttaccgttcttatcttcatgaaacgctcgatggcctgacctgtcgttatgaaggtaaatactggccagggctccctggcgtcctgcaggttatagccagggagcacccggaaactggttgtctgtcagaaagcgatcgggccataattaacgggcgcagcaaaatactccccgattatctccgcgaattattcagtagcatcgagaacgtcaggcagggcccatggggtctgccgaaagactttacattgacggacagtagcctggcaacgctggccactgtaacgctggagtatactgaagtgatctccgctgatacggtaaaagtacgccggagtgaattcagcaaaagaggcgaacggggggcatggccatttaagccactgaaggctgtcgatatgtag

SEQ ID NO: 188199 - DNA, 867 bp, Klebsiella oxytoca
atgcgcctgttggcttcaaaagccgggaataaaatcaccgaaaccgccataccgcgcgtcgcgatggttcacggagaaattcctgagcaccagcttactgctgtctatgagccgatgagtaatctgatactcactggctccaagagcatgactgtgggagataaaacctggcaatataatcctgccacctactttgtgatgtcggtggatctgcccgccgtcggcaaggtctttgccgatgagcgaaccggggcgccctatcttgcggtgagtctgacaccgaagcctgagattattgcagaattactggatggcatgccgggttcaggtaaaacgcatctttataacgccggattttctgtcgccccggttacgtccgaattgctcgatgcctggctgagaatgctgcgattgttcaacaagccagaggaaatttttgctctagccccagcgtatgaacgagagattttattccgggttcttcaggggtcgcagggctggatgctgcgtgatattgccacgccggaatcgcatcttgcccgcatctataagttgattaactggctgaaacaacactatatgcgaaccgtgcgggtagaagagctggccgccatggcggcattaagcgtttccgcatttcatcgccactttcaggcgatcaccgcgctcagccctgtccagtaccaaaaacgtcgtcgcctgatgcaggcaaggttgaagttagccacaactggcgacagcataacggccatagcacatgctgtcggctaccaaagccatacgcaattcagtcgggaatatggacgccatttcggtctctcgcctccatcagatcagaaaaatataacactgttcagaaacatatag

SEQ ID NO: 188200 - DNA, 393 bp, Klebsiella oxytoca
atgatcacttttgagattcgtatggaaattaaagtcctgcacaagcggggaatgagtatccgggccatcgccagggaactgggtatttcgcgcaatactgtccgcagccacctgaaagccaaatctgaaaagctgcagtattcaccacgcccggtaccatcatcactgctcgatgaataccgtgattacatctttaagcggattagcgatgcgcatccctacaaaatcccggcgaccgttattgccagagaaatcatggagctgggctatcgtggagggctcactatcctgagagagttcatccgttcgcaggccctccccgacaggcagaacgggtcgttcgcttcgaaaccgagcccgggcggcagatgcaggttgactggaggaccatga

SEQ ID NO: 188201 - DNA, 126 bp, Klebsiella oxytoca
atggaagtagccgaagtgaagcggctcaagtcgcttgaagaggagaacgctcggctcaagaagctgcttgccgaagcaaggctggataaggaggcgcttcaggtggctctgggccgaaagttctga

SEQ ID NO: 188202 - DNA, 837 bp, Klebsiella oxytoca; identical to SEQ ID NO: 101505

SEQ ID NO: 188203 - DNA, 351 bp, Klebsiella oxytoca
atgtctaacactaacgccaattttgagatgaccgggatcctgttagggcaagaagtccgtaaacgtaaaactcctcaggagaagatcgccattatccagcagacgatggagccgggtatgaatgtctcccatgtcgcccgcctgcatggtatccagcccagcctgctgtttaagtggaagaagcaatatcaggaaggcagcctcaccgccgttgcggctggagaggaagtcgttcctgcttctgagcttactgctgctctgaagcaggtccgggagcttcagcgccttctgggcaagaagacgatggaagttgagatcctgaaagaagccgtggagtacggtcagtcgtga

SEQ ID NO: 188204 - DNA, 477 bp, Klebsiella oxytoca
atggtcagccggaccatgggcgtgtcgcgtgcgcaactgtcactgcggattaaccgttctgccgactggcaggacaggcgctgtaaccggcgtaatgaagaagcagacgcagaaatactgtcggctatcctcaacattatcagcgatatgccgagttatggttatcgacgcgtgtggggcatcctgcgcaagcaacgtcgcacagagggacagccacctgtgaatgccaaacggctttacaggataatgagcgagccctgtgtagtacgccgtctgcgtttctccggccctaagacatcaatcatctgttctccaatgactagtctaaaaactagtattaagactatcacttatttaagtgatattggttgtctggagattcagggggccagtctaaaaacagcacaatgcatctttctgggccgtcagtcagggatatgcttattcgttacgcagaggaaaatgatgtcgatttga

SEQ ID NO: 188205 - DNA, 426 bp, Klebsiella oxytoca
atgagcaacattaccatctatcacaacccagcctgcggcacgtcgcgtaatacgctagagatgatccgcaacagcggtactgaaccgaccgttattctttatcttgagactccaccttcacgcgatgagctggtcaaactaattgcagatatgggcatttccgtccgggcgttgcttcgtaagaatgtcgagccgtatgaggaactgggtcttgcagaagataaatttactgacgaccagctcatcgactttatgctgcaacatccgattctgattaaccgtccgattgtagtgacgccactgggaactaaactttgccgtccttcggaggtggttctggatatccttcctgatgcccagaaagcggctttcaccaaggaagacggtgaaaaagtcgttgatgatgcaggtaacagactgaaataa

SEQ ID NO: 188206 - DNA, 1290 bp, Klebsiella oxytoca
atgttactggcaggcgctatttttgtcctgaccattgttttggttatctggcaaccaaagggattagggatcggctggagtgcaatgctgggcgcaggactggctctgatatctggcgttgtgcatgtgggcgatattccggtggtgtggaatattgtctggaacgcgacggcgacctttattgccgtgattattatcagcctgctgcttgatgaatcaggctttttcgaatgggcggcattgcatgtttcgcgctggggtaacggtcgtggccgtttgctctttacgtatatcgttctgctcggtgcagcggtggcggcactgtttgccaacgatggggcggcacttattctgacgccgatagtcatcgccatgctgctggcattagggttcagcaaaggcaccatgctggcattcgtcatggcggccgggtttattgccgatacggccagcctgccgcttatcgtgtcgaacctggtgaatatcgtctcggcggacttctttggactgggcttcactgagtatgcgtcggtaatggtgccggtggatattgccgctattatcgctacgctggtgatgctgcatctgttcttccgcgaagatattccgccgacttacgacctggctctcctgaaagcaccggcaaaagcgattaaagatctggcaaccttcagaaccggctggatagtgttgagccttcttctggttggctttttcgtccttgagccgttgggtatcccggtcagcgcgattgctgctgtaggggctgtcattctgtttacggtggcgaagcgaggccatgccattaacactggcaaagtgcttcgcggtgcgccatggcagatcgtcatattctctttgggaatgtatctggtggtctatggtctgcgtaatgccggactaacagaatatctctccggtgtactgaacgtgctggcagataaaggactttgggcagcgacgtttggtaccggcttcctgacggctttcctgtcttccataatgaacaatatgcctaccgtgctggttggtgctctctctattgatggcagcactgcaacaggcgttatcaaagaggcgatgatttatgccaacgtgattggctgcgatctgggaccgaaaattacacctattggtagcctggcaacgctgctctggctgcatgtcctttcacagaagaacatgaccatcacctggggatactatttccgcaccgggatcgtcatgactctgcctgtgctgtttgtaacgctggccgcgctggcgctacgtctctctatcactttgtaa

SEQ ID NO: 188207 - DNA, 1008 bp, Klebsiella oxytoca; identical to SEQ ID NO: 101407

SEQ ID NO: 188208 - DNA, 762 bp, Klebsiella oxytoca; identical to SEQ ID NO: 101406

SEQ ID NO: 188209 - DNA, 816 bp, Klebsiella oxytoca; identical to SEQ ID NO: 101405

SEQ ID NO: 188210 - DNA, 1161 bp, Klebsiella oxytoca
atgaaacgaagaactcggattaactacacgccagagcagaaggcaattatctgggacagatataagcaaggtgattctctacatgatatcgccagaatgtttgacagatatcattcttccattatgcccactatccaccagacaggcggctaccgtcctcccgtgcgaaaacggcaccgattagcgctttcgcttgatgaaagagaggagatatccagagggctggtagcaaaactcagtatcagagacatcgccgccaaattatcaagagcgccctcaacgattagccgcgaggtcaggaggcacggtggtgcaaaacaataccgtgcagcaaaagccgatgctactgcgtgggaaaatgcgctgagaccaaaaccttgcaagctaattgaaagccccgcattgtgtaaaatcattgcagagaagatgcatcaggactggtcaccggaacagatcgccggttggctgacacgctgttatccggataatcaggaaatgcatgtgtcacacgaaacgatttataaaacgctttttatacaaacccggggagcattaaaaaaagagctgcagcaatgcctcagaagcggaagagcagtgcgtagatccagaacgtcatcgcttaaagggaaaggattagggtcaatcccgcacacgatacctatcagcgaaaggccacctgaggccgctgacagggccattccaggtcactgggaaggtgacttgattcagggctcgaaaaactcctatatcatcaccctcgtagaacgtcattcccgttttgttatgctggcaaagatcagagacaacaagaccataacggttatatctgcactcatcagacaagcccgggaattacctgctgagctttataaaacattaacttgggatcgtggcgctgaaatgaccagccacacacgatttactgtagcgacagacattcagatttattattgtgatcctcaatctccctggcaacgtggctcaaatgaaaatacgaacagattgctcagacaatattttccaaaaggaactgacttatcggttcacagccagcaaagacttaacagtgttgccagacagctcaacgaaaggccgagaaaaacgctagactatgaatcacccgcagaacggttcaataagtgtgttgcgtccatcggttga

SEQ ID NO: 188211 - DNA, 240 bp, Klebsiella oxytoca
atgggtagcatcaacctgcgtattgacgatgaacttaaagcgcgttcttacgctgcgcttgaaaaaatgggtgtaactccctctgaggcgcttcgcctcatgcttgaatatattgctgacaatgaacgtttgccgttcaaacagacactcctgagtgatgaggatgctgagctcgtggagatagtgaaagaacgtcttcgcaatcctaagccagtacgtgtgacgctggatgagctctga

SEQ ID NO: 188212 - DNA, 288 bp, Klebsiella oxytoca
atggcatattttctggattttgacgagcgtgcactaaaggaatggcgaaagctgggctcgacggtacgtgaacagctgaaaaagaagctggctgaagtgcttgagtcaccccgaattgatgcgaacaagcttcggggtatgcatgactgttacaaaattaagctccggtcttcaggctatcgtcttgtatatcaggtcatagacgagaaggttgtcgtctttgtgatttctgtcgggaaaagagagcgctcggaagtttatagcgaggcggtcaaacgcattctctga

SEQ ID NO: 188213 - DNA, 162 bp, Klebsiella oxytoca
atgaaactaccgcgaaacgccctggtctggtgcgtattaatcgtgtgtttaacgctcttgatattcacatgcctgacccggaaccggttatgcgaagtccggctaaaggacgggaacagggaggtcgcggcaagcctggcttacgaatccaacggtaagtag

SEQ ID NO: 188214 - DNA, 531 bp, Klebsiella oxytoca
atggggaataaagttcattttaccactccgatgatgcagcttcaggacccggaacgcaccaaagtcctgctggttactctgcctgaaaccactccggtactggaagcggcaaacctgcagtccgatcttgagcgtgcggggattcatccctggggctggattatcaataacagcctctctattgcacagactcattcaccactgctgtgtctgcgtgctcaacaagaacttcctcagatcgaggctgtgaagaaccagcatgcaaggcgcatatggcccactcaacagcgacgtattgtggagatctcgaccgcggaaacgcgtgtaatttcgctggcgttaaccagcgcctttatgttctgcggtattggttttgggtcggcggtggcatcatggctttatccgctgtcggggttttacggagtaatgataagctcagtcctgttcctgctgctggcactggccagtctgtggacgtctgaatggttacgagcacgttctgcgaaatatcaggcggttcacctgtcataa

SEQ ID NO: 188215 - DNA, 936 bp, Klebsiella oxytoca; identical to SEQ ID NO: 101396

SEQ ID NO: 188216 - DNA, 909 bp, Klebsiella oxytoca; identical to SEQ ID NO: 101395

SEQ ID NO: 188217 - DNA, 534 bp, Klebsiella oxytoca; identical to SEQ ID NO: 101394

SEQ ID NO: 188218 - DNA, 312 bp, Klebsiella oxytoca; identical to SEQ ID NO: 101393

SEQ ID NO: 188219 - DNA, 1110 bp, Klebsiella oxytoca; identical to SEQ ID NO: 178695

SEQ ID NO: 188220 - DNA, 162 bp, Klebsiella oxytoca
atgaaaactctaatcactgatgttatcgggcttaccgggttcggttcgcttgctgcaggcgtgtatctccagttcgggctggcgatgtctctgatgatgtcgggaaccctgctactcatttatgcgctgttagcggcaatgagggggaataatgctgcttga

SEQ ID NO: 188221 - DNA, 957 bp, Klebsiella oxytoca
atggcttttttaccctcggcggatgattcactgacagcgtttgttcatcaggaacctttacgtttcaccgggacgctgccgcttatttccacgcgctttacgccgccccgtacgccggaaagcctgctgtcgcgggagcgcctgctgcagcgcctcgacggcgccgtttcccgccgtttaaccctgctgcgcgcgcccgccgggtttggcaaaaccaccctactggcgcagtggtaccggcaccgccttcgacaaggggatgcgctggcctggctgagccttgaagaggacgacaacgcgccgctgctgtttatgcgctatctacaggaggcgctgcggccgctgtggcaggggtggagcccgtcgtttctgcatctgttacaaggtgagcttccggccgagctccccctgttctttgctgagctcgttaatcagcttaatcagtgcccgcacccgctgtacctgatcctcgacgactatcagtgcatcagcgacccggcgattcatcagggaatgagctggctgctgcaccatgcgccgccggcgctgcatctgctcatcggtagccgtagtcagccgcctttagccctgagccgtctgcatatgcaggaccagctgctggaggtcgatgatccggagctgcgctttaaccccagcgaagcccgcgcttatttcgctggcgcgtcggggctggatccgcaggcgatcccccggcttatcgcgctcacacaagggtgggtcgcgggaatgaaaatggccgcgctctccccggacgcgtctacggcgatgggcttcggcgccggctcgcggtcaatctcccgctatctggatgaagtgatttcgcgccgctgccgcccgaagtattcgacttcctgctgcatacctccgtgcttaatcgcctgcatccggatctgtgcgatgccgtctgcggccgccataacggcggcgagatgctga

SEQ ID NO: 188222 - DNA, 1557 bp, Klebsiella oxytoca
atggctagcgaaaatgacaaaaatcatagagttagggtcgcgcagtacttgaggatgtctaccgaccatcagcaatattctttacataatcagtccgaatatatcaaagattatgctgaaaagaacaatatggaaatcgcttatacctacgatgatgcaggtaagagcggagtcagtatcgtaggcaggcattctttgcagcagttacttagcgatgtagaacaaaagaaaatagatatacaggctgtattattttatgatgtgagccgttttggtcgttttcaaaatagtgatgaagcggcatattattcctttctatttgagagaaatggtgtagatcttatatattgttccgaacctatacccactaaagatttccctttagagtcctctgttatactgaatataaaaagatctagtgctgcatatcacagcaggaatttatctgaaaaggtatttatagggcaagtaaatttaataaagcttggttatcatcaaggcggtatggctggttatgggctgagacgtcttttagtagacgaaaatggcatagctaaagaaatattgagtttccgcaaaagaaagagtattcaaacagatagggtaatattaattccgggaccaaaaaatgaaataaaaattgtaaatagaatatatgatctctttatagataataacgtcccagaattcattattgctgagagattaaatgaacagaacatacctgcagaaaatggaacattatggactcgtgcaaaaatacatcaaattttgacaaatgaaaaatatattggaaacaacatatataacaaaacctcatctaaattaaaaagtaggcttgtaaaaaaccccaaacatgaatgggttagatgtgacaaggcatataaacctattatttcaaagaaaaaatacaataaagctcaagaaataattcagctccgatccattcatttgactaatgaagatctattagaaaaactaaaacaaaaattagaatctaatggaaaactatcaggctttatcattgatgaagatgatacaggcccttcatcttctgtttatagaacccgatttggtggtcttttaagagcatatactttgattggttataagccagaacatgattacagctatctcaaaataaatgaagcactaagatcattttactcagagataattgaggattttaagggtgaaattttaaaaagtaactgtcatatagacgagtataaatatgccccaatgctttacatcaatgatgagtttttaatttccgtccttgttactaaatgcatacatatgaaatcaggtaaacttagatggaaagtccggtttgataactcacagaaagcagacataacaattgttatacgaatgaattcacaaaatatttcacctcttgatttttatatcataccaaagattgaaaacgaatataataaaatgtgcatgacggaaacaaacaacattcgattagatctctatagatttgataatcttgataaacttctacaaattattactcgcatgaaagtgagggaactatatgctgcctga

SEQ ID NO: 188223 - DNA, 1353 bp, Klebsiella oxytoca
atggactttacggaatatcaagaagaaataatcgaagatgttaaatcttgccttgaaaacttacaagtccaacccattttattcatgggtgcaggtatttcacaacgatatataaaagcgcctgactgggaaggtctattaaagcaactagcgcaaatatgccccttgatcaaacgcccttatggttactacagccaaacaaagggtgataacaaacctttgattgctagcgatttttgtgacttctatgctgaatgggcttgggatgatggcaaggatcgctatccagagacatactttgaaggaacgactccaaaagatatttatattaagcatgaaattgcatccattctgaatgaattatcaaactccgttgatttctcgaacatggaatatacagaggaagttcagaaattaaggaaagtaaaacctcatgcaataatcacaacaaattatgacgacacattagaaaaaatatttgacaattatcaggcaatagttggtcataacgttgttaaagtgaattattcatcttatggcgaaatcatgaaaattcatggtagcagtcatgaagttgaaagtattgttattacaaatgaagattatgttgatttctataaacgtaagaaatatatcagtgctaagttgctaacatattttgctgaacaccccttgtttttctttgggtacagtatcaatgatgaaaacataaaggcaattctctctgatatagatgaaatcatcgctcccaataatgcattgattccaaatatttatcttgtctccttcagtaaggactgcgaggccactggttctcatcaaaaggaattgctaatcggtgttggtgagaataaaagcgttcgaatcaaggtgatatacgcaaataattttggttggatttttgatgcgttatcatctaatacaccggaaattagcgttaatccaaaacttgtgcgtgcatttctagccagaacgtacacattcgcatcagaatcccttgttaaacaagaacttccatacgattttgagatgttccgcaatattgcagagcatgatgatgcattagcaaaaatgtatggtatcgctgaactcaataatgggcaggcactaaatgctagtttcccatatacaatgtctgatctggcaaggattctcgacatgggatcgtggcactatgttaatcaagaattcgaaaaattaagaaaactaaccgacttcaacattaaagcatcagacaacaattatcatgttttcattaaatctgggaaaagtggtgtcggaaaatactcatctgaggcacttgacttattgcgaaaattaataaacggggaacagtttgagttaaacccataa

SEQ ID NO: 188224 - DNA, 1128 bp, Klebsiella oxytoca
atgcttttcatgaaagaacattcagggcgcaacggctttatgattaaactcgataatattcgcaagacctaccccggcagcgcgcatgcggctattcgcggccttaacctggtgattaatagcggcgaactgtgcactttcgttggccccagcgggtgcggaaaaacaaccattctgcggatgattaatcagctggatattcctgacgccggtgacgtatacgttcagggcgttaagcttgccgctgccgatattattcaggtgcgccgccaaattggctttgtcatgcaaagcgccgccctctttccgcatcgtacggtcgcgcaaaatatagccacggttccgcgccttctcggctggagcaaaaagcatatccaggcgcgcatcgacgaattagtggatttgatgtctctcgaccgcaacgtcctgccccgctatccgcaccagctttccggcggccagcaggggcgcgtagcgatcgccagagcgctggccgccgatccgcctattctcctgatggacgaacctttcgccgccatcgacccggtggttcgcgagcgcctgcaggacgagctgctgttgctgcaacagcgcctgcgcaaaacgatcgtcctggtgacccatgatatcaatgaagctattcgccttggcgatagaatcgctatcttccaggagggcggcgagctggcgcagttcgccacgcctgaccatattttgtcgcatccggccagcgactttgtgcgccgttttatcggccccgaaccgaatctgcagcggctggggagaattcaggtcggacagctcccgcgccatgacgtgccgcttattgatgagagcctctcccccatcgccagcccgcatccgccggtcgccagtccgctgcgcctggtgctggacaaaaaacggcgtccgctgaactggttcgatccggttaagcgccggacgctgccggtcgacgccccgctggcggccatcaacacgctgcgctttgcctacagcgcgctgctggatgcgcccggcggcgtagtggttcatgtcgataccgacggtgaatatcagggcagcatctcccacgctctgctgcagaacgtgctggaaggccacgtggatcttcgccgctatgattga

SEQ ID NO: 188225 - DNA, 1233 bp, Klebsiella oxytoca
atgatgacgcccggcaaaagaaactatatcttgttgagtcttttcgatttcctctatctcttcgcctggtcctcgaccatggcgttctttgtgatctggacgactcagcacctcgggattagcgcaacgaaaaccggcctgctctactcggtcaacgcctttattgccctgctgatgcagcccttcttcggctttatttccgataagttcggcctgaaaaagcggctgatctggatcctggtcgccatgctgctaccggtaggcccgttctttatttatttgtacgcgccgctgctggtgcacagcttctggctgggtgcgctgcttggcggggtatacctggggatgatttttaactccggctgcggggtgattgattcgtatattgataaaatttcgcggcgctaccagttcgaatatggccgggtaagaatgtggggatcgttaggctgggccgccgccgcgtggatcgtcggcaagtatatcgacagcaatccgaacctcgccttctggctggcgagtatcgccattgtgattgccgcgctctgttttatgctgaccaaaatcgagctgaccgaagcggaaatgcagaaaaccagcgcgctgaaagtttcgcatgccctggagctggcgaagaacggccagttctggatgctgctgatctttaccctgttcgtcacgcaaatctacgacacctacgatcagcagtttgcccagtacttttctctgcagttcccgacgccggaagaaggcaatcgctggtacggcattttggcctccattcaggtatgcggcgagacgctgtttttatgcctgatgccgtggttcgtaaaccgcaccggcgcgaaatgggcgctgatcatcgccggactgatcatgtcggtgcgtatcgtcggctccgcgattccgctgggcccggtgtggatcggcgcggtcaaaatgatgcatgcgctggaaaaaccgctgattctggtgtcggtgtttaaatttatcgccgccaacttcgacaacaagctctcctcgacggtctacctgctggtgctgttcgtcgcctccatcgccaccgcgatttactcgccgctggccgggtatttgtacgacaccatcggcttcgcgcatacctattatattctgggcggcatcgccgggctgtttacgctgatctcgatatttacgctgcgcgacaatagagaaccgaccgcgccgggggctggcgttgcgcaaagccattaa

SEQ ID NO: 188226 - DNA, 1116 bp, Klebsiella oxytoca
atgcgccagaccattaccctgatgatagcccttaccgcactgttgctgcctgcggctgcccttgccgcccgggagcgcgtagaggtgctgcagaaccagcttgaacacccgtgggcgctggcctttcttccggacgatcggggcattctgatgaccctgcgcggcggtgagctccggctgtggcagcgggaaaaaggcctcgcgcctgcgatttcgggcgtaccgcaggtctgggccaacgggcagggggggctgcttgacgtggcgctggccccggatttcgcccagtcgcgccgggtctggctaagctacgccgaaggcgggagtgacgataaggccgggaccgccgtaggctacggccgactgagcgaggatctccagcgcctggaaaacttccaggtggttttccgccagcagccgaagctttcaaccggcaaccattttggcgggcggctggtgttcgacggccgcggttatttgtttatcggtctcggggagaataaccagcgttcgaccgctcaggatcttgataagctgcagggaaaagtggtgcggctaacggctgatggcaaggtcccggacgataatccttttgtcggccaggctggcgtcaggccggaaatctggtcttacggtattcgcaacccccaggggatggcgatgaacccgtggagcgatacgctgtggttaaatgaacacggcccgcgcggcggggatgagatcaacctggtgcaaaaagggaaaaactacggctggccgctggcgacgcacggcattaactatagcggcctgccgatcccggaggccaaaggcaaaacgctggaaggaaccgaagcgccgctgtttgtctgggcgaagtcgcctgcggtgagcggtatggcgttttacaacgcgccgaccttcccgcagtggcagcacaggctatttatcggcgcgctgaaggatacgtcgctgattgtcctcaaggttgacggcaataaggtgacggaacaggagcggattctgggcgatcgcggtaaacgtatccgcgatgtgcgcgttggacccgatggctatctgtatgtcttaaccgacgaatccaacggcgagctgctgagggtgagcccggcgggctaa

SEQ ID NO: 188227 - DNA, 264 bp, Klebsiella oxytoca
atggggaaattaaccaaaaaagaatcggcctggttcgatgaagttaacgcagtgctggcgcgctgcccgtcgccagaaaaattcggcttctacaccattggcgatcgcgacgtaacagtatacgacaagcgcaaagaggaagagatcgcgcgccgggtagatactcgcgcatcttctgaatggtgcaccgctgtgcgagatgcggacgctaaaattgacgcccacatctactttccttctgacgtactgagcacagcaggataa

SEQ ID NO: 188228 - DNA, 834 bp, Klebsiella oxytoca
atgacaactgatatcaccgaactggcgcagagagagaaattcgaagtgtgggcagaacatgcttgcgcggctccgtggggctatctcaaaaagcggcgcaccactgaaggctattccgagcagatttacacttgcatgtggacggcatggaaagcggctggcgctgagctggtagaggcgctggagaaggcgcagcgctatatcgaagaattgcgggaatggaatgctggtctggcacaggagtcattcgagcgccagcagctgatttctgaacttgaacctatccgtgcagcagccgagaagttggttcgctgcaaaggtcgctatcacagcgagcagaactatcgcgcactggcggcgctgtttggcgtgaatactccagacctgccgccgctggatagcgagtcccgccccctgaagttgccccctgagctttacacgatcggtgagcttatcaggacgcaggacaaccgcattaccgatcagcccatgttcgtcgttttccagaagcgtgaaattatcggaagcgacgagcactcgcctagcagaatttgctgggtatgggatggtgaagaggtcagcgagctgagagccaagcgactggaggcgctttatcaggatggtcgtgacactcgcggatatgaccgatacgctatgcaggaagttgatgagtttgttactgcctgctttaccgagcatgcatgcaaagacttcctccgccagaacggacacaacctacgccagccgtatatctacgcctgcggctctttccgaaataacgaatatcagctggttagaaattggctcgctggcatcaaggtggaggctgagtga

SEQ ID NO: 188229 - DNA, 918 bp, Klebsiella oxytoca
atgaaattatcaaagttacgtaacgcgattgtttatcgggccaccttgcccagcatcgaagctgttgaaggtcacctgcacgaactgccctacactgaattgggtgaaacggaatttgcacgctcgtctttcgttcctaacccactcaccggtgaactggtgacgccgatagctggcggctatgccatcgttgtacgccgtgatgagaagatcattcctcaacacgttgtgatgaaagaagccaatgaacgcatccaacgcatcgaatctgcgtgcggtgcaaaactgaaacgtgctgaccgtaacaacatcattcaggatgctagggtgcagctttgcaaacaggcgtttatcaaatcatccctgttcctggcgctttacaacactgaagaaaatcttctgatcattaacaccgccaataaaaatattgcagggatggtcggcgcgatgctcgttaaagtcatcggctcagtaaaaaccgtcactatcaacatcagcgatattaaaaacggactgacaacacggcttcaaaatcacctgaatggtgaagaacctgcctttgaagggtttgaggttggtgattatgtccaactgtccagactcgcagatcagaaagaagttatccgctattcggcggatcatacttcggttaccagtgaaattctggagagtctgaacaccggtttcatcgtcgataatatggagttaaggggctgtggtgtctctttcctgcttaccgataaattccacttccgtcgcatcgatactcaggataatagttttgatgatgacgacgacaaagcgtatcgctggcgtcaccaggcaggtactgacatgttccagttctgcaaagtgattaaccagctatgtgatttgctcgcctacaaagagcctgaagaacaaaaaccagcagcctga

SEQ ID NO: 188230 - DNA, 231 bp, Klebsiella oxytoca
atgaacccggaaatattcatcaaaaacaatgttgttaaggcactcctgactgatggttattcagcagaacaggctgagcaggggggggtaggggctatttcgtactaccggcgctcatcaaagccgacaaccaagcgaagaaacatctttgacgactgccttgaacaagcccgaatgattcttaagtacggcaagaagaaaggcaccagaacgaaaggggcattgatttaa

SEQ ID NO: 188231 - DNA, 456 bp, Klebsiella oxytoca
atgacaaacctgaaagaagccgtaaaggcaatgtgcaaagcctatcccggcggacgtgaagcgatggctggtgcattaggtatgaccttaacccagttcaataacaacctctacgagaagaacggctgtcgtttctttgaagtatctgaactggaagcgatggaggacatctcgaatacatctcacctggctgaatattttgcccgccgtcgtggtgctctgctggtggatgtgccgcacctggaagagctggaccgcgtggatttgtttagccgcgcaatgcgtacctcggcagccagagggcaggtggatcagattatcgaacaggcgcttgaagacggggttatcgaaagacatgaagctgaagaaatcatggtgcatcaccgccgccacctggcagcgcgtgaagaagaaatcgcggcaattatcacgttgtttgcacgcaaaaagaagtga

SEQ ID NO: 188232 - DNA, 915 bp, Klebsiella oxytoca
atgagcctgttaatgccatcaaggccgatagtcatcaatcctgaccttgcatacagcattggcctgaatgaagccatagcgttgcagcaggttaactactggctgaaggagacaacctccgggcttgagcgtgacggtgtgcgttggatctacaacaccactgagcaatggctggagcaattcccgttctggtctgagtcaacgctgaagcgcacattcacccgcctgaagagcctgggcgtactcaaaatcgagcagctcaacaagtcgcagcgcgacatgaccaactactacacgatcaattacgagagtgagcttttagatgaagtcaaagtgactaaatcgaaggggtcaaaatgcgctgttccatcaggtcaaaatgacacgatggaagaggtcaatatgaaacgctccaccaggtcaaaacgaaccgctgtcatcaggtcaaattggcacgatgatcctacagagaatacaacagagattactacagataataaaaccccttcttgtccggttgctgagcaacctgacgagaccgggcctgcgattaccgtcctggaacatttcaacaaggttactaattcgagctatgggcgaggaggacgtggcaaaactactctgggatatatccgcggtcgcctggcagaaaattacagccctgaagacctcatgctggtggttgattacctgaatgagaaatgggcgaacgattcaaaaatgtgcgactacctccggccaaaaacactttttgccccagagaactgcgcggaatatttcgataaggcccggaaatggtcctcggcaggacgcccttcctgggtgaatggacgatggtccaaagacgctgctgcgtttaaatccactcacgccaatgttgattattctggcatacctgcggggttcagaggatga

SEQ ID NO: 188233 - DNA, 810 bp, Klebsiella oxytoca
atgagcaagccatttctgaagtgggctggtggtaaatacacccaacttaacgatctgttcaggtatatccctgaagggttacgactgattgaaccattcgtggggggcggatctgtattcctgaacagcgataaacacgcggatttcctgctggcagatgttaaccccgaccttatccatctgtatcaaatgctggctgtcgtgcctgacgtagttgaaaacaaagcccgctggatgttcgagaaaatgggcaatcctgaaggttatgaactgatcaggaaggaattcaacgcgcagacactggatgcagccgagcgtgcagctgcattcctgtatctcaaccggcattgcttcaatgggctgatgcgttacaacctggcccatcagttcaacgttggttggggaaaatacaaagctccctatttcccgtttcaggagatgaagactttcgctgatatgtctcacaactgcgtattcatgacatccggttatcgccggactatcggccttgcgggaaaaggtgacgttgtgtattgcgatcccccttacgaaccgatgcctggcactgcagggtttaccgcgtatgccgctggtggttttaactgggatgatcaggtattgctggctaagcactgcgtagaagcgcacgaacgtggcgcgagggtagtcatttcaaactcatcagcccccaggatagtagacctgtaccgggagcatggttttaatctggaatttatcaaagcgcgtcgttcgatctcctgcaatggcaccacgcgggaagtcgctcgggatgtcgtggcgatcctgtaa

SEQ ID NO: 188234 - DNA, 390 bp, Klebsiella oxytoca
atgaaactgacactgccatttccaccaagcgtaaacagttactggcgcgctcccagcaaagggccactgaagggacggcatctggttagcgagactggtcgcaagttcctgaaagcagccagggcggcaattatcgaacagttacgggcagttccaaggccatcaagtgagctggcggaagttcatattgttctgtatccgccggatcagcgtcgtcgtgatattgacaactacaacaaagcgctgttcgacgcgctgactcaaactggtgtctgggaggacgacagccaggtgaaacgtatgctggtggagtgggggaacatcgtgaagaaagggaaagtagaaatcaccattaagcgatttatttccccggcagttgcagctgcctga

SEQ ID NO: 188235 - DNA, 696 bp, Klebsiella oxytoca
atgaatcagttaatcgcaagcaagacagttacgatgtcgagcatcgaaatatctgttctggtagataagcgccacgacaacgtaaaaagaacaattgaagcgctggtggataagggcgttatagcttctcctcaaattgaggaaaagcccactgcagggcggacgatgtcggtatatctcttcaggggagagaagggcaagcgagacagtattattgttgtcgcgcaattatcgccagaattcacagcacgccttgttgaccgctggaatgagcttgaagctgcacaacatccggtcatcccgcagtctttctcggatgctttgcgtctggctgctgatttgcaggaacaaaaagagcatctgtcgcaagaactggcattagccgcaccgaaggttgattttgttgatcgttactgtactgctaacggttcaatgtcattccgtcaggtggcaaagcttcttcaggctaaggaaacagagttccgcttattcctgattgagaatgacatcatgtaccggcttggaggaacgctgacgccgatggctcagcatatcgatgcgggacgttttgaggttaagacaggcacatcacttacatcaaaccacgcgttcagtcaggctcgctttaccgccaaaggggtcaggtggattggtggcctgtggacagagcacaaagcaggaggacacgcagcgtga

SEQ ID NO: 188236 - DNA, 981 bp, Klebsiella oxytoca
gtgagagcactacttactcctgagattgcccctaaaatgggcgttgttcttcttcgcccaggtgctgagcttatgccattgttcaggcgaggacgtgtactgattgagcctgagccagagcgttacgctgaatatcagactggagctatccctccagcaacacagccgctggaaagtgacccaacggtattgcctatctttgaaaatatggatgtgctgatccgtgctggcggtttagttggccttgaggccgagctggagcgtactttcgaatgtcagtatccgcatgcaacctggcatagtgagaatttcacactcttccgccatgaacctggaagcattcgcctttgctggggttgcgacaatctagtcagggaccaattcacacaggaactggcaggcattgcgcgtaaaaacctggtatcctggctgatatcagtcatacgctccagactgggatttaatgaggaccatgtactaacaattccggagttgtgctggtggctggtaattaacgatctgtcgcacgtcataccggaaacgctggcaagaaaagcgatgcgattgcctgaagtcaggcaccagtcattgatgaaagaaagtgatttacagccagagtttgcggcaaccgaattagtccaaaaaaagatactggcgctgaaagtggatactgaaacgccggaatcattcatgcttcggccaaagcgccgacgctggataaacgagaattacaccagctgggttaaaacccagcagtgtgcctgctgtaataaaccagcagatgatccccatcacctgataggccacggacaaggtggaatgggaacgaaagcgcacgacctgtttgtgttgccgctttgcagagcgcaccacgacgagttgcacgctgacaccgtggcatttgaacagaaatatggctcacagctggagctgatatttcgattcttagatcgttcgctggcaatcggcgtactggcgtaa

SEQ ID NO: 188237 - DNA, 1068 bp, Klebsiella oxytoca
atgggggagaaccgtaaccggcgcgtgtggattttcgctgacgaactgcccacgctgcacaagctgccggacctggtcgaaatcctgccggaggcgcgtaagttcggtggctgttacgtgttcggtattcagtcctatgcccagctggaagatatctacggcgtgaagcccgccgccacgctctttgacgtgatgaacacccgggccttcttccgttctcccagcagggaaatagcggagtttgccgccggtgagattggcgagaaagaaatcctcaaggccagcgagcagtactcctacggtgcagacccggttcgtgatggtgtgtcgaccgggaaagaaaaagagcgtgaaacgctggtcagctattccgatattcagacactcccggatttgtcctgttacgtcacgctgcccggaccgtacccggccgtgaagctggccctgaagtacaaaccgcgcccgaaaattgccgagggatttattcagcgcactctcgatacgcgggtggatgcacggcttagtgctctgctggaagcgcgtgaggctgaaggcaatctggcacgggcgcttttcacgccggatgcgccggagcctgaacagcgtgatgcagacagcaggacatcgcccggacagccagagccggaaaacgccccggtctcacctgcacccgtgaagtccgcgtcgacagctgaaacgctggccgcaccgccatccgttaaggcgtcagaagcgccacaggctacagtcacgaccgtgccgttaacccgcccggcaccggcaacgactcctgctgcttccagcgcgacggcgtcctctgtcgctgcgacggcggccacgaccggcggcacagaacaggagctggcgcaacagcccgcagatacgggacaggaggtgatgccggctggcatgaatgaggacggtgaaatcgaagatatgcaggcgtatgacacctggctggctgatgagcagacgcagcgcgagatgcagcggcgtgaagaggtcaacattaaccatagccaccgccgagatgagcaggatgatattgagattggggggaatttctga

SEQ ID NO: 188238 - DNA, 351 bp, Klebsiella oxytoca
ttgaccatcattaacaatttcctttgcgctaatggcaagattatgaaaaagactttactgatagccgccatagtggcggcaggtattacgttcgcaatggccgacgatggccagcccgctggtcgactgtacaaaattggcgagcacaccgtagaaatagatgcggattgcatgatcctctcggttgacggctcccccgctacgctaaacgcgtccgtatccgggcatatggattttaatttagccaacggcggcattgcagaatcggaaccacggccaaaccgtcatacctgcaaagtgtatgcggggagtgatgtgcgaacaattcacataaaaaaacaaactcaatga

SEQ ID NO: 188239 - DNA, 201 bp, Klebsiella oxytoca; identical to SEQ ID NO: 112537

SEQ ID NO: 188240 - DNA, 1233 bp, Klebsiella oxytoca
atgatgcgggaaaaatcccgacgtccgtcgccgctgcagcggcgggtgctgattgtgctggccgccctcggtgcaaaacgtccggggccggtggcgacgcgggatattgagcgggtgctggagcagggcggggacgccccggtgtacgggccgaacctgcgcgcctcctgccggcgcatggaagccgcgggctggctgcgcaccctgcgagccccgaacctgcagctggccgttgagctgacggacgctggccgtgcgctggccgccccgcttctcgctgacgaacaggcgcgcgtcctggcggagcagcgagcggcggcggtccgggttctgcccctggtcaggatgaaggcggtctatgagtctgactcgttcggtgacgagcggccggtggcgctggacgatcgctggcatctggcggtccggggagactacgttatccgtctcgacggcaccacctgcctgcagctgtggaatgcggccgggcaggtgacacgcctggaaggcgatcccctgcagatcgccacctggctgcaggcctgtcacgatgcggggattgcggtccgggtgcagatcaatgagagcgccacgccggaggagggcgctctgaacgtcaccgcgccggcggaccggaccgacacctggtaccgccagctggacgtcgcgctgcaggcggaggggatcagcggcctgaatgaggagatcaggcaggccgttatcacgcctggtgaggggctccgcgacctgccggcgccggcgcgcctgctgcaggttctgcgcgacagtgcggaggcgttcccgctcacggcggccggctatgaggaagatacggaggccgcactggctgacctgctggcccgcgcgggtttcgccggcgaccaggtgcatgagctgcagtggcaccgcatccgctggccgctgatgagtcaggaagaagctgaccgccgcgagctgaacaccctgctgaacgacctggaacggcaacagctgtactgcaaccgcgaacaactgacggagattgtgttttcgccggtacgcaaacccggcgagcgctggacggaacgtctgcagtggctcctgatgacggatggattcgggttccgcagtccgctgtcccgtgaagcgggcgccagggcgctggcaatcctggccggttacacggggcgggaggtgacggagcatctggccacggtgatggtgtggaacgacgccggaacaggagagaggccctga

SEQ ID NO: 188241 - DNA, 3825 bp, Klebsiella oxytoca
atgataatgtttacaccgtggcttaggctaaccgctgtcaaaaatgagatcgctgaagcaaatgcggttggctatgaagctctgactccaacaaaactggagtcagataaagccagtggctacatcgatgcactgaattacgcttttactcatcctgatatcaggaacatagctgtcaccgggccttatggggctggtaagagctcagtacttaaaacatggtgtaaatcaaaagaagaaacccttcgcgtattaactgtttctcttgccgatttcgatatgcagaaatctgctaatagtgatgtagaaagtgaggatgaaaaggcactagaaaatgaaaaaaattcagctactactgaaaaatctattgaatacagcatcctgcaacaaattctttataaacataacaaaaatgaattaccctactcgcgcatagagcgcatttctggtgtcactttaagccaactagcgaaatcaaccagtaagctcacgttaacaatactaatggccttagtatcactttatttccttgctcctgagtacttaacagcgaagttttctctaccggggacattcagccgttatcttcttgaacatccgcttttagtgcgtctgcctggcggtgttctatctgtagcaggcacattatgtctattgctgagccaactgcaccgcattggtatctttgacaaaaaagtcagtctggataaagtggatatcctcaaaggagctgtgacggcaaaggcatcagccccttccctgttgaatgtctatatcgatgagatcgtctatttttttgatacaacaaaatacgacgtggtcatttttgaagacttagatcgtcttaataataatcgtatttttattaaactccgtgaaattaaccagataataaacaactgtctagcagataggaaaccgcttaaattcatctatgctgtcagggatgaactttttagttctgctgagtcacgaacaaaattttttgattttgtcatgcctgttatccctgtcatggataacgaaaatgcctctgatcatttcattaaaaaatttactgaagtagaaaaagaacatgtaggtttaaatgaatgtatcagtcggatagcggcattcattccggatatgcgagttatgcataatataaccaatgaatttagactgtatcagaatattgttaacaatcgtgagaatataccaaaattattatcaatgattgcctacaaaaatctttgtgctgaagattatcatggaatagatcaaaaacgaggtatcgtatttcatttcataaactcttatgtggagcgtcgtattcatgaacgttatattttagaaatagacaaacaaatattgataaatcaggaaagattggaactgatagaaaatgaaaaaaacactcacaaaagtgctcttcgtaaagagttgctgtctccctatataaatgacatccatcaggaaatactatccttccgcacagatacaggcattacctggcgtctgaaagaggttgttgaagatgaaagttgtttcatggcactaattaatggtaagggtataaacacagttcatccagcctccaaccattatattataagaaccggatctggggatagcgaattaatccgagcatcatatgcagaacggtgcgttttaattgatgaaaaaattagcaatggtatattgcgtataaaaaacaatataatctcactggaagctgtcaaaagaaggataagatccgagtcggtatcagattttataaaccgtatgcagaaaactgaattcagtgattgggtgaagatatgtgtaaatgacaacattgatccgaaccagcgtatggttgagcaaattgattttatttatttcctattatccagtggatatctttcaaccgattacatgtcatttcgttctatctttatgcccggaggactgaccgaaaatgataatacatttatcaaggctgtaatgtccggaactgatgtagttaagtcgttttccataccgctggaaaacaccaaaaatgttgttgctcgtttaaaaaaactgggagttattgaacgggagaatgcgcagcaccctgcggttatctgctggttgattgataatgaaccagatactctggccgataataccgcaacctggctcaaccaaactaacagtcaacgcgcaattagcatacttatgttggttcagaaagaattcccgatagatattcgcttccggtatctggaaattattgtatcggatataaaaatactaaaaaaactgttggagcatttgtgtgcatcagagcaaagagagatggttcaggaaataacggcttggttattgtgcctgagcaataacacaattcttagacaattaactgaaataaaagagatttttggtacacttattacctctttaccccaacttgtcattgcagtgcctgaaggatatggcgatgcattttttgagactctgaagagtaatagtctttctgtttcatatattccacttattaccgatagtcaaaatcgtgaattgatcagaaaaatatccgcttcaggtttatttaaatactcgcccaacaacattgaaaacatatatttgactctgaaaaaaaatgaggatgaggatggcttatcattttccagtcgcccactgcactgtctggaatctctccagatgaaagagctggataaaatcctatgggagaatataaatgatttcatttcctctgtattcataggctcaatggaaactgagcgcattcctcagttacttaattcagaaagtgtttccatgagctctgcagagcttattatgaaccgcatgacgttcagtattgatcaaattgagttaattcataataaatatgaaataaaatcaactgacgacacagttaataaacataacacatatagcatgttactttcatataaccgtatttcaccaagcattgagaattttgtctacttattgcatgacaaaaccatcgatacagctaatgaacttgttcaatgggtaaataataaacaccgtgaattcacgccgtgcaatatcacttttacttcctccgaggtctttaataatttccttgtaaagtttcttggttcagcagttttgtcagaaggtgcgttattaaccgttctgagctgtttagatatagtcattacggaaatccctaaaactataccattccgtaatgcagagatactgtatgtggaaaataaacttgcgccgacaatttgtgttttcactggattatattttgctcttagcagagaaccgaactacagtcagagaatgaatacgcttttgagtaatctgattgccttgcgtccggcaatgctgctcgaagaacccgatgaaatcttttatgttgcagataagtttgatgatgagcttgcccgaaaacttttcaaccatcgccagatcaatgcaaatattaagacagatgctttacgctggttacgtgataacaaacctggagtccttgatgaacaccacctgctgtcattacatactctgtcagagctgagcgtcggtatggatgaagatggaatgcgcttgttgcttcttaaaaactgtctgtctgccggagatgctgataaggacacacttcgtgtggtgctgaacagttttaccgatgagaattatcatgggcttctccctcaggcaacattcagaaaaattccttatacttttgacttatgggcgttggccgagttactcaacaaagtgggcctcatccaacccccaaaaatggggtcagggcgtgatgaagaaaaaattattatcaactcgattcgttataacaatgaagaagagccagatgtgtga

SEQ ID NO: 188242 - DNA, 255 bp, Klebsiella oxytoca
atgatcgcgctggacagcatgattaagcagggagagaacctgctgtcggacctgaaaatggattttagtacctatgaacaaaagattagaaataaagtgtacttgtacaagcctttaaggagtaagtatctcactgagatggagaaagcctttcagcgtattaatgaagaatggaacctgatggtgtcctgcaaagataagctcctctcagacggaaaacatgtaaggacactgtttgtgatcagagaaagctga

SEQ ID NO: 188243 - DNA, 324 bp, Klebsiella oxytoca
atgaacgaaggccttacccggtttcatttgccagattatgcagttcacggcaacagcaatcatatccggataaaatccgggccgataatggccacaatcagggagtggctggtcagccggatgattttttgctgtccgagtccacgcaacagttgcctcacttctctgctgacgcccggtaaaactcagcaatccatccagcgtggccagcgaattgaaacggatatggtgaccttcggccagaaatgccccgtgccgtgccggactgagctaggacagtgcctccagcatatcttcccacgcgcggcgcagcagttgcagtga

SEQ ID NO: 188244 - DNA, 981 bp, Klebsiella oxytoca
atggcacagataagctttcgtatcagcgatgagtcaaaaatacgcgctgacaaggttctcgagcagcagggttacagtgccggcagctacctgcagggcattgtggagtacatcgcgcagaatggcaccctacctgtggtgatcgaatttcgcccggccgccttaaacccggaagaggtgtttcaggaagcaattttccagtcccgtgagacttatgttaactggaggactttttgccggaatgaattacaggtgaaccagatgacgccgctggataagctgcgcacgcatattgatgcaatcaatacggcatatgagttttatcagcgaaatgagtcggtgatccgccaggccccctcacaaatggaaaaaatcaatggcggggatcccttccatccggagatgttctcgcgttgccttgagtattttccgcctcttttcgggtacctgcgtaaggccgtaagctttgtccatatgaacaatcgcccggttcagcagggtgacctggacgaaatggagcccgtcttagtccaggctgcaaaggccattgatgagctgcaggcgatggcgaacacctcggtctccgcagagacgctggcccggtttatgctgcgcgatattcaggaagcgctgagctgtgccatggagtccacacgtgaacacatctcttatatgaccgcccgctcgtggcagcaacgaatgactcttgtactaggggaagccgagaaaaaatataagcgacttggcacatcggaacaggacgtggcgctggccaggctgagacatgacaccagacggctggccacgaaggttacagagtacgtggaaacgacatcagaaccgatgaccggatttgatacgaaccttcttgaccaggtggtggcgttttataatgaagtgctcagcctgtcgggttatatatcggcatccatccggacggatgccgatcagcctggcaattcaggtaacgacagcgcctga

SEQ ID NO: 188245 - DNA, 825 bp, Klebsiella oxytoca
atgtcatccccttccacaacagtaccggaagcagttattgccactgtaaatacattcattgctctgtgtgtcaccattgtaaatgaaggttcatcaagtcctgataaatatgtttcgcagttttatcgcttgcgtcaggaattacttgaactcgataatattatcaccattccttcatggatcagattctccatgtcacccgctgacattaagaataatgttggcttaaacgtcacaggtggcgatggagcctggggtcgaagacgtcagtatttacagaacgaatcgatgaaaatactttcaagctataaaaccgctccaattattgagcattctgttagtaagaataaaataaaaactactgagcaagtaagtgggttgacaacgatggcaagcgatgcaggtttaaacatgaagaagaaagtattcattgtccatgggcacgataataacctaaaaaatgaggtttacatttttctggcaagtgaaggtttccagcctgtcatacttcatcatgaagccaatgaaggacagaccataatcgaaaagcttgagaagcatatcgacactgtatcctatgcagtggtgctttatactgcctgtgatgaagggaaagccaagaatgaaactgaactaaaaaaaagagcccggcagaatgttgttttagagcacggctggctcatgtccaagctatcgcgtaaattcgtcgctgcgatagttgaagatggcgttgaatttccgggagacctgtccggagtggtcagaatacctgcatcagactggaaatatgatctatctaaagaattaaaagtgctcaataattaa

SEQ ID NO: 188246 - DNA, 1131 bp, Klebsiella oxytoca
atgggatataccagaaatcagcacatgctctcacagtggtttctcaggaacttccgcagtgatgatacggcacagagtccgaaggagaagcaacgggtctgggcccatgttgtggttcctgcggcagaaagcaaaaatgacataaaggacatcccgctgccgatatccagcgtggccgtctgtaaggattgctttcgtcttaccgacggtgatacaggcgaggtttttgatatcgagcatgagctcagtgattatgaacaggatatggctttgcttgtccgggatctggttcagaaccataatttcccgcgtctggctaactgtgacactgatgattttccggtagagaaacttgcaagttttgctatatttcagatgttacttaacctcaataacccgcaaagcagatttccgggtaaaaatgagttatttcagacattcattaatccagtaaaaaacaacattcagcatatcatttccgaaacaatttctttgcctgaagttatgccggagctggcgactttaagtatctatcagaaactgattcgtatagcccgttcttcttcaggggatgacgaaaaagctaaggccatgtttatattattttcccttctcgcgctacagggaaaaataacaatgattgacgcaatggccaggttacgcggagaggttttttccggaatacatcgcgtggatatatttcataccgggcatcactttgacagtacagaaccacgtccggtgtttacagtatcacctaatgtattttgcaaaatgacagaagaacgcgtcctgtaccttccccttgctcataatttggctcttgagttttatcagtatccggaacacggatttttcaccccactggaaattaatgtgttcagcccggcccctcagaaactgcttacaaaagatatgtcacgaatcaatatttataaatgctcctatgattatattgatcaggttatgtcaacaattgatatgtataacgtcggattttcaaatattatttattccagctggcagctcagtgatgtagaaaattatctgaggctgcagaacgaacatcatgatacttattatcttccggaacatcccgtttgctggactgtatccagggagaaaggctga

SEQ ID NO: 188247 - DNA, 282 bp, Klebsiella oxytoca
atggccctgaccccggaacagataagttgccggcagcagctcgtggcaacgggtgacttcaatgcccataccctgctgcccggagaggagtggaccaggccagaaaacgctgatgtccggcacgttctgttgttgatctcactgaatgacatgcagctggccgatcggctgcatgtcagggagcgtacggtccgtaaatggcgatcaggggaaaccaagatggttttcaccacctggtgctgcctgtgccaggtggccggactgggctccctgttagaataa

SEQ ID NO: 188248 - DNA, 267 bp, Klebsiella oxytoca
atggcggtagtccacgaatccgcgacggtctttcgcattacggcggttggaagcataggttttggtgaacacaagctggcccacggcatagaaccccgccgccttccacgcggccataaagcggtccacccggttccagccgtagaaactgaccatcagggcgtcctgtttgaggacgcggtacatctcctgcgtagccggttgcagccattcgtccgtcacatccccggcaatctgtctgccctgacggtccttaaagcccactaa

SEQ ID NO: 188249 - DNA, 591 bp, Klebsiella oxytoca
atgaactttgatgccgtacaggttgatataaacgatattctttcagttaacagacgttacgttatcccccgaaatcagcgggacttcagctgggaaaaacttcagcttgatgagttctgggatgatattaggagaaacattcagtacgagaacgagagcttcagccatgctgagtacttcctcgggacagtcgttttatcaggcacaaccgacagttcaatgctggaaataattgatggtcaacaacgtctttctgttataactattctgatatcactcatttccagaaagctcagagctcttaactatatagagagcgcggatgatatagttaatacctatcttgtatcaaaggcatccattatctcagcgaaagcacatctcacagaaaaaatatctaaaagcaacggacgtgacttttttaaacttaaatgtcagtcgaaagaggattgtcatccaaaggttaaatctgatgaagacgaaaagataaactacgcctacacttactttgaaaaaagattagaaaaacaggaagcatgtaagttacttaataaaagcaaaaaaggggtaaggtattcagaggaagagtag

SEQ ID NO: 188250 - DNA, 1827 bp, Klebsiella oxytoca
atgcggctcagaaaattaaaactgaaaaacttcagaggctacagaaactctactgaaatcattattgatgaaagcatgacgggtattgtcggtcgtaatgactttgggaaatcaacgattctggaagcgctggctattttttttgaaacagaaggaatgaaggctgacaagaatgacatgaactgtttcagcctaagagaaggggacggccgttttgaaatagcctgtgaatttgatgacctgcccgattttatcatgatcgacgacagggtgcagaccacgctcgcctcagaacatctgctgaatgaagacggcaattttgaaatcgtcaaaacgtttaaagcaacgacctcaggaaaaccggagcagacctgcatccgctgcatccatcccgaagaggagcccctgagaaacttactggcaatgaaaatttccgagctcagggcggtgggaaaagaagctgaaaaaaatgtggcggataaacgcactgcatcgttatggcgtcaggccatcagggaagccgccgctccctatacctgttctgaaatgttgctggatgtcgataaagagtttggaaccgacacaaaatcattatggggtaagatcctcgatttgctgcccacgtatgcgattttcaaagccgacagggaaagcagcgacggggattcagaagctaaaaaccccttacagcaggccgtaaaagacgctcaggctgcgctgcaggacaaaattacagcgctggaaaatgagatccaggacagcgtactggatgtcgcacagagaacgctggataaattacgtgaaatggcccccgaactcgccagtgaactgactccacgatttaaggagaaacccaagtggaccttcagtttcaccctggacggggaaaatggcatccccatcaataagcgcggcagcgggataaggaggcttatcctgttgaattttttccgggctgaggccgagaagcatgtcgcggggacgcccagaaatgtgatttatgccatagaggagcctgaaacgtcacagcatccgaactatcagatgatgctgatgaaagcgttactggcactggcaggccagccgcaccgtcagattatcgtcaccacccatgtcccggcgctggccggattgatccctgtcgaaggcgtacgttatgtcacccgaaatgaggcgggtgaacccgtagtaaaaatgccggatgacgctgtgctgaaggaagccactgaaagcctgggggtgctgccagagaccggtatggaaagggcgcaggggatagttctggtagagggaaagtcggatgtcactttcctgaggcatgcggccagttcattaaaacagtcaggtatgttgccagcctctctggaggacgtgaaaatagtgccagtcctcataggagggtgtggcagcgtcaaacactgggtgacattgaatctggccaacgatctggggcttccctggtgcgtatttctggactccgatattgggggagaccctgcacaggttctgtccattcagaaacgtaaaaaagaagtggaggatgccggtaaggtattcttcgccacgcgcaaacgtgaaatagagaactatctctgcccggatctgattgaagaaatgaccggtgtagccgtcacgtttacggacacctgtgatgctaaaaaaataattggccgggcggtgggaatgaaacccgataatgtgcttgataaattctggccccggatgacagcggaaagaatcatctcaagatcaacctatcatgacggaatgcaggaaaggattgagctggttgagatcctgagcgatattgttgccatgacgagataa

SEQ ID NO: 188251 - DNA, 1125 bp, Klebsiella oxytoca; identical to SEQ ID NO: 101432

SEQ ID NO: 188252 - DNA, 270 bp, Klebsiella oxytoca; identical to SEQ ID NO: 101431

SEQ ID NO: 188253 - DNA, 690 bp, Klebsiella oxytoca; identical to SEQ ID NO: 101430

SEQ ID NO: 188254 - DNA, 738 bp, Klebsiella oxytoca; identical to SEQ ID NO: 101429

SEQ ID NO: 188255 - DNA, 138 bp, Klebsiella oxytoca
atgacggggacttccatgaccatacacagctctgtttttgccctgccagacatagaattccgtcagtgcaaaaagcttattgatgtcatgagaatgatcggcattcaggtgatgcacattgccgtgggaatgaaataa

SEQ ID NO: 188256 - DNA, 1197 bp, Klebsiella oxytoca
atgacccaaacaacgactgcaagcaattcgcgcctgatgttaaccgtcgggctctgttttatggtggcactgatggaagggctggatctgcaggcggcaggcatcgccgccgtaggcatggcgcaggcgttcgcgctggataaaatgcagatgggctggattttcagcgccgggatcctcggcctgctgcccggcgcgctggtgggcggcatgctggcggatcgctatggccgcaagcgaattctgctgggctcggtgctgctctttggcctgttctcaatcgctaccgcgctggtgtggaattatcccacgctgctgctggcccggctgctgaccggcgtcggcctgggcgcggcgctgccgaatctgattgccttaacctccgaggccgccggcccccgctttcgcggcagggcggttagcctgatgtactgcggcgtccccatcggcgcggcgctggcggcggcgctgggctttttcggccttgccgcggcctggcaaacggtgttctggatcggcggtatcgttccgctgctgctggtgccgctgctgctgcgctggctgccggaatcgccggtgtttcagcgcagcgcgcggggcgtgccgctgcgcacgctcctcgcgccgggcaacgctaccgccacgctgctgctgtggctgtgctattttttcacgctgctggtggtctatatgctgatcaactggctgccgatgctgctagtcggccaggggttcagccccagcgaggcggcgggggtgatgtttgtcctgcagtttggcgccgcctgcggcacgctgctgctgggggcgctgatggataagctcagcccgctgtggatgtcgctgctgatctataccggcatgctggcgtcgctgctggcgctggggaccgcgtcctcgctgaccgcaatgctcttctccggctttgtcgccggactgtttgccaccggcggccagagcgtgctttacgcgctggctccgctgttctatcgcaccgaaatccgcgccaccggcgtagggacggcggtggcgattggccgtctcggcgcgatgagcggtccgctgctggcgggcaaaatgctggcgctgggcaccggcaccgtcggggtgatggccgcgtccgctcccggcattctgctggcgggcgcggcggtgttctggctgatgagccgacaaaaacgcacggcgctggcctga

SEQ ID NO: 188257 - DNA, 249 bp, Klebsiella oxytoca
gtgcgcggtcggagtggtcacgacaaggcaagggccgtagtcgtggcgtatctccgcgttagcgggccggtagggccgcttacgagcgtgtactctgaactcaccgcgtcacctctcacagcgactaatcccctagttacaacatccatcattaaaagcgacactactcccggccttcggccgggggcggcggcgcttttcagtggtggggaggggcacctggccggcaaaccggcgccggttttgtga

SEQ ID NO: 188258 - DNA, 1077 bp, Klebsiella oxytoca
atgggggagaaccgtaaccggcgcgtgtggattttcgccgacgagctccccacgctgcacaagctgccggacctggtcgaaatcctccctgaggcgcgtaaatttggtggttgttatgtgtttggtattcagtcctatgcccagctggaagacatctatggcgtcaagcctgccgccacgctctttgacgtgatgaacacccgggccttcttccgctccccgagtaaggagattgcggagtttgctgccggtgaaattggcgagaaggaaatcctcaaggccagtgagcagtactcctacggtgctgacccggtgcgtgatggtgtatcgaccgggaaagaaaaagagcgggaaacgctggtcagttactccgatattcagacgctgcctgacctgtcctgctatgtcacgctgcccgggccgtatccggccgtgaaactggccctcaaatacaagccgcgtccgaaaattgccgagggatttattcctcgcactctcgatgcgcgggtggatgcgcggctcagtgcgttgcttgaagcgcgggaagctgaaggcagtcttgccagggcacttttcacgccggatgcgccggcatccgggaccgctgatacaaacagtcacgccggtgaacagcctgagccggtcagtcagcctgcgccagcagaagtgacagtatctccggcaccggtaaaagcgccggcgacaacgaagatgccggcagcggaaccctccgccaggacagctgagcctcccgtcctgcgggtcacgaccgtaccgttgatcaaaccaaaagcagccgcagcggccgctgctgccgcaacagcatcctctgccggtacccctgctgcagctgcaggcgggacagaacaggagctggcgcagcagtccgcagagcaggggcaggacatgctgccggccggtatgaacaaggacggcgtcatcgaggacatgcaggcgtatgacgcctgggctgatgagcagacactgcgggatatgcagcggcgtgaggaagtcaatatcaaccacagccaccgccacgatgagcaggatgatgtcgagattggggggaacttctga

SEQ ID NO: 188259 - DNA, 510 bp, Klebsiella oxytoca; identical to SEQ ID NO: 183798

SEQ ID NO: 188260 - DNA, 726 bp, Klebsiella oxytoca; identical to SEQ ID NO: 183797

SEQ ID NO: 188261 - DNA, 240 bp, Klebsiella oxytoca; identical to SEQ ID NO: 117438

SEQ ID NO: 188262 - DNA, 702 bp, Klebsiella oxytoca
atgtgtgcgatggatcgtagtagtgatgacagcttaagtcaatcggttagggatgctcttcttcacataaaggggttgtataacatctcgcctgtctctgtttgcgtaagaaaccaacaacgtgatgtactatattccaacacatcatttgaacaaatgtatgacttttttaaaacagaatgtgtagcaggtagtttttctggaacgttttatgaattagagttgatgttttcccaattagaacttgattgcatggtgctaggtaaaggctgtgttttaagtaaaattttttcgtgtggaaaatcgaattttcaaattcggattgagtgtatcagtcttttggatgatgatttttattttttttggcaaataaatcttctgataacggttccattacccagccggaaaatggaggttatcaaatcaaaaggtaattcagattttgatgaggctatttcaaagataagtgatttgaatataattcctctttcattttatgttcttggctttagctatttggatatatcaagttatatctgtgtgtctgaaaaaattgtgaaaaaaagaatcgatcgttcgaaagagaaagtactggagaactatccttcttttagctcatttatatcggattgttacaagaccaggaaaatatattttttcattgagaatgtttacgaatatataatgttaatgaagtgttaa

SEQ ID NO: 188263 - DNA, 681 bp, Klebsiella oxytoca
gtgaatgaatcagtaataaaaaccgaaaatgtgttcctcttctggagagccattgaagcattaacccctcaggatattgataaggaaaatgcccgggacaaactcaacccggtttacaaagtaggcgcaggagccatgcttccctgggatgacccggctcatacccgtaaggatgttgggcctggcaaagtgtggcgctactccgctcaggcgggggtttatcatttaagtgtgattaccaaaatgctggaggataaaatcggtgcccatgaagcggtacctgaagaacgcaaatcagggaaatgcaggctttttgatattggtttcaatgaagaaggcatcccccagccagccacattcatgttatccctgtctgcatggtcggcggctcagatactcaggcatgatcgcggcgtttatgctcttcatgctcccctttgctccgatgtgtcagacctgcccgcaccaaacgacagcctcccgctggtggatagcggtttttacgattttgataatctgacccttcatctcatgcagtgggtggacattgaggcttatcgattacaggaggagggacagaaggccgatacaggatggttgaagacgcttgagaaactttgcatccatgccccggatgttcagggatgcaggtcaggaagcgataggctggttgctgattga

SEQ ID NO: 188264 - DNA, 636 bp, Klebsiella oxytoca; identical to SEQ ID NO: 101436

SEQ ID NO: 188265 - DNA, 654 bp, Klebsiella oxytoca
atgggacgctggcttgccggcaggctcatgaaagaactggggctggtgagttgtcagcagcctacccaccggtataaacgtggtggtcatgaacacattgttatcccgaatcaccttgagcgacagttcgcagtgacagaacctaaccaagtgtggtgcggcgatgtgacgtatatctggacaggtaaacgttgggcttacctcgctgttgttctcgatctgttcgcaaggaaaccggtgggctgggcaatgtcattctcgccggacagcaagctgaccatcaaagcgctggaaatggcgtgggaagctcgcggtaaaccagccggagtgatgctccacagtgaccaaggtagccactatacaagcaggcagttccggcagttactgtggcgttgccggatcaggcagagtatgagccgacgtggaaactgttgggacaacagcccgatggaacgcttcttccggagtctgaaaaacgagtgggtgccagtgacaggttatataaactttagcgaagctgctcatgcgatcacagactatatcgtcggatattacagctcgctaaggccgcatgactataacggtggattacccccaaacgaatcggaaaaccgatactggaaaaactctaaagcggtggccagttttagttga

SEQ ID NO: 188266 - DNA, 243 bp, Klebsiella oxytoca; identical to SEQ ID NO: 101438

SEQ ID NO: 188267 - DNA, 1194 bp, Klebsiella oxytoca
atgcctgcctgccgagtatgtcagaatttcttccgggatgctttagctccgtttcacaaataccgacaaaatgcccttcttgacgccacgcttgccttaatcaacggcgcgtcactgacgctgaccagtatcggacgttatttacccggcgctgctcaggtcaaaaacaaaatcaaacgagttgatcgtctactgggcaataaatcactccatcaggatattcctctgattttcaatggcattatcaccatgctgacacggaaattatcgctgtgtgttattgcggttgactggagtggctatccgtctcaggaatatcatgtgctccgcgccagtctgctttgcgatgggcgttcgcttccgctgttaagctggatagtcccgtcagaaaagcagcagaatggacagatacaaaaggccttccttgatgcccttgccggggcggtgaacccgacggccagagtcatcatcgttaccgatgcgggcttccagaatgcctggttccggcatatccggtcgctcggatgggattttattggccgtgtcaggggtaatatccagatgcgcctgaacagcaaaggtgaatcctggttcagacgtcaggaattacaggccagcagtaaacccgaatatctggggccaggcacgcttgcacgggcggaatatgcccggtgtgagggacatttttatctgcacaggaaagaaccaaaatgccggaaacaccggcactcacggtgtcgtataaaacgcaaatctcaggttcgcgacgggcgctcttcagcaaaagagccgtggctcatcttcagcagcacagacgactttaagccacgtgaaatcatgaagttatacagtcgccgaatgcagatagagcagaacttccgcgatgagaaaagcgaacggttcgggttcggtctgcgggccagttacagccgttcagcgggaagaatgctggtgctgagcctgctggcaacgctgagcacaatagtcctgtggcttattggttatcatgcagaaagtaaaggattacatgtaaggtatcaggccaacagtgttaaatcgcggcgggtaatctcttatctgacgttagcggagaatgtcctgcgacactccccgctaatattaaggcgaacggtgctgagcaccgttcttaaccacctcgccagagcctaccgaagtatggtgctggtttattag

SEQ ID NO: 188268 - DNA, 207 bp, Klebsiella oxytoca
atggattgtgtgtatctggatcccggagtgaaagccgatgagaaacgacaatcgctgcaaactatgcaggaagctctgcagtgtacttcatcggttagcttctggtactgcctctggtgcgacgtgcattttgaaggaaaaaacgttgttctaaatgcggaacagggatctactcattcgaggactgcagccagaggagatcactaa

SEQ ID NO: 188269 - DNA, 411 bp, Klebsiella oxytoca
atgtacgcaaaatccttcatggcccctgacggcaacggtcgttttaccagtgctaggactgcacagaccaccccttacgacaggtatacctgccacctctacggcagtgcactgcgataccatccggaatacgacacggaacggccgtggttcgaacaccagaccaacaaactgacggagaatggtctacagcactgtccgtatgccaggccgaatcggaaaaagacacaactgatacggcaactgcaatcttatgtaccggatgtatacccgctggttatccaggccgactggcactgtaacggctgtgacagggactaccccggtcaacgctactgtctgacttgtcgcaccggaaagttctgcacggttgcagcgccagtgaccagggagggaatatgcgaatactga

SEQ ID NO: 188270 - DNA, 180 bp, Klebsiella oxytoca
gtggccgaatcgttcttcagttcgctgaaaaaagaacggatcagaaaacgcatatataaaacccgggatctggcccgggcggatatcttcgattacattgaagtgttctacaaccgggcccggcgccacagccacctcggcggcgtcagcccggaggccttcgaacaggcctcgtcgtga

SEQ ID NO: 188271 - DNA, 477 bp, Klebsiella oxytoca
atgggtgtcagcgttggaggagataaacagccagccattgggtcggtcctcacggacaccgcgcatccagtccctgatagtgaacggctccccgttcttctcgatgccctgcaggtagcgaatagccttgacgtagttggtcagcacggcacgaatggagatggccgttttctcaattttctcttcaaccaggttcgctgccggcgtgttctgcagataggcgcgcagcttgtcgattttaatggacagcatggtatcaaccagcttctcgtagctgcgatccttgtcttcacgcatcaggtacgcgccttcggcaaagatagtgcgaccggagccctgccagaacgggtcttctttggtgcccatcgggataagggtgttggagatgttgtcgaagtccggcagcgtcaggcactctttccacaaatcccaggccgcgcagcgcgagtccagcgggttgaggattttatccagtga

SEQ ID NO: 188272 - DNA, 732 bp, Klebsiella oxytoca
atgaagcttaataaagtcatggctgtgatggtcgtcagctctgcgctggtgttatctggatgtagtgcaatgggaaccgctattaaaaagagaaatctggaagtaaaaacccagatgagcgaaacaatctggctggaaccttcaaataacaagacggtttatctgcaaatcaaaaatacctctgataaggatatgagtggcctgcaggcaaaaattgccagcgccgtcacttcaaagggatatcaggtcgtcagtaacccggatacggcgggctactggatccaggcaaacgtgctcaaggccgataaaatggaccttcgtgagtctcagggctggttaagccggggttatgagggggcagtgactggcgccgctcttggggcggggattaccgcttacaactccagttctgcgggagcaaccctgggggtagggcttgcggctggtctggtcgggatggctgctgacgcgatggtggaagatgtgaactacaccatgatcaccgatgttcagatcgcagaaagaaccaaaactcaggttcagactgataacgtggccgtattgcgtcagggaacatccggtgcaaaagtgcagacaagtacggaaacaggtaatcagcacaaataccagactcgcgtcgtctcgaacgctaacaaagttaacctcaagttccctgaagcccagcctgttcttgaagaccagctggcaaaatcgatcgcaaatattctgtag

SEQ ID NO: 188273 - DNA, 525 bp, Klebsiella oxytoca
atgttaacccatcaaataatacaaggtgaaattgacgagttaaaactagttctgactgagaaggatttaacgatcccctcattctggaattgtatctggcctggcttgacttttatgttttggtttttactttcatcatatttttcatatgggataagtgatttttctacgggtcttgatagaatttcatcaatggtttttgcggcagttgtgggcattttctctatcattgcaaccgcgaatacccgctcactcttcctttctttacctgagtctttcaggaaaaagtcgttgttctttggttttttagcaaagaaatgcagagcttatggagcggttatttttactatattcccatgcctggcgtttttttctgcatataacggaattaatgcggttgtttttattgttgttaccggtttcagtcttttattaacacttatggttatgaatattgaccttagtcgttatcagttggcgaccctgacgtctgttattgaatcggttagaaatcatgaacggtga

SEQ ID NO: 188274 - DNA, 1596 bp, Klebsiella oxytoca
atgaaaatttatcgtccactgtggaacgagggggctttactgtcccctcaacagttccagcagcaggctgaatgggagtcttttcgcagtgccggtgcatcagcgctggcatccccattcccctggggtgtggaaaaggttgagtttaatgacagtcttctctcgtccggtctgatccagattgcctgtgacgcgttactgttgaagcccgcgtcatttactttccagaccccgatgtttgacggaacaccggccctgccggtcaggacggtattcggcgtggtggagtcgtttcgccgcgtgtccacctcgaatgatgagacccggtacgtgctgacgatcgttccccgtatcgcccttctggactatacgaaagggagcgagatctacctcaatcagtcggttattgaggtggttgaacaggtactgcgtaaacacggtctggaagggcctgattttgagttccggctctcccgggagtatccctcccgggaactcatcacccagtggcgggaaactgaccttgagtttattcagcgcctgctggcggaggtgggcatttactggcgctatgaaatggacagccgtcttgaacaggacgtggtgatttttcaggacagtcagcagcagtatgaatttggcgtcacgctgccgttacgcaaccaggccgggatgagtgacagcgggcaggagagcatctgggatattcagactgcatacaatgtcgtgagtggaagtgtggccacccgggactacaactaccgtgaagcgcttacgcctcaggacagtgccgaaagcattttcagcaaggaagggatcactaccggggaaacgtaccattatgcggaacccttcctgacagcaggtgacgctgcaagcactgaaaccggggcctacttcgcccgcctgcgtcacgaacgcattctgaacgcgcagtatcgcgtcagcgggcattcctccagccctcatctggccccgggtcaggtactggaaacggacggcacgttacccgatgccgtcagggaaggcatcgtcatcaccacggtgcgcaccagcggttcacgcaaaagtagctttacgctggcgtttgagggcatcccgtatagcgaaaccgtatgctggcgtccggcactgctcagtcgcccggtgatatccggctcgttacctgcccgggtggaaagcacgcagaaaggcgacacctattcctggctcgatccggatggacgttacggcacgacagcgacgtatataaggaaggtgaagcggacgatgtcggcgggcgcggcgagtatgccattaaatctgcctgtgatgccactaactgaaggctttagggaatacttcattattcacgaccagaaaaccgggaaaccacttgaaaacttcccttacacgctgaatgtcaatggtaatgaactcagtggaaaaacgaatacccaaggatgcacacaatgtggctggacccgacagagcgaaaatattgaactgataccacatactgaacaatttaaccgtgtacttattaatgccagatactgggatgaaaaatcatctgtagatcttgatttttccagaactaatatggaaggtgaataa

SEQ ID NO: 188275 - DNA, 1308 bp, Klebsiella oxytoca
atggcatcagggaaaaaatctgccacaataccgggtacatcgaccaagaaaacacccacagtaatccaacctgcaggaacagttgcgcaggtcacaaaccccctggacttatggtatctgtgtgaaaaagtaaactacgcattaaagtttcccaaaattagttccagcggggcaattttatatcagcgagtggtgaccagactcattcggtttgatgatagaaattttgactatcattttccttatattggagaggtggggtatgacatgacacggaatcctcccgctccaattatgagtcagcgtaatccaaactggccgagcagtttcccgttatcaaaattctgggcaataaaaaaaggttatgatttccgaatgcgcggcttgggaataagtgatgttgtggttgaacgtatcagtgagttaatgccccttgatgaactggaaaatatccttggtccagagttgcgtagtcagtctgggaaatctaaggcagtgcctaatgatctggagaatcttttaaaaggcaagcgcggtttatttcgtattcccgatgttatccgaattaacaataccatgcttactggaaagcaggcttttactcagcagaatatccacactgttattgaaatcaagtttccaggtgataagctttcacctgaacagcaaattgcatatcaacgaattgccggtgataggcaaaagtttcgattgttggaaacaaaagtttgccagatagatggtaaacgcaaaagagaatggattcgtgacgctaaaaaagaaccagtatatctacctgtaggattggccgggcataaaccactacccgaaggtatggagccttatcccctattggaaggtgaaatacaacaggagtttgaagcagtacaacaacattttgctccccttataccggcgaattatgatatgccacgtctggaacccatgcctgatcctgctttgctggcaatgcaacaacaacaactggaacaggcacgtggtcaattgggtatggctgtaggtggtccattttttgcaatcagtggagggatagttctcgtaactggagtaggggcgcttcccgctgtaggtttcggggggctcgaattactggggaaagcaggtgaacaggttgtccgctatgctacatcgttgttagtcggtggtggaagtgtaaggtatgctacagccagtcaggacgagcagccttcgacgaaattacagcaaaaatattctgatgatggaatatcaaagtttctgattgatgtgaccagaacgcaacaagaatgcatctactggcctgattaa

SEQ ID NO: 188276 - DNA, 1197 bp, Klebsiella oxytoca
atggatttttttgagagatttaaacaggctgaatatgagtttacctatggtgcactggacgatccagaaaaccataatgcacttcaggttggactcgttgcatatttttacattgataaaggctacttgcctgaaaaaagacaggcattaatcgctgctctcgaactctatcaccaaaaatttggtgatagattgaaatggagtttcttcaaagatcctaacaaaccagaccgttactcagagaatgtgttaaaaagatatcagaaaaaaataattgattcggatggcgatcatgtagattgttggtgtgcttctgaggaggggtttgaatatgcgagtgattattgtgtgcaaatgctatcgtcagcagactggtttgagtatgtacatttcccggtaacttatttttctttttatctgccagtatcggaactaaaatacaacgaagatattgagaattttctcgttgaattttgtgatattctcaagccgttgcatggcctaatgggactggggattcaacaatgccaggaacgtgataaattccaacatatggagtatgaagtctgccaggattttttagggctggatattacaaatgataatactgatgagcatttcagaaaaggtattcgctcagttaattggtatactttctttaatgatcattggcttgataaactaggtggttttgcttttttgcagtcttcaattaacgaatcacgtataaaaattaataagtataatggcggtgtcattattcgtgctggagaatggcctgagttgggatggataaaagatatgccatatccagaattgtacttgaaggtgaataaagctttgaaacctatacgtgcgccagaaattggtagcctggggtatggctctattgcaggagaaattcgctttgatgagagctctacggctaaatggttatctcgttttgatgtggatttaccttcgataacgatcgccccaccagtagacaatccggttcgtatcactcgctggaccgacgagatagccccttatgccgggcagtgggcttcgattgttaatggaacaactgaatatatccagacgagagaagggcaaaagatgcctgcctttgaagataaatacggtaaaaagcacagagcatgttggtcgctgctgaagcgtgatgataaaggtagcgtatttattattccggactga

SEQ ID NO: 188277 - DNA, 1086 bp, Klebsiella oxytoca
gtgctgcgtaaacacggtctggaaggtccagattttgaattcagactggagcgcacctatccggcgcgcgaaattatcactcagtggcaggagacggatctgcaattcatccagcgcattctgtctgaggtgggaatttactggcgctcgatgatggacgatgtgcgcggtctggatacgtacatttttgcggacagccagcttaactaccagtttgatgtgcgcctgccgtacagcgagccatcggggttgttcgacggcgcggcagaatcggtctgggatgtgcggacctggcacaacatagccaccggcactgtcgtcacgcgggattacaactaccggaccgccaccacgccgatggatgcggcggtgagtgtgcgcagtgatgcggtcaccaccggggagcattaccgctacgcggcaccttatcgtgaagcgggcgatgacgccagcccggagccggaaaccgaatctggcgcattctacgcccgacttcaccacgagcgggagctcaacaggtcggcacgcattcacctgttcagcaatgctgcacacctcactcccgggcaggtgctggagccgcagggcgatgtcattacggccctgcaagaaggcgtgatcctcacgctggtgaccttccggggcgcccgggattcccgtctgcatgtgtcggtctggggccagccttacaccgagcgttactgtttccgcccggcggaaatcccgcgtccggaaattcacggcacgcttccggcccggtttgagagccgggagaagaacgatatatacgctcacctggatgagcaggggcgctaccgggtgaagccggacttcgaccgggagagcacggagccgggctacggctatctttggctgcggatggcgaagccgtactctggtgatacatacggctggcacaccccgctcaccgacggtaccgaagtggccatcgcgtacagcagaggcggcatcgacctgccgtatatttcccacactttacatgactctgaacatccggaccccgttacccgtgacaaccgcacccgcaacgggccacagccccggcaaacaacacgctgtggatga

SEQ ID NO: 188278 - DNA, 1932 bp, Klebsiella oxytoca
atgttaaaattacctaatatttacatcgtttctcctttacaagcgctctctctagaagctgaacgcctgtctatccgatataatcacatcgcaaatataacgatattaaatgccacccttgacgatgttgattccgtgatcccgatattgcgcacgaattcccctgatcttgtgattagtcgcggtggcatggcatggatgcttaaacaaaaaataccgcagcctgtcattgaaataaaaacatccgcttatgatattatcgatgccctcaggccatatcttgggctcaataaaaatattggggttattgggtttcgcagcgttatcgacggctgtatgaaaatagccaggatgcttaatctgcaactcactgagtttatcattgacgaaatggccaacccttgcattgagaatgtcaggaatgactttgtcaattacacacaaaataaccagatagatcttattattggcgatgccatttgcccactttattttggcacacacagcatggaacatttcatccctttccattcaggtgtcgagtccatagaactggcattacatgaggcaattcagctgtatcaggcgctcgctaatgagcgcattgagcaaaaccagctaaacctgttacttgaccacaccaataaattcattcttctcattgataattgcggtaaggtcattcactgtaatcataaagccgtcgagcttttacaactcagtaaacatgatttaatcaataaaaaaataccttccttaacgctaaactgggaagacctgcaaaataatatcccgatagaaaatgagttaatcaacacaccctatggcgaatttgtggttaaccagttccccattgtagaaaacgaaaatctcaaccgcgtggtgatcaccctccagacatcatctaacttacagaatgctgagcagaagataagaatcaaagaagcgaaaaagttaggatttcacgccaggtatcacttcgaagattttattacctgcaaccgtgaaatgcaggctcgcttaaggttagccaggatatatgcggaaaccgaagcaacaatactgctactcggtgaaaatggtaccggcaaagaggttctggcgcagagcattcataacgccagttcacatcgcaatgggccatttgttgcggttaactgcggcgcaatccccgcttcaattatggaaagcgaactctttggatatgtcgatggcgcgttttccggtgcctctaaaaaaggccgcgccgggatgtttgaactggcgcataacggcaccatctttcttgatgaaatcagcgaactggataagttcttacaagcaaaactcttacgcattctgcaggagcgccaactgatgcgcctgggcgcagatcacatgattccggtcaacgtccgcgttattgcggccacaaaccgaaacttaccggcaatgattgcagccggtgattttagagaagaccttttttatcgcttgaatgtgctcaaggtcaccacattaccgttacgtgaacgcccggacgatatccaacttattgggcaaacaactttagatgcgctgggaaagtcctatcagttgcctcccattgcattgagcgaaagtttatggagtgagctaaaaaaatatttatggccgggtaacgtacgtcagttgaataatattatggagcgcctggcgttatcgttttcatccggcgtggtgtctctttctgccgccacgttactgattgaggatttacaagccgataaagcgtcttccccccaacaacctcgccatcactgcccggactgccagttgctcgaagggccgtataaacggatccgtagccgtattctcaaaggggtgctactacgacagcaaaacaacaaaagccgtgcagcgaagcaactggatattgaccgtagctcgttcacccgttggcttggtgattga

SEQ ID NO: 188279 - DNA, 918 bp, Klebsiella oxytoca
atggtaatcccgttattgatcggagcattattaaagacattttgtcctggtgctttagaaatagggagcttttcgacggcggtagctcatggcgctctcgctatcctgggcgtattttttgtctgtatgggcgctgaaatccgcctacaggccgcgccggtcgccctgaaaaaagggttcgccattatgctgtccaagttggttgtcgggacagcaattggcttactggtcgcaaagttttgcggcgccaacggcttctttggtttgtctgcactcgccattatcgcggccatgaccaatgcgaatatgggcctctacgctgcactgaccaaacagtttggcaatgaaaccgatgcgggcgctatcgctgtgctttccgtacttgaaggcccctttctgacgatggtggcgatgggtgccgctgggctggtgtcgatcccaataatggagctgttcgccgttgttttaccgatactgattggtatgctgctcggaaatctggatgaggatatgcgttcgttcctgaaaagcggcggcgcgatgctgatccccttcttctcttttggtctgggtaccggaatcgatttcagcaccctgctgatggccggattcgcaggggttattctgggtctcatgaccgcattcattggcgcgctgattaatgttgccgtctcccgttttgtcggaggttcaggcatcgccggagcggcagtctccacgacagccggtaacgccgttgcgacccccgcagccatcgccgcggttgaccccagcgtgtcagcattaatcgccgtagcgacgccgcagattgccgcctctacgatcgtcacctccttagtcgtaccgtttataaccgcctgggttgctcgccgcgaacaaaggagaatcgcccaacgccagcagttatcaaaaacataa

SEQ ID NO: 188280 - DNA, 1164 bp, Klebsiella oxytoca
atgaaaaaaacaatcaaaggttatcgtcgtccggatggcagcgtgggtattcgcaactacgtcttaattttacctaccagcgtttgcgccaataaagtcgctcaggacatctccgctcaggttcatggctcaacctggcttaataatgattttggttgctgccagattgctggtgatgctgcattaaccgaaaaaacactgatcaacgttgccaggaacggcaacgttggcgccatactcgttgtcggactgggttgtgaaggcgctgaacctactcacattgcgcaagaaatcacgaaatttggtaagccggtttcctgcatcacaattcagaatgaaggggggaccttgcagtgtcaggcgcgcggaatttcaatcgcacgtcagtatgcgcaggatttgtcccagcaagactacgaagaaataagcgtcagcgagttgatcctcggaatggaatgcggaggttctgataccacctctggcctcgcctccaaccctgcctgcggtgttgcatctgatttgttagttaacgatggtggcacatcgattctttcagaaaccaccgaattcattggcgcagaacacgttgttgctcgtcgggccattaattcacaagtcgcagacgatttaatcaagctggttgtggggtgtgaagaaagagcgaaagccctgggcgcagatatcaggggcgggcaaccgacgccaggtaatatccagggcggtatcaccaccattgaggaaaaatctctgggctgcatgcacaaagcgggtcattcaccgctacagggcgtcctgcaatacgcagatttccctggcggtcgtggactatgggtgatggactcccctggacaagatatcgaatccatctccgggatggtggccggcggcgcacaaattattatctttactaccgggcgcggaacccccacgggaaacccgattgcgccagtgatcaaaatcaccgccaacgaagaaacatttaccaaaatgcgcgacaacattgatattgatgtttcatcgattatgcggggagaatcttctattaatgagatgggcgaggtgatttatcaggaaatcattaaggtttctaatggtaaaacaaccaaagctgaagatcttgggcataaggaattctctatttacaagatcgcaccaacattttaa

SEQ ID NO: 188281 - DNA, 291 bp, Klebsiella oxytoca
atgaagaaaaatgcagtggttattaacccgcaagatagcgttgctactgctatccagcccctcaaggccggagacgtcgccaacatgtttgttggcaatgaaaatctgaccatcaccttacgggatgacatcccttacggtcataaatttgccattaaagccgttgcgcttcatggcgaagtttacaaatacggtgaatccattggtcgggcaacaaagtctatccagaccggagattatgttcatgttcataatgttgaaagtgaacgtggccgtggggattggaaataa

SEQ ID NO: 188282 - DNA, 495 bp, Klebsiella oxytoca
atgattaacatccggatgaccaaattagccattttccctttggctgtttttattttatttgctcctctgacttcctttgccgaaactttcccggcgaaagtggtgcgagttattgatggtgatactgtccaggtttatgacggtgccacaaataccagaatacggctctacgggattgatgccccggagagtaaacaagccttcggtcagaaggcaaagcaagccatgatccagctggccgcaaaccaggttgttgttattcagaaccacgggcaggacgtatatggtcgtatgcttggtaccatctatctgaacaaccaggatcttaatgccgttatggtcgcagaaggcatggcctgggcatatcgctatcagggccggttaactgtacctcaatatggctctcttgagcagaacgcccgtaatgcaggtaaagggctgtggtcggacccatacgctgtcgagccacgtcagtggcgtaaagcgaataattaa

SEQ ID NO: 188283 - DNA, 573 bp, Klebsiella oxytoca; identical to SEQ ID NO: 101454

SEQ ID NO: 188284 - DNA, 609 bp, Klebsiella oxytoca; identical to SEQ ID NO: 101453

SEQ ID NO: 188285 - DNA, 204 bp, Klebsiella oxytoca; identical to SEQ ID NO: 92423

SEQ ID NO: 188286 - DNA, 369 bp, Klebsiella oxytoca; identical to SEQ ID NO: 92424

SEQ ID NO: 188287 - DNA, 249 bp, Klebsiella oxytoca
atgtatgaagatatgttgttttcgctcagctatgagcagatgacgcagatggcagaagaggaaataaagcaatgcgattttcgcagggatggcacccattatgtccgggaagtgaacaaggctcatgacatcctccgcttctggtatctcctggcgctgcgtggacacactggcctggccacaacacgggtcgaagcagactataaacggcttaaaacgctcatttcccagaggaatgagggacaatga

SEQ ID NO: 188288 - DNA, 402 bp, Klebsiella oxytoca
atgaacagaactaatggcgaaccagagacagaaacagacgtgatggccaccgctttcagcaccatgcgcaagtacggcatgaatatcatcaccgccacgcagcatatggatattaatgcttacgtgaaatccgatccgcggatgccgagaacgcggctgcgtcgttacctgggacagtgcggcctgcgcggtgaggccctgagcgcggaggtaagacgtatcgtcgctggccctgaacgaccagataacacgctgaaagccggaatcttctatacgtggccctatggctgggagcctgcggatttcacgccagtgatgaggcgcattttcaagggaaagcgcacccgccatgtgatgttgtttgatgaactgcctcagctgtttggcaagaatgactattga

SEQ ID NO: 188289 - DNA, 300 bp, Klebsiella oxytoca
gtggagacagaagttctggatttcggagttcagcagtatcggcagatcgccaattttaatatccgaagccataccgtcgcgcttcatctggcgcgccacgtctttgggtttatcggacaactggcgcccgccggtattctcatcctcgctctgctgtttaccctgacggcccagcacccagctggcaacaaagaacgtcacgatacagataacgagggaaacgacggccgcaaacacaaaactggtccacagctgctcaccgcaccagatagtgtatttatcggccaggatttgttctga

SEQ ID NO: 188290 - DNA, 1107 bp, Klebsiella oxytoca
atgaacctcgtctttgttcagtcgctaatccgcgaccgttttttgcatctgctgctgatcgtcggcgttgttttaagcttttttgttccgtttgtccctgcaggctggctacacgccattgactggcatacgattatcacccttagcgggctgatgctactgaccaaaggtattgaactgagcggctattttgacgtaataggtcgcaaaatggcgcgccgctttgtgaccgagcgccagctggccatctttatggtgctggcggccgcgctgctatccaccttcttaaccaacgacgtggcgctgttcatcgtcgtgccgctcacgctgactctgaaaaaatggtgcgccatcccgacaagccgtctcatcatttttgaagcgctggcggtgaacgccgggtcgttgttaacgcccatcggtaacccgcaaaacattcttctctgggggcgctcgggcctctcctttccggcctttatcggccagatgctgccgctggcggcagcgatgatgctcaccctgctggcgctgtgctggttctgtttccccgcgaagcgtctcgactatcagagtagcgacagggcgctctcctggcggccaaagctggtctggagctgcctggcgttctatggggtctttttgaccgccttagagctgaagcaggagctgtggggactggcgctgatcgcgctgggttttttgctgctggcgcgggcggtcattatccacgtcgactggacgctgctgctggtcttcatggcgatgtttattgacgttcacctgttgacccagctaccggctctccagcatgcgcttaacggcgtcggccagctctcggcaggcggattgtggctgacgtcgattggcctgtcgcagtttatcagcaacgtcccggcgaccatattgctgctcaattacgttccaccatcggtgctgctggcctgggcggtaaacgtcggcgggttcggcctgctgccgggctctctggcaaacctgattgcgctgcgcatggctggcgatcgccgtatctggtggcgtttccatatctactctctgcccatgctgctgtgggccgcgctggtagggtacggattgctgcagctctga

SEQ ID NO: 188291 - DNA, 2988 bp, Klebsiella oxytoca
atggcaaggaggcagattctttcgctgtcggaaagagaatcattactggcattaccggatgatgagttaacgctgacccgaatggcgtattttagtgagcatgatctggcgcttatcagtgctcaccgtaaacccgccagccgttttggttttgccgtccttctttgctatctgaaaaatgtcggctttgcaccggataaaaaaatccccccctctgatgcgctgctgaagcatatcgccagcaggctaaagcttaccggagatctctggcccgcttacctttccggcagggatacaacccgccgtgagcatttaaccgaactgtaccgctatcttggcgtaaaggcgttcaccggcaaaatacagcaggactgtatgacacacctgctgccgatggcgacacgcaccgataaaggtattctcctggccgaagaattactggtctggcttcggcagtacaacgtgataatccccgcgattgatgtcgtggagcgtacctgtgcggaggccatggcaggcggcgataaaatcgtatttcagaccctgaatgccccgttaactccggcgcacagggatgccctggatcgtttacttgagtcctcagataatcagccttccaggctgacatggcttctgcaaccgccgggtaaaatcaatggtaaaaacgtgctgcaacatcttgatcggctcagcagcattgaatcgctggcattacctgaaggtatagagcgtaccattcaccagaaccggttgctgaaactggcgcgggaaggccgaaagatgagtagccgggatttaacccgattttcagcagcccgacgtcatgcaatcctggtgtgcgtgctggaagaagccagggctacactgacagacgaagtgattgagctgcatgagcgcatgctgaacagtcttttcagcaaagccaaaagaacacaggctgagcgccttcagcagaccggcaagctcatccagtcaaaactgaggcagtacatcgatgtcggtcaggcactgtccgatgcccgtgattccggtggcgatccatggctcgccatagaaaacatactcccatgggctgaatttgtcgccagtctggaggaaacacgccatctcgccaggaaaaataattttgatccgctgcatattattactgagaaatacagcacattacggaaatatgccccgcgcatgttgtccgctttacagttcgtcgccaccccggcagcgcaacctttggctgatgcgctggttgtgatcaaggatatgtaccggaagccgtcacgtaaagttccggcgacagcgccgcttgagtttgtccctgaaagctggcgcaaagtggtgattacaccagcaggtattgaccggcagtactatgagttttgtgcgctcagcgagcttaagggagcgctgcgctccggggacatctgggttaaaggctcacgccgctacaaaaattttgatgattacctcattcccgaaaaagactttgacaacctcacaccggcgctgccactgcccgtatctgctgattatcatgagtacattaccagccgcatgactctgcttcagtccagacttgaagagatcaatgctatggctgcccttggtgaactgcccgatgtggaaatatccgacaagggcgtaaaagtctctccgctggataactgcgttccggcacaggtttcaccgctggcagagctggtttacagcatgctaccgcgacctaaaatcacggaaattctcgacgaggtaaacagctggacgacgtttacccgtcatttttcgcatataaaaaatgacattacccgtcccgatacccgcctgctcctcaccaccattcttgcggatggcatcaatcttggtctgaccaaaatggcagaagcctgccctggtagcaccaaatcatcactcgaagatattcaggcatggtacatccgcgacgaaacctattcagccgctcttgctgagctggtaaatgcacaggggaaaagaccactggcggcattctggggagacgggacaacgtcatcatcagatggacagaatttcagaacaggcagctcaggccgctacgcagggcaggttaacccgaaatatgggcaagagcctggacgtcagttttatacccatatttcggatcaatacagcccgttttacacctgcataatcagtcgggtcagggattcaacccatgtgctcgatggcttgctgtaccacgaaagcgacctggaaatcagggagcattacaccgatactgcgggtttcaccgatcatgtctttgccctgatgcatctgctgggatttgcgttctgtccgcgaatcagggatctccacgacaagaagctgtttatcaaagggaaagcggaccaatacccggcacttcagtcactgatatcaacgaccagcctgaatctgaaagagatcgaaatccactggcgtgaagtgctgcgtctggcgacctcgataaagcagggaacagtgacggcatccctgatgctgaaaaagcttgccagctaccccaagcaaaacggacttgccaaagcactgagggaaattggccgtattgaacgaacgctgtttatgctcgactggttccgcgatccggctctgcgtcggcgggtacaggcgggactgaataaaggagaagcccgtaacgcgctggcgcgtgcggtattcctgcaccgcctgggggaaatcagggaccggaaaccggaaaatcagagctatcgcgccagtggactgacgctgctgacggcagctatctcgctgtggaataccgtctacatggaaagagcggtcgaggccttgaagcgtaaagggctgaagatcaacgagcaactgctgtcgcatttgtcgccgttgggctgggagcacatcaatctgacaggcgattatatctggaaaagcaaccggataccggcttccggtaagtttcgtcggctgaggccagctaaagtagagaggtcaaaaaatagccttaacgtacaataa

SEQ ID NO: 188292 - DNA, 642 bp, Klebsiella oxytoca
atgttcatcagagcttatttgagagcgtcgacggaagatcagtttgcggatcgggcaaaagacatgctggagcagttcgttcaggaaaaagggtataaaatagccagctactaccgggagaacatcagtggtacaaaactggaccgcccggaactgggacgactgctaatggacagtcaccataatgatattttactggtcgagcagatagaccgtctgactcgcctgagcaacagcgactggatgacgctgaaaaagcaaattgagcaacacgagttgcggattgtcagtctggatgtccccacgtcatggcaggctctgtcagataaagaccctacacaggctgacccgataacccgcgctgtcattacggctatcaacaatatgttgatcgacctgatggccgcaatgtcacataaggactggttgagtcgccgccagcgacagcaacagggaattaaacgcgctcattctctgggtaaataccggggcaagcaggccgatcacgaacgacatcaaaaggtattgtactaccgacaggttaagaaactcagtatacgggagaccgcagaagctaccggctatagttcttctcaggtttgtcggatacaggcacttaacaaaatatccggtactgattaa

SEQ ID NO: 188293 - DNA, 1317 bp, Klebsiella oxytoca
atggctatggccgtggtcattacaaactttggtatcctgttaagggatttgggtacatctgctgcaattattcagcggaaagagttaactgaaaatataaaaaccacgattttttggttgaacactatactaggattttcgcttgcagtactgataatattactcgcaccatttatagcgatagtgtatcatcaatcagagttgactcaagtattagtattactaagcatcaccttcccgttgtcaagttgtgctgcaacacacctggccttaatggaaagagagtcaaagtttaaatcaatatccatgatagaagttagttcttcattaatctcagttattattgcagttatttttgcgaacttggggtttggtgtctatagtcttgtttggcaggctattgttatgaattttatgtctgctttacagttttggtataactcgaaatggcgtccgggttggagaatttctattcgcctagtagatatcaaagagatttttggatttagcgcaaatctatcattgtttaatttaattaattatttttcgcgtaatgcagatagttttattataggtaagtttatggctgctgcaattttgggtagttataatttggcttatcgtataatgttgtttcctttgcagagcttaagttttgttgcaactcgctctctttatcctatattaagcaggagtcaggagcagaaccagatcataagaaatacttattataattgtgtgttcgttattttactaattactgctcctttaatgagcgggattgccctatatagtaagccttttatcttcttattttttggaccacaatggtatataacagctgatgttcttaagtggctggcacctactgccattatacaatcagttcttagtacaacaggggctgtttttatggctaaagggaaaactgatatattgatgcgcttgggggttatcggcgcaattttacaggttggggcatttttactaggtgtccatttctcaataaccacttttactttattttatctaatagccaatattttaaatttcttccctgttatgtattgtctgttaaaattaatctctggcgattttttttcatttttcaataagataaaatcaattattttttcaactcttggaatgatttttatactaaagttaattgattgttttattattggtgataaaggtgtgcaaagtctttggggtttgactttaattgtgatgataggcgtcttttgttatttttcttttctcatggttttttcatttcaatttagatatgtaataattaaaaaactgaagaaataa

SEQ ID NO: 188294 - DNA, 699 bp, Klebsiella oxytoca
atgaacaataacccactgtttagctggccggatatcgccggaatagtgccgaagctgctggaaaatttacccgtgaccctcggtataacgctggcgtcgctgctgcttggtttaacgatcgcgctgctgattgtgctgctgcagtttagccgctttaggccgctcagcgcggcggcaaatgggtataccgacattctgcgcggcgcgcctctggcgctgctgatcctgctgtttttcttcggcggcaaattagttttgaccgcgctggcgctgccgccgctgtggattagcgataccacctttgcggtgctgtctatttcggtcagcatcagtccctactttgcagaaatgatgcgttcagcgtggcgcgcggtggatagcggccagaaagaggccattattagcctgaatattccctggcatcagggaatacggcggattattttcccccaggggcttattattgctattcccgtctttggcaatcttttaattaatctcgtgaaaatgacctcgctggtcaatattattggtattgtggatatttttgggcgggcacaaaagatttcgcaaaatagctacggggctaaacaagtcgcggcatttattagcgtcattatcgtctactgggtgctgaatagtattattctctattttaccactcgtattgaaaagaaatatcagttcctgctggagtga

SEQ ID NO: 188295 - DNA, 846 bp, Klebsiella oxytoca
atgaagacaattattgcagtaatactctataacacacaaatcgatgattctgaaactataaagcaacttgctgtcaatgtatgtgataattgtattttaattattgttaacaacggacctaaaaaaattaataaaaatagtgctgttcttgatattcttgtcagagagtatattggcgtagaaataagggaatacattgaaaataagccattgagttggatttataatgaagttttgaatggttttgatagcgatagatatgttttctttgatgatgatagtaaaattgattgtgattttttcataaaattaaaattatattataatgatagtattgatgttcaaattcctgtgatttatgaagtgtctgatgggcagcgctactatccagtggttgatgggggggtttacaaaggatgcgatggttctgtcatttcacaaaataacatattaagtataggttctggtcttgtcatatataagagtcttatcagtaaatttaataagttaaatttgagcttgtttgatgaaagattcgcactctatggagttgatttcagttttttcagaaggatcgaaatggttaaaagaaaatatagcatcaaaattcaaaatgtttcttttatcgagcattcactatcacgagtaaatactcactatagtatctatagatatagagagagactatatgatgcagtgcttacgactcgattttattcaaagaataaaacctcatcattttttaatttagctaggattatgataaaagaactgattaaatttaaagtgaggaatatatttttaatagtaaaggtgtatgttattggcaaacatccaagatgttga

SEQ ID NO: 188296 - DNA, 1092 bp, Klebsiella oxytoca
atgtatgattatttgattgtagggacaggtttttttggtgctgtatgtgctcacgagttgatgaataaaggtaaaaaggttttagttatagaaaaaagaaatcatttgggaggcaatgctcatacagaaaataatggcggtatacatgtgcataaatatggcgctcatatcttccatacaaataataaagatgtatgggattatgtgaatcaatttgcagaatttaataatttcattaattctcccgtggctctttataagggcaacttatataatttaccgttcaatatgaatactttttatcaattgtggggagttaaaactccagcagaagctagggctaaaattaactcccagaaaggaaatatttcttctgaagaagcgcaaaatttggaagaaaaagcaatatctttaattggttcagatatatacaatactttaattaaaggatatactgaaaagcagtgggggagaagtgcaagacaattacctgcttttattataaatcgacttcctgtacgttttacatttgacaacaactatttcagtgaccgttaccaaggtatccctatcggtggatatacgaaattgatacaaagaatgttcggcgatgtagaaattaagttgaatacagattattttgaaaataagaaatactttgactctattgctgaaaaggttatttatacgggaccaatagatcaattctttgattattgttatggagcacttgagtatcgctcacttcgtttcgaacacgaagttttagataatgataattatcaaggagttgctgttgttaattatactgaatttgaggtgcctcatacacgtattattgagcacaaacattttgatccagttgatgtatctcacacagtaattactaaagagttcccagttgaatggacattaggttcagaagcatactatccaattaatgataaaaaaaatatggatatatttaaaaaatatagagaactagcaaaggctgaggacaaaattatattcggaggaaggttggcagaatataaatactatgatatgcatcaggttatagcttctgcgcttaaaacagtttctttattataa

SEQ ID NO: 188297 - DNA, 960 bp, Klebsiella oxytoca
ttgtttttagagtatccaaagataaaatcaagctggataagccgtcttatatttgagtattatacatcatacaagttaagtaagaagatacaagcagatgtctggttcagtctacatgatattagtgctagagttaaatgctctaaaagatatgtatattgccataatccatcacccttttattctgccacttatgaagacttcaaattagataaaaagttttttctttttactaagctgtataagtatttatatggtatcaatattcgtcataatgatgctataattgtgcagcagtcatggatggccagtaagttcagtgaatggtataatattaaaaaattagttattgctagaccaggtgatgatgaaatctgtttagaaggtaaaagaacagtacaggatatgcgaaaaatgcctgtttttttatatcctgctgttcctagagtttttaaaaatttcgatatattattacaatcattaaagattataaaaaataagtatccacatatttatggtaagtttgtgatacaacttacttttaatgaggggtttaacaaatgtggtgatgatttcataaaaaaatgcaaagatgcagacgaggaaaatatacatttcataggttttaaatccaaaaatgagatgtttgaactgtattcttctgcgtgtgattatgttatttttccttcaaagttagagacatggggattgcctttgtcagaggctaaatcatttaatcttcctattttagctgctgacttaccttattctcatgagacaattggtatgtacgatcaagtctccttttttgatgttaacgatcctgtaatgttagcagaaaagcttgctaaagttgtcttatgtgaagatgtttttacgaagcattatttcaatccagataaaacactatttccagtaattaatggttgggatgatcttgcaaagaaaatcatctcttga

SEQ ID NO: 188298 - DNA, 846 bp, Klebsiella oxytoca; identical to SEQ ID NO: 184765

SEQ ID NO: 188299 - DNA, 216 bp, Klebsiella oxytoca; identical to SEQ ID NO: 133521

SEQ ID NO: 188300 - DNA, 486 bp, Klebsiella oxytoca
atgaacagtcttttaacgctggcgaaggacttagagcagaaatcgaaagcgcagcagcagagtaccggcgagatgctgaaagccgcattcagcgagcacgagaaatctgtaaaagcggaactgaacgaaagcgcgaagagaatcagcgccgccatcctcgaccacgaccggaaactgtcctcagccatgagccagcgcacgaaaggcatggtgcgcatggtcagccagacgtggctgaccatcgtcctggtctccgcgctgctgatcgcctcgagcgcgggcattctgtggtggcaggggcagcagatactcgacaactacacgaccatccgggagcagaagagcacgcaggccatgctgtcagagaggaacagcggcgtgcagctctcgacctgcggcgagcagagacgccgctgcgtgaaggtgaacccggaagcgggacggttcggagaggattcgagctggatgatactggcggggaaatag

SEQ ID NO: 188301 - DNA, 324 bp, Klebsiella oxytoca; identical to SEQ ID NO: 160292

SEQ ID NO: 188302 - DNA, 558 bp, Klebsiella oxytoca; identical to SEQ ID NO: 144157

SEQ ID NO: 188303 - DNA, 360 bp, Klebsiella oxytoca; identical to SEQ ID NO: 140043

SEQ ID NO: 188304 - DNA, 390 bp, Klebsiella oxytoca; identical to SEQ ID NO: 140042

SEQ ID NO: 188305 - DNA, 402 bp, Klebsiella oxytoca; identical to SEQ ID NO: 139189

SEQ ID NO: 188306 - DNA, 210 bp, Klebsiella oxytoca; identical to SEQ ID NO: 109941

SEQ ID NO: 188307 - DNA, 546 bp, Klebsiella oxytoca; identical to SEQ ID NO: 109940

SEQ ID NO: 188308 - DNA, 570 bp, Klebsiella oxytoca; identical to SEQ ID NO: 109939

SEQ ID NO: 188309 - DNA, 204 bp, Klebsiella oxytoca
atgtctaacactaacgccaattttgagatgaccgggatcctgttagggcaagaagcccgtaaacgtaaaactcctcaggagaagatcgccattatccagcagacgatggagccgggcatgaatgtctcccatgtcgcccgcctgcatggtatccagcccagcctgctgtttaagtggaagaagcaatatcagcaactgtcttga

SEQ ID NO: 188310 - DNA, 195 bp, Klebsiella oxytoca; identical to SEQ ID NO: 36234

SEQ ID NO: 188311 - DNA, 147 bp, Klebsiella oxytoca
atgaagaagcgtttttccgacgaacagatcatcagtattctccgcgaagccgaagctggggtacccgcccgtgaactctgccgcaagcatgccatttccgatgccacgttttacatctatggactacctccgttttgcaagtactga

SEQ ID NO: 188312 - DNA, 618 bp, Klebsiella oxytoca
atgactgccgttcaggtaaagagtcgcagtacgccccagctgctgggtgatgctggcctgtattttgccgcgcttgttgtaagcgaggttgtagtagtcggtgaacgtcggcttcacttcaatcaccccgtcctgggtcgcgacgttgtagccgctcatccggctgtaggtggtatcggcgaagctgaagtagccgtgcgtggagtagcggtaacccaccagctgaatattggtgccggtatccgtcagcgacttgttatagaggaagcggaccgactgaccctggtgatcgctgtcatcgggcagggtggcattggcttgggtgacatccagcgacagcgcccccagctcccccatgtttttccccacgccgaggttaaaggcgtggtagcggtccgccagctgggtgccgccgtacagcgtccagcccgccgggagtccttgcagcaacgtgccctggaagaatttaggtttctcctgctgattgttgccgctgcggtactcgccggcggtgaccgtatagcgggagtagccttcgcgctggagcaccggaacggaagagtaagggacggtgaacacctgactgctgccgtcggcctctttgatggtgacctgtag

SEQ ID NO: 188313 - DNA, 1083 bp, Klebsiella oxytoca
gtgaaaccagtaacgctatacgatgtcgcagagtatgccggtgtctcttatcagaccgtttcccgcgtggtgaaccaggccagccacgtctctgcgaaaacgcgggaaaaggtggaagcggcgatggcgcagctgaactacattcccaaccgcgtggcacaacaactggcgggcaaacagtcgttgctgattggcgttgctacctccagtctggccctgcacgcgccgtcgcaaattgtcgcggcgattaaatctcgcgccgatcaactgggtgccagcgtggtggtgtcgatggtagaacgaagcagcgtcgaagcctgtaaagcggcggtacataaccttctcgcgcaacgcgtcagtggtctgatcattaactatccgctggatgacgaggatgccattgctgtggaagctgcctgcgctaatgttccggccctatttcttgatgtctctgaccagactcccatcaacagtattattttttcccatgaagacggtacgcgactgggcgtggagcatctgatcgcattgggtcaccagcaaatcgcgttgttagccggtccattaagttctgtctcggcgcgtctgcgtctggcggactggcataaatatctcacacgcaatcaaattcatccgatagcggaacgggaaggcgactggagtgccatgtccggttttcaacaaactatgcaaatgctgaatgagggcatcgttcccactgcgatgctggttgccaacgatcagatggcgctgggcgcaatgcgcgctattaccgagtccgggctgcgagttggtgcggatatctcggtagtgggatacgacgataccgaagacagctcgtgttatatcccgccgttaaccaccatcaaacaggattttcgcctgctggggaaaactagcgtggaccgcttgctgaaactctctcagggccaggcggtgaagagcaatcagctgttgcccgtctcactggtgaaaagaaaaaccaccctaccgcccaatacgcaaaccacctctccccgcacgttggcagattccttaatgcagctggcacgacaagtttcccgacttgaaagcgggcagtga

SEQ ID NO: 188314 - DNA, 1626 bp, Klebsiella oxytoca
gtgactcggattctgacagcgattctgattcggacagcgactcggactctgacagcgactcggactccgacagcgactcggactccgacagcgattcggactctgacagcgattcggactctgacagcgattccgactctgacagtgattcggactccgacagcgactccgacagcgactcggattcagacagcgactcggattctgacagcgattctgattccgacagcgattccgattctgacagtgactctgactcggattcagacagcgattcggattctgatagcgactccgacagcgactcggactccgacagcgattctgattcggacagcgactcggactccgacagcgattccgactctgacagcgattcggactctgacagtgactcggattccgactccgacagcgactccgactctgacagcgattcggattctgacagcgactcggactctgacagcgactcggactctgacagtgactcggattctgacagcgattctgattccgacagcgattccgactctgacagcgactcggactccgacagtgactccgattctgacagcgactcggactctgactctgactccgacagcgattcggactccgacagtgattccgactctgacagcgattcggattcggacagcgactccgattcagacagcgactccgattccgacagcgattctgattcggacagtgattctgactccgacagcgattccgactctgacagtgactcggattcggacagcgattcggattccgacagtgactcggattctgacagcgattcggattctgacagtgattcggattctgacagcgattcggattctgacagtgattcggattctgacagtgattccgactctgacagcgactcggattcagacagcgattccgattcggacagcgattcggattctgacagtgattcggattccgacagtgattctgattccgacagcgattcggattctgacagcgatgctgactctgacagcgactcggattctgacagcgattctgactccgacagcgactcggattctgacagcgattcggactccgacagcgattcggattcggacagcgattcggactctgacagcgatgccgattccgacagcgattcggattcggacagcgattcggactctgacagcgatgccgattccgacagcgattcggattcggacagcgattcggactctgacagcgatgccgattccgacagcgattcggattcggacagcgattcggactctgacagcgatgccgattcggacagcgactcggactctgacagcgactcggactccgacagcgactcggattcagacagcgactcggattcagacagcgactcggattccgacagcgactcggactcggatagtgactcggattcggacagcgattcggactccgacagtgactccgactctgacagcgactcggattccgacagtgattcggattctgacagtgactcggattctgacagcgattcggactctgacagcgactccgattccgacagcgactcggactctgacagcgattcggatatcccgcaggccaatgcggataccaataccgcgctga

SEQ ID NO: 188315 - DNA, 579 bp, Klebsiella oxytoca
atgaccaaaaagaaagcccgcagtatggccgggctgccatggatcgcagcgatggctttttttatgcaggcgctcgacgccaccattctgaatacagcccttcccgctatcgcccatagtctcaaccgttcaccgctagcgatgcagtcggccattatcagctatacgctgacggtggccatgcttatcccggtcagcggttggctggccgaccgcttcggcacgcgaaaagtgtttatcatcgccgtcagcctgtttaccctcggttccctggcctgcgcgctttccaactccctgatggaactggttatcttccgcgtcattcagggcatcggcggggccatgatgatgccggtagccaggctggcgctactgcgcgcctatccgcgcagcgaactgctgccggtgctcaacttcgtcacgatgcctggactggtcggccctatcctcggtcccgtgctcggcggcgtactggtgacctgggccagctggcactggattttcctgattaatattcccatcggtattatcgggatcgtgtatgcccgcaagggtgatgctgccaacttactgatttag

SEQ ID NO: 188316 - DNA, 1179 bp, Klebsiella oxytoca; identical to SEQ ID NO: 101499

SEQ ID NO: 188317 - DNA, 1005 bp, Klebsiella oxytoca; identical to SEQ ID NO: 31749

SEQ ID NO: 188318 - DNA, 801 bp, Klebsiella oxytoca
ttgcctaatgcttatgcgacctacaacgtcaccaacagcagcccgggctcgaccgatcagtatgtttctctgagcggggtggcgctggaaaatcataacctcgactggaacgtacagcagggctacagcaatcgggaggatgccagcggcggcgtctacggcaactatcgtggttcaacgggttcagttaacgccggctacagttatgccaaacatagccagttgattaactatggtctcagcggcggcgtattaatgcatgccgacggtattaccctgggtcaggaaatgtctgaaaccgccgtactggttaaagcacccgggctgaaaaatgtacgcctggaaaacgacgcgactatcgaaacggactcccgcggctacgcgattattccgtacgttacgccataccatcggaccaacgtaaccttagatagcacgactctggggaataatatggaattgccaaatacgacgcaaaaagtcgtgcctacacgtgcagccgtggtacgggcgaacttcgcgggtaatattggccgccgcgcattccttatccttaagagagcatcaggcgaaaacgtgccgtatggcgcaacggtaacgtcaactaccgataaaaatgcccaggccagtatcgtgtctgatggtgggatggtctacatgtccggtctaaaagataacggtgaagtctatgcccagtggggttcaaagactggccagcagtgtaaagcggcttatagtctggccagggaaatcgaaggcatcgcgcagacgactgcggtttgccaccaacagggaaagtaa

SEQ ID NO: 188319 - DNA, 264 bp, Klebsiella oxytoca
atgaagaagcgtttttccgacgaacagatcatctgtatcctccgcgaagctgaagccgggggttctgcccgtgagctctgccgcaagcacgctatttccgacgccaccttttatacctggcgcaagaagtatggcggtatggaagtgcctgaggttaagcgactgaagtcgcttgaggaagagaacgccagactcaagaagctgcttgccgaagccatgctggataaggaggcacttcaggtggctctggggcgaaagtactga

SEQ ID NO: 188320 - DNA, 753 bp, Klebsiella oxytoca
atgaggctcagcgtccggcggctgatgcgcatttatcagggcgcatcactgatgctggcactggagcgcaggcgctttggctaccgccgcatctggcagttactgcgccgtgaaggccttcatgttaatcacaagcgtgtgtaccgcctttatcatctgagcgggctgggcgtaaaacgcaggcgacgtcgtaaagggctggcaacagaacgtctgccgctgctccgcccggcggcacccaacctgaccttgtcgatggattttgtcatggacgcgctggccaccggtcgcaggatcaagtgcctgacctgtgtggacgacttcacgaaggagtgtctgacaattaccatcgcattcgggatttcaggcgttcaggtcacgcgtattctggacagcattgcactgttccgaggctatccggcgacgataagaactgaccaggggccggagttcacctgccgcgcactggatcaatgggcttttgagcatggtgttgagttgcgcttaattcagccgggtaagccaacgcagaacggatttattgagagctttaacggacgatttcgcgatgaatgcctgaatgagcactggttcagcgatatcgttcacacaaggaaaatcattaatgactggcggcaggattataacgagtgtcgtccacattcagcactgaattatcagacgccatcagagtttgcagcacggtggcgaaatggaaaatgtgaaggtaaacaaaccgaccttactaactga

SEQ ID NO: 188321 - DNA, 351 bp, Klebsiella oxytoca; identical to SEQ ID NO: 101506

SEQ ID NO: 188322 - DNA, 270 bp, Klebsiella oxytoca
atgccggcgcgccgtccggtagcccttctcaatgaaggtccccaccttctcgtttttgaagtccagcagtcgccagccttcatcaatcacgttgagttttttcaggctgcggggagactggtacatccggttctcgatatagatgatgagcgagaacatcaccgcgaccagcagggactggcgcgactccagcccgcccagttcaagaaccaccatccgggcatcgtcgtgcagggacggctcatcggagttgaaatactccccgtatag

SEQ ID NO: 188323 - DNA, 168 bp, Klebsiella oxytoca
atgaaggaagtgagatcaggagttatcagaaccgtttatgttggcccttgccataccatccgttcataccacaacactgcccgggacatgttgaacctcacccatcccggaggacaaaaccccgcgtataccgatgattcatcattcatcaaaaagaaacctctttga

SEQ ID NO: 188324 - DNA, 363 bp, Klebsiella oxytoca
atgaacaaagttaaagctgttgttttcggagttatgatgtctgctgctataacagccaatgctgcaaatgaaaccactactgtaacaggtgaagtcggtaaagatgtcaaactatcccttgagtccaatccgactacgggttacggctggatgattaaagaccttcctgacggattgattttcgtttctggaggatatgagcagtcaaaagactgtccgaaaggtgccgtagggtgcggtggtgaagaagtgcttcacttcattggtgaaaagaaaggggaaagcacactaaaactcatttacggtcagtcatttaacaaatcaagctggcaggaaaaagaagttaaagttgtgattaagtaa

SEQ ID NO: 188325 - DNA, 426 bp, Klebsiella oxytoca
atgcttgtggaacaggtagaccgcctgtcacgtttaagcggtgaggactggaataagttacggtcacttattaatgagaaaggcgttagagtggttgccttagacctgccaacaagccaccagcttattcagtcaggagatgagttcaccagcaggatgcttgaggcgttgaacgggatgatgctggacatgctcgccgctattgccagaaaggattacacagaccgtaagagaagacaggctcagggtattgtaaaggctaaatcagacggtaagtacaaaggccgtccagaggacacacagcgcaatgagagaatagccaagctgttacaggctggtatgtcctacagtgacgtaatggaaacagtggcttgttcgcgggcaactgtggcaaaggtcagtaagagcctcaaagaattagcttaa

SEQ ID NO: 188326 - DNA, 1572 bp, Klebsiella oxytoca
atgcgtcaagtaattacataccttcgtttcagcagtaagccacaagaacgtggtgactcaatacgccgccagaaaggtctatttgagagatggctgaaagataaccctgatgcaaaagttgtcgatgaattctcagatgaaggtgcatcggcatatcacggtcaccatctgaaaggcgattttggacgaatgcttcaaaacatacaggatggtaagtacctgtcagggcaaactgtcttacttgtcgaatcagaaacccgtcttaaccgacagaaagcacgtaataccgaaaaccttgtagacctcattacgggtaaaggtgttgatgtgatttgtctcgaatcaggcaaaatctacaccagcaccaatattgatgaccttgatacatctattcagttgaagatagccgcacacatcgcacatcagcaatcaaaagagaaatcaatcaaggtaagtgctgcatgggagcatagagcacagcttgcattagaaggcaaacagcaactgactaaaaatgtcccaggctggatagaccctgatactcgtaaacttaacgagcactcatcaaccgttgtgacaattttcgatttgctcctttctggtgaatctcttcacaacattgctcgttaccttcaggcaaacaacattaagtcattctctcgacgtgaaaaagcgaatggctttagtgttcactctgtccgtactatcttacgctctgagtcaaccgttggaacactggcagcatccaagcgtaatgaccgccccgctatccccaactactatgaaccagcgattgatgttgccacctttaataaggctcaggagattctgtcaaaaaatcgtgttggcagagcgccagccagtgacaatccaattactatcaacctatttaagggaatcattcgctgtcaatgcggtgcctcagtacatcccacaggtgtcaaggcaacctatcaaggtgtttaccgttgtaacaatgtccctgatggacgttgcaatgttcctaccattaaacgtaaaccctttgataaatggatgcttgataacatcgttggcttccttgagagggatgatggtaacaacactgacaaacgaaaagctgagattgagtatcaaatttcgttggtaaccagcaagttaaaaaaggcaaccaccctgcttctcgaactggatgatgttacagagcttaaagaacaggtcaaagaactgaacattcaacgcagtaacttgcaaagtgaattagacgaactcaatcagcgtgaaacattgagtgataagccgttgcatcacctgtcggagattgacttgacgaccaaagcaggaagagtagaagcacaactcatactgtcaaaattcgtacaatccatcgagctgcaacgtgaaatgataataatcacgcttcgaaacggtactgtaattggaaaatcaagagacttatctcctgtgttatcacaggatttaatgaagcaagttgtatcatccccgtcacctacagacatcgacatgttcagcgtcattacatctgatgaagagttcaggaagtctggtaagcaggttacaaaacgttcttag

SEQ ID NO: 188327 - DNA, 630 bp, Klebsiella oxytoca
atgtcatcggcaaagcaagcatttcgcggctcaccttacgcacaggagtttatttctcatttacagccatactgcactccgtacagtacagggcgtggtgagcgatttgaccttcaggtgaagggccaagggatgtgttatctcattcttgaagggacaatagcgttataccgcagaagtgacgatatgatgctttccacttcgcgcagccccgcgattttcggcctcgctaacctgacggacatttacttcaatgattattttaaaaccgtcacgccgtgcctgattggcgttcttaccaccgatcgcgtcgaggaaattattaaagagaaggcgctatggggattactttctaaacagctgatgtttgtctataaccgcctctatcacaacgtcatgccccagggggcgccaacggcctacgagatgattcgccagcagttgctcaggctaatggaggaagaagcggattatcggcacagcgtgacggctgaacgttatatccgggagaaaacccagctttcccgtagcggcgttatgcgcattctggccgatctaaaaaccggcggcttcatcgaaatggaagagggaaaactgataaaaatcaacaagcttcctgctaagtactga

SEQ ID NO: 188328 - DNA, 513 bp, Klebsiella oxytoca
atgaaaataccccacaaaaaaatgcttcttctggcttttctgtgctggaaagcgttttctgccgacagcgtgagcgtaggcgtaacgggaaatattgttgcctcgccctgtatatttaatggcggaaatagcaacctcaatgtcaatcttggcgatattcaggcaacaaatatggttacgccagggtcatcctccgacccggtggcctttaatttgctgtttaccaactgcccggcgggaacgcgcagcgtaacggcctccttcaccggaaacccggatccggttgccggccctgactattatatgaatagcggtaccgcaacaaacgtggcgatcgcgatgagcgaagcgggcagcggcgcgctaaaggggacgggttccagtattatgcgcaacatcgcggcagacagaaccgccaccctggccatgcaggcctcggttaaatcgatgtcagggggcgcgacgcccggcagcgtgagtgccgttgtggtcatgacgctacagtacaattaa

SEQ ID NO: 188329 - DNA, 1854 bp, Klebsiella oxytoca
atgttgcgctccatcgccaccgtctcgatctccggtaccttacccgaaaagctccatgccatcgcggcggcaggctatcagggcgtcgaaatcttcgaaaacgatctgctctattataccggtaccccggctgatatccgccacctggcggcagatttagggctaaaaatcacgctttttcaaccgtttcgtgattttgaaggcgccagccgcagccagttcgccgccaatatggaacgcgccaggcgcaaatttgcgcttatgcatgagctgggctgcgacactatactgctgtgcagcaacgttcagccggactgttccgccgacgtcgagctgcagatcgcggatttgcgcgccctggctgaactggcggagcaggaacaaatccgcatcggctacgaggcgctggcctggggcacccacgtcaaccgttggcatcaggcctggtcacgggtcaaaagcgtcaacagtccggcgctgggcattgtgctcgatagcttccacgtgctggcgcgcggcgacacgctgcagcggctaggggaagtaccgccggagaaaatcacctttgtgcagatggccgatgcgccgctgatgaaaatggatattctggagtggagccggcacttccgctgctttcccgctcaggggcagctgccgctggtggattttgcctgcgatcttacccgctgcggctatcgcggtccctggtcgctggaaattttcaacgacagcttccgggcgtcgcccaacggcgcgacggcgaaagatggctatcgctcgctgctgtggttggaagagcaggtccgtcagcggctaccggaaagccgggcgccgctttttgctcccgttgaactgcccctctacgccgggctggagtttatcgagtttgccgccgcgccggcgcaggcgggcgagctcggacaaacgctggcgcagctcggctttgccgaggaggggagccatcgctcaaaacgggtctccctctggcgcaacggcggggcgcgggtggtagtcaacgcccagccgcacagctgggccgaccattttcaccagcgtcacggggtttccctctgcgccatggcgctgcgcgtcagccagagcgcggcgatcgtggaacgcgcccgcgcatacggctacgccacctggcagggcgatgccgggccgaatgaaagcccgatcccggcggtttgcgcgccggacggcagccttatttatctgattgaggtgggggatgacatctatacccgcgattttcatctgcgcgcgaacctcacgccgcgcgacgattatcagggtatcgatcatctggctctcggcatggaagcggacagccgcgataactggatcatttttttccgcagcgttttcggctttatcctcgagcatgaacaaacgctacccgatccgtacgggctggtgcgcagcctggcggtacgcagtccgcagggcgacattcgcctcgcgctcaatatttcgcaaagccgcgccacgcaaattgcccgttcggtcgcctgttatcagggcgccggtttacagcacgcggcgtttgcctgccgcgatttacccgccacgctcgccagcctgccgcagattgcggtcgaggcgctgcccatcccggcgaactattatgacgatctgctggcccgttttggcgaagacgctcaggttaaccttttgaagaatcatcagattctttatgaccgcgatggagacggcggggagttcctgcatctttatacccgcccattttctgccggacgctttttctttgaattgaccgagcggcgcaacggttacgcactttatggtgctgtaaatgcagctgtacgcttgtcagcaatgcagtacacctag

SEQ ID NO: 188330 - DNA, 2514 bp, Klebsiella oxytoca
atgatgtcagagataataacctatcaatgtgaacttaaggatggtattcacgcccgtccggcgggacacatcgaacgattgtgcaatacttttcaatcagtagtgtgctggaaaaatattcgcaacggccttcagggtaatggtaaaagcgcgctctcgattgtcgctaccgatactttgctcaaagacgcctgtgaaattacgctcagcggaaaagatgctgcaaaagcggctcatcagcttagcgagctgctcaaaaagctgccctctttcgaggtgagccatgtgcaagaaaccgcagcgcccacgggctacctcccgcgttccctgcgggaaactcagctcagttttattcagggttcatgcatcagcggcggtattgccattgccaagcccgttcgaatccagggcctgtcattaaaggaaatgcaggcgcgtaaccccggtggtgaatattcttctgagcaccagcagtgtcttttcctggctggtttagaaacgcttaagcacgaaaaaaagacagccctggaaataaaaaaaggcgtcgagcacgatattttacaagcgcacctgtccattatcaccgacataacctttcaaactcgtatcgccgccgccattgccagcggagataacgcctgggaggcggtcattaaagcggcaatggaattttgtgaaatccttaaccaatcatcaagcaaatacattaaagagcgcaccctcgatgttctcgatataaccggacaattacttactgcgatttatggcgcaggcatactgccgcagcgcagccttgaattaacgcagccatcaattattatcgccgacagtctgacgccgagtcagtttctcgcgattaataaagagcacctcgccggaatggtattatccgcgacaggcaaaacatcacacacggcgatcctcgcacgttcgcttggtatcccgaccctgacggatattgatttttcgaccctggcgctgaacaccgaaagtaacattattatcgatggcaatccggggatcttgattacgacccctgatgaaaaggtcctgcgctattaccacaatgaaattgccatccagcagagtatgcagcaacagatgctggctaacgtccgccagccgacgattacacacgataatcataatattgagattgccgcgaatatcgccagcctggcggaagccgaggcagccttcagcaatggtgccgaaggcatcgggttgtttcgtaccgaaatgtcattcatggaccgtgaaaccgcaccagactaccgcgaactggcagaactttacgggcagattatgcaggtcgctcaagggaagccggttatcttccgtaccttcgacattggcggcgataaacccgtcgactacctgagcatcggcgaagaagaaaacccgtttcttggtttccgggcggtgcgaacttaccctcgctatcgtgaacttttcgccatgcaacttaaggccatcctcagcgcttcagctttaggcgatgccaaaatcatgattccgatgatcgccaacgttgatgaagtgatctggtgtcgcgaagtcctcgaagaagtcaaaagcgcgatgcgcgatgaaggcctggcgttcaatgatggaatctcgctcggtgtgatgctggagatcccatccgttatcttcgcgatgagcgaaatagcagaatacgctgatttcttcagcgtgggcagcaacgatctgacgcaatacttttttgccgctgaccgtggaaacacccaggttgcggcagtttacgacaactatgccccggcattcctccgcgctatgcagtatgccgccaatgaagcccatcgcgcgggcaagtggattggcatctgcggggagttgggcgccagcaaagattttctgccgctgttcgtcggcatgggctttgacgagctcagcatgagcggcacttcaattccaggcgtcaaacatgccctgcgggagctgagtttcgctaaatgtcaggcgctggcccaggagtcagtgatcttaaaacgctcagctgaagtcaaagccgcgctgcgttcgccggaggtaaaagcgatcgactctatgccaattctcgcaccggaatttattctctgtggcctggaggcccgcgataaaaacgaagttatcaaaaagatgaccgacaatctttggctgcaccatcgcaccgataaccgggatcaattaaccgacgatatctgggcccgtgaggactccttctccaccgccgtgggctatggtttcgccattccgcacactaaatcggagcatattcactactccactatcagtatggccactcttgctgcgccaattatgtgggacgatcagcaagtcgaaaccgtatttatgttaacggtcagtagatcggccgatccgaacgagcatatgaaatatttctccacgcttgcccgaaagctaatgaaagaggatttccgcaatgaaataaagcaagccgaaaacgttaccgtactctacaacctgatggccaatactttggccatgtaa

SEQ ID NO: 188331 - DNA, 666 bp, Klebsiella oxytoca
atgaattttcgaggtatattactggatttagacgggacgctggtgaactcgctggattttgtcgaggcttcctggagcttatgggctactaaaaaggggctggatgtgtggggggtatgcgattacctccatggcaagacagccctgaatacgctgcgccactttatgcccgatgccagcgaacaaaccattattgaggagtttaccgcgctggaagcgtttgaggcgcgtaacactgatggtattaccgcggttgacggagcggtggattttctccgccgactggagcagttgcaggtgccctgggcaatagtgacgtcggggtcgctgaaggttgcttcggcgcggatccgccgggccggttttccctctccgccggtgctggtgaccagcgaagatattgttaagggcaagccgcacccggaaccgttccttattggtgcaagccggctcaacctttcacctgctaactgcttggcttttgaagattcaatagccggtctgctttccgcgaccgaggcgggatgtgctgtcgttgaagtcctcacccgtcagtcctccgttcatgatatcgacacctggcaaaccattgatcgctaccttggcctgagcgtaacgcgccagggcgaggcggattttttccttaagatttcgagggagttttaa

SEQ ID NO: 188332 - DNA, 2502 bp, Klebsiella oxytoca
atgccggtggttataacctataaatgcgtgctaaacgaaggtattcatgcccggccagcgggttatatcgcgcggctatgtaacctcttccaggctgcgatcgactgggaaaacacccgcacggcgctgaaagctaatgcgaaaagcgccctttcgttgattgccagcgacacgctgctcaatgatgaatgccgaatcaccctgagcggcgaagatgaacagcaggccgcggcccagctatgcgcactgctttccgatcttccctcattcacccttgagcaggaatcggtgacaacccaaggctatctgccccgttgtctgcgcgagctcaatccgcaggttattcaaggatgtcgtattaataaaggcgccgcaattgcaaaaccgcaggttattcagggtctgacgttcgacgatctcatcgacgccaatccaggttttatcggcagtatcgaatacgaaaaggaccgttttcatacagggctcgcatcgctacgcgcagagaaagaggctgctcttgggcagacccaaggcattgagcacgacctgatggcggcgcatctatcgctgataaccgacatgacctttcaggataacgcagtcggatatcttaatgagcggatgaatgcctggtcagctatcgctcgggcgtcgctcgacatttgccaccagcttgagaattcgtccagccgttatctgcaggagcgcgcgctggatatactcgatatcgcagcgcagcttatcagcgcggtttatggtgaacaggctctggcgtctcgtccgatcgcgttaaatgaaccggtaattgtgttcgccaacaacctgacccccagccaatttctggcgctcgaccgcagccagcttgcaggcctggtgctgtcatcgatgggtaaaacctcccacacggcaatcctggcgcgatcgctgggcattccgaccctggccgatatcgatttttctaagctggcgcttgaggatcaacagcagatcattatcgatggtgaaccggggatactgattatccatccggatgagaaggtgctgcgctactaccgtcaggaaattaccgtccagcgggaaatgcagcgacggctgcgggccaacgctctggtgccggcacaaacccgcgacggtcatcgcatagagatagcggcaaacatcgcaagccttgccgaagcgcaggccgcctttgaaaatggcgcagagagcattggcctgtttcgcaccgaaatggcgtttatgagtcgcgattgccctcccacctgcgacgagctggccgcgctatatcagcaggtggtcggtctggcgggcggcaagaccgttatctttcgcaccttcgatatcggaggcgataaaccggtcggttacctgagtatcggcccggaagacaacccatttctcggctttcgggccgtacgtacctatccacaccatcgcgacctttttgccactcaactaaaggctattcttatcgcttctgcgacaggtacagtcaaaattatgttgccgatgatcgcccgggtggaagagcttatctggtgtcggaaggtgctggaatccgtcatgcaggagatgcgccacgcgggtctggcgtttgatgagcagattgcgctaggcatcatgctggaggtgccttcggtactgtttgctatggctgaaatggccgaacatgtcgacttcttcagtctgggcagtaacgatctgacgcagtactttttcgccgccgaccggggtaatgcccgggtaaaagcgctttatgacagctatgcgccgccatttttacgcgctctgcaatttgcagtcagcgaggcccatcgccttggtaaacctatcggcctgtgcggagaactcgccgcagacgaagccattcttccgctgcttgtcggtatcggatttgatgaattgagtatgaactgcgcgacaattccgcgggctaaacacgcgctgcgcgagcttagcctcgcagattgtcggccgctggcgcaaaatctggtgcaacagaagaacgctcaacaggtcaacgccgcgctacaaaaatcaggcgctagcgcgatgaaaaaacccttgctgtcgccggagatgattttatgggcaattgacgccgctgataaaaatgaggcgatcaaaatactggtggataatctgtggctacagcagcgtaccgacgcacgagacccgctctgcgacgatatctgggcccgtgaagtgccctttcctaccgtcgtcggttcgggttttgctatccctcacgcccaaacggaccacatcaaggattctaccgtcagtattgccacgctcaggcaacctattgcctggggcggcgtcatggtggataccctgttcatgctgacgatcggcaaatccgcgcaggataatgagcacatgaagtacttctccaccctggcgcgcatgctcatgaatgatgaatttgtcagccaaattaaaagggcgaaagacccgcaagccctttatctgctgatatccaaaacgctggacttctga

SEQ ID NO: 188333 - DNA, 1071 bp, Klebsiella oxytoca
atgattgaattatcggtagaaaacctgcatctgacctacggcgataatccggtgcttaagggcgtgtccatggaactgaagcggggagaggtggtgtcgctgctcgggccatcgggtagcggaaaaaccacgctgctgcgggcggtcgccgggctggagaagccgaccggcggcattatcaccattggaaaatcccgcgtctatgacggcaacccgcgtagcgaaattccggccgaggagcgcaacctggggctggtgtttcagtcctacgcgctgtggccgcataaaacagtgtttgaaaacgtcgcttacccgctgaagctgcgtaaggttgccgccgcggagatcaagcagcgggtccagaccgtacttgaacagctggggctggggcatcttggcaatcgccatccgcatcagctctccggaggacagcagcagcgcgtggccatcggcagggcgctggtttacaacccgccggtgatcctgctggatgaaccgctgtcgaatctggacgccaagctgcgggaagaagcgcgggtctttttgcgcgagctgatcgtcaagctgggactgtcggcgctgatggtcacgcacgatcagaatgaggcgatggcgatttccgatcgcattctgctgcttaataacggcgtgatcgagcagcagggcaccccgcaggagatgtacggcagcccgaaaacgctgtttgccgccgagtttatgggcagtaataatcgcctgcatggcaccgtcagcgcgctggagaacggtcgggcgcgcattgagggggccagctgggcgctctggggaatggcgggggaaggggtcagcgtgggggaagaggcgacggcggtgatccgcgttgagcgcctgcgcatcgcttcagcgcctgaagagaacatgctggcgctgccgctgttgaccagcatgtacctcggcgaccgctgggagtatctgtttcgcaccgaaggcgatgatttcgccatacgcgcctacggcagcgcgctgcgcgatgccgagcgttgccatctgacgttgcccgtcagtgacctgtggatcttcccgaaaggttga

SEQ ID NO: 188334 - DNA, 1338 bp, Klebsiella oxytoca
atgtcataccgggaaaatcatgctcaatggaacgcctttattcacgccctgaaacaggaagtcaaacccgcgctgggctgtaccgaaccggtctccgtcgccctcgcctgcgccgtggccgcgcggcagctctccggcgcggtggtgcgtattgaagcggcggtttcgccgaatttaatgaaaaacggcatgggcgtgactatcccggggacgggaatgaccggcctgcctatcgccgcggccctcggcgccatcgccggcgatccgcaggcgaagctcgaggtgctgaagagagccacccggcgggaaatggaagccgccagggcgctgcttgaggccggcgccgtgcgcgtggtactgcaggagccctgcgatgagattctgtacgttcgcgctaaggtctacgcgggggatgagcacgcgacggtgaccatcatcggcgaccacaccaacgtcgtggccattgaaaaaatgggccactccctgtttatcaagcacgaaagcgcggccagcgatcgtggcgtcgacccgctgacgctggttgcccgcagctcactgcgcgatatctatgatttcgtttgcgaggttccgccgcacgagatcgcgtttattctcgaggcgggcgcgatgaacgacgccctgtcaaagaagggcctggttaaggagtggggtttgcatatcggcccgacgctgaagcgccaggtcgacaacgggctggtttccgacgatatgtttaccgagatcctctaccgcaccagcgccgcgtcggatgcccggatgggcggcgcatcgctaccggcgatgactaactccggttccggcaaccagggcattacggcgaccatgccggtggtggtggccgccgaacgtcttaacgccagccggcagcagctggcccgcgcgctggcgctctcgcacctggtcgccatctatatccattgtaaactcccgcgcctgtcggccctgtgcgccaccaccaccgccgggatgggcgcggcggcggggattatctggttaatgaacggcagctttgacaccatcgccatggcgatcaacaacatgatcggcgacgtcagcggcatcatttgcgatggcgcttccggcagctgcgccatgaaggtctccaccagcatctcttccgcctggaaagcgattctgctggcgctggataactccgtcgtttccggcaacgacggcatcgtcgatcgcgatgtggaaaactcgattgctaatctttgcgccattgccgggcgggccatgcagcacaccgaccggcaaatcatcgaaattatggcgcacaagcgttatcaggcggtaagcgccgggaacgaagcataa

SEQ ID NO: 188335 - DNA, 144 bp, Klebsiella oxytoca
atgtctttaaatcgcaacaacgacggacgcgtcagtaatgctgaaacggaccctttcatttttggcatgaatagccagctgcgtttttatcgtcatattatctgcgccccaggagatctctacaattggccttatctctcttaa

SEQ ID NO: 188336 - DNA, 807 bp, Klebsiella oxytoca
atgatcaagctgtgcgcgacctgcggcacttcttacgacgacggcgacaacaccctgagccggtgccgtatctgtgaggatgaacgtcagtacgtcccggccagcggccaggcatggattgaattagagactctggttcgcacccatgtgaataagtggcagcagcattgcggcgagctgttgagcatcaagacggtaccgaaatttgccatcgaccagcgcgcgtttctgctgctcaccccgcaggggaatattctgtgggactgcattgccaatctggacgcggcgacaaaaacgctgatagcggcgctgggcgggataaaagcgatcgccatttctcatcctcattactacaccacgatgcagacgtgggcggaagccttcgatgcgcgaatctaccttcatgccagcgatcgcgaatggattatgcgcgatagcccggcaatcacgctgtgggaaggggatgcgctggagatcctccctgcggtgcggctgctgcggctgggcgggcatttcgccggtgggaccgttctgcactgggcaaaagatgacggcatcatgctggcgggcgatattatccaggtgacgccgggggcgcacgccgtttcgtttatgtggagctatcccaatttgctgccgctggcggcagccagcgttgagaagatcgttgagcgtctgggcgatacgccctttgaggcgctgtacggcgccttcgaggggcagaacgtcacgaaaaatgcccggcagatcgttttagattcagcgcagaaatatctggcctgcctgaatacgacggcgcaccgctga

SEQ ID NO: 188337 - DNA, 201 bp, Klebsiella oxytoca
atgaaaatatggcagaacatcgtggtggttccggtaatttcgctgaagaccgtgataaagcatctgaagctggacgtaaaggcggtcagcacagcggtgggaactttaaaaacgatccgcaacgtgcatctgaagccggtaaaaaaggcggacaaaatagtcatggtggcggacgtaaatctgataattcctgattattaa

SEQ ID NO: 188338 - DNA, 1773 bp, Klebsiella oxytoca
atgttgagcgatctcagcaacgatgaaagtaaaagacgcgcggcgattgacctgttaaaaaatcccgacgagggacgggacgaagcattaaagaagtatacgcatctggtctgccagttgctgaaaatgccgatgagttttgtctcggtgctggatgatgaaaagcaatatatcaaatccgctcagaatatcgccgccacggaaacccgcctgggcgacgcattttgcgaacagaccttgaaacagggtaaaacgttcatttgtcgtgatacgcatcagcacccggtttttcagcgcgatcgcgccgtcagagaagcgccgttcattcgtttttatgcgggatgcccgctgacaacccgggatggggtggccgtgggtaccttgagtatccttgatacgcaacccagggaactttccgacgagcaggtcgctatctttaacacgctggccgagctggtatcggacttcttagcctcctggcactcggtaggctataccgacgtcgtcacgctattacccaatcgtcagcgcctgctgaaggacattgaggtgtcggcggtgagcgctttccggctggtcatcattgactgcattgatatgccctttgcctacgagatggcccgctcattggggatgattgccgtagaaaacttacttcgcgacatgaccgctcagctgcaggcacgtctgcctctcgcgggccagctttacgccgtggcggtcggacgatttgcttttttaacgcctgagccaacggctctgtcgctggaaaacattgcacaaaaccttcagggaacccaggccaggattggcccggaagttcccctggatttggatattcacatgggtgactccgggctgtgcgacagcaccctgacgccgaatgaaattctgcgtcgtgcggtgagcgccttgcatgaggcgataagccaggggcaccgttttaccacctataatgacgccctggatacccgcaaaaagagggatttcagcctgctgaccgaactcagacaaacgctgcagggaaaccagggcttatatctggtctatcagccgaaaatctcgctggcgaccgggcgcgtgacgggtgctgaagcgctggtcagatggaagcatccgacaaacggcgaaatcctgcccggcgaatttatcccgctggtcgaaaagaccagcctgatgcgtgagctcacggcctgggttatcgatcgcactatcgcgcagctgagcgagtggcgggaccagggactgactctgccggtgtcaattaatctggccgccagtgatttttctcggcccgatttcgctgaggagctcgaacagaaactgcggaatgcgtctcttgagccggcgctgctggggttggaatgtctggaaaccgagaagatgcttgaaagtccggccgcgcttaacgggttgaacatgcttaaaaaacgtggatttaaaatttctctggatgactttggttcgggatacagcaacattaattacctgcggcaaatgcccctggacatcatcaaactcgaccggtctattgtgagtcatattgtcgacgaaaaagccagccgcattattgtgcgtaacgttatcaagcttctcaagcagctcgattacatcgtcctggccgaaggcgtcgaggatcgcaaaacggtcgagatcttgcgaagcctcggctgcgatgaggttcagggctatttctatgccaggccaatggtttctgcagattttgcagcatggtcccgcgccagaaacgcagcgccggaaataaacccctga

SEQ ID NO: 188339 - DNA, 348 bp, Klebsiella oxytoca
atgcagtggaatattgaaaatagccttgtatgtcctgtaaccggaacaggattttcagttgcggcaagtgctaaaaatctcaaattaatcatatggtataatggtgattattttttgaacactggttcggttattaacatcacccaaaatgaagtgctcattaacggcgagcccggcgatttacaggttattcacgctttcccctatacggaaatcctgtggtcaacgtttgcccggtatatcgattgtccgggcaatgagaatcctatgttgctcatctgcaatcgaagaagtctctgcaaattcgccttgtgcccctacggtgcgaggcaaaagaggccagaataa

SEQ ID NO: 188340 - DNA, 219 bp, Klebsiella oxytoca
ttgggattgcctaatctgcccgcgatccgcgcgggactgctggccttgcccttctctaccgcgatagccaccggcgaaggctactattttgtctggccgaaaaatacgctcagcccgcagccgatcgccctattgcagcgttttttaaaccagcatattcccggtccgctccccgctgacgttatccgccagggcgcggccccggattacagtacgtga

SEQ ID NO: 188341 - DNA, 402 bp, Klebsiella oxytoca
ttgtgcagctggtttagcggtatgatgtttagtggttttgtggtgttttttagctgcctgcgctttctgagctacaggtttagcagcggcttttttgtgtttcttagcggcctgggctttctgggcggcagccggtttagcttccgcttttttgtgctttttagcggcctgggctttctgggttacagcaggtttagctgcggcttttttgtgctttttagccgcctgcgctttctgctcagcagccggtttggcagcggcggtatggtgtttcttatggtgggtcgctttagcggtggtgctgtgagttgcagcagccggcgccggagttgtggtggtggcagcatcggcagcgaaagcaacagaagacagacccatagcagcggcaacgaccagagctaa

SEQ ID NO: 188342 - DNA, 612 bp, Klebsiella oxytoca
atgactatatttaaaagcttactctcctttctgggtgcggcttgcgccagcgcatttgtggtacttagcctgtgggtcgatatatacttttgggattataatatttcagaactatcactgaccgaaattgtgcaggagtccgttttaacagccatcgtatttattcatttcctgcttgccaggcggtataaagccatgcgctactgtaatattctggttggcggttttttccttgccatgctaattcgcgaactggacgccctttttgatctcattgctcacggtagctgggtatggtttgcgctgattgcagctcttttagccttaattcatccagttattcattatcgtcagaccctgcaccagctagcacaatatactcgtaccccctggtacggcctattaatcagcggcctgttggctattctggtcttctcccgactcttcggcatgcaagccttatggctggccattctcgatggcggttacgttcgggtggtaaaaaacgtcgtagaggaaggctgcgaatcattcggttatatgctttgtctcaccgcctcgattggctatttttgcacttttcgcgaaacgttagcgcagaaatcatattga

SEQ ID NO: 188343 - DNA, 255 bp, Klebsiella oxytoca
atgaactataagaatgtactgaagaacgcgatatggcttgctcccctggcgatcctgagtctgcaaacgcctgcgtgggccgcagatgccagcaaaacggcgacctgccggacggcgccgcctgcggtggacaaagacggtgtgccgttaccgcccgttgtgggcaaagagggcgctcagccggtctctgctaaagacaagtccggccacagcggctcaacggccaactgccagcccaaggccatcgacaattaa

SEQ ID NO: 188344 - DNA, 489 bp, Klebsiella oxytoca
atgggtgcggatcaggtagttacgttatttaagtataagcaatggatagacgcagaaacgttacaagcaataaaacgtgttgatacctcggtttatgcccataaacaccatcttatgctcaggctcatgaatcatatttatgtggtggatatgattttcagggctaatattagcgggcaaaaacacggttacacagcgcttaatacgccagagacaccgtctgctgatgaacttttgtcaaagatgaccgaatgtacagactggaatattcaatatgtgagcaccatgagcgccgttgatttttcgcatagtatagaattccgctttgtcgatggcgggaagggtgaaatgaaagcactggatatgctcaatcatgtactttttcatggtacgtatcatcgcggcgctctcggttggttgctttctgaatgtggcgtgaccccgcctaaggatgtattaaccgtctttctcagagatcataatcactag

SEQ ID NO: 188345 - DNA, 1677 bp, Klebsiella oxytoca
atgtcgtgtgtgtcatttcccaggtatgggattctgctgggcagcctcactgcaacagccctcccggcagcgcccctgagtcctgcggaccagaatgccattgagcaacaacaaaaggcattgctggaacagacgcaacagcagcgcgatatgctccgccattccacatccgcgccctctctcccggaagcacccccttcagaaccagacggtcagtgttttcagctccggtatatccggctggagaacgtcacagtgctcccgcgctctgccgtgcgaaaactgacgaccatcccgttacagggctgtatgacgctcccggatatccgggagcgggtgcgggatgtcacccaggactacctttcccggggattcatcacttcacgcgcctggctaccggaacaggatatttccggaggaacgctggtcattgccgtcacagaagggaaggtggaagccgtcacgctggaggggcatgaggaaaatgccatcaggatggcttttccccggacggagggccgggtactcaatctccgggatactgaacaaggtctggagcagcttaaccgtctgaactcacgtccactgaccgtagatattctgccggggagccgggaaggtttttcccgggtaacgctggtaccggtcagccagcgttttcccgtcagtcttgatgtgggcgcagataacagcgggcagaaaagtaccggcagcggacagctgaatgcccgtctgacagcagacaatccgctgagcctggcggaccagtggacgctggccgcaggcagggacagtgagtttcaccatgacagacgcagccgtaatattcaggccggcgtttcggttccttacgggtactggttgttcagcgcgcaatatgcgtggtccgatttttatcagacgctttctgttagtggggccccgcagcgctggcgctatgaaggcaccgtgcagtcacagcggctggccgccagccggacgctactgcgtgacggtaagcaacgtctggcgctggatgtcgccttatcccgccggaaaaccgaaaaccggctgggcggcgtacgtcttgacgtcagcagcccgacgctcagcagcgtgactgccggactgagctacagccggagtatcggtggaggctatctcacgctgggtccgtccctttctcacggcgtcccgttcgccggcgcgacacgtgatgacccggcgcatcccggcctgccccgcagcgaattccggcgcttcagcgttagcgtaagctggttttaccccatgacatcctctgtgtactggctgacctcagcctgggggcagaccacgcctgacagactctacgccagtgagcaactgtccgtcggagggcagtattcggtcagggggtttaaagagcagtatctcagcggtaaccgcggcagctactggcgcaatgaactgacatggcaatggatgacggtgccgggcgtgggggcattctcagcaacgggtgcactggataccgggcatgtcatgcgccaggaagggataaccgacggcggaacgctgacaggggcttccgtcggactggagctggctggccgctggttcagccagtccctgacgctgggggtgccgctgtcgtaccccgacagactcactccggataaacacgtggtttactggcaggccaccgtttcactttaa

SEQ ID NO: 188346 - DNA, 282 bp, Klebsiella oxytoca
atgatgagagtggaatattttaaagaaaatatagagccacatttggaaggatatgagtttacatattctaccttccccgaaggagattttggaaaactggaacgtgttgaatttaaaggaaaaaataaagttggagcgattgatttttggtcgcagggatgggtggggatggatatctatgacttggagttggatgaccaagtttttaacttgttgctagatccagatgaagaaaaacacgatgccatagcaaagttaattaacatcttgaataataggtga

SEQ ID NO: 188347 - DNA, 492 bp, Klebsiella oxytoca
gtgggagctgcgccagaattggttctggccgcacgactggcgattgccgggtgtaaaaccaaccccgcgctttgtctgaatcaggcgggtatttatgcggcagacattgtggcaccagaggccatcattggtacaggcgctataacggctggcagcacatttattctgggtaaaaccgaagacagtatgaagacgctgagtcgacagctggtgaacgttttcgatgagtttaatcaaccaaaaaggttcaatacccagcctgttgccagctttatcaaaggagaaacagcctccggggctaatctttctacgaaaacggcagattatgtcaaaagcctgcaaagagataacaccgccaaattagtaggtgtttttaataaacaaaacccaaacgctgaattaaatgtttttgggaaatctttacagcaagttttggccccggagggagtgacacaaggggtaggactaaagtttttgcttcagaaaaattga

SEQ ID NO: 188348 - DNA, 303 bp, Klebsiella oxytoca
gtgacatatttaaccgaagaacaataccaggatcggaaagagttactgcgaggggcttctacgactatgttatggaaaaatattgacccagatagtgttgatggcgcctgtaagctaacctatcaagaagaaaaatcgctttatatctggttcatttggcgtttattggaagatggtgagatcaaacttgctcgccacgggaagtttctccctggaagcatcgacaagcagatcgaggtttttgaaagggcatttcctaaaactgaggatgatatgaattgtgatgcatttgaggggttttag

SEQ ID NO: 188349 - DNA, 336 bp, Klebsiella oxytoca
atggaaaaaaaagacgtataccttgagatttaccagagttctatacaacaaataaatcgtgttgcaaccaagagtgggttattaaaatgtttatataaatcaatgtattataagacccagcttattcataagttttcttttttacttaagaatgagtattttaatgatatggacattgattttttaaattggggagcgaagaactactatgaaatgcgtgatgtgaaaaagagcatactatataacgagcagttgaaacgactttcaatgctcttctctcttgttccggaagaaatgcggcataaacttgagtgggatgggccagaaataaaatag

SEQ ID NO: 188350 - DNA, 369 bp, Klebsiella oxytoca
atgcgttcgacctctatttttctgcttattaccagcgttctgaccttttccctcacttcattttccgccagcgcggaagacggcgcgatgcatcaccataatatgtccgcgatggcggagatgccggggatgaataagccggatgattccgcccccctttattcaacgaacggggtcattaaagcctggcgcgacaatgccgtggtgattgcccacgctccggttgccgagctgaactggccagcgatgaccatgagctttgcgctcggcgataaccacgataaaaagctggcggtgggacaaaaggttgatttcaccttccgtcagacggactccggctacgcgctcgtttcgatgaccgcgcactaa

SEQ ID NO: 188351 - DNA, 4371 bp, Klebsiella oxytoca
atgccatcatttaatagcgacgagtcaaataagggctgtttgaacaaggcgtgtggagaaagtgcggtaacgtatctggcagcgacgcccggccagcaggcaatgtggtggctggataatacgctggatcagccccaatgctataacgtgccggtgctgctgaccgttaatgcgacactggacgcggagattatgcagcgcgctgtggctgagctgaccttgcgccatgaaatattcagaacgcgttttgtttatcttgacggtaaattacaacagcgtatcggcgctgatggctatctctctttttcccatcgacaaccagagcagacggaaacccctgaatcggtgactgcacaactggcggctagccgtttatcattagctgaggggccgttgagtatcattaatatgctcagttcagactcgggtacaacctggttagcatgctgtttccaccacatcattattgatgccccctcagtacgtattgtcttgcatgatttgctgcgcatatattgtgcgcttgacgagaagcgcgctctgccagcgtttaacgacacgggaagctatcaggaatttactcgttggcaggccgcatcccttgcggcggcggagtgcgaagatatgcgggattactggcggcaggcactgcatccggctccgccactgtcggacctcccggtcgattttccccgtcgtcttcgggaagataccaaagccgcctataccatgctggcgctgaacgaacaggaagcggactcactgcagcggcacgcgagatcgttgtcaatgactccatttatgtatatgtcgatgtgctggcaatttttcctcagccgcatgagtgggcagaacgatattaccgttggcgtaccttttactctgcgggatcgcagcgagtttgccgaaacgccgggatatatgatcaatactctgccggttcgcgtgcaggtcaatgaagatgacacggtcaggacgctggctgcaaaggtgcgtcaatcttttattggcgcgcatttcaataagctgctccctttcaatgaaattgtcgcactgtcgcgtgaaaacgcggggcaggacagtccactattcagaacgctgttggttatgcccgatacccggggcgatattttcaacgacttgccttttaaagtcatgctggatgactattttagccagatggcaaaatacgatctgacgctgttctttgaagcacaaccgcagtggaagctgacgctggagtataagacggcgttgtatcatccgcagaccattgactactggttgaaaatctttcgccatttattgagcgcgatgggcgaggacggcgaggtattactgtcatccctgaggctattggatgcaccgttaagtcgtgaactggttgttcgatctagccttaagccgtgcgcggaggcctggcgatttgacgctctggcggctttcaatcagcatgctgtaaaccactctgcggatactgcgttaattaccgctaatggcacgcgatcgtatggttggttagcggaacgatcggggcagattgccgcttacctgcagcagcagtttaatatcgctcctggcaaacgtgttgcgttattactggaaaggaatgccgaggcgattgccactctgtttggcgtattaaaaaccggcgcggcctacattccggtcgatccgcaatacccgcaagagcgtatcggttacatgttacaggacgccaaggtggattgcatcgccacgacgcgatcgctggtagcgagatttccagtgtctgcctccgtacctctgttattaatcgatgatattcccccggagtaccctggggaatggtcttatatcaaaagaatgcccgacgatgagctgtatatcatttatacatccggttcaaccgggcagcccaagggagtacggttattaaataaaacgctcaataacctgattaagtggcaacaagatgtatctgagtgcggtcagggagattgtactttgcattttatgtcactttcttttgatgtatcggttcaggagatcttcggcacgttagcctgcggtgggcgcttatatatcgccagtgaagaagagcggagagacctggatcatctgcaagaggttatccaggagcagggaattaatcggctctatttcccctatgttgctttgcaacagttcgcgcatttgagcgcattggccaacaggcaattcccgagtttaaaagaggtctactccactggggaacagctcgtactcactgcggatattaaacattttttcaggcaacccgttcgcctgattaatctctatggtccctcagaaagccacgtctgttccgcatatgtgctgccgccggagagcgataaatggggagatgcagcgtccattggttaccctctacccggattcactctgctggtggtggatgagcatctgcagctggttcccgccggcgtcgccggtgaactgcttatcgttagcgattttctctctcccggctatcacaataaaagtgaagaaagcgctcgacgttttatctctgctgagggctttgccgcacaaagttgccacgcgtatcgtaccggtgatctggtgaggctggagcatgacgatcggttcagctatcttggcaggctagacaatcagttaaaaatacgcggttttaggatcgaaccgtctgaagtcgaggcggccattaatgccctggagggcgtgcaggtttcagcggtagttggcagggcagataattcaggaagcaagcagctcatcgcctttattgctggcttattggatgataaaggcaatcaaaaggataagatcaaacgcggccttcgcctggtgctgccggagtatatggttcccacagagttggtctttgtggataagctgccgaccacgcctagcgggaaaatcgatcgtaaggcattgcttaaggtggatattattgttgaatcatccacgcagatgccggagcggcctctgaccaaaacgcaggagcaggtcaaggcgctatgggaaacgctatttccgggacgtcagatcgcactgcacgatgattttttcgccattggtggacattctttgttggccacacagctggtttttctgctgcgtaaggcgttcgattgcgatattcctctacgtttgttatttaatcatccgaccttgtcggctatggctgagtccatcgacggctatattgccagtgaaaaggggcccgtcgatgccgttgatcgttcctttgttcaggacggatacgaacgcatacattggcaggggggagtgcgttcaacccctgggctgacgctgctcaccggggcgacaggatttttgggcatctacctgctgcgttcattgctattggccgggacccaatccgtgctctgtatggtaagagccaggacagatgagcaagcgttggctcgtttgcgtgaaaatgcgatgcgttacggaatcgccgatgagattgatttttcccgggttgaagtttgcctcggcgatattggtcagcgcaatttagggttaagctctgaagcgtatagccgtttggcagagcgagtagacacggtattccatgcggccgcacagattaattttttgctctcttattcttcggtaaaacagtcaaatgtgcagggtacgctgaatattttagctttctgcggttgtggcggacgaaaaacgctgcactatttatccactatcgcggtcttttctccacgctatccgcaatcgcctatcgtggaacattgtgtgccggggcatccggaagcactgtcgataggttacacgcaaagtaagtgggtggctgaacgctatgttatacaggccagagaacagggacttgatgctaacgtatttcgcataggacgtattggcggagacagcagaagtggggcctgccagagcgatgattttttatggcgacagataaaaacttttatccagatgggattggcacccgatccgtcttcactatcaacggacctgctgcctgtcgactttgtcgctgaagcgatagttgcattagcgcgttcagaagctacgcgacaggaaaacttccatattttccatccgcagagcactcgatttgagccggtgtatcgggcgattcgttctctgggctatccgttggaaacgacttctgacggcgagtggttgcaacaacttgagctgtgtgtcacccaggggcgtgaggttgcgctgggaccggtcattcatctctttaaagagaatttgttggatactggcgataacgcctacggtaattcagagacgactaagcgtattacacaactgggtttgcgctttcctgaactgtcggaggagacgttcaaacgtatgattgtttatttccagcggcagaacgaaattgtctaa

SEQ ID NO: 188352 - DNA, 1188 bp, Klebsiella oxytoca
gtgaacgtttttgaactcaggccggggttaaaggcctttctgctagcgctggccggttcggcggtgctgatgattggcatgggctacgggcgtttcgcctataccgggatcctgccactgatgctgaacgagcaggtgctctcgctgcgtgaaggcaaccttgccgcttcggccaactacgcgggttacctggccggcgcgctgctgctggcgaaagccaggcccgcggacgccagagtgttaaatctgctttccgtattgctcacgctgctgtgcctggcgttactcggctggctggtttcgccgctggccattatcgcggtacgcggaatagccggactgttaagcgcggttacgctgattgccgcctccctgtggctgctgcagcatatgaagcaccataacggcgcgccggtgctgtattccggcgtcggcatggggatatttttgtcggcggaatgtatctcgctgggcaagaccctggcgctctccagccagcaaatatggctgctgtgcgcaataagcgccggcgcgcttttcatcctggcgctgcgcctgttgctgagcccggcagactatcttattgcctatcaatcgcctgctggcgtacaggaccagcaggcgcaaggccgcgtgcgtgaagcgtggaagctgctgctggtttacggcctggccggctttggctacatcatcaccgccacctacctgccgctgtttctcagcggctcgctgaacgctatcgatccggtgcagatctgggccattttcggtcttgccgctgtgccctcgtgctttatctggcaccggctggtcatcaggtttggctaccgtcgcgcgttcacccttaatttgctgattcaggccgtcggcgtcattctcccggcgtggagccacgcattgccgttttgtctgctgagcgcgctactggtcggttttacctttatgggaacggtgactattgcgctgccgcagggaaggcggctgaaccatctggtctcgttcaatatgattgccgccatgaccgcgacctatggcgtcgggcagattgtcggcccgctggttgccggcgcgctgtatgagcgcagcgggtcgtttaatccttcgctcagcgcggcggcaggggcgctggtggtggccgccgcgctggttgccgccggagggcggcgagcgtcaaaggtcggaggctga

SEQ ID NO: 188353 - DNA, 837 bp, Klebsiella oxytoca
atgaaccacaccacattacagattttcaaaacggtggcggaagaacagagcgtcacccgcgcggcaaagctgctggggcgggcgcagtccaacattacgacccgcattcaccagttggaagaagagctgggcgttgagctgtttgcccgcggtaacaagaagatgccgctgtcgcccgccggggagcgttttttggcctatgcgctgaaaatcctcagccttgccgaggaggcccggcaggctctgcaccccgccaccccgggcggtaatttacgcatgggggcgatggacgccaccgccgccagccgcctgccgccgctgcttacccggtttcatgcccagtgcccggaggtgatactgacgctcaaaacccaacccagccgccagttgaccctgcaggtgctggacgccgcgctcgattgcgcgctggtatgcctgccacagggcgcttcccccgccgaagacctggaatatctgccgctctttcaagaacagctggtactggtgcttcccgcggatcgccaacgctttcgctttgccgccttcgcggagggttgtacctaccgggcgatgggtgaagcgtatctggcgcaatccgaggcggcggagagcgagatccaggacgtcggctcctatcacgcgatgctcgcctgtatcgcctccggcggctacgccggcatactgccgcagagcgtgctcgatacgctgacgctgcctgaagccagccaggtgcgcccggtcggtcaggcggtcacgcagcttatctggcgtaaaggctacgcgtcccccgccctcgataaaatgcgccagcttctcacatcagcctccgacctttga

SEQ ID NO: 188354 - DNA, 810 bp, Klebsiella oxytoca
atggaggagagtttgacaaagggtggtacgaccaatgtcccggtgcttagcgtcagtatcgcatcgttgccgcgtcccggcggcggggacattctcgccgacattcattttagtgccggtaaaggggagtgcctggcggtcattggcccgaacggcagcggaaaaacctctttattgcgcgcgatagatcatgaactgacggtgcgggagggcgacgttcgcttatatggccgctccgtctccgcattaacccggcagcagcgggcccggcagatagcggtactggcgcagaacgacgcccctgatatgcgtctggcgcttgaggattatgtcgctcttggacgtattccccacgcccgggatatgtcacggcgcgaacatgaaagcatcgtaacccgggcgattaacgatacgggattgcagaagctgcgcacgcgctcgctctccgcgttatccggcggcgagcgacagcgggcggcgctggcgcgggtgctggcccagtcgccaaaactggtgctgctggatgaaccgaccaaccacctcgatccgcaggccagggtggaactgctggcattagtgaaaagcctggggatcacggtcgttgcggtactgcacgatctttccctgattgagtcctttgccgaccgggttttgcttttatcgcaagggcgcgccctggcctgggacgtgccggagcgcgtactggtttcagaacggctttacccggtctttggcttgaccagctttaccgtaccgcatcccgaaacggggaaagcgctgcggattttcgaggttccgggctatgcgtaa

SEQ ID NO: 188355 - DNA, 507 bp, Klebsiella oxytoca
atggtgacgattgtcagccacaatcatttttttaaaaaagccatgcggctgaaaataaatgacgtaaaagcggcgaagcaggcgaatctggtcgatttgtgcttaacaaggtacccaaccagcaggcgcgcgcagtttcattttctgattaacagctttgaaatgaaaaagaattttgtttgctttaaggtcgaagataatattgtttgtttgataaataagaggcgcaccgcgcatatcgccaatatcatcgacagggtaactgacgggatcccggtgggggaagatatcactttaacagagcgagagtttcagtatatttttgtaatgaagtttaacgtgctggcaaaggattatccggaactgctcggcatttcaccgaaggcttatagctgcaataaaagaaaaataattgaaaagtttggctttcattcatttcatgcgctactggcgctgtctaattatttacacgctttttcgctgatcgataaattcatgccggagtaa

SEQ ID NO: 188356 - DNA, 141 bp, Klebsiella oxytoca
atgaaaatgaatcaatggtttgtacgtttgcgtaatactcccattccgcagcgcaagctgcatccggcgaaatggctgacgctgatcgcctttctgctgctgctggcgcagctggcggtagagtctttgctctcggtataa

SEQ ID NO: 188357 - DNA, 129 bp, Klebsiella oxytoca
atgctgtttatgaatgaattctctgtatttattgatttaatgcatgtctttacccttagccgctttgttacgcttaggtccattcattggcggtctgacagggtagtcgtgttggaaatctttttttaa

SEQ ID NO: 188358 - DNA, 627 bp, Klebsiella oxytoca
atgaaagtcacatggaacgtcagccccgtgggctaccagctgattagtaaacgctgccccgcctgtcatgggcagcaggatttcaccccatccggcgccttccgggtcaattcacaaaaaaagatgctcgatgtctggagtatctatcagtgcgtccgctgcgcgtatacctggaacatcagcctgttctctcgtttaccgatcagcaaaatcaatccgcagctctacgagcggcttatcgctaacgataaatctgccgtcgaggcttattctcacgatctgctggtgctgcggcgtaatcgcgcgtcgccgtcaggatcgcctgaattcatggtcaaggagcgctggcgaatcagccttgttcgcgcttctcaggtgagagtggaggttaccgtcgcgcgagcctttcagaccagcctgctatcggtgctgcgaagtcagctgcgccttagcggtagcgctgtccgtaagcgccttgcggcgggagatatcggcggcatcacgctgaaggcgttgcgatcgccccggctgaggccggagggatatacgctttatatcaccagggaggttctcctcgcccgcaggcgcattccgttgtctgcaggcccggatcgcagaagacgatag

SEQ ID NO: 188359 - DNA, 144 bp, Klebsiella oxytoca
atgcaggccggggggctaaaaatcataccttcatcgcgattattccgcgattttgcccgcgcgcgagctggcgactcagctcaggtcgtgcagatctttctcgtttggcggcagcagcgctatatcgtggaaattaacccgtag

SEQ ID NO: 188360 - DNA, 573 bp, Klebsiella oxytoca
atgcatcaggtatttcactggattaacgaacccgcgacatggtcggaagaggacggcgtactccgcgtagtcaccgatgcgcaaaccgacttctggcgcgaaacctggtacggatttgagcgcttctccggccatatctacgcgacggaggccgcagcggatttcacctttcaggtgtgggtccgcgccgacttcagcaccctgtatgaccaggcggggatcctgcttatgcaggacgcgcaacgctggctcaaggccggtattgagtacaatgacggcgcgcccgctatcggcagcgtattgacgcaggggaaatcagactgggcgaccggtgttttcccgggcgaccccggcgaattttggctgcgtctgacccgtcggggggaagcgctgcgcctgcagtactctacggatggccgtcagtggccgctgctgcggctgtgcccttttccctgcggagcggtgaagatcggcgtcatgtgctgcacgccgcagcgtagcggactacgggttaatttccacgatatagcgctgctgccgccaaacgagaaagatctgcacgacctgagctga

SEQ ID NO: 188361 - DNA, 435 bp, Klebsiella oxytoca
atgttcaactctcttagcgccacgctaatcatttttatggcaacaacgggcgcggcattctctgccgggcaggagaacggcgtgaagattcagtttgtatttaacgcaacgacggtagtcggtttgctggatgagagcgcagcggctaatgagttcctggcacagctgccgatgacggtgaagcttgaggattatggttccacggaaaaaatcgcctggctgccggctaaattgcgccaggcggatcctggcgcatcgctaaccccacggcgcggcgacatcgcctattacgcgccgtggggcaatctggccatttttcgcgaggattttcgccaatcgtccgggctgataaagcttggccgggtggtcgaggggcttaaatcgcttgaccagccgggcacagcgacggtgaccatcagccggtatgttgagtag

SEQ ID NO: 188362 - DNA, 972 bp, Klebsiella oxytoca
atgggcatcattcgaacgttaaacggggatatttccgctcatcagctgggtgtcacctacagccacgaccatatctactgtattccgccctattgggccgagcgtcaggatgacgatctgttactcgacgatccacaggcatcagagcgtgaattaagcgattttcgtgaggcgggcggccgcgccatctatgacgccaccgcgccggactatggtcgtcaggccgcagccgtcgccgccatggcgcagcgccagcagctgcacatcatcgccaccgccggtttcaacaaaggttttctctggagcagcaagcggccaggctcagcgcagacttttgccgagtggatcgaacattcagagattgatgaactggttgagcacgtctgtcgcgaggtcacagagggaatagagggcaccgcgcatcgggccggcgtggtgaagtgcggcaccggctacaacaccatttccccgctggaagaaaaaaccatggaggtgatcgttcgcgcccagcagcgcaccggcgcgccaatgcacagccatacggaaatggggacgatgggactcgagcaggcgcggatcttcaaaaaatgggggctggatttatcccgcttatgttttgcccatatggatcgcaaccccgatccctggctgcaccgtcagatcgccaacaccggggcgtttctctctttcgacggtatcagccgcatcaaataccaccctgagcatatccgcacccaggccatcctggcgctgtgccagcggggttatcaaaaacagatcttaatcggcggtgattttgcccgtaaatcaatgagcgcgcactacggcaagggggggctggggctgaagttcatccttaacgactggcggccaaggttccttgaagaggcgcgggaagccggatttgacggcgaagcgctgctgcacgattttttcgtcgacaacccggctcgttacctcgcttttgcctga

SEQ ID NO: 188363 - DNA, 1056 bp, Klebsiella oxytoca
gtgaataagaaaccgcaacccaggatcgcgctggtcgccggcgccagcggcattgtaggcagacagctagtgaaaacgctgttgcgccatcggtgggaggtcattggcctcagccgccatgcctcgcctcacccggatgacattcccgttattaacgtcgatttactcgatgcgcgggacagcgcgcagaaactgcaatcgctcaacggcatcacccacattttttacagcgcatggttgaacgcggcgaactggacggaaatggttgaaccgaacgtcgccatgctgcgcaatctggtcagcaacatcgagaaaacctcaccgctgcgcacggtaagcctgatgcagggatataaagtttatggcgcgcatcttggtccgttcaaaaccccggcgcgagaaagcgatcccggcgtacccggggccgaatttaatgccgctcagctcacgtggctcagccagttccagcgcggaaaaacgtggcgctggagtgcgctcaggccgggcgtggtcggcagcacggtgcccggcaacgccatgaatctcgcgctgagcatcgcgctctacgcctcgctgtgtcgggcgcagaatttaccgctgcgcttccccggctcggaacaaacctggcgcagtatcgtcgatcatactgacggcggattgctggcggaggccacgctgtgggccgccacctcgccgcaggcggaaaatcaggcgttcaacgtcaataacggcgacctctggcgctggtgcgagctgtggccgcgcatcgcggactggtttgaactgccttccgcgccgccggtcaggctctcctttcaccagctgtttgtcgattaccgcgcgcagtggcgcgaactggccgggcaggatctggtggaggcggatattttacggctgaacgacggtacgtttgccgatttcgtctttagctggaattacgacatgtttggcgatggcagcaaactgcgccgggcgggcttcacggacatgcaggccaccgacgacatgtttttccgcctgttcgcgcagctgagagccgcacgcgttatcccctga

SEQ ID NO: 188364 - DNA, 132 bp, Klebsiella oxytoca
atggtgggatcatgcgaccatggtatgttgcgtaaaataagccccggagagtcggtttatggccgttttgagcaccagacgggcggtgtaaaagcggacatcaaggttgtccgcaatttcccgcaggtatga

SEQ ID NO: 188365 - DNA, 1323 bp, Klebsiella oxytoca
gtgagatttgcatcagttcctttcaatcagaatcaggtgggatggccgctcaacgacattgaccatcacagacaaccgcagctgagcggcgacatccaggccgactgggtgatagtcggttccggctatgccggcgtcagctttgcccgccggctggctagcctcaatccgcagctgaatatcgtgctcatcgacgctgaatgcgccgcgaccagctcctcagcgcgaaattccggctttattatcggcctgccgcacaatatcggcagctctaccgccgagctgaaaaaagcgcaggattaccgcgccctgttgcaggaagggatccgcctgctcgatgaaacggtgaccgagcaccagatcgcctgcgaatgggaaaacgtcggcaaataccactgccagatagatccgtccagcgaagccattatgcaggagtacgtggataacctgcagctgatgcaggagccctacagcctgctggacggcgaagcgctgtaccagaagctgggaacccgcctctacagtaaagggatctatactcccggctgtattctggtcaacccggcaaaactgatcgcgggcctcgcgcgtcatctgccggaaaacgtcaccgtttaccatcagaccccggcgctggctatgcgccaggaaaacggcggcgtcagggtgacgacgctgcagggtacaatccgcgccgcccaggtcatgctggcgaccaatgccctctcccgcgaactctcgccgaccgtgagccgtcaggcgtcaatggcgacctacgccagcattaccgccccgctcacggcggagcagcgtcagcgcctgccagaaatggaaagttgggggttaacgccggtcaatgctatcgccggggccacgctacgctatacccacgatcatcgtttcctggttcgccagcatgtcgatccggcattgcgcggcgtgattaccgccgggcagaccgccaccgccgcgcgccagcatctggcgctgttccacacggcctatccgcagctacgggatgtcccgctggagcgaacctggtccgggaccatcagcgtcacccgcaacggcgcgccggtctggggagagcttgcgccgaaggtatggacagccggaggctgtaacggcgccggggtatccaaacaaaccatcgccgggacgctacttgccgatctggcgatgggacaggacaacccgctgatcgccgccatgcagtcgctcggccaggcaaactttatgccgccttccccgttcctggatatcggcgtagccggggcattatggaaagagcgctacatgggccgtaaagagatgcccgtgtag

SEQ ID NO: 188366 - DNA, 507 bp, Klebsiella oxytoca
gtgaaaacatggaaattagggcgccttgccgttctttgctgcctgatagccgcatcaccatacggcctggcatcagacggtggaacaaccacgttgactatcaccggcaatattgtcgaacctgaatgtgaaatcaatgacaatcaacagattgtggtcaattttggtgaagtactgaccacccgagttgatggtgcgaactacgaaacgccgattgtctatacgctgaaatgcacaaacctgcttcgtaatacgttaaaaattaatctcaaaggtaacggcgcgtcatttaacggccagctgtttaccacagatgtaacgggccttgggataaaagtgtacgacgcgagtaaaacgactatcgctcccaatagcggagtgctgagttttacctatgccgaaaataaacctccggctctgtatgcggttccggtcatgcagaccaacgcctcgctaccagacggggcatttaacggttcagcgactatggtgtttagctatcaatga

SEQ ID NO: 188367 - DNA, 1287 bp, Klebsiella oxytoca
atgagtcatcgagcagggaatgcaatcgtcttcattctcggtgtcacgatgattccatgcgttcaggccgatgtcttaaactatgccagggattggacccagcgcgaagaagtcaataaaagcagcgagcaatcgcaggaagagagacgtcctgcgccgcgggaaaaatcaaagacgccgccaaaagcgtctgctaaagaaaagattaacgccaggccgtccgtcgcggtgaaagccacaacggcgccggcaaaaataaaagagagagatgaaaaatctgcgaaaactcctgatattccgccttctggtgttatcaaatatccggaggtgaggagggagcaaaaaacaataaacaagaacgaaatagacgtttatcttcctgattctcgtattttaggtcgctggctgaaatcggttattcaacatatttccgccacgccttcagagcgaatgataaaagagctatatctgaaacagaaagacgaaataaaaagcatgcgcgataagttagcccagcgtgagggtgaaaatgttattttaaaaaataacgacaaagaacgtcatttaattatgtcaaagctcggcaaactggaggcggagaatgggcagtggaagcgtttgacgcaggaaatgcaaaaaaatctgaagctggcaaagtatccaccactccctacaagtgaacaagatttagcggattttgccgccggtatggcgatgggtgttgatattgttgaactgcttgaacagcgaaatgaacaaggtgttcagattgatcgtaaattatttctggcggggataacggaaacgctacgcggagaacgccgcctgtctcaggaggcgtttgaacaacatcttgccagggctaatcagcgcgtcagcgatgctataaagaaaaccatgaaaaacagggaggtacgcgacaaggaatggttacataactttattaaacaggaaaatacattagccgccggtaacgaagcctggttccgggtcatccataccggtaacgaggtattacccgacaatgagtcggcaaccgaattaacgctttcgtttatacgtcgtctgactgacggaaccttgattgcagactccgatctttctggtctggtactgcaagaaaaaattagcgagctgccgacctggctgcgggtggttgcaaaaaaaatacgcttgaatggtgaagccgaattagcggtgaaagtaaatgaatacggcgacccggcagaacggggaaactatgtcgagcattggaaagttcgagtggttaaacaacgtacaatgtaa

SEQ ID NO: 188368 - DNA, 975 bp, Klebsiella oxytoca
atggtacctactgctaaaccactacacttgccagtgcatatagcaactgagaataattatttttccatggggcttatattcctgttgaaagagttgtttgaagaggagtatcagggcggagtgattatctctaagactagcgagcctatggccgcggatctgatcgtgaaattccacacgccgggtgaaaaagtgtttgattgggtggggtgtcatgagttccgtacacacaatgaatataagttcaaaatgttaggtaaaaaatggttaagcgtatatccgcgtagcgaacattacgatcggaatattaactgtccggtcatcaatgccgttattaccatgagaaactccgtggccactattcgcagaaaattgtttactttatttttcgctgactcgatgagcggccctccggatctgcgtaagccaaactgctctaaatgcccagggccttaccaactggcatggcgagaacagttgatgctagggtatttaagtcaaggcttggggcattatgagatttcgcaaaaaatgggttgttctataaaagcattgagcagctatcgccgttctattatgcgtaaaatcaatataaaaaggtatagcgacttcgtactgtggttaggctctcaggctgtttcaaaaaaatacgctgaaattgtccagcatcatgttccggaatatgctgacgatcggcttatctggaaaacaaaactttctcctgaaggcggtgatgaatcagatgataagtaccgtacgttgcaaagcatgaaacgcctgacgaccagtcgtttacatttaaaacaatccgaaagtgaaatctggctgacgacacgagagatcgccaacgaaatggatattagtatttacagcatgcgctatttattatgccagatggaaaactccggagccgtaataagcattaaaaccgggagcgggagaagtaatacgctacgctggaaattagcaagttaa

SEQ ID NO: 188369 - DNA, 504 bp, Klebsiella oxytoca
atgggcaaaagtaaactaccgtttcttgggcagtcgggcattgcgagcgccgacgcttctcgggttccgcacatccaggcaaaaaaagaacaggttcggtctcgctcccaggagatcggctggctcttgtgggcgttacagtatgttttttttatcggcgtggcgctgtttgtctctgtccgctgcgggagcaaaaagctgacgccgctgcgcgagagacgcgtggaccttcatcaaaccgcctgttccgggtgtttttatgtctcttcaactccgaagtcgaagatgccccggagtgcaccattgactctgttattcagccgggcgtttacggcaccattttctgctaaacgttacgccgtcatcgatcggcggatttataccgcgggccatttccgcgctcggcatgctgatgttctggcacatggtattgtgtcgttatatttttgccctctatccccagcccaccgttccgggttgcgggacctgccagccgcggcttag

SEQ ID NO: 188370 - DNA, 1758 bp, Klebsiella oxytoca
atggggcgtttggcgctgctgatctctacattactgctgatctgtccggcacgggcggactcatggtatatcggtctgctgtcgattcgcggcgatgccattgctcgcagcagctggcagccgctggaatcatttctgaatcagcagatgccggatcagcagttccatattcgtccgctggatctccatgagatgcaggaagcggtcaagaacggtagcgtgcagtttgtcgtgacccaccccgggcagtttgttcaactaaatactcatttccccttacgctggctggcctcattgcgcgcttctcatggcatgaagaacataataggaagcgtcatcctggcccgtcgcgacggcgaaattaagacgcctatggatttgatcgggaaaacggttggcgccatcgatcccctggcttttggcggctacctgttgggatacaaagcgctgagcgatgccggattgcggccagacagcgatctccatctgcgcttcaccggatttcctgccgatgcgcttatttatctgctgcgcgaaaatgccgtgcaggcagccattgttccggcgtgtctgctggaaatgatggatgaagaggggctgattgataaagttgattttgtcgcgctgataacacgcccggaatccgcaccttgcgtaaccagtacccggctttacagagactggtcttttgccgcgctacccaccgtaagcgacgaggtggccgatcgagtgacccgcgtgttgcttaatgcgcctgataatgcggtttttcgttggggcgcgcctgcctcaaccagccaggccgaagcgctcatgcgcgaactgaaacagcatcctcagcagcgactgttatggatggatgtcaggaactggtttgttcagaatcgcctgctggtggcgggagccgggctgatattgatactactgatactcaattatatctgggtgatgctgctggtgcgacggcgcggcaggcagcttgaacgcagcgccatccggctgcgcgagcaggagcaggcccttgaaacggcccgtcaaataagcgtactcggcgaaatgacttcaggtttcgcacatgagttaaatcagccgctgtcggctatccggcactatgctcagggctgttcgatccgcttgcagaagcaggatccgcagcatcctttactgtcggcgctggagaacattgatcttcaggcgcagcgcggggcggagacgctgcgcaatctgcggctttgggtgagccaggcgcaaggagaatccgttacggccgaaaagtgggagagcgttcgcattgttcaggcgattgataatgtctggcagtggctgcacgtgccgcgacagtttcccggacttcggatgataagcagcatagaccacgccctgaccatcgtcttaccgcctgttctgcttgagcaggtgctggcgaatctgatcctcaatgcggcgcaggccggagcgaagatgctgtggattgatgccgttcgcgatgccggaagcgtgaggatcgtcctgcaggataacgccggcggtatcgatgacgcgcagctagcgcaggcattccagccgtttaagagcagccggcaagagggaatggggctggggctggttatctgtcagcggctggtgcgttatggccggggagagatcggcataaggaatcaaacggcgcccgatggacggcccggcgcggtagtggtactggcattcacgcatcaagaagagcggagcgacaatggcgataattcatctcttagatga

SEQ ID NO: 188371 - DNA, 588 bp, Klebsiella oxytoca
atggcgataattcatctcttagatgacgatccggcagtgacccgggcatgcgcttttttactggagagcctgggctatgaggcggtgtgctgggaagagggggaacggttccttgcgcaggccgatctgtatcaggtcggtgttgtgctgctggacatgcggatgccggtgctggacggccaggcggttcacgaggcgctgcgtcagcgcggtagtaccctggcggtggtgtttttgaccgggcatggcgacgtgccgatggcggtagaggagatgaaacgcggtgcggtggattttctgcaaaagccggtttcgctaaaaccgctgcaggcggcgctggaacatgggctcacggtctccggcgagcgctttgcacagaaaaaagtcgtcgattgctatcagcaacttacccctaaagagagagaacttgcgctgctggtgatgaaagggctcatgaatcgggagattgcgcaggcgatgagtattgccgtacgcacggtggaggttcatcgggcgagggtgatggagaaaatgcaggcggggagcctggcggagttagtcagcaaattacagcgagttacccggtga

SEQ ID NO: 188372 - DNA, 1995 bp, Klebsiella oxytoca
gtgacgataaaaacacgcctggacgtggcgatggcgctcgccttgaatctacccgcggcagccttcgccgcagatggcgcttcggtaaacgaagagcagatggtcgtcaccgccagcgggttcagccaggagcgacgcgaggcgccggcgacgatctcggtgctcgatgagaaggcgctgaatacccgctcaaaccagaacatatccgaagcgttgcgcgagatgccgggcgtgctggtgggcaacggtcacggcagcctggcgaccggcgatgttcagatgcgcggcatggattcgacctatacctcgtatatggtgaacggcatcaagcaatctacccgcgaatctcgtccctacgggcatcatattgggacggaagcggcgtttatgccgccgctggccgctattgaacggattgaggtcattcgcgggccgatgtcctcgttgtacggctctgacgctattggcggcgtggtcaacgtcatcaccaaaaaggcgtataacctcgacacctggacgggggtgctggaggataattacttcctgcaggagaaaagcgaatacggcaacaccaaccagactaacgcgttctttatggggccggtagtgccgggtaaactcggggtcagcgtgggcgcggattatcttgatcgtcgcgatgatgacagccccacgaaagaacgttttgttaaacatcagtccggaaatctggatgccacgatttctctgtcgccaaccgatacccagctctgggatctgaacgccaccaaaggcaatcaggagaaaacccataacgacaaagagtggtactggggttttgaccgcgatgcggcctcgctgtcacagcatgcgtggtacggtgatgacctgctggaggtgaagaactttatcagctacgaaaaggcccgcacggaatatcgcgtgcccggcatggacccgcagtttattaagcagaataattttgaggccaatagcgcgaacacctttacgctggccgatcacaagctgacgttaggcgtcaactttacgcgcaacgaactgaatgacaccttcggtatcgtggacaaacaggcgcccggcgtcaccccggtcagtaaaattacccgccacggctgggcggtattcgcggaagacgcgtggatgatcgtcccggactttaccctgacgacctcggcgcgcctcgatcatgatagctatttcggttatcacgttacgcctaagctgtacggtaactgggccattgacgaaacctgggcgctgaaagggggcgtgtccgccggctataaaaaaccggatttacgccagaataatgccggttttaccagcgtctacggggcttatccttattctgaaatcggtattggcaacgacgatctcaagccggaacaaagcatcaataccgagctgggcgtgtactggcagcgggatgccctggcgctcgacgccacccttttttacaccaaatttaaagataaaatcagcgaccataccatctgtacctcatcggctacccagaagtgccaatacaacggctataccgccgatagcgtgtcgcaatatattaacgtcggtgatgcgcagatctacggtgtggagctgaacggcgactggcaggtgaccgcagcgctgaaggcgaacgccaactatacctacacccacagcgaacagaaaagcggcgagtataaaggctatgcgctaaacgatttccccagcagtatggccaacgtttcgctgacgtggaacaccacttccgatctggaactatggaccagggccagctggcgcagcagatcgccggatatcggcaagtccagcgcaacggacgcctacgcgctagtggatttaggcgcgcgttaccacctgactaagcgcgtcaccctgatgagcgggatctacaatctgtttgatgtaaatccggtttacaccaccgcctaccggcagacggcgatgctggaagggcggcgctataatttcggcgggcgcattgagttctga

SEQ ID NO: 188373 - DNA, 429 bp, Klebsiella oxytoca
atgttcgtgaaaatcagcccgctgctcatttgccccctcgctttactcctttccgcctgctcgggtagtgcttctgcgccggacagcaccgaagacgctaaaatatcggcagaagtggataagatacttcgcgattatcaaacgggttcagatacttcaccgcaggccaatgcctcacgctatctgacccagatccagaaggctatcttcgctaagatagaccagccggcgtccaggcaagggcaaacatgctcggtgcgcttaacgctacagcgtgacgggacggtggagaatccaacggtcgagaacggcgatccggcgctatgcgcggaggtgatgtccgcgctgagacaagccacaatcccgcctgcgccagacgaaaaaacctatcaaacattcagtcatgtcgttctggacttcaggccctga

SEQ ID NO: 188374 - DNA, 561 bp, Klebsiella oxytoca
atgaaatatcaggatctcttggaaagcgtgttgttaaacgacccgatgagaatgaacgcgctgtacgccgtgcaggcgctggaactcaacgatggctggattggcgccggctttgtcagagatgcggtctgggatcatctgcacggctacgggcaaaggccagtttcgggtgatgtggatgttgtctggttcgacgcgaaaagcgcgacttccgcctgtgatagcgcgctggaagagaggcttagccagcaaaactccgtttttaactggtcggtgaaaaatcaggccagaatgcatcaacgcaacggacatcaaccttatcgttcaacggagaatgcgctgctgtactggcctgaaaccgcgacggctatcgcggtaagattgggagcaacagatcatgttgaggttatcgcgccctacgggctggacgatctctttgagctccgtctgcggccaacgccggtatttgcgcagcataagctggctattttcagccagcgcgtcgcggaaaaacggtggctacagcgttatcccggcctgcggcttctcgtcccgacataa

SEQ ID NO: 188375 - DNA, 534 bp, Klebsiella oxytoca
atgatttcatctgaacatgcgctagtgattattgatatgcaggaggggcttttccgcggtccggcttctcctcattccgctgatgccgttctgacaaatattcttctgctcatcgctaaagccaggcagtcacaggtaccgatcttttttattcgccacgtcggacccgacggctcccccttctctgcgagcagcccgttaaccaggctgatagccgagctggatgtggacgttgaacgggatatcgtcttaaccaaaacgtatcccagctgctttcgcgacaccgaattacagcgccagcttacgcagagaggcgtaaagcagctggtgattgccgggatgaaaacagagttttgcgtcgataccacctgccgggcagcgccggagctgggattcacggccgtgctgatttccgatgcgcataccacaatcgataatcctcatttatccgccaaggacatcattggccatcacaaccgaacgctggcgggcccgtttgtcgcgctttcaaccgcggccgactggcgcttttga

SEQ ID NO: 188376 - DNA, 141 bp, Klebsiella oxytoca
atgaaattgcgggtaattaattttacgcggattttatgtcaggcttgtgcggatattaacaaattccatattcattatctggtaatctttcctgaggtttccggttgccaaaacaactattttgccgctggcgatgattaa

SEQ ID NO: 188377 - DNA, 231 bp, Klebsiella oxytoca
atgggcaacatcatcctgtataaagttatcgtcatcatggtcattgtctggtggggctggagtctactgaggagtaagcagaaaaagcagagcctggagcccgccattgcgcaggcgaatgccagagagcgttatcagtggcgttatttcaggtggggctggagaggtgtgcaaatcgtctgcggtttttatttgctgataaccctcatccagttccttttacgctactag

SEQ ID NO: 188378 - DNA, 444 bp, Klebsiella oxytoca
atgcttaaacaattaaccgctatcgttttgctggctgcagcaaccaatgccgtggcgcaagacgatatgacgctggacagtctggtcaaaaaggaaccggcagcctttagtaaaatggtaaaaggtcaccctctgcccgcctgggtaaagacgggcggaaccgcctcgcctgccagaacggtgaagcttggcgcagagacttatcaggtactcagcgtctgtaaaccccacgattgcgcgacggaacgcttcgccgtgctgtggtctgaaaagtccagacagatgagcgggcttttctctaccgttgatgaaaaaaacgcccaggagaaactgacctggcttaacgttagcgacgatctttccatcgatggtaaaacggtgctctttgccgccctgagcggcagcctggaaaatcatcccgacgcatttaactttcagcagtag

SEQ ID NO: 188379 - DNA, 1539 bp, Klebsiella oxytoca
atgaacgactccttatcacgccatcgtctgtggatattcttatttttaattgcggtgctgagctttggtacagggctttgttactggcaaatgcaaaaaaaagtggataacgatattcatgcgcggcttcagcaggcgatagccagccttgatgtgaccgtttctcatgcggagcaggccgctaatatggctgagccgttctatgggaaaagctgtaatgagaatgtcctgacggagctacgcacgctggtggccactattcccgatgtgcgcacggtgaatttaggtaaggataatgaaatatactgcacctcggtttatggcggacggaaatttcagttcgatcgccgccaatatacgcatggcgctttacgtctgctgagcggcagtgaaatcacgccgctccatccattgatggtttacagcgaacaggacgaccggggaaatacgattctggtgggtgtggatggctattatttatacaacattttaaacgttctcgacggcgacgctcatctgtatcttcaggttggcgaccgggtaatgacccataagggggaagtgacaacgagcccgggtattcgcgttcccgtacgcatggaatcagagcagtttcactattcggttattgccgaccgccattacgcgtccggccccggcgcatttatccgttatgaacaacacacccttatcgccattattctggcctccctgctgctgacatttttgttcagaaactacctccgctaccggaatacgattgagtatcagctcaggcaggctatcgaactcaaacagctcaaaccctatattcagccgattatcggcagcgacaccggtcagatcgtcggcggcgaagtgctggtgcgctgggagcatccaaaacaggggtttattgcgccggataaatttatctccgtcgccgaacagaccggtcttatcaaagaagtgacggcgatttgctttgctgaggtgagtcgccagctccggcgacagcagtccgtcattcccgcggggctgtttatctgctttaacaccagctcggtaaacttccaggacgacgaaattgtgaccctgtgccagacgtttacccaacagatgaaagcggcaaaagtacgccttgtcctggagataaccgagcgggagtcgattgcaaataccctgcagacgtcagcggtgacggaccaactcaggcgtattggcgtgcagttttcgctggatgattttggtaccgggtatgcaaactacagctacatccagcagtttaatccggagattattaaaatcgataaagtctttaccttcaacattgtgaccaataacgcttcagcgctggtggtgatgaatatggtcaatctggcgaaaaaatttcattgccagattattgccgagggcgttgaggataaagagcagcttgagatgctcaaaaatatgggcattaccctctaccagggctactacttttcaaaaccggtgccggttgatgaatttattgagatgcttccgcgcacgtttctccagcgcagagagggcgagtaa

SEQ ID NO: 188380 - DNA, 909 bp, Klebsiella oxytoca
atgagcgggatgactgatgagaatcggcgttctcaggttgcgcgtaaaacgacgctggtcagcgtggtggtcaacctttttttatccagcgctcaggtgctggcgggcgtgttttgcggatcgcaaggactcattgccgatggtatccattctctttccgatttagtcgccgattttgtcgtgctgctggcgaataaaaaaagccgccagccttctgatgacgatcacccctacgggcattggcgctatgaaaacggcgcttccctggcgattggcgcgctgctgttactggttggcgcggggatgctgtggtccgcctgcggcaagctgtggcatccggagtctatccagaatgtgcatattaccgcgctgtgggtggcgctcgccgcgctggtcgccaaagagattttattccgttatatgctaagggcggctaagcaaatccactcttcaatgctgattgccaacgcgtggcacgcccgctcagacgccgcgtcttcggtagtcattgcggtcggcatcatcggtaatctggccggtttcgcgtggcttgacccggtcgccgcgctggtcgtcggcgcgctggtcacccgcatgggctataccttttcgtctgacgccctgcatgacttaatggatcgctcagtggaccgcgataccgagcagcagataaccgccaccattctggcgacgcccggcgttgcggcgctgcatgacctcaaaacccgccgtgccggagatttcattctggtcgatgtgcacattgaagtaccgggaaatttatcggttgcgcaagggcacgatattgcgctgacggcgcgctcgcgagtactaaatagccataacgttatgcatatgatgattcatatcgacccttgtcgcgcggaaatagccgcaatgaatacgtag

SEQ ID NO: 188381 - DNA, 189 bp, Klebsiella oxytoca
atgaaagaatacacagcggaagatagcttccagtcggcggcatcaacgagtaaaaagtgccatttatcctcgatacccacagctaaaagtcagtcaatgcatccccgtaacgaattgttccggttaatgaatgaattcgtcgacgagcatgggtctatcaccgatgatgaatacttcagggtgctctga

SEQ ID NO: 188382 - DNA, 1257 bp, Klebsiella oxytoca
atgcgaaaaatcactatcctgggtatctcggctttactctgtacaccgctgcttctgcaagggtgcgtgtcgcaaaatccgcgcgggacagcctcccgcccgcagcttacggcggcggaagcggcagccttcaccatggaacgctattttgcccaaggcggtgcgttgagtgcccccgatggcccctggtcgccatcgcctgcgcgtctcccgcgggccgaaagcgcgtggcgcgtggcgccgtcgggtgcgccgttcacccgtattcagcaggcggtcaatgcggcaatcaaccagcacgcggccggtgatgagcgtatctatatccgcattgaaccgggtatctatcgggagacggtctatatccctgaaggggcgccgccgataaccctctacggcgccggggataatcctcaagcggtgagaatagagctggcgatagactcgcagttcccggtatcgcgctatcgccagcaggtgaatagccagcaacagtatcgtgaaggcgatccggcatggtatcagtatgcgctgtgcgccggacgtactgccaggacgataggcaccaactgcgcggcggtgatgtggtcgcaaagcgcggattttcagctgctgaacctcagcgtagtcaatagcctgctggacaccgtcgacggtgcgacccatcagggcgtggcgctgcggacggatggcgatcgggtgcagctggagaacgtccgtctgctgggacgccaggatacgctctatgtcaataccagcaatcggcgcaatgaggcggtgaccgaccgtatcagccgggtatatgtcaaagacagctacgtagaaggcgatgtggactatgtttttggccgggcaaacgtggtttttgataatgtccattttcacaccgtctcaacgcgccgctcgcccgaagcttacgtgcttgcgccgaatacgttgccggataacccgtgtggatttttggtgatcaacagccgttttaccggcgatagcggctatcggggcggcttcaaggcgaagctgggccgcgcctgggatcagggggcgggcaagaccggctatttacccggaaaaaccgctaacggtcaggcgcttatcgccaacagtactatcgatcaaagctacgatcggctttccccctggggcgctgcggccaccacctcccggccgttccgcggcaatcccgccgcagaacgtcagcttgatgatgttgccttcaatcgcctgtgggaattcaataaccactggcagccctga

SEQ ID NO: 188383 - DNA, 252 bp, Klebsiella oxytoca
atggaatgcccggcctgcggtatcatcagcagcgggatcccggcggcttcactctccgtcgcctcccgggcaggcagcgaaaacgctccgtatatcagcgctctggggcaggataaattgacaaagcgcgcgaaccaggagggattagcgcccttcaccaggctggccgcgccgcgccacaccgcccagggggcgctgttttgcaggcagccggcccagggcgaggtttcggcggagagcatttcggcgtag

SEQ ID NO: 188384 - DNA, 555 bp, Klebsiella oxytoca
atgaacggtttttattctcctcaggctggcgccaccgtgcgctggctcgatctacccggttacggcgaacccattgtgtttatccacggcctgggctgtgcctcaagctatgattatccgcgcgttgctgccgacccggcgctggccgggcggcgaatgatccttgtcgatttacccggtttcggctatagcgataaacctgaatccttcagctaccgtatcgccgatcaggccgcggtagtggtcgagctggtggatcgcttagcccttgaacgctgctatttatttggtcacagcatgggcggcagcgtcgcgattgaagcggccgggcgccttgccggacgggtgcgggcgttgctggtagccgagcccaatctctatcccgggggggggaatgtacagcaggcgcatcgccgggcaaacggaagaacgctttattgcccgcggctacgccgaaatgctctccgccgaaacctcgccctgggccggctgcctgcaaaacagcgccccctgggcggtgtggcgcggcgcggccagcctggtgaagggcgctaa

SEQ ID NO: 188385 - DNA, 285 bp, Klebsiella oxytoca
atgcgaacattcggcgcaatttgttgcttcgaagttgatattgttttgaataaaatagcgtgttttctctttgtggcctgcgccacggcgatgctttacggcaattttccggccaaacagattattggctgtgaaaagcagggtggcgcggaatcgatctgcatagcggccgcgtgggatagtgaaaaagtcgatctgctgccggcatggaatcccgacgtgcaaaagctgatggccgcgcaaaagcgtacgcttgcagcggaggcggggtctttcaaatcgtaa

SEQ ID NO: 188386 - DNA, 279 bp, Klebsiella oxytoca
atgaagcgttcaacctgccgcctgctcgcaggcgccatcatgtcgatagcggccacctcagctcaggctttacaagccccggaagtggacctgcgcgatccggcgatttgggaggagaaagcggcgtctccgctcaccgctcacccgcagccctgcgaggtgttcagcggcccgcactgcgcggtctgggatgatgagaagtcggatattcagcgcgaacgagagcggcgggaacagcggcgctggcagaatggttatgaaaacctgcggcgggaataa

SEQ ID NO: 188387 - DNA, 165 bp, Klebsiella oxytoca
atgaataccttcaccatcatggctatccccttcttcgccgcagcgatcgttatgctgacgctgggggcaaccaggaaaagtcgtgcctgcgctatcgtgggcggcgttttgctggccgcgaccgtggtaaacgcggtgacgggcatggcgctacagggcgggtaa

SEQ ID NO: 188388 - DNA, 177 bp, Klebsiella oxytoca
atgcccgtcctgcggtacaggccgcattactggccgaggcgtcgctttaaggttgatgtggggatttgggttcaggcgttactgcgtaaaaacgtagagccttatgaacaggcattcatcaaagaagacgacgaaaaaggggtggataacaccgggcagatgatcagcaaccgctaa

SEQ ID NO: 188389 - DNA, 912 bp, Klebsiella oxytoca
atgacacataccgcagaattcctcgtctttggcgccaccgggcagcaaggtggcgcagtggcccgagcgttacggcgggccggacgtcaagtccgcgctttcgtacggaatccgcatagcgaagtggccagagcgctgacgacagaaggaatcacgctcgccatcggcgacttgttcgacctcgcatccattgaccgtgcaatgtcgggtatccagggcgtatttagcgttcagaccagttctccggcaggcgagataagcgacgagcaggaggttatgcagggaaaagccattgccgatagcgccctggcggctggtatccgccatctcgtctattcttcgtccggggcggctggaaaagccccaaccggcatggggcactttgacagtaaatcgacaattgaagattaccttcacgccttgccgctctccacgaccatcacgcgcccggcaagctttatggaaatgatgctgctgcccggcatgggactaaacagcggccattttttcttcttcatgcaacgccatcaggcgatgcagatgattgcgctgcaagacctggggcgcattaatgcccagattctttgtaatcctgaacgttatcgggggcagactctggaactggccagccaggcgttgaccggtgaagacttgcagcgggctttctcagatgccgccggtcatcctgttcattatcaccgctttcctgacgagctgttagcgcagaacacttttcttcgccagctcacggcgttggtagacaatggcattgtcgcaggctcggcggatatacccgcgcttgaacaggagttcggtatgatgatgacgctggaacaatggttggcagggccagcaaggcagagctttaacgcggcgcttaacgccccacaggccaatcttgtcctgcgatag

SEQ ID NO: 188390 - DNA, 285 bp, Klebsiella oxytoca
atgcgctttagcgccattcggcgcggcattcctgacatttcgcagcgtatgttgaccctgactctgcgtaatctcgaaagggatggcctggttgcccggtattattaccccgagcttccaccacgggtggaatatcaactgactgaccgaggccggtcgatgttggagccgctggcggggttcactgactggatcagggatacctggcaggatattgaggcatcccggaaagccttcgatgattcagaggacaaacgggctgctgcgtccatgacccgcttgtag

SEQ ID NO: 188391 - DNA, 396 bp, Klebsiella oxytoca
atgtttactcatatgcgtattgctaaacccgtcgccaatctcgaaagatcatttctgatgtacagcaaggggttaggtctgcataagattgctgaattcaacgatcatgacggtttcaatggaataatgttagggaggggagacttagactggcacatagaattcactttttgccgaaaccatcccgttcaacctttacacacagaagaggatttactcgttctttattactctgaagaaaaagaatgggatacggcctgtgaaagaatgatcggtgctggctttagaatgaccacgtcattcaatccttactgggatgcgaacggaaggacatttgttgacctcgatggatatagggtggttatacaaaacaaggcgtgggtattgccccaataa

SEQ ID NO: 188392 - DNA, 651 bp, Klebsiella oxytoca
ttgatcaacaacgagcatggccagctaacgatgaaattgatacttgttcgacacgcagaaacagagtggaatttagaaggaattattcaggggcacagcgatagctccttgacctgtcggggtttgcgtgaaacatccgtcctactagcagcgtttagtgcaagtgagtatcaaatagagcgtgtttacgcttctccgcttgggcgtgcctggcaaatggggcaaagcctggctgaacactttcattgttcactgacggctgaaccggcccttaaagagcaggcctttggtcagtttgaaggtatgccgttagaactactcagacaaaaacatccaaactatgcaaatgcgttattcaggcttgatgcagagtattgtccacctgggggggagtcactggcgcatgcttctcagcgagttatgcgttttttacaaaacctggaagatacctcatcacatcaacaaacaatatgtattgtgtctcacgggcatgtcagtcagggcactctggcaattcttaaagaagggactgtcaatagtttccctcgctatgctcaccccaatgcaagttattctgttatcgacctgattaatggaaaatgtatcggcctaaagtgggggattgctacacatttacgtcacctgaattag

SEQ ID NO: 188393 - DNA, 801 bp, Klebsiella oxytoca
atgcttaatacgttacccgatttacacagaagttttgcagagcacctcaagcttcaatttcagtctgactcgcggattcactcccttctcgccggcggctcgattatccatggcggatttgataaatactccgatttggattttgtcgttgtggtcgatcccctctactatgacgaaatcatggcccagcgtgtggcgttcgccggaacgctgggccatctcctgcatgctttcagcggggaacatgtcggagagcctcgcctgctgatatgcctgtatggtcctgaactccttcatgtcgatctgaaatttgtcaccctggaaatgctcactcaacgcgttgaggagccagccgtgttatttacccgtgataaccgtgctctgcagcaacaactggcaaaattcagtgctcactggcctgatatgacgccggagtggttcgagtcccgagcctggatctggcttcattatgcggtggctaaactaggaaggggcgaactctttgaggcgattggtatgctgtcattcttccgcgagcaggtactggggccaatgctgcaccgccgtgcaaatttaccgcaacgtggggttcgccgcattgaatcgcgcggtattgatcctgacggcctgctgacttccacgctggcaacgcacgatcgtgactccgtcagcgttgctatcagaatggcccttgacgcttatatcactctgcgagcggatgctctgcctgaaaatatcgcagacgatgccgcgcaacgggcgctgttggccatgctgaaagcgtattctgacaaagtttaa

SEQ ID NO: 188394 - DNA, 1437 bp, Klebsiella oxytoca
atgtcgacccatcgcatcacgcaagctgagccgcgccgctgggccatgttcgtcattttgctggtcggcgcgtttttgccgccgctcgatttttttatcgtcaatgttgcgctgcctgccatccagagcgagctgggcgcctctttctccgccgaacagctggtcatttcatcctatgcggctgtgtatgctgtcaccctcattaccggaggccgcctgggcgatatttatggccgcggcaggatgtttttccttgggcttatcggttttgctgctgcatcgttattgtgcggtttagcctggtcaccgtgggtgctgattatcggacgcattttacagggtgccacggctgcgattatggccccccaggcgctggcttccgtgcaggccattttcccggaagcggaaaaaccgttcgcgctgagtctgtatggcgcagtgtttggcctggcctccgttatcggccaggtatcaggcggcattctgatctcagcgaacctgtttggcctgggatggcggactatttttctcgttaacctgccggtggcgctgctggtcatcctctttggcgtgccgctgctgaaagagacgcgggcgcaatctgcacagcggctggaccccgtcggcacgctgctgacaaccgtgatgctgagcgcggtgattgtgccgttgactgaaggccgagaggcagggtggccgtggtggacgtggctgtcattgcttgctttcccactgctggcccgattgttatggcgctatgaggatcggcttagccagcatggcggttcgccgctacttaatcctgccgtgttgcgcgcgccgggactgggccagggactggcgatcgtattgctgttttattccatcggcgctttctttcttttattttccatttatctacaaggcgcgttgcatttgaacgccctgaccgcgggcctgatttttctgccctttggcgtcggctttctgatcggaccgttgctgacgccttatctcaggcgcttggttggcaattacctgagcgcaatcgggatgggatgcgagaccttagggctggcaggtcttgcaggggtcatagccaatacgccgacgggcagttctcccgccgcgcagccgctcgccctattgctttttgttaccggtctcggccagggactggcgatgccaacgctggtcagaatggtaaccggtcgcgttgcgccggcgttttcgggaatgattgccggcgtgaccagctcggcgctgcagctcagcacggcgctgagcgtcgcggtgattggcggccttttttacagcatgttggacaacgggaaaagcgcggcgaatatcacccaggcttttatcgtcgcgctggcggcgatgtcgctctgccttgccgcgggcgccgggttaagtttccgccttctccggcgctcttcggaatgggaccggcgatag

SEQ ID NO: 188395 - DNA, 870 bp, Klebsiella oxytoca
atggaatggggagacgtccgggtatttcttgcagtccttcgtcaaggctccttcggtgaggcagcgcgaagccttggcgtgagtcatccgacggtaggacgcaggataaaagcgctggaagatgaagcccagcaggcgctgttccgccgtacaagggagggtctggtgctaacggacgccggcgacagagttcttaagctggctgaggcgatggaaaactccgcgctggcaatggaacgacgcctggcggggaatcatgaacgtcttgaagggatattaaggatatcttcagcagaatggttcgctaactatgttctggccccggtgcttgtcgaactgacgcgccgccacccggccattgtgccggaagtcattgcaagctaccgcctgctcaatttgtcgcgccgcgatgccgacatcgcgtttcgcatcgtcccctttaccgaaccggatattgtccagcgccgcctgatgagtatgccctatgcgctgtatggaacagcggaaaccgcgcagacggtgcagcacgatccggccgccgtggggcttattttgatgaatacggcacaatctcacttttctgatgttgcctggctgcttgacggcttccccctgtcgcggcgggtgttcaccagtaccagtcgggccgttcaggcgcagatgtgtcagcggggaatggggatggccgtgctaccgcagcctcttggcgatgccctctccggattgcagcgcattggcacgccgacgccaccgccatctaaagatatatgggtcgggtatcactctgatctccgacatatggatcgcctgcgggcaatgctggatatcgtcgatgccatacttgccgatcctgttgcggccggcacctga

SEQ ID NO: 188396 - DNA, 1533 bp, Klebsiella oxytoca
atgaatatactggtgttttgtgatggtacatggaatacgccgcagcagctggaagaagggaaaccagcaccaaccaatgttgttaaactccggaatgctgctgaagagagtaagcagcagcgagtttattatcatccgggtgtcggtaccgagggcggaattgttaatcattatcttggtggaggaattggggaggggcttgataaaaatattatcagcgcttatttctggcttgccagaaactaccgtccaggcgataaaatatggttatttggttttagtcgcggagcttatactgtgcgaagccttgggggaatgatttcgcgctgcggtttgcttgatgccagcgctagcgccccgggagatgaaagggtttggcgcgatatcaacgagctttttcaaaactatcgaaagccgcttgcggatgcagacattatcaaagctaccgcccggaagccgttttatgatgtcgcgcctggcatgcccactgcaaaaagtatatcgatccattttattggtgtctgggatacggttggcgcactgggtatacctgatgatatggcactggcgaatctgcttgataaccctgaagattatgtcttccacgatacttcgctaagttcgatagtccaaaatgcgcgccacgctctggctctggacgagcagcgacaaagtttcatacccacactatgggataacgtacaaggtaatccgcatgtgaagcagtgctggtttgctggagtgcatgcggatgttggtggcggctatgcgcagagcggattatccgatattgccctgcaatggatgctggacgaggcgaagccgctggggctgcttgtaaaaaagggtatcgatgggcagttggctaccgatccgctggcgattctacatgattcggttaccggattttttaaacttcagcatacgcgaccgcgagggatccctcaaatcgctgcggataatctagagatccatccaagtgtgctgacaagacagaaaacaccctcattacttaacggtgattatcgtcgttcgcagcaggtgacgaaagacgctccggtgacaattgatattttttctcgggaacgctggaatcagaccggagtgtggttggaaggaggtaaaaagtatctcttccaggctgaggggcagtggttggatagttcgattcccagcgggcctgcgggaacagatgacggtaagttttatccgggggaggccgttcaggtcctggcttcattatcagataaatttgaaagtctttggcgcggtgcgacgaaaaatcaaaatatcgatttctggctaagccgacggataggatccgctccatggtttgcgttaattggtatggtagcgaataatgttagctcagattcagttgatccttatcccctacatcaggtttttactattggcgatggatgttcttttacacccgaaaaaagtggctatttttatgcttatgccaatgatgcctggcaaatgtatgacaacaatcgcggtagcgtatcgttaacaatcactatgagttag

SEQ ID NO: 188397 - DNA, 609 bp, Klebsiella oxytoca
atgaaaaacgaaggcaagctgagtgatggtgtaaaatcactctctataatcaataagttacaaccagagcaaaagctgacacttctttttgatatctgctgtgagtttaaatcagaaataagccactggtatcagcgggaggtgacaaaaaaacgttatttttctttaatatttatctttttgataatggcagccatctcaataataatttacatacaaatacttatgttaccttttttaacgaatgctgaaaaaaaattgtggttcacacaaatatcatttggcttactgagcatctcgcttcttctacttatggctgaccgtgcctttcgatggactgcaggatggactaactatattaacgctatcatggctatagatatacgctacgccgaatttataacgctatggattaaaaatgatgcggccaacgcaacagatatgaataaacgttatggtaatgctagcgatattgcaggtagttttattaacgatttaatgcgtatacagcagcaggaaacccaagcctggtcagctcagctatctgataccataaaacagtttgacgaatggttccaagcggagaaacagaggcaaaaaaaagaatag

SEQ ID NO: 188398 - DNA, 300 bp, Klebsiella oxytoca
atgagtatcaatcgtatagatatagatttcaaaggtggagtggtgactgatgatacattatttatcacggatttcgatggtccagtaggctatattgatgaagatatattattagttgagtatccaaatgatttttcagtagatgtgtcattccacgaaggttcaaataatttaagtgtcaacgtgatatgtgggagcaattgggaggcgcctgtatacagaaaatttataggacttcgtgataaagcaggattgctgaagtcaatcagggaagccgttgatattgctgttaaaagctag

SEQ ID NO: 188399 - DNA, 1860 bp, Klebsiella oxytoca
atgatggctgaaaatcaaccggcaccgctaacaccagctcctccaggaatggtttccctcggcgttaatgccgacggtgaagaggtgatgaccgtgattggcggggatggcggcgcaggcttttctggcgggcacgcaaatattgttcctggtagcggcagtatactggctgaccagcgcaagaagacgctttcccgtcttcaagctgaatgctcggcggccattgaagccaccgcaaaatggtcaaccgaaaatctggaaaaaacgatggcggcgcaggcggaaagaatccgtgccgctacggcagctcagcagtcagcaaaggcatcccttgacagactcatgcagcagttgaaagacgtgacggacaaagctcttcaaaaagccaggtccgggccgagcgtcaccgaccttgcacatcagaacaaccaggaacttgcggcgcttggggagcaaattggccgtcaaaaagcactgaacgaagccagaaaaaaggcggagagggaagctaaaaaggctgaggaaacttatcaggccgcactgctggcgcaggaagaagcgcagcgccagcaggcagaagttgagcgggaactcaaggaagccagggcgcatgaggccgctgcaaaagcaaaggctgaagctgacagggttgcggcggagaaagaggaagctgaacgactgaaggctgaggaggcgcaaaaggctctttttgcgaaggtgggtattcagggcaccccggtttacacccaggagatggtaaaagctgtctccgttctgatgttaaaaccgggggtaatattgctaaaccgggcgccgggaatgatacagatggccgccgtggcggtacgggcaccggctgcccttcccggtgtagccagtgccgttataacggctaccgctgaattctccggctggatttcatcagccctctggcggggtgttgtgggcgtggcaggagccgccactgccacaacggctggtgccatggtagctgctgcatcgacgatattcttctcgccccgtgccggtggcggtaacgacagtaaggttcccgggcgtgatattgagataatggccgcccaggcccgcctgtttacagctggtaaactgatcatcgatccggggatgaaaagcgttgacctgccggtgcgtggatttatcaccatggaaatggatgggcgccagtctctgaaactggtgaaaactggcacaggcggcatatctgccactgtaccggtactgagtggcgtacgcgacaaggcctccggacttgataaaatcatggtaccggcggtggacggggctccgtcactgagcattctgatcaaccctgtaccatttggtcccgctgcgccatcccataccggcaacagcacgccagtgccagtgacgccggttcacaccggcacggaagtaaaacaggcggacagtattgtcaccacctcactgccagtagccgatgttccgccgctgcaggacttcatctactggcaacctgatgcgacaggaaccggcgttgagccgatttatgttatgttaagtagcctgccaaaatcagttaatcataagcacaagcattatccccctaaaggtgtatcctggaaggatattgttaatgcaacagctaatggagggagtgctaaattcaaaccagatgttaatattgctgaaatcgatatcgacgcatggaaaaatgggcaaatgacagccaaacacccaacatggaaggtgaaaaaatatgatcatgtaattggtgcttatgctggaaaagaaacccagtgggttgttgttaaagagtctcagggggttgttcactctcatccaatatcggagcaaaaagccaaggagtacatgaaatga

SEQ ID NO: 188400 - DNA, 363 bp, Klebsiella oxytoca
atgtcccgtaaaaccgcgtttaatggctccgccgccggccgacgccgcgcgcagcgagcccacttacaaaatccgcaaaccctcagttccgatctcatccaccggcccacgccttcccgcgctcagattcaggcaaagggaggacaccacacgcccagccgtattgaggatgctttgccgattaaatttgttgcgcaggatattttctggcagcgcgaggaatataaacgacagattgtgcgagcgaccgttatttatcagcacgagtttgcacacgattatatagaaccaggcagctatctctgtcagagggcaatttatgcgcttggtttgcaaagaagaaagaaagtaacggcgaggtaa

SEQ ID NO: 188401 - DNA, 213 bp, Klebsiella oxytoca
atgcaccatcaccccgtaacatcatcccgaatcacctccgtcgcctatgatgaatccgccggcattcttgaaatccgctttcgcgataaccaaacgctgcagtatatcggtgtcccgccgcgcattttccgcgactttctgctggtggtttctaaaggccgtttttacgatggcgtcattaaaggaaaatttaccgaacgccgctgcgcctga

SEQ ID NO: 188402 - DNA, 609 bp, Klebsiella oxytoca
atgttgaatatcgtcattaaaaataataatcagttttttaatttaggattgcactttatattacagggcctcttcccggagtacgcattatctacgcaatgtgccgcatcgcttaatcaacggatcgtgcaggatgctgatgtggtcgtgctggatttatgtcgcggagcagaattcgtatgtcatcccgagttgttaaatcggaaaccgggattgctgattggtttggttgccaggcaaaatcgacggggaagagccgctttgccgctctgtctgaaagagatcgtctttgttgggcgcgatgagaaaatctctcaggttatggcgaaaattaaactctcatggattctgcccccaccgtcagcggaagaaaaatcggtgttgcgatgcgagcgttgcccgcagaggaaactatccccacagcagcgaattatcgcggcggcaatctatcaggggttaacggtgaacgcgattgcccgaaaactttcgctttgcaataaaacggtttttgcacacaagcgcctgattatgtctaaatttcatctacgcaatgatttagacctgctgctattgctgcgctatctgaatagcgctaaaggtcacggttaa

SEQ ID NO: 188403 - DNA, 906 bp, Klebsiella oxytoca
atggataagctggaatcaatgcaggtctatatgtgtgtggtggatacgcatagtttcgccagagcggcggaggcgcttgggctgccgcgctctacggtgtcgcgggtgattaagacgcttgaagcatacctggggattcagcttttacagcgtacgacccgcaagcttagcgttacgcctgacggccgccactattatgctgagtgcaaaaggcttctggctgagatcgccacgctggagtcctctttccccgggcggtccgcgcagcccagaggccgtttcaaagtcggcatgccgcagtcccttgcgcggcagagtattatccccaggctcccggcctttctgcagcagcatcctggtctggagctgatactttgctcaagcgatagcgtggaggacatcattcaggaagggtatgactgcgcgatccgcgcgggcaggatcgacgattcaacgaccctggttgcccggccgctcgccaacttttcatggcgggttctggcctctccggcctatattgccgcttatggtcagccggaaacgctcgatgatctggaaaggcatctcgctgttggctatctggatcaccgcaccggcagaaccatcgagtggtttttcacgcttgctgaggaggattacgcgatccgcatgaaagagaccctggtcgtcgatgatacggacgcctacatacaggccgcaatacaaggacttgggttaatccgcgtcgccagctatctggccaggccgtacctgcgcagcggcgagctggttgcctgtctggataacgtctcttgtgctttaccgctttcgctggtttatccgcaaaacaggtaccttcctcctgcggttcgcgcgttttatgcctggagcaaagtggttttgcagcaggcggccgaggaggcctaa

SEQ ID NO: 188404 - DNA, 930 bp, Klebsiella oxytoca
atggaagagcataatgtcgctacagatgaaaaagtattggtgctgggagcgggacaattcggggccgccgtgctcgactcgctggtgccggcggtcattcaacggaatggcgctatcagcgttatcgtgtcgcccggctcgtgggatgcgcggggaaaactgcgctccgcggctcatcaaaaactggccgacaggggggcggaatttatcgccgtcgacgttgcatccagtacgccagcctcgctaaaagacctctttgcgaattttgctaccatcatcaactgtatgggatttgtcgctggggcgggtacgcagataaaaattacccgggcggcgctggaggccagggtgaaacgctattttccctggcaatttggggtgaattacgatgcggtcggaaaaggtagcggccaacccgtgtgggacgagcagtatgacgtcagaacgttattacgcgctcagaccgccacggaatgggtgattatttcaaccggcatgtttaccagttttcttttcgagccggcgttcgatgtggtcaatttatcccaaaataccctcaatgcgctcgggggatgggatacgcaaatcaccgtgacgtcacctgcggatattggccgcctgaccaccgccatttatttgtttgaaccccgattaatcaatgaagtggtctttgtcgccggagaaacgacctcttatggaaaactggcggacaccgttgagcgcgtaacaaagcgaacctttacccggcaggtatttaccctgcccacgctactggaacagctgcgtatgaagccggacgatcggatgcttcgctatcgcgtcgccttcgcacgcggagatgggatgtggtggccgatgagtgaaacctggaatgtacaaaataatattccaacccaagatattgaatcctggcttagaagcgttatttaa

SEQ ID NO: 188405 - DNA, 1188 bp, Klebsiella oxytoca
atgtccacactgagccgtactaccccccccacgccagcgcacgcccactggggcggcgtatttgccatgacgctgtgcgtttttgtcctcatcgcttccgaatttatgccggtcagcctgctgacgccgattgccagagatttaaacgtcaccgaggggctggcaggccagggcattgcgatttccggcgccctggcggtcctgaccagcctgactatcgccaaccttgccgggagcctgaatcgtaaatatctcctgctggggctgacggttctgatggcggcgtcgggtttgattgtcgcgctggcgtccagctatgcggtttatatggcgggaagggccctgattggtatcgtcatcggtggattctggtcgatgtcggcggccaccgccatcaggctggtgccgcagcgccaggttccccgcgcgctggcgattttcaatggcggtaacgcgctggcgaccgtcgtggcggcgccgctgggcagctacctggggtcaaccgtcggctggcgcggcgcctttttatgcctggcgccgctggcgatagccgccttcatctggcagtgcgtcagcctgcccgcgatggcaagcgataacgcgagccggccgcgcggctccgcgcttcgcctgttcagaacgcccatcatcgctatcggcctgctggcctgcggactcttctttatggggcagtttaccctctttacctacgtgcggccgtttctggaaacggtaaccggcgtcagcgcctctggcctgtccctgattttgctcgcgataggcatcgcgggttttatcggcaccctgggcgtttcaccactcctcaccgcccgattttatcagaccttaatcaccctccccttactgatggccgcgattgccggaacgttgctgctggcaggacaccacgcctgggccgtagccattctgttaagcctgtggggaatgctggcgacggcggcgccaaccggctggtggacgtggatagcgcggacgctgcccgacgacgcggaagcgggtggcggattgatggtcgccgtgattcagctgtcgattgcgctgggttcgacggcaggaggcgtggtatttgaccgcatggggtggcaaagtgcttttggattaagtggagtattgctgcttgccgcggtcggaataacggcgctcaccggccgccaggcgaggaagtag

SEQ ID NO: 188406 - DNA, 345 bp, Klebsiella oxytoca
atgaatctcaatcggtgttgttatttgctcctgatcgctgcggcgatcggcagcatttttacgtcctggccctttgctatttggctcctgctggtcaacgtcctgacgctggcgatttacggcgtggataaaatggcggcgcgcagggcctggcgcagggtaccggagtccacgttgctggtgtttgggttcgtgggcggctgggctggcgcgatagcgggtcagcagctgttccgccacaaaacgcaaaagcagccgttcaggacctggttcatcatcagcgcgatcgccagtctcgcagggatggcagcgatttatgtgttctctcctttttcttttcactaa

SEQ ID NO: 188407 - DNA, 435 bp, Klebsiella oxytoca
atgagtccttcgccctccgttctcagtcgttttactgagtactacgccatgctggatacccagccgccctcggcgctggccgcgctctatcatgcgaatgccgtactgatcgatccatttggccagcatcgggggctgtccgcgatccaggggtatttttcccatctgttagccaacgtggcgcggtgccgtttcgacatcgatacgccggtctgcaacgctcagcggtttgccgtcgcctggaccatgcactggtcgcatccgcgcctggccggcgggaaggcgttagaacttgcgggctgctcgatggttacggttgaagaggagcggattattcaccagcgcgactactacgacgccggggagatgctgtacgaacatcttcccctgctgggctgggcggtacgcggcgtcaagcggagggtgcggacatga

SEQ ID NO: 188408 - DNA, 720 bp, Klebsiella oxytoca
atgatgacggtgcttatcaccggcgccagctccgggattggcgccggactcgccaaatccttcgccgcggacggccaccccgtcatcgcctgcggtcgcgatccgtcgcgtctggcagcgctacagcggcacagccccaacatcagcctccgctcatttgatatgacggacagggagtcctgtcgccaggcgctcgcagagtgccgggccgatctgatcattctctgcgccgggacctgcgaatacctcgaccacggaacggtagatgccgcgctggtggaacggacgatcgccaccaactttctcgggccggtgaactgcctggaggcgcttcagccgcagctgtctgtcggcaatcgcgtggtgctggtaagttcaatggcgcactggctgccctttcctcgcgccgaggcgtatggcgcctccaaagcggcgttaacctggtttgccaacagcctgcgcctggactgggagccgaaaggcattgccatcacggtggtctcgccgggattcgtcgataccccgctgacgcgcaaaaacgatttttccatgcccggccaggtgagcgtggagcacgcggtaaaggcgattcgccgcggtctggcgaaaggtaaaaatcatatcgtcttcccgacaggctttggcatgctcctgcgcctgctggcagggcttcccgaaggtctgcaacgcctactgttgcgcaggatggtacgctcatga

SEQ ID NO: 188409 - DNA, 486 bp, Klebsiella oxytoca
atgaatcgcccggcgtcgctcctgctgacggccatcgcgttcgacctctactggacgctggtggtgctgtttcgcgagcgcggtctgttcatctggctggcgctggcaatcctctgctggctacggctaccgccagaataccgtgcgtctgcgctgctgctggccgccgcgggctgcgggctggatacgatctgggcgctatcgggactggtcgattttaacggcgataccctgctgcccctgtggatggccgcgctgtggctgatgttcgccgtcgtctggatccgcctgacctgtgccgcgacgttgccaggatggctgctggccctggcggcggcctttggcggcccgacggcatacctgctcggcgcctatctgggagcgatgactttgctggcgccgacggcggctgtcttcggtgcgatggcctgcggctggctggcaatgatgctcgtgttccatatggtgatggggaggcggcaatga

SEQ ID NO: 188410 - DNA, 525 bp, Klebsiella oxytoca
atgagaacggctttattactgctgtggctggcggcattctctccagttgctcacgcagccgactggctggagtggccccgcgttggcgaagcgaccctcagttgggggcccttcaccgtctatacctcgcagctacgcacgccggacggccggtatgacggcccgcatcaggatcgggcgctgattatcacctatcagcgcagcatcgatcgcgacgagctggtcgaggctacccgcgaccagtggcgggcgcagggcattctgcaacaggagccgcaaagcgaggcctggctgcgcatgctgcgaggactctggccggacgtcgcatcgggcacgcagctggcgttcgtggtgagcggcggcgagggccagttctggtatcgcgccagcgccgcgcagcccacgtttactgcgctgggcccgcgccagtcggcagcgttcagtacgcgctttctcgctatctggctcgatcccggcaccacctatcccgaactgcgtcagcagttgatcggaggtacaccatga

SEQ ID NO: 188411 - DNA, 693 bp, Klebsiella oxytoca
gtggcgcaaaagagcaaagatgcagtattggattatttcagggcgctggcagaggttttttctcgggcaacagggctggtggcaacggtgattgatgtgaaagacaatcgattgcctgattgctatgctagcggcaatttcctggtcttaccgctgattcagggcgataagttattcggctatattatatgcgaccatcataaatcgaccgataatcatcatcgggcggcggcaataagattacttaattttatcattaataatatttctgcggctgcagaggaaaaagaagagggctcgaaaacatcgctggagaaaagggggttttattattcgcaaaaatctccgcatgaaataaaattaatatcggcgctacgctatattgatgagaatttatatggcgagttgtctctggagtctgttgccgcccacgtctgtctgagtgcgaattattttagccggttttttaaaaaacgccagggagtgaattttaaagtttgggttaatcagcgaaaaatgcagcgggccggggaactgctcgccgatccgaggtattcgatagatagcgtagcgcgtaagcttcagttcgcgcaaaccagctatttttgccgggtgtttcgcgcggctcaccgcaccagcccgcaactgttccgcgatcggcgtctctcggcggcttctccgcaggccgattag

SEQ ID NO: 188412 - DNA, 420 bp, Klebsiella oxytoca
atgaaactggaacgaaaaaacgttttttggttctggggtgggatggatctgttctatctcctccagtttattgtctggaatgtctaccatcagcgagtgcctttctacagcgatatcctcgcttatctacagcttgtgcaaagctacggttccgcggcagcctggctatatccgcttaatgccatattgattatcactattcccgtctcgatgattctcttctggcgacacagtcgctatgcgctgtggctggcgtatgcgcagacgccgttgcgtctgatcttcatgctaccttcgctttcgctggtgttctggatgctgcgcgagatggagtttaaggggagcgcgttttatattgggttcctgctggtttcagaggcggcaaaagtcgtcaccctttggcgatgtcgcaaagtttga

SEQ ID NO: 188413 - DNA, 1671 bp, Klebsiella oxytoca
atgaaatacaacaataacaaactgttaaacgcgctttttctttactttatttttactgcctccacgtttgcggatgttgccaacaacacacatcaaactgaacaggataaagctcggcagagcgcattaaagcccgagcagcaagattatcaatcatcgcgcactggctcgcataaatataaacttatttttccggtggaggagacctgccggtatatcagccacgtcaatatcatctcctcaaatgaaaaactcacgcaacgtctcctgcgcaatatcgccgtacaggcagaaaagaaatgtctgggtattaaaggcattcgccaactcgctacggcattacaaaatgaaatcatagtccaggggtatattacttcacttattgatataccttcacagtcactggaagatggcgttttagacattaccctcacctacggtaagataggcaatatgatatggtctgccgacagcggcgccacgtccagcctgtggaatgccatacctaccgccacgggtgagatcctcaaactaaccgaccttgagcaagggatggccaatctgcaacggctacccggatcgtcggcgcaaatgaaaatccagcccgggaaaaacaacgcggaaagcgatattcagataacgcgtaatctggctaaaaaatggcaggtaagcgcgtggatggatgatgccggcagccgggaaagcggtcgctatcagtccgggggcgcactatatctctatgatatggctacgcttaacgatattttctatgtctccgccggaggcgacgtcgaatttaatcagcataatgacggcaaccacaatagcagcctctattattcggttcctgtcgggtactggtcgctaagcctttacggctcgcagagcgaatatcgtcagcaatttaaagccaactattcaaccaccgaatacaaaagcgaaaaccgttacgccagcgcgacgctctcgaggctgctttcccatacgcggcagcaaaaaaccaccctggacgcccggattgcaaaaagcacgtctcgttactattttggcggcagcgaactcaaggttatgcgcaagcagaacccggtttgggaattgacccttcgccagcagcgctacttcaataaaaaaatcatcgatgccagcctgggcattcagcgcagcttgccctggcttagctccatgccaacccttgaggaaaaagcgggtctctacagcccactttcgcgggtgatacatgctgatattcaggcatttatgaaatttgatattaccggcgatcgtttcagctacgcgccgcatattaatgctcagtttagtcccgatattttatccacggataataaatttaatatcggcagccgctggacggtacggggttttgatggagaaaattcgctgtccggcaaccaaggctggtactggcgtaatgattttatctgggatatgccaaccccggatcggcaattatattttggtctggatattggccgcatcaccggcagtgaacaatatagacagggcaaagttatttccggcgccgtaagcgggctgcgcggccagctattttccacgcagtatgatttttttatcggtacgccgttcattaaacccgatcgttttcatagcgatccgctcaaccttggtttctcgctcaactggaggtattaa

SEQ ID NO: 188414 - DNA, 1794 bp, Klebsiella oxytoca
atgttcaaatttaaatttacttatgtcgccctggcggcagcactcagttcgtcttacgtctatgccgatccgacggtctggacccactcatccggagctaccgtcgttgatattgaaacgcctaacgcagcgggcgtttctcacaatatgtaccgtgactttaatgtcagtaacaagggcatgattctcaacaatagttccagcgatcttactcacgacaccttaggcaatatcgctaaaaacaataatctggctaatggcagcgcttcggtgatcctcaatgaagtgacctcaaataaatccagctcgctcaatggatttatcgaagtcgccggccaaaaagccgatgttatcatcgctaacccaaacggaatctcctgctcaggctgtagctttattaacaccgatcgcgcggttttaaccaccggccaggtaaagctcaacaacagtggcgcgattgacagctataccatctccaaaggtcagatcactattgggcaaaacgggatgaatgcaacaaatagctatgccaccctgctggcaaatgctattgccattaacggtaccgtcagcactcccaacgcgacggtagccgcaggaaatttcacgcttgacaacaatacagggcaaatgacctctgcgggtaaaacgcctacggtactacagatgctgattccggaatacagcattgatattagcaatcttggcggaattaaagctaacagcatcagcatgattggcaacgacttaggtctcggtgtacgcaataaaggcgcgattgtcgccaatagcacactgacaatgtccagtaacggttcactgaccaacgaaggatcgatcaccagcaacggtatgcttacgcagatcgccgccgccgggaatattaaaaacacgggtaacatctcgacgacaaacattaccattatcaatggattacaaacacttaccaacaacggaaccatatccagcagcaaacagttgatggtcagcgcctctggaaatatcgaaaacaacggcaccatcaaaagcagcacggcattaagcgtagcgactaacggcaacctgaaaacggcttacggctctaatcttctttctgataatcaactgctagtatcggctcttggcgatatcgataacggcggttcaacccgggcgaaaaataccagcattgcttttagcggtagctcgctcaaggtaaccggtaacattcacggaacggacaatctcgtgattcaatcggttaaagataaagcgctctcatccggtgaaatcagcaactcaggaaccttaaaagggggtaacgtcaccatccagacgaatggtacgctggcgttaaaccgtgatagcaaaatactcgccagcaatatgctgacaaccaacagcaactggctgaataacgacgggggaaccgttcgcggcgattctgcggtcttaaactttaataacaacgcgatgcaaaacagcggagaaattattggcgggaccatcaacatttccaccaactcagatctggtaaataaatggattatggaatcctttggcgatttcaccattgatacccacaataaaggcaacattatcaaccgcgacaaaatcgtagctggcggaacgatgaccttaaatgcaaaacaagtggttaacggcggctataaatgcgggttcctgaaaatgttcacctgcgatgccggcttactgagcggcaataaactggtcctgaatacttctcagcgatatgcttctgaagtgggtggcgaacagtatttcaagttaacggaagttaacaccaccaaataa

SEQ ID NO: 188415 - DNA, 624 bp, Klebsiella oxytoca
atgcacatccaacactcgatcattcaacttgccggtcactcgctgcagcgggtggatttcgacccgttgaccttccagcctgaagacctcctctggctcccgcatcatgcccggttaagcggctgcgtccacaagcggcagtccgagcatctcgccgggcgtatcgccgcggtttacgcgctgcgggaagtgggcgaaaaaggcgtccctgccattggcgaccaacgccagcccctgtggccggccccgtggtacggcagcattagccacagcgaacgcagcgcgctggcggtggtctccgcccggccggtcggcgttgatatcgaacgagtcatggcaccttcgctggcggcggagctggaaagcagcatcatcaatagcgcggaaaaaaaacggctggacgccagcggcctgccgcctgaactggcgctgacgctggccttttcggcgaaagagagcgcgtttaaggccagccattcggctatccaggccaggatgggtttcagcgattttgaagtgacgtatataaaggaagaaaatctgcggcttcggctctccgccggggagtatcggctgcaatggattaaggccggtgaatacgtcatcacgatctgcgcgccgtaa

SEQ ID NO: 188416 - DNA, 1335 bp, Klebsiella oxytoca
atgaaagcccgatacaaaaccattgtcgacagatacgcgcaggcgattcatcgcggacagatgccggccggaacccgtctgccgacccatcgtacccttgccgccgatgaacgcatctcgctggccacggccacccgcgtttatcgtgaactggaagcaatggggctggtcagcggcgaaaccgggcgcggcacctttgtgcgggatatctcgctgccgccggggcacggcgtcgatcagcagtcggtggcgggcgatgttatcgatctcaacttcaactatccttcgctgccggcgcagggggatgcgctgcgcgaggcgctcaggcggctggcgatggcgggggatattgaatctcatctgcgctaccagcctcatgccgggcggctctccgagcgcgaaactatcgcccgccatttgaccggtagccgctttgcgcccgacgcggaaaacgtgctgatcgtcagcggcgcccagcacgggctggcggtgaccgtgatgggccttctgcgccccggcgatgtggtggcggttgatgcgctgacctactcgggctttaaggccctggccgcgctttatcatctggaactggtggcgatcccctgtcgcgcggaggggccggatctgcaagcgcttcaccagctgtgccggcagcggcgggtacgggcggtttataccatgccgacgctgcacaatccgctcggctgggtgctcacttctcgccagcggcaggcgctgacggacctcgcgcgcctgcatgacctgctgattattgaagataccgcatacgcctggctggtccgcaatccgccgccgccgctggccagctatgcgccggaaagaacggtttatatcaccggtttttcgaaaaacgtcgccaccgggctgcgcgtgggggcggttatctgcccgtcccgctatcggtctgagattgtacgcgccatacgggccacgacgtggaataccccttcgctgatgagctcgctgatctgcgcctggattgatgatgggacggttgcgcgttttgcggcgcagaagcggcgggatgcgcggctgcggcagtcgctcgcgcgtgagacgctcggcgcgcttccctttgtgagccatccgagttcgtacttcctctggctgcctctgggcgaggagagccgggccgatcggctggtgaaaatgctgatggatcgccatatttccgtgtcgaccgccgaaccgttttgcgctgccgcgaacgtgccgcaggcgctccgcatcgcccttggttcagtccccttggatagcctgcgtgcggcgctgctccaggttcgcgaagccgtggagtttgaacaataccgctag

SEQ ID NO: 188417 - DNA, 414 bp, Klebsiella oxytoca
atgaaaaaaataaaattaattgttggcggcgtgatctgtgcaagttatttattaacgtcagtattatcaatggcaagtgataatataaacagcaataccattcattttgataaaggcagcaacggcacgataataaaaagtaccgtgaccggcgacgatgttaatgactatacgctggaggcgaaagccggccagatgatgcatatcggtatgaacagccagtggccgcatcccttttttaatgtgattactccggataatcacgcgatttttaacggttctatgagcggcgatatttttgaacagcgtctgggtgtcagcgggaaatatacggtgcgggtatatcagatgggcggcgcgcgtgatgaagggaaaaccagcgcctacgcgctgacgtttaaaattaccgactaa

SEQ ID NO: 188418 - DNA, 543 bp, Klebsiella oxytoca
atgttatatatcgttgagtgcagctacgccgacccggaaagcgaagccggctggaatcgattttacagccagcacaagctgccggcgctggtatccgtcagcgggttccgcgcttcgcagcgcttccgggcgctctcctccggctgcccggtctatcttgccatccatactatccatgatgctgacaccatcgccagtgaagcgtatcgccataaaggcggcggcgactttgcgcgctggcaggcgcatattcgcgactggcggcgaaacctgtatcggtacagcggggtgttccctgccgtctctgaggaggatgttttgctgctgagcccggagccgctggactttgtggactcggagctggggtatcagccgacaagacttccggccgccgggctggataataacccgtcgctgcgcgtggtatacgttctgccgcgccgggaggcgatgctacttgcgggacgggaaaaagcctggatctatgaacccatggccggtcagctgcaaagcccggctgaaaaacagccagcatcacgctaa

SEQ ID NO: 188419 - DNA, 804 bp, Klebsiella oxytoca
atgcagattatccgtccgctgacaggcagcgttgatgcgccggaccatcgccagccgtggcgaaccggcggcctctggcagcgcactatcaacctctatgttgaaggcggcgcattgctgacgctgcatcgtcatgggcagggcatcagtcccggcggatgggtattacgtcatcgcgattttatccgcctgcatggggcgctgcgggcgggcgctctgcctgcggcgggcgaaaatggcattcaggttgatgaccttttgctgtcgccgccgcgcagacgctgctccctgcggccttgctatcagcccgctggcgctcgcttaccgaaagcgctggtggatcgcccggaagagaccgggctgttcgggccgctgtcgcaggcggttcatctaccactgcatcctgaattgcggcaattacgccactgttttgcctcagcgctgcgcgggaacgccgttgactggcggctgtggctgggaaaggggccgggcctgacgccgagcctggacgatatgctgatcggcatgatgctggcgggctggcgcgcggggcggatgttgcgccacggcgggcaggctttctttcgcgcatccggggatctgcacgcggcgacgacccaggtgagcgtcaactatttacgctatgccagcgcggggcgcttcgcctcgccgctgctgcatttttctcacgcgcttcagcgcggacgacgtattgaacccgccgtcgaagccctgctggcgatgggccacacctccggcgcggataccctgctgggattctggctggcgcaacacattatctaa

SEQ ID NO: 188420 - DNA, 942 bp, Klebsiella oxytoca
atggattatcggcaattacatgcttttgtggtactggcgcaagagctgcatttcggacgggcggcgcagaggcttaacgttacccagcctgcgctcacgcagcagattaaaaaccttgagaatacgttgggcctgatgctgtttgttcgcgatcggcgcaatgtttcattgaccacagaggggctatttttgattgacgaggcgcgagttattcttggtcactgcgataagttcctcgaaaatgtaaacagcctgcgtctggggtataaaggacagttaaaagtcggctatgttgggtcatctattctcgatccggcattgacattgttaataaaaaactatcggcataaaaaatcagagaccgatttgataatagaagaacataacgctcataatttattaacattgttactggataaacggatcgatctggcttttgttcgttcgccaataccgcaatatgaacagctggaatatatgaatattgccacgcgttcgcttattgccgtcctgccgcgtaaccatgaactgggtaaccggcggaaaatctccctggcgttactggcgaaagaacaattttttatgcaaaaggacccttacggcgtgggcctcggctggtcggcaattaaggcctgccagcaggccgggtttaccccgcagaaaattcagtatacccgtgatgtatcggtggctattggcctggtttcaatgggaatgggtgttgctctggtgccagaaacgcagagttcgatgctgatgtccgatgtaagctactgcctgctggaggaaacatttgccactaccacgctcactctgtgctggcggcggcatactaaaaataacatcctgcgcgattttataaactacacccgggagctcaccgaccgtcagcaccacagggcgactcaaagcgtggcagcccaacggtctgacgatctttga

SEQ ID NO: 188421 - DNA, 333 bp, Klebsiella oxytoca
atgaaagagttaacttttaatgaaatggaatatatttccggtggttttaatctgctgaatgcggctactggctttaccagctttgtcgtcaactccgggcttggcttcggatcttttgtcgccacctcaggagcctctttcgcgaattttgtgattgatagcgccgtagaatttggcaagttcgttatcggtcagtcgaactggaacacctttgtgtctgcggggttggataactggaatggctttgtgaacactgccgccaatagctggtcaaccttcgtgaacaacgctggagcggactggaatagctttatcgacggcgcgaaagcctga

SEQ ID NO: 188422 - DNA, 318 bp, Klebsiella oxytoca
atgggctttccttctccagcaactgactatatcgaacgccggatcagtataaccagtctgtgcaatcttggcgccaatactctcacaatcgaaaccagcgacggctatgcggtcattgacgtgtctcgcgggcctcagcagggcgacacagtgctgattagctatgacggccgcactgagttcgcaaaactgatgggaagggcgtttatcacggctgacggggagtcgatcgagggagaggcgcttgatgacgttgaagttggcggagtggtaacgcataccatcgttgacctgatgcaggatgaatcaccagtgtaa

SEQ ID NO: 188423 - DNA, 240 bp, Klebsiella oxytoca
atgccacgtctttacgaaattgaatgcgcctggcgccgggctatcgttatggagcccggcggccgacgcacagttacgactaagcggtttatcaaagaactggaagcgtcgaactggatatggtctgcaaagcaggctaaccagtgggtggagaattacgtcacgacgttccgggacgtgtctactgaggaaggcgataaccgcactttccagttgtttaatccgaacggagggctgtga

SEQ ID NO: 188424 - DNA, 1521 bp, Klebsiella oxytoca
atgtttattttgtccgatggcgctgtcattaaagggaataataaaaaagggcgtttgcgtggtaactccgcgaatcagtcatcgatacgacgctgtatcagtgcagtaggggtaaagggagctggtgttgatggggtcgatattcgcgatttcaacagctacggcgcgtattttgagaactgcgaagatacattttgtaggcgatcaacgatacgagatatcactggcggggcggtagaaacagccgcaggccagtacattaccaactgcattagtcatgagtcagaacgtaacgacatcagggataccggaagcaacggcattaagttcagggccgacaccggtggtctgacgcgagcatgcagctcatcacatgacaaaatataccgggctggatttatcgggattgctcacggaaagttgcaggaccacacgacaagttatgcatactgtgaaaactgtgttgataacggtctggatatgaatggctgccagaactgcactttcagtaattgcacgtcagttgggtgtcaggatggcttctatatgggagagaatggaatcaataactgccatgtcgtcgattgcgcagccagaaactgcagacgctcaggagttggcagccttggctcccttgtcatgtgttcggtaattaacccatccattgatggatgcggtagcggaatatattgttctggatttaatggattcaaaatacgcggcggtgagattattaactgcgtcaaaaacacatatgtcgataatgaggataaaaataaccccaacaaaatgagtacgggaataggaattgatattcagtctgacctttccggccttcctgcatgtaccacgcctgatattgagggggtgacgttcctgaataacgcagggcatgacatcgctttcggcggcggccggctccagtcgatcgccgttactgccggggggagtggctacacctctgcgccaacggtcacgatttcaggtggtggcggttccggggctttagcgacagctactgtttccggtggcgcagtgacaaagatatccgttttgtataagggctttggctatacgtcagccccaaccgtgaccatttcaggtggcggcggcagtggtgcgacggcgaccggggctgtgagcagcgggggcgtaataggccagctccagcttgggcgatgtacattcaaggacagcggtggagatggcaaaatatactacggtactgcaactctcgcagacagccagataagtaacagcatggggtatatcgtctccagaacgcagacgtacaatctggctggcgatggtactacagttgagtttacgctttcactgccagaggaggttgctgacgcaaattaccgcattgtctcggtggctcccgactggctgacaacggtcagacatctggataatacaaagggaacctcatatttcggcattacctttggcagcgctccgccatccggaacacgtcgcctgaatgtaacttttgaacgactgcgcccggcccactga

SEQ ID NO: 188425 - DNA, 201 bp, Klebsiella oxytoca
atggctactaaaaaatttattgaactggaggtcggggacgtcatcgcccccgttccgggaatggagatcactgtaactgaagcaccagtgctaaccaaaacagatgatggtgaaaattacacactgaaagggatgcgggatggtaatgaagttggtctggccgggttctatgattcggtaatagtaaaattggatatttaa

SEQ ID NO: 188426 - DNA, 873 bp, Klebsiella oxytoca
atggaaagaggggttgttgctatatcaactatattaaaaaaaatagagggtggtttttctccccaaagagggcttctacctgaggaaataaattactacacactgtactgggattacatatcaataccaaccaataacatcctccatgtcggcgtttggatggagaatgatttaatagactgcggggttttaaatagacctgaatttcaagtttctcgtatgactagtgctgaatatccgcgctttcatattcaattgcaatttaaagcattggataagttaaggaaagaaaggtctgacattgattggagaattcatcaaataagtgatgaggttttaatgccaaagccatcaaattcgataatgtcgactaatgattgtgttagattgagtcttgataggctgcttccagtgccatcaagagaggttcacatatgtgatattttagagtttaagttaagacgcaagccagagctcatggcacttcatgcatattgtgatgatttatacttagaggttgttaactcggcagatcagaatttattgcatgctaaaaatttcgataaattaaagcgagccatagaggatttagataaggtgggatctgaggtttggcaatttccaatcaaatttaatttggatatgtcaccagaatttaatattttgcaatccagagccggtattgcaacaataatttcagctttaaactctccaaatcctgcggaaactattggagcaggtgctgtaatttcagttctagagggttttgtaaagataaaggctgagattcgtagcttcagaaagtcagcaagaaaaaacaatgactttatctatctttcaaatgctatcaaagaaaatattataaagaggtga

SEQ ID NO: 188427 - DNA, 144 bp, Klebsiella oxytoca
atgagaatccattggcaggggaaaagaataggttgtatttatagcactttaattattggtgctttaattcaaacaaatattcctgactatgcatggtttgtcatcccattactaacaatgatattaagtattgaaaaggattaa

SEQ ID NO: 188428 - DNA, 438 bp, Klebsiella oxytoca
atggaagagacgctattttccgcctgtcagttcaccagcgacagcctgaactggcgcagcgccgttcagctcgcctgccgcccgcttgagcagcagggaaaaatcaccggaagctatgccagggctattatcagcgccacggagcaggatggtccctggtatatactgagcccggcgtttgcgctaccgcacgcgcgaccggaagccggagtgctgagcagaaacagcgcgctttcgctgctttgctgtcgcaaagccgttgattttccgcagcatcccggtattcggctgatagtcgtactggcggcggccgatagcgaacagcatattcagacaatccagcggttagtcagttggctggatgaggaggacagactacggcgattcaccgaggttcataatcaggcccagcttgaagcgcttctcgcttcgcattaa

SEQ ID NO: 188429 - DNA, 1290 bp, Klebsiella oxytoca
atggccaaatcgtcatatccaactggcgttgagaatcatggcggatcgcttcgcatatggttcatttatcagggcgtcagggtcagggaaaaccttggcgttcctgatacaccaaaaaacagaaagacggctggcgagctaagaagctcagtatgtttcgcaatcaaaatgggtactttcaactatgccagccagtttcctgaatctcttaacctgaaaaaatttggagttgagaaaaaggaaataacagtaaaggaaattgctgagaaatggcttgagctcaagcggattgagatgagcagcaacgggtttgttggctatgagtccattgtaaaaaacatggtgccacggatcggcggggacaggttcatttcctcagttaacagagaggatttgctgcttataagaaaggaacttctgaccgggtggaaggtgcctaaaaaaggacataagccatcaaaaggaagaacggtacccactgttaacaactacatgaccactatttcaggaatgttcagttttgctgtagcgagtgggtacacggcagaaaacccgtttaacggtatatcagctttaacaagaagtcgtccagaccccgaccctctttcgagagatgagtttcttcgactgcttgatagttgtaagcatacgcagatcaggaacatctgggcccttgcagtatacaccggcatccgtcatggggagcttgtttcactggcatgggaggatatcgacctgaaagcaggcacgatgatgatcaggagaaactttacccctacaaatgaatttaccatgccaaaaactaaagctggaacgaaccgggttgttttcctgattgaaccagcaatagaagcactccgcagccaggcagagatgacaaggtttggtaaacagcatgaagtagaagtaaacctacgggagtatgggcgaaaggaaaagcacgaatgtacgtttgtgtttgatccgagactaaccggacgaaactaccttgcaggagaccattatgcagtcggatcgataaagaaaatttgggatgctcatattaagcgggccggtctgagacaccgaaacgcttatcagacgagacacacttacgcttgctggtcgctgtcagctggagcaaaccctaacttcatcgccacgcaaatgggccatgccgatgcacagatggtttacaaggtttatgggaaatggatggcagagaaaaacacggaacaggtggcgcttttgaaccagaaactatctgattttgccccatccctgccccacgatgaagtgatgaatggataa

SEQ ID NO: 188430 - DNA, 249 bp, Klebsiella oxytoca
atgagcgacgtaattcaactggtgcctaacaagtgggtcacagaaaagaaactcacagaaattaccggtcttcgttctggaacaattgaacgagccagaaagaactcctggttcgttggccgagaatatatgcatgtatcacctgatggtgatccaaacccgaacagccaatgcatgtataacctggaagcgataaatcagtggatagagcgccagtcgtcgaaacagccaggtgctcattcatgctga

SEQ ID NO: 188431 - DNA, 219 bp, Klebsiella oxytoca
atgactccagaagaacagaaaaatgccctccgaaatgtcgcacgcaaggcaaacgatgagattaaggcgaagaggatggcatcacctgctgttagttgcgacgagatatcacggccgatccttaacggatgcatgtcggtcattaagcaactcggtttaacaccaagccacctctatgtcgaaatcggcattttgaacggaaagataaaggagcgctga

SEQ ID NO: 188432 - DNA, 594 bp, Klebsiella oxytoca
atgagcaagcgatactccctgatttatgcagatccgccatggcttttccgcgataaggcagccgacggtaagcgtggggccgggttcaagtatccagtaatgaacgttctggatatctgccggttgccggtgtgggaactcgccgccgataactgcctgttagcgatgtggtgggttccgacccagcctgtcgaggcgctgaaagtcatggaggcctggggcttccgcctgatgaccatgaaggggttcacctggcacaagacgaacaagcacaaaggcaacagcgcgattggtatgggccacatgacccgcgcgaacagcgaagactgcctgtttgcggtgaaaggaaagctacccaagcgaaacgataagtcaatctgccagcatgtcacagcaccgcgccaggagaattcccgtaaaccggatatcgtgcgcgaaaaactggtgcaactgctgggcgacgtgccgcgcatcgagctcttcgccagacagtcatctcacggctttgacgtatggggcaaccagtgtgcatcgccagcgatcgagctattaccgggttgtgcggttgacgttgtgaagacggaggcagcatga

SEQ ID NO: 188433 - DNA, 159 bp, Klebsiella oxytoca
atgaaacatcaccgcgacgccataaccgtaggaaaagtgaagtgtatgtactccgtcattcgtcgcggctggctaatgccctggggtgaagtggtgagaaaccctttaaaggctcagcggctggctgaagagctggacatgaaaagaggtgcgcaatga

SEQ ID NO: 188434 - DNA, 648 bp, Klebsiella oxytoca
atgacggagaaaaaagtatacgccgccatcagcgctgtagccggtgagctggcagagaaaggcatcagcaaggccagaaaacagggcagccaggtcaactacgcattccgtgggatcgatgatgtttacaacgctctggcccctgccctagttaagcacaagctgctgatcctcccgcggtgtactgaacggtcatgctgtgagcgaaccagtaaaaatggtggcgcactgttttatgtaaccgtacgagctgagttcgactttgtcagcacggaggacggcagcattcataccgtcgtcacctatggcgaggcgatggacagcggcgataaagcaacgaacaaggccatgtcgattgcgtacaaatatgcggcctttcaggcgttctgcatccctacagaagagacgactgtggaccctgactatgaggctcaccaggtaaggccagcagacgcagatcggattctcgctgatttcactgcttacgcagactcagagaacgatccaaaggccctccaggataactacgggaaagcatggaacagccttcatggcttccctgaacaccagatgaagtgtaaggacgttaccggtattcgcctgaaagagctgaaacagactggtggcggccatgaaaatcacagctga

SEQ ID NO: 188435 - DNA, 159 bp, Klebsiella oxytoca
atgagcgcggcggaaaaatgggatgacgacgaattcattcagctgatgagcgatgcgatcggcaaacgtgatttcgacgatgacgaaccagtaaacctttcttcggaacggcagaacccggtgatcagctgggatgaatttgcggggaattttcaatga

SEQ ID NO: 188436 - DNA, 198 bp, Klebsiella oxytoca
atgaacatcaaatgtgaatgcacagacatgcgcacatctgtaggcccgcataacacgttaaccgtcgagctggaagacgtggtgctgtcagggacggttaacagtcgtgaagtcctcatgcaactagattgggacgtggtgatcgaatgtctggcggagcatggctacgtcattactcatcgggagaaagcggcatga

SEQ ID NO: 188437 - DNA, 1005 bp, Klebsiella oxytoca
atgagcgaagtaatggacttaaccgtcatcgaaataaaaccagagcaggcgccggcactgtaccgggccggcggtcttgacgcttacctcgatcagattcgccaggctgtgaacgaggtgcctgatctgaccaccaagaaaggccgtgaccgtgtcgcttctctggcggcgcaggtatctcgcagcaagacagcaatcgaaaagccagggcgtaagtacctgaaacgccttaaagaggctgtgcgccctgctgaggaggaaattaagcgcttcgttgacgcatgtgacgaactgcgcgacgcaacacgtcgcccgctgactgaatgggaagccgagcaggaccgcattaaggcagaagaagccatgaacgcactgcacgccgaagcgctggccatgaatgaagagttcgatcggcaactggcagctcggattgagtctgaccacgaaatggccctgttgatgaatgacgcttttgaccgtgaacaggccgagaaaaaagcagaagcagaacgccagcgcattgcccgcgaagaagagattaagcgccaggcggaagagaaagccaaacgtgaagcagcagaaaaggcacagcgtgaaattgacgctgcggccgccagagagcgcgaggcaattttggcaaaagagcgagcagaacgtgatcgcattgaagctcagcagcgggccgagcgcgaacagcgagaagcagctgaacgtgctgagcgtgaaaagcaggctgccgtggaagcagagcgccgcaaagcacaggaagaagccgaccgcatccgccgcgaggcagagcaacgcgaacaggcccggctggctgaggagaagcgcaaagcagatgagcaggcgcgccgcgaagccgacgttaagcaccgcaaggcagtaagtgtcgaggttgttaaggcccttatggccaataccagccttacccgcgatcaggctatcgaggtgctcaccgcggttaaagacggccgcattcctcataccggtatcagttactga

SEQ ID NO: 188438 - DNA, 507 bp, Klebsiella oxytoca
atgaaatctaaaatcatccactttgttcttatgcttgcttcctttttcattggttattttataatcaaaatatcattgagctttatagttgatggtgttgttattgcggcaccatgggctgtagtaggtttgatgcagctgccattgtcgtattgtatacaggcagtctttaaaacaaacgaagttaatgatcactcttcgctaacccgatctgagttgcgaaggcttttgcctctggttaaatacaaaaggcgagtaatggtatcccttttagcattctatgttttctcgacgctatttgtagtattaggcctgatggttagtgctggaaatcaagaattattatacaaagtactgaaactatcaggtggattgctcttcgtatcgctctatacgagtcttttcgttcatagaatgatgatcgagcttcagagtttcaaggcccttctaaatagaagagattccgataaaaaagaaagagaatccttaattgataaactgaaataa

SEQ ID NO: 188439 - DNA, 1023 bp, Klebsiella oxytoca
atgaaagatagcaggccgaaaatagttcattataaaaaagcagtcatcccaagcggggcgtcatcattgcaaagcattttacttggaatcataggggatggtggctccgctgaaaacgttttgcttcgtcaagaaaaaacctcaccctcagatgataattctggtataaggtttttaaataaaagcaatacatacaaaacaattctttttggacagctggttctttttgagaaggacaagagtcaatctctattagaaataagtgaaaatgtcagattttatgacattaactcaatcacttcgcatgatattattattaatggcgataacgcacaagataaaaaaagggagtttgttgactccattttatatttcggtgttttaaacaaccatgtgttaattgttcagtctacatccctacgttccagagaatttgagtctcatcttaactggcttataaatagctttactgatttagaggattttgtcttactcctgcaagataagccatcggaagcgacaatgcagaagatggaaaaatcaccagccaaaagcattagaattggcagtttgccaataacttctgaagtgaaaaatgatgacgcaccttccacaccaaaaaccacaggttcagttaaaacgataaagtacaggcctactggtaagggcggatcgttgcttaaggcttttttaggtgataactgggctgacgatatcaatttgaaggattccttagatgatgccaatctacaggtaagtcttgaaattacatatttcagaaaaacaaatgatggaggacaggctgttattgacagcatagcgacatcactgagacatatagatggggatgattacagcataaaacttcaaggcggaggggaaattactggtaaagaaattaaactttcaggaaatatcagtgtcgaatataataatggcattatcgatgaaaatgatttattcttaaagatgcacaaatggttgttctccaagcttgaggctggagagctgaatgtaaagtaa

SEQ ID NO: 188440 - DNA, 798 bp, Klebsiella oxytoca
atgagttcactttaccagcattacaaccaaaaagataaaaacggaaccggaattaaggtgaaccggacgtttatcgttcccctgaaagagctgtacgtcgaacccggactgaacatccgcgaaatcgaccaggatcacgtcgctgaattccgcgatgcgtttatcgccggagagtcggtgccgccgctggacgtccaggttaccgagaagggcgtgaaggttatcgacggccaccaccgctattacggcgccattgaagcgacgaaagcaggcgctgacatcatccggcttgagtgcaaagacttcgtcgggaacgaagctgatcgtatcgccttcatggttacccggaaccagggcaagcctctcactgctctggaacgcgcagctgcatatcagcgtttgagaaatcaggggtgggaaccggacgagatcgcgaagaaggttaagcgttctctgtccgacgtcgactatcacctgcatttgctgacctgtggagaagagctgatcagcatggtgcgtgccggcgaggtatccccaacaaccgcggttgcactatcccgcgagcacggcccccaggcggcctctgtagccattcgccagatggataaggccagagcgtcaggtaaatcgaaattaacccgcagcgcggcgctgccgcagtttagcgcagcaaaggcgcgccagtttctccagatagtcgctgatcaggctgacattgaactgccagctgatgcgcgcgccatcctggataactatcgcgaattcctgaaagaggccggctgggagagtgaagcatga

SEQ ID NO: 188441 - DNA, 1029 bp, Klebsiella oxytoca
atgaacaccgcagaaatactcaagtttcccggcgccgcgccggggaaattcaggagcaaccggatggaaaaccagaaatctggctacatcccgttgtaccggagcgttctcaagcagtcctgggcaaaagatgtgtacctcagaaccctgtgggaaaacctgctgcttaatgctgctcgtcagccattcaaagcaactttcaaaggtcatgagtggtcactgctgcccggacaactggtggtcacagcggccgatttagggctgcagctttgcgaccggaaagggaatcctactagtcgcgattcagtggagagaatgctggctgtttttgtgcgcgaagggatgatttctatcgaaggtgagaagcaaaaaggtagagtgatcaccatcacaaattttgcagaatatgctcaaaaaacagacaatttacccgcgcatgaagccgcacatgaagccgcacatacttccgcacatggcgagcccagcaatggcgcgggtttgaaggtggtgcccgcacatgaagccgcacatgaatccgcacaaacaaccgcacaacatgaacaagaaggtaataacaagaataaaaacattaaaagatcttcgtccgagaattctggcgaatcctctgacgcccgcctgaagaaatttttgtctgctcatcctgatgctgcggtttacacgcccagcggaagcaagtggggaaccgctgaagaccttcgggttgccgagtggattttctccagggtcaggatgatcaacccaacctgcaaagcccctgatatgaccgcctggtcaaacacggttcgactgatgcgccagatcgacaaccgcagccaccaggacatttgcgccatgtacgactgggccagcaaagactcgttctggcatcgcaacatcctgagccctgaagcgctgcgcaagcagtgggacaagctgaccatgcagcgcagcgcgccaggggttcaggttgccgggaagccaaaagtcgacctgaacaacactgactggatttatggggtgctcgaatga

SEQ ID NO: 188442 - DNA, 738 bp, Klebsiella oxytoca
atgaaatcaatcgctgaaagcatgcacaacttcgaccgggaaaacttccagcgcgtggctgccgggcttcctgaaatgcaggacgagcaggcagtaaagcgccaggcggcaaagactgcggagatcttcaacgaactgttccgccagttgctcgctgtgttcccggcgctggccagcaaaacacccgaggagatgaacgagatgcgccggcagtggcttctggcgttcaaggaaaacgggattgtctccatggagcaaatcaacgccggaatgcgcgttgcccgcaaacaggatcgtccattcatgccatcgccgggtcagtttgtcgcctggtgcaaatcggaatcagccgtatctgccggactgccggatgcagtggagctggtcgatatggtttaccagtactgccggacccgcgggcaatacccggatgctgagtcctatccgtggccagagcacaacgtcacgccggtaacgctgaagcacaaggcctgctactggatggttactggactgtacgcagacatgcgcgcaaacggcctcagcgacgctgagttgcgccgcaaggctcaggatgagctgatgcgtatggtgcgtcgtttaaacgcaggggaagcgattccagagccggttaagcagattccaaaacttggtggacggccattaagtcaggagcaggggttaaacaaaatcgcagaaattcgggcgaaatttggactggggagagggcggtcatga

SEQ ID NO: 188443 - DNA, 303 bp, Klebsiella oxytoca
atgaaaaagaactcgggcaaacaagccgttattaacttcatcggccagcatccaggctgcagctttcaggatatccgccgcggtaccggccttgactcttcagtggtcaattcctccctgtggcagatgcaccgtgacggacaggttaagcgtgaaggtgagtgcaggagctaccgctacaccctgatcgacacaacagctgtcaccgaaagcgatccatcggttcagtatcgccagcgtcccggcggcgtaaacccaatgaccaacctttttaaccagtgcctggcgggagtgagaaaatga

SEQ ID NO: 188444 - DNA, 246 bp, Klebsiella oxytoca
atgtacaaaggcctggagatttctggcggtggcattcatgacgagcagtcagtggtctgccagcaagcagcgctggatgctgcaatgtcggcatttgaggaaatcgaaacccccgcaaccgatcgcatctatgccgggattaaggctgatggggtggaacaggcggcaaacgaatgttatggcgcaggttatatctgcgaaacattgctggcgtacgcccagcagctgcgcgagggggccaaatga

SEQ ID NO: 188445 - DNA, 264 bp, Klebsiella oxytoca
atgagcattgccacttatctcaataccggtctagccattctgggatgggcatacatcatgttcaaaacaggccagtggattaccaaaaatgctctggggcagtgggacaagcgccgcaagcagtctcgccgccagaaggccgtgaatgagctttatgaggtgtttgaacttaacaagctggagtcaggatcaaccatgcgcatagtcaccaaaggcgacctgacaatcatgatgtatcgcagcgagggaaaggccaatgactga

SEQ ID NO: 188446 - DNA, 1032 bp, Klebsiella oxytoca
atgactgatatcaccgaactggcgcagcgtatgaaggccgcagcagagaaagcgacgcagggcgaatggtggtccgacgaagttaaaaacgaagggtgctacgggtctggcgatgactgtgtggagggattcacctcatacgcaatctatggccatgacgggcaaactctctttgattcgctcaacagtgacgccgcctgcatcagtgaggaatacgacggcgaggggcatgtggcatgggatgagacggcgcagcgtaatgccgaattcatcgcccttgctaacccttccaacatccttgcgctggtagaggcgctggagaaggcgcaggccatcaacgcagcagccgaaaagctggttcgctgcaaaggtcgctatcacagcgagcagaactatcgcgcattggctgcgctgtttggcgtgaaaaccccagacctgccgccgttggagcatgaaaacgtccattatgccgatgctgcagagatggagatcgcagcactgcgccagcgcatcgccgagcttgaggaaagccacgctcaggtcatccagtcacgcggccactacaagcgcatgaccggggaagggttaaagcagttggcggagtcccgcaccgtgaagctgccgcctgagctttccaccatcggcgagcttatcaggacgcaggacaaccgcattaccgatcagcccatgttcgttgttttccagaagcgtgaaattatcggaagcgacgagcactcgcctagccgaatttgctgggtatgggatggtgaagaggtcagcgaactgcgagccaaacggctggaagcgctttatcaggatggtcgtgacactcgcggatatgaccgatacgcaatgcaggaagttgatgagtttgttactgcctgctttaccgagcatggatgcaaagacttccttcgccagaacggacacaatctgcgccagccgtatatctacgcctgcggctctttccgaaataacgaatatcagctggttagaaattggctcgctggcatcaaggtggaggctgagtga

SEQ ID NO: 188447 - DNA, 864 bp, Klebsiella oxytoca
atgaccagtaaattaacccgagaagaactacgcaaacgggcaaaagaaaatatcaataacttgaggttcgcatcaaagcagcgagccttcgaaagcgctcgtaaagaaatcctggccgatcttcaactggcagaatatgcactggaagcaatggaaagtgagccatacggtttcactgaaggtgagcgttttggaatggttttagagccgcgacaatggcctgctccaaaagacggagaaccgcaactgcatatcaaagagcaaccagggccagatatcgacacgttacgacatgctttcgaaacggaagagcgagaggaaactggcggatttaacctacacaaatctggtattgactatgtggataaatcaactcaagcgcagtgggaggcatggttagtctgccgcgccgccatgctccaggctggcatctccgcggtaattccggatggttacgtgatggtgcctaaggagcccactgaagcaatgatgctgcataaatcaggatgccagcaccatgcatgggatgaccctgattgcgcaatgcgccagacgcgccggctaatttggtcccatatgctcgccgccgccccgcagttacccggcagcgaacccgctaccgtgccggatagatggattccggtaagcgagcggatgccggatgatgatgactttgtctatatctggcctcgccctgactttggtgttgagcttcacatcggtcagtactgcgaatgtagccctaaaggtgacggctggtatgctcaggtttatgagcaaaactatggcattgagtggtatccaatcactgtaacccactggatgccgctgccagacgacccgcaggaggtgaatcatggctga

SEQ ID NO: 188448 - DNA, 384 bp, Klebsiella oxytoca
atgagcacagaaaccgaaatagaactgggtaaggttgtcgcgttcccgacgaagaataacgacctacaggacgggctggttattcagcgcgaagggcagaaggttatgtgcctgcactccactgtttgggtgaacgaaaaagaccggactttacgctgccggaagtgcgaaacgttgatcgagccttttgacttccttatgacgctctgcgaccaggagtctcgctacatggagagcgtgaaatatctccgccgggaagaaaagcagcgccgtcagaatatcgagaagctcattcagattgagaagaacgccaagtcccgaattcgccgtgccggggataagtctccacttcctctctggcagaacgagagggttgacgaatga

SEQ ID NO: 188449 - DNA, 477 bp, Klebsiella oxytoca
atggaccaagaaactcttaaatctattcttaagtacgacgccttttctggtttgttttcatgggcagtgaaaaggcagaaggtggttgtaggaagcgttgctggaagcaaaaattctcttggctatgtgcaaataaaaatttctgggaaactttatcatgctcatcgccttgcatggctctacgtgtacggatatatgccagaaaaagagatcgatcacataaacagaataagagacgacaacaggattgccaatcttagagaagcaaccagccaacttaactctcttaacactggtatctataaaaataacacatcaggtagcaagggtatttattacaacaaaagagcaaaaaagtggcaggcacagattctcatcgatggaaaacgggagtatttaggtctctatgatgatttaaaaagagccgatatagcatttagacttgctaatcacttcagacttgcaaaaccgaactga

SEQ ID NO: 188450 - DNA, 441 bp, Klebsiella oxytoca
atggctaaagacggaaaacacgtaattcacgcaggcggtatcttcgcgaacccacaacttcaccgtgaaggtgctgcagccgctgatactcctcccggtacgattggcttcttcgacaacaccacgaagaaattcaccgcctccgtggatggcaatgaagccgcgatcctctacgtagccaactatgactacctgcgttgcaaaaccgtagatgacgtcatcaaggctggcgactgggttgttgctttccacccaacccctggcgttttcttcaacgttcccgctgcagcaggaacttacacaaaagggcagcctctctctgtggccaacggtcgcgttaaagctgtcggcactgatgaatcggtccgctgctacgtagaggaagaccgctcatacaccatttcgacagcaggccagctcctgcgcgttgtcattaaataa

SEQ ID NO: 188451 - DNA, 1077 bp, Klebsiella oxytoca
atgtttgtattctccactaagcaggcgaccgaaaccgggaacctcgaagccaacatggctcagttcaatgaactgacgttcgctcgtaattccagcgctcaggccgtggcagactttattgctcgtacccgtgttcgcggtgaagcggcaaatgcgccggtactggacgcagtaaacgcagtcgacgatatccgccgtctgtacaaggcatatgaccagaccgtgctgaagcaattcgagccgaacaccgaattcacgctgctgaacgacctgatgccgctgtctcgttctgttcgtcttgaagagtctgtgtacgagtacgctcgcaccggcggccgaggctgggcgcacacctcaatgtccggtcagattggtgctgcgctggatgcgaagtcttacaccttcgatggcaccatggtgccgatccacgacagtggctttaagttcaactggcgtgacccggtattcaacaaaggctccgcgctctcatccctggcggattctcaggccggttcagtagatgatgtgcgtcggcagtatgtcgactacatctgggaaggtttccgcgatgcggcaggtaactacatcaaattcgatgacaaaacctggaaggggctgcgtcacgatgagcgtgtggcgcaggtaacgctgaccgttaacttcgcaaccagcaccgacccgaaagccatgcgtgcggcggcgatcgccctgcgtgacgtcctcaagctgcaaaacaagcagtacgggcagcagacgtggtacgtctccagcgaaatcatgtccaactgggaacagtatttcgatgtgaactctctccgcactgtgctggaagagatctccaagctgtcaggcatcacggcaatcaaagaagatgctgagctgaccggcaacgaaatcgtaatcgtgccgctgcaggctggcgtgattgctcctatcgtcggccaggcgttcggtaccgtcgctgatccgcgtcagttctacaactcagattacgtttggcgtacctggggggctgctggcctgatggttaagcaggacatcaacggtcactactctgttattcacgcttcaagctaa

SEQ ID NO: 188452 - DNA, 369 bp, Klebsiella oxytoca
atggcactcgtaaaggtattggtagcaaacctctttgccggtgccagccttcaaaagctggaggctggacagatttatgacgtcgatgactcgatcgctgaaaagtggattgagcagggcaaggttgagaaatccaccgagaagaagggtgaaaagctcgtctttgaggtggctactccgtctgcgccggtaagtaaagatgcatccggcatccagaaacaactcgacgaagctctcgacctggtgaaaacgctcactgatgaagctgaagcgaaagataaggcccacgcagacgctctggcagctgaggttaagcgagctgacgaagctgaagcggcactggcagcagcgaccaaaaaggacaagtaa

SEQ ID NO: 188453 - DNA, 285 bp, Klebsiella oxytoca
atgtaccttcacatcactttaaactccggcagaacgatgcacggaggtctgactcagtccattatcgaagtttatgacgtttccctcggagtcagatctacctgcaagggcgacgatgacaacgctcatccggttgttttatggcgatcaactggggataagagcgatgaggggttaatgttccttcatgagttggatatcgccgtcgtcaaatcaaaggatggaactgtgcttcatgaatggcacggagcaaaaagcctgaagcagaaaagagagagtaaataa

SEQ ID NO: 188454 - DNA, 333 bp, Klebsiella oxytoca
atgagcgaacaagagcagctacagcgcctgggtgaagaaatcgccggggcatatttacggcacctaaaagaaacaaccggcggcgacacggtgacttatgacggagttaccaagaccgttgtttttgaacatctggtcttcgggttggttggggtggctcataccaatgcgagaaagcatcctgacgatccagtcttgaaggacccgcataagcatttatcacagatgattaacctcttctctcgaccatatacgctcaccgactttggactaagcgttatagaaatgatgaatgagaaatctatccataaagagcgcggggccttaatgtga

SEQ ID NO: 188455 - DNA, 504 bp, Klebsiella oxytoca
gtgaaaaagttaatattagctttatttgcagtatcaatgcctctggtatccaatggtgctgaatatgtagcagaaggagcctggcaggttaagaaagaagaaaacaaaatgaccgataagactgatgtcgtcgccattaaccgatctccagatgtgtatactcgacagggcattgaaagaagcacatctatagttatcaggtgtaaggaaaataaaacagaagcgtatctgtctgttagcgagtacatgggcagtgacgacccagtggtaacagtaaggcttgatggtggtaagccgcaaaaaaggacgtggtctggcgccgagggcggagaggctgctttcaacaccaagccagtctcttttatcaaagaaatatcttcccataaaaagatgattgtgggatttgagccttacggctcgacgatgcaagtggttgagtttgatcttgctggcatagattccattgcaaaagaaattgccaatgcatgtaaatggaaactttag

SEQ ID NO: 188456 - DNA, 252 bp, Klebsiella oxytoca
atgtcgcgagaagatccacaattcaatttcaggatgacccctgagataaaggaaaaggttaagcaaagagcaaagcttaacggtcggtctataaacgccgaactcctgcaaatcgtacaggatgcactggatcagccatcgccagttactggctatcgcgacgacgccgagcgccttgctgaccagcaggctgagcagtttaagaaggtcgtattcgatacacttaaaggcatctacagcaaggagaaataa

SEQ ID NO: 188457 - DNA, 918 bp, Klebsiella oxytoca
atggcaagtatagcaattcttgaagcagttaacacctcttacgtactgttcaacgggcagcagattatcactgctatggcggccggtatcgcttatgtggctatgaagccaattgttgaaaatctcgggatgagttggtcaactcagatgcgtaagttactgagtcaaagtgaaaaatacaggtatgctcatatgaacatacctactaaaagcggcattcagaagatgctttgcctccccctgaagaagctcaacggctggctgttcagtatcaaccccgagaaagtgcgcgccgatatccgcgacaagctgatccagtatcaggaagagtgcttcactgttctgcatgactactggacgaagggaaaggctgaaaacccgcgcaaaaagacaaccgtcgatgaaagaacgccgctgcgggatgcagttaatatgctggtaagcaaaaggcatatgatgtacccggaagcttacgccatgatccatcagcgctttaacgtggagagcattgaggatttagaggcgactcagattccagatgctattgagtatgttcaccgtatagcgctcgaaggtgagttcctcggcaaacaggaagagttaccggctccgaaattgaatatcccggacatcacaatggaatggtggtacagcaacaatttcccaatgcgcatagataaccttgagcgttatccagggcatcaggcttggaacgatttaactcttacacctccgatgatgtatgggaaagacactaagtcgccggccctttacctgattgagatattggagcgaatggggtttgacatggtaggtccgcgtatcgaggtggaaacaatgcggatcatgcttggaaagggtaagcagaaaatcagggtcatgggtgacgggcgggttaagtaccttctttcactttga

SEQ ID NO: 188458 - DNA, 2469 bp, Klebsiella oxytoca
atggcggaaggtgaaaatgtaggtggcatttacatagaaattgaagctgatgtcgctaaattgcttaccggccagcggcaggccaaccaagcgttagatagtattggcgatcaggcgcaaaaaacagctacgcaactcaacaagcttgatacccaagtcagcgcaacagctaaaggagtatcaggaagcctcaggactggatttcagcaggctggttatcagattcaagattttgtcgttcaggttcaaggcggccagtctgctcttgttgctctcagtcagcagggctctcagcttctaggagtgttcggtgccagtggcgcggttgcaggtgctttactaactatcgggactgttatcgttggatcgctaattgctggcatggataacgcgacagtttcaacaaaggctttggaggaggcacaaaaaaggctctctgatatttttcaggtatccgcaaatggtgtagtggtactttctgacaagtttgcaaaactagcggaaacaagcgaaaacgcagccagagcccagctaacgatggctctcatcgatgcgcaaaatattatcaaatcctcagttcagagcgtaaacgagttaggagatgctcttggcacatggaaggcaccattaggtgcagcaataagccagcttgacgcactgaaagccagagggagtgatgttaaccaggcattgaaagagcttggtggcacatatgaggggaacatcgtagggctaaaccagcttaaccaagtggtgaatgaggtatcaaaggcatttggggttagctctgaggatgcagtaaagctggttcaggcattagctgacgtcaggcataacgccaaccctgataccattgccgctttgcgagatattaccgtcgatctcagccaaaaatatggttacgcaaataaatcactttccgagtttacgggaaaaatcggcgagtattctttaaagtcagatcaggctgctgaatcaacccgcctcgccacggagatgctgcaagggcataaggttgcttcagaggcagacactgaggccattgcgcaaaatacgcaaaggctgcaagcctacatccaaatgataaaggatgaaggcgccacgatcgctatgaccgcccgccaaaaggccctttatcgagcggagcagcttggggcttcggatgaagataagaaggccattaatacttcattcgacaaaattgatgcgtttaaagcagagaaagcagcgcaaaaagaagctgaaaaagaaagtagaaaatctgcgtcatcagcggcatcagaagccaaaaagctctccacacaacaggagtccgtggagcaaaaactggaaagactgcgtgcagcccaggacttatcaactgaatcagtagagaaacgtcgcatccaagaggctgggttgcgggccgagcagtcacttggcagcgctgcaactcaaaagcaactggatgaagcgagggcgctgggtcaggcaaatgagcaagctgctatatctatccagaagcgagcgcaggctgagcaggcgaataaagctgcaactcaactccaggcacaagctgatacatctgttgacccgaggacagggcaagcagtaaacccgctggcggaggttgatctcgaagaaagccaacggctggcattgtacaaaaaatactatgaccttggtctgatagacatcaacaccttcgaggctactaaaaccgccatccatcaattggccgcgaatgagcgtgaaaaaatcctcaaggatgaggctgataaacagcagcagaatatgtctaatctactcggggcgtcctctgacttcttcgggcaaatggctgggctggttggtgattacgctggcgagtccagcgctgcgtataaaaccctctttgctgtgagcaaggcgttctctatcgctcaggcaaccatgaatatggttatggcgatcagtaacgccgcagctctaccttggcctgccaacataccggcaattgcggttgctgctgctcagggggcaaatcttatcagccagataagaggctcaaattatagcggcggaagaaagaatggcggtcctgtaactgcgggtagtgtctatcctgttggggaggggaacctacctgagttcatgcagaccagtaagggcctgttcatgattccaggtgatagcgggaaggtattcagcaacaaagaggttactggttctccgagtatcaaaaaggcatcgaccggtagtgagtatcaaagccagaccagcggcggcggttcatctggttcgcaaacgtcgaagtctatagcggtcaatattcagttctttgaccaggcatcaggaggaaatcgcaccttgcagacggaaacgtcgatgggcaacgggatcgctgaaatcaaggcatacctgcttgatgaccaagcgaacaacggagaaatcactcagggctacgcggctgcaatggggcagagagtattagccaggggcgactactaa

SEQ ID NO: 188459 - DNA, 2073 bp, Klebsiella oxytoca
atggcagaagttccactcccaaccccgactaaggtcccggtgcccagtactgatattcgtaatgcggtatttgccggcgcgaagctggacgaagaggttactggtactggtgatttctatactgatcgccttgatgtgaaacgcctgaccaatacggggcgaaacaaccagttcaatgctgcgcagcaagaaagggccgaccagttccagcagttcctcctttcgtccggttacgtgttcctcggtgactatgaagacggtccgtttcagtttagcgcccgtaaccagtacatccggtataacgaccaatattaccgcctgaatgccaccacggatgtcggatttacgacgaccggtaccgacgcaaccagttttgcgaatgatgtgacccacttcgctctgatggatggcgatactcttcgccaaaacctgggttcaagcgaaccggggtttggggcagatatgtccatgacgacaattgggaaaactgtcggagatatcgtcaggtcgccatacattattaccgggcatgccagcatcaagtctccttacttcaatgctcctcgcgacggtgctgaagacccggaggccgccgcagcaaacgtcgctgcaattaacaggatgctggattctggtgccaaaacagtcgagctggacgacaaggccaggcaggttaattcaccgctaatttaccagggaagcgtcggcatttatggctcaggcagggagaccacttcgctgatttggacggggggagatctgcctgcactcgctcgtccggattacacgaacaaagaggctaaagggtttcccaatgtcagggttagacacctgaaaatagtggatcaggctcctgcgcgaaatagttattacacgattgacctgttcaacggcaacagtagtggtcttgacgattgctggattgactgccccggacgttacgacgcggatggcaatcaaattattacctctgaccgctatggtgttgctctgggtattgccagaaacagtacgcttaaaggtgataatggctttgtttttcatatgcgcaattcacgaatcgccaaaggtacattaatggcgaatggaaccgacggatatatttccggctgtgagttatggggggatttcagaaatcgtgctgtagaaattagcggcggatgcactattgatggcgggacacaaattgttccagggtatgaggcagggatatttttatttaatgacaaaggctatgacattgatacgctcaaaatcataagcgtttactttgacggctccactgacgtggatttattcacgggctggggaattctgtcagccgcaggaattggtctggttaacgcgaatatcagcagctgcaatttctggcacatgaataaaggtggtatttatgctgccaaaatatattcttccaatattgaatccaatacatttaccgattgcgattctgacgataccggtgaagatgatatttactgtgatgatgtgtatggctcatcgatcattaacacgcattcccgcagccttgctcctaagaacaacagcgcaaccagggtcaacctcggcaggaattattcaattacggcgaaagtggggtatccgctgagcacgctgggtggaccggtgagcttcaatacaacctatgcacgcagtcgtgtgacaaatccgacctatgcgcgacaggctggcggatcattcgcctcgtcatttccgtatggtgcgctacctgatgccgctgcacgatacggtgaagtcattgttgtaaacgggaaaccgtatgcctcggatggtgcatcgtggcgtgatatgtcgggtgacacgctcgctatggaaacggcgactgacctgcatgcactgacagtcagccagcgatactacacatccgatattacgatgcatagcaatatacccgcaggcctgaccggtgcggcgcagattgaggtcggatacatatctgcagggtacagggtcattacggtaatttccctgaaagcctcaggcggtatttataaacagctcttaaccgggggaacaacaccaacatggggcttatggttaaaaattgcataa

SEQ ID NO: 188460 - DNA, 267 bp, Klebsiella oxytoca
atgagttttaccgtctctaaaaaaatacgtaaatgcggctactaccctgatttaggtattcaggagccagcagaggacattactgtcgatgtgacgtacgaagtaaccgggataaaaagtctttacgggcaactgggtattgccacctacagcatgtccacgccagagtgttccgtagcgggtgaaagggatttcgaatttgagtgggctggtaacggaaatcctcttgaggccgcagaggcagccttggaaaacgatttattgtaa

SEQ ID NO: 188461 - DNA, 195 bp, Klebsiella oxytoca
atgacaactaaaaaatttattgaactggaggtgggggacgttatcgtccctgttccgggagtggaaataaccgtgacgtctgcgcccatcctgaccagaacagatgacggtgaaaattacaccctgaaagggaggcgggatggcaatgaggtgggagttgctggattttatgactcggtaatgcaagttaaatga

SEQ ID NO: 188462 - DNA, 306 bp, Klebsiella oxytoca
atgtcagatatagattatatttcatacattatttttggccttgttgtatgggcgttcctgagctttatggggaagcacgacagagcaaggcgtaagtttgagttctcagttaaatggctgtttacatttttatggccgctgacaatttttctttcttcgttcgtctactatcagcaaaacagcactatggcggctggtattttgttcattgtaggctgtgttctctgcatccctgcttatgtagttgccagtgagaatccacaccaagcgtggaagagaataacttcgttttttaaacagagataa

SEQ ID NO: 188463 - DNA, 2583 bp, Klebsiella oxytoca
atgcctcgtttaccatctgctaacgatctcggcagggtttccctgcgcccggcgaccggtgttgccagtcctgatctctctgcaccatttcgtgccgcgcagcagctgggaaatcaggtaacgcaaattgctggcgaggttgctgatgaccagaaccggctggattttggtaaagcgcaaactgcgtggttgcaggggcaggctaacactcatgctgcctttgagaaagataacgactatgcaactatgcaggatcgttatggccagcagatgcagaaggttacggaaagttcagcatccgggattaccagtggacgcatgcgtcaggagtttgataactgggtaaaccaacagaacatccgtggcggtgagcaaatccgatctctagcgtggagtaaggagaaagacgccagcattgccgggcttaatcagtcgctggagaccagccggtctacttatctgacatcgtccgacccggcaacccgtcagcaaattcttgatgccacgaacaatatgattcagggcgccgccagtaaggggtatatagaccagacgcaagcccagcaacttgggcagcggtggatcaccgatgctgctaccggttccctgaaaatgatgcagccagagcagcgtctttccgcattacagaatccgaccggcattgtgtcttttcttccgccagatcagcggcaggcaatgattaaagacgcgtcatatgaggcgttaaacaccaggcttgggcaacagcaattgcagatgtataccggcgatgctggtatgaatgtgctggctgtgccccaggccactttgctgcaggccgtgtaccagcaggaaagcggtaatcgtcatcgtaatgctgacggtagcctggttacgtcaccagcgggggcacagggcgccgggcagataatgccccccacgggtaaagatccgggatttggtgttaaaccacttcaggacgacagcgaacaggaaaaccgccggtttactggtgattacctcaatgcaatgctcaaacgctatagtgggaaccagatcctagctcttgccgcttacaatgctggccctggtaaagtcgacgactggttgaaacagattggcgatccacgtacgggccaggtgagtaatgagcaatttgcggcatctattccattcaatgagacgcgtaactatgtttactccgtttcggcgaacgctcagcgtatgggaaatgtccgttccgtcatagattcgcaggaattcaaaaatctggacgggcagcagcaggctcagatagcgtcacgcacagtacaaatccaggatcaggttgattcagcatatcgcgtcaatattcagcagcgcataactgacgatgctgcacgcgcgcaatcaggactcaatattgagaatcctgtgaccgaagctgagttcatccgttcgatcccttcttctgcaacaccgggagagcgtgcacagttttatcagcaatggaaccgttacaaagatacgctggcgcttcagccggtaaataactttgtgatgcagaattctgccgtcgatggactggccgccgttcaggcgctgaaacctgccgataacgcagctgatttacagtttaaaaaacagcaatatgcgcaggcccaacagaactatcaacgcatcatggatgcccgtgaagcagatccaggtggttggctggttcagaatgatgagacgacccaaaaagcattcgcggcttataccgataaccctgatttaatgggcgactatgtaaaaaatgtcattatccaaaagaaacggctcggaattaaaagtgatgctgtgataccaaaagttcaggccgatgctttatctcaggctctattacagtcaacaccagataaccaatcaaaactgttggacgccattcataaaggtactggcggtggtgcaccttacatggccacactcaaacaaatagcggtaaatgcgccctctgcggcggttgccggcgtcctgatggataagccttcgtcgttaattgctcaggagaactggatcaatcctgatatcacgatttcaccttcgcaagcgtcaaaaaccattctcgcgggttctgctgcacgaaaagggactaaagacgcaaaagggatgtcgatgcccaaggaaaacgatatgcggcttgagttctcaaactccgtgcaggatgcgtttgccggtgacgctcagggagccgcaatggcatatgaggtggcaaaggattactacgcgggaataatggcccagaagggggattactccggtgttctggataatgatgtctggaagcaggccgttaatgtgtcaactggcggtgttcatgactataacggtatggggtatgttctgctaccgtggggaatgtcggcagaacagtttgataaacaagtcgatcaggcgtggcaaacacaggtcacaggtgcaggagtcaaagctccaccgggacaatacggcctgcaaagttacggtgacagccagtatctggttaagctcggtgcagggtatctgcttaaatctgatggctctccggtaatactggatctgactcagcagcgtcagcgctttatagagggcataccgcaatga

SEQ ID NO: 188464 - DNA, 372 bp, Klebsiella oxytoca
atgataagtgaaattaaaacagcttcaatggctgatgtaattgagtggtttggacaggttccggggactatgaaggcagtgcaactgctggttaatggtacccctgtcgctatcggcggaatgatgcgcaaagaagggttcaatatggcatttatggacatgaagccagaagccaaaatcgtgcctttttctctgtggaagggttcactcaaagcaatgaaggaaattattgcagaaagtcgaatacctgtttatgcacgcgtcagtgattcattagagaccgcaccagcttttctgaaaaggctgggatttgttccagttgaaggtaatgaaaaggtaatggtatggcagatccattttccgcaggaataa

SEQ ID NO: 188465 - DNA, 141 bp, Klebsiella oxytoca
atgaatcatctcaccatagaacgcatccgctaccgctggatgaagcttcgcctttgccgtcatcgcggcactgtattagttgactaccgcatcctcagaaactttatacgcacctgtcagatccggggagagacagcatga

SEQ ID NO: 188466 - DNA, 255 bp, Klebsiella oxytoca
atgactgatgccctgacgaaagaaaaaatcattgatgctatgcgcagttctattgagggcttctccttcttagtcgtcgattcgctagagtttgaactcaagcgccagcttaccgacgctgaacagcaggaagtttccacagttattgagcagttggttctaacgtttcctgaaccatgtccgcgctgtggggtaacgtctactcgcccgaatggtgagcattattgccatgctaacagcgtgaggactgaataa

SEQ ID NO: 188467 - DNA, 957 bp, Klebsiella oxytoca
atgaagctatggcaacctacccccgccgcgctttggcagggacgcgacgacagcgcggaggcggccaacgcgctgcgcctgtttcagactatcgtccgggccgagcgttttgagccggagatgctggctggcgacattgccctgctgggatttgcctgtgatgaaggggttcggcgcaataaagggcgcaccggcgctgaaagggggccggaaaccctgcgccgggcgctggccaatatggccagccatgacggacatgaccgctgcgtggatatggggactatccatgtggcggacgacgcgctggaggcagcgcagcaggcgctgcgcgaagcggtaaccgcctgccaacgcgcgggcaagcgtacgctggtcctcggcggcggtcatgagacggccttcggccacggcgccggggttctggacgcgtttcccggggaggaggtcggcattattaatcttgacgcgcatctggatttacgtatcgccgaccgggccagctccggtacgccattccgtcagctggcgctggcctgcgaagcgcagcggcgcgcttttcattacgcctgcatcggcgtgagccgcgccgccaatacccaggcgctgctggacgaggccgcccgccgcggggtgacgattatcgaagatctcgatgtgcttaacgctttcgaagcgcgagcgatcccggaactcgcgcgtaatatcgcccgctacgatcgcctgtatctgactatcgatctcgacgtgctgcccgcgcgcgaaatgcccgccgtctccgcgcctgccgcgctcggcatcccgttggccacgctgctgcgcatcgtcgagccgctgtgccgcagcggtaagctccaggcggtggatctggtggagtttaacccgcagtacgatattgatagccagggagcccgcgcggcagcgcgtctggcgtggcaaatcgcccattggtggcagtag

SEQ ID NO: 188468 - DNA, 699 bp, Klebsiella oxytoca
atgaatgaaaccatagcattacgtcctgatagcagggcgttggcaaaggacagcgttgttgattacacccttgcgtcgctggaggaacttgaacaactgcatccggctctgaatctgctggcgcacccatcaatcgctcaggatagccatgatttctttgtccgttgctatgacgctggcgtacggcatgcgcaggccggggccgctgaaacggtggcggctttacctgattcgctgacacatgagcagcaagggagcgggctactgtgtgcggctgccgggcgtctggaaattcttggtcagccgctgacgcacaatcgtctgtgcgacctcgccggtcagttctgtgctggcatggcggatgttgatagcgaaatccgcagcggtttctataccgtgcgcagcatatcgctgccggtttaccggcggctgctgcgggataagcattcatatggcatctgcctgcagcaggcgctgctgcatctgctggcctggaaaagtgattccccctgggcgcggcagcaggcccagcggttgctctggcaggggggagttctgggtgataacggcgagtttgcgctgatgacgctcgatgatgaactgcgggagcgccagtttgcgtggcccggattgtggtcgctgctggccgtgaccgggtttctggcgaaattcccggccgggccgatatttgctgactga

SEQ ID NO: 188469 - DNA, 594 bp, Klebsiella oxytoca
atgaagtattttaatagtaagccctctattgtttatggttatcatggacttgataaagatgttgcttacaatattttaaataaccattcggaatttcttttgagtgataacacttacgactggcttagtggaggtgtttatttttgggaaaataattacgaacgtgcaatggactatgcaattgagtcaagtaaaagagcatcttcaaatattaaaactccgtttgttcttggagctgttattgaattaggtacctgtcttgatttattagaccatagtgatattgattatgttaaagaagtttatgacttgtttgtgcaatatttgaaagaaacaaattctccgcttccagtgaactcaagttttaattccaaagtaaatgacctaatgaaaagagaattagactgtgctgttatttctcatgctaaagaattagctaaattaaatggaatatctattgatactgttcgggcatcatttcaagagggcaatcccatttatccttcggctaactttcatgataaaacacacatacaaattgctgtagtaaatcccagatgcataaaaggtgtctacttaccaagagaacgataa

SEQ ID NO: 188470 - DNA, 180 bp, Klebsiella oxytoca
atggatattcaggaacttacgagaaaacttaagaataaaacaatttcatacacaacagaagaaacaaaacagatccttatcgatgccaaagttttggttaaagatggctcatataatccagagatgttttctaacgagttagtcaaaaaaagccagcgagcaatgaagcgtagaagatga

SEQ ID NO: 188471 - DNA, 1227 bp, Klebsiella oxytoca
atggcctcactcactgtcaggacggttcaggctctcatcaaagcaagagaaccggggaagtttggagatgggcgaggcttgtacctgaaagtcccacaaaaaggtgaggcgtattggatgcttcgatacacaatcggctctaagagacgagaaatcaccttaggtaaggtatctcatctatctctgtccgaggtacgtagcctcgctgaagatacgcgcaaaaaagttgccaccggagatgatcctattgctgaacggaaacttaaccgaccgaagcaactcacaacggtagatggattgtttgaagactggcgcaaagacctggttaagcggttgaagcatccacaaatcccagaaagggtatacaggaaagatattgcccctacgattggtcaactttctttggcgaagataacccccattgatgttcgagccattctccaaaaaattacagatagcggaaggccaaccatttcaaatgatgccctactctacatgaagcaactcttcgaccatgcaatcaagcttggattattgttaaacaatccagcttctgcgtttaaggtcaatgatgcaggtggaatcgaaaaaagcagagaaagagcattgagtctggaagaaattggtcaggtgtttaaaattttcagagaacactctgacagcttctctcgtgataactaccttgcctgtgctctgctactactccttgctgttcgcaaaagtgagctaaccgaggctccttgggcagaattcgatttggatgagaaaaaatggtctttacccaaggaaagaagtaagtctggtgtagcaatcgtcatcccgcttcccccgctcgctatgaagattcttgaagagctaaaggttagagcttttggttctgattatgtctttcctaaccgcagatccagtaagaatctacacatgggaaaagacacgctcaacagggcgatagccaagctattcggggtagaaccaggtaagaagaagcaaccacctaatgtaatgggtgatattgaatatttcacagtccatgacttacgaaggacttgcagaagtttacttgcatcactgtctgttcccccacatgtcgcagaaagatgtctgaaccacaagctgaaaggtgtagaagctatttatgacaggtatgattattttcaagagagagaagtagcacatctcaaattatctagattgcttacaaagcatattaatttattggatagataa

SEQ ID NO: 188472 - DNA, 726 bp, Klebsiella oxytoca
atgaactggcgcgtttacgcttcgtcggtcattggcagcagccacagacaaaataaccttccttgtcaggatgccttttgctaccgcaatttgggcgatcgtctggtcgccgccgtatgcgacggcgcaggctcagccgcttatagcgaacagggtgcggttttagtcgcccgagagctggccgaacggttggcgaaattcaccgccgcgcctgatgaacagcaactggcgacgctgatagcgagcgtgcgtgaggtcgttctgctggcggcgcaggagcgagggctttccgcaggcgattttgcctgtaccgttgtggccgcatggctcggggaaaccgcctcagtggtgctgcatatcggtgatggcgtcgcggagttgagcatcgacgctgagcagcacttctcgttacctgaaaacggtgaatacgccaaccagacctggtttctcaccagccacgactggcgcgaacatttacgcatccgtcagtttgctggcagagccacgcaactggtgatgatgtccgacggcgtgcagccgtttgcgctaaaccagcgcggcgatgcgctattctccccctttatggaccctgttttgcgttatttgccgcaggtctctgaggttgaagggagtgaggcgatacgcgccacgcttgacgacccgcgcacctgggcgataaccggcgatgataagacgcttctggtagctctgcgtaatgaagcataa

SEQ ID NO: 188473 - DNA, 1374 bp, Klebsiella oxytoca
atgaagcataaaaaagcccctgggtgttataacgagcaacgtcgcgcggtacgcctgggaaaactgattaagagcggcggcgctggcagcgtctattttctggcggatgacccttcccgcgtcgcgaaaatctatcatcccaatatcgataccggctattaccagcgcaagcttagcgccatgcttgcgcagcgcccggaaatccccgcgcctgctgacggtgaagcgatcgtccaactggcgtggcctgactatttgctcttcgacgagcgcaagcgggttattggctttgttatgccggtgctcgatacccggcgcactattgagctggagtatattttgcagtcgcggcaggcgaaggcgcagaatctgccggaggggattggcgccaaagtgagcctggcctgcaacctcgccaccctggtctcggcgttacacgcgcgccagcaccgggttatcgacatgaagccggtcaacctgcgtttttatcgcgacagcctgtacatcgcgctgcttgactgcgatggctttagcatccagggcgagggcgagcgtttcccggccgggcagttcacgccggattacctggcgcctgagttccagcgcattggccaggtgccgggcgaacaggaagaggctcaggaccgcttctcgctggcggtgattattttccaactgctcaaccacggcattcatccctatagcggccgcgcgcaggcggcaaaagtgcctgatgatttacccggtcgcatcgccgccggttgctacgcctacggcatcaatgccgcaaagaatatctctccggtaccggccagtacccatcacctgctgcccgctgggctacgcaagctattcgatcgcgcctttagcgattcgcctgcccaacgtccttccgccgatgaatgggcgaagatcctgcgtacttatgcgctacgcagtacgcaaaaaattgttctctgtagtaagaaacaccagcatttcgccgggatgccgtgcctggtctgcgcacgtgaaaaacaggttgttgagggcgtaaaacaggcgaagcagcataagcggacacaaaccgttagtccaaagcctgcgcccgcaaagcggcagcctcgcgtggcgccagccgctgcggtacctcgtcagccaactgggccggggccgttaacgctgctgtggcgcaatatgcgcagcaaagttcctgcatttgtttggcatggcgcgctggctgtgattagcacgctggtgatggccatattagcgcgtaattttacccaactgagcggtccctggcatgcctggtacgataatgcggcgttaatcctgatttttgtctggatagccgtgatggggctgctggcgattcttcggagtaagccataa

SEQ ID NO: 188474 - DNA, 2337 bp, Klebsiella oxytoca
atgattacgccgaagttaaaacacctgctggtcatcttgtctttgattgcgctttttgtcgcgccgaatatggtgctctttctctggtctgcaccctttatgttggtggataagctttcgcttttaccggcggcgctgaatgctccccagcgtttattgctctacggcctgtggctagggggaactctctacttttccgccctgatgtgggtggcgattacccggcgcaataaaggctatctgattgctgccgtggcgcagattgtttttgttatcggtatcaccttattcaatgtcccaattggcgagcaaaaccagcggcgctggcagagtatgaatcagctggcatcgcccgcctgggcggattttctctatgaccgtcatgcccgttttattcagataatcctgcgtggggaaccgtttaatcagcacaagattgtcgagcaatttatcgcgcagaaaaagccattagcggagctgccgcttggctggagtgaaaaagatgccgccgccgcggatgcgctctggcagcaggcactgggctatcgcgaacaagaagcgaaagcattacccaaaataacggattatctcagctggatgccggaccgtggcgatctgacgctggccgcggctatcctgacgctgacaacggatgcggacaaatcgcgggcggaaagagcctttcggcaggcaatcgccattgcgccggaaaactctgacgcctggctgggttgggcgttagcgctgatccagtcccgcgataatgagcgggtgcgaaattcgcagtttcaggcgcttacgcaaagcattacgagcggattattgatagcggagggcctgaaggatagcccgcgccagcctgcgctacagcagcggttagcggcgtatatcgcgcaaatgccgtctgacgaccggcaaatcctgcatattctgcaggccagaatgcagacgcgctcctgcgatttgccattggaccggtatgcaacggaaaaaggcgaaggtagcaaggtgttgcctttatcgaaatcgatcgtgtttaaagaaggccccgtgcgtggcatcagcacagttaacgagcactttccggggcacgtcagcattgagccagaaagatatgggatcggcaaagagacggtgccgccgatgctctacccggcgataaataaatatatcaagtcggcgacgacggtactctcgctggatacagacgccagcggcgagctgttaaacgtggtggttgagtgcagcagcggcgttcccgagtttgataaagcggcgctccactacgcgccgcagtggcgttttcactctaatcggcagggaaagcgcctgctgatgccggtgacctttatcagcgatcgcctgtctccgaatgaacactatcgggaaatggaatcacgggcgatgcgtatctcacggctggcggcccggcataataaacctggaatggaagccgccgcgcaagagatggccgctcaattcacccggatgaaagcgctttttccgcagaagaaactgagcgcggaagaggcgcgcaatttacagcttatctacttcaaaaaacgagaaaaaacgaccaaaggcagaatagaaggttttaccgaaatgaccgaggcgatggaagcgctggtcgaaacgcatccctactatgcgccgttattgaaggatttggcgctgagaaagagctatgtttcctttgacgagaaacgggcgacgtgggcgcaactgctggcgctggctccggaggatccgcaggtgtggatggggtggggcagcctgtgggccgagcgcgatcctgaactgtacatcggcgcaatgatctactccctgttgctacagccactcgccgaggataccgagcagaaaatagcgaatatcaaaactaagctactgatgcgggttggcatgggcgagcgtaatgcgattctttcggcaaaagtgtacgcggattatgctgatatcctcggggaaagagcgaaaggtgaagagaccgcaaaagccggggaaatcttgccggcgagcaaaaagctggaccgccatgaaacgctcgttccctttgacccgccggtgagtatgacggttgatatcgacaagaatgcggtgttgaacgcgtctttcttcggcgttgagtggaaggcgccgcaaatgcagggcgataaacggactgagcttaccgttgatattgataaaaacggcgcgccgacgctggtgctggtgagcaaaagcagcgaagtggaacagtacgatgcgcgggcggtcgatatgctctggcgctggaagttcaaaccgcagcccgatggcaggcagataaccatcggcgtgaattttcagcactag

SEQ ID NO: 188475 - DNA, 558 bp, Klebsiella oxytoca
atgaaccattatgatgatttgcagcgcttcaaggaaaagacgcggacacacagtctaaaattcaaggacctctcatcagaagccgccgccggtgaaaaaggggattgggttattctcaatcaacttattcccgcggaggaagagtcttctttggcaatggggggatcggtctccctacctgtgccgcagcgggttcctgccgatatgtttcatcaggtggagcgcgctgtcgttcaaaccgcccctgcgccatctgcgccggcgccagcgttgagtatcccgccttccgcgccgcagcctgttcccgtgacggacaggatggccgtagtgcccgcggcgccggaaagcgcgcccgcggctgaacccgcttccctggcgacggtttctcgacctgctgctcagccgatacctgtccctccggccaagcctcgtccggcgatagcgccgacggcggaagggtttgcccatctctttgcgacaaaaaccgcagagccggtagcaaaagataaagatcagtcactgaaatcactcctggagaggatcgcgacatgccgttga

SEQ ID NO: 188476 - DNA, 609 bp, Klebsiella oxytoca
atgcaggtaatcatgtttgacaggcagtcgatatttattcatggcatgaaaattggccttcagcaatacattcccgaaattgatctttttggcacctgtcagcctgaacagctctggcagatgctgacggcgcaccctgacgcgctgctcattctggatggtgatatgcacagcgagttttgttgttggttgttgcaggaaaaacagcttcgcttcccgcaatctcaggtactgctgactgtttctgacaataataagagctggctacagcgcgcactgccttacaatgtgcggggcatcgtgcaacgcgaggaaggtttgcaaactttcgctcaggcgatcaacagcgtcctgctgggactgctccgtctaccgggcgattggctaatgacggcggaagcgcgggataataaatgggttcatttaagccagcgccagcgtgaggttttacagctgctggccgccggtgattcaaataaagagattagccgtacgttaaatattagcgtcggcacggtaaaggcccatcttgagtcgctctatcgccggcttaacgtgaagaatcgtacccaggcggcgatgatttttaatagcattagcgaaacttaa

SEQ ID NO: 188477 - DNA, 309 bp, Klebsiella oxytoca
gtgcgtagctccgcctccggtgccgacaatctgacgcgtctgaacggcggcgagctgatgctgatgtccgcctgggaagagcatctggccgggctgcaaaaaaccggggccatcacctcccggctgttccttaactggccgatcctcctcgaaacgcaacaggcgctgagtaaagcctccggttccacgccgaggaacaggcaggtcagcccggacgtgaagcgccccgacgccgatgtacagttttacggtaaggtctacagcgcgcagctcaggaaagagttcgtgcgtgaagtgatgatgcagtga

SEQ ID NO: 188478 - DNA, 1200 bp, Klebsiella oxytoca
atgcgtaaacaaattctgatcgtgggcgctggctttgccggtatgtgggcagcgctgagcgccgcacgtctggcggataaaaatcagcaggacattgatattacggtgattgcgccacagcctgaactgcgtgtgcgcccgcgtttttatgaaagcgccgttcaaacgctggttgcgccactgcaaccgctgttcgacgtcaccggggtgactttcctgcgcggcacggttgagaaaatccttccggcctccaaagaggtaagctggaaagatgccaacggtgaaatgcgccagcatcgctacgaccgcctggtgctggccagcggcagccaggtcaatcgcagtacggtcgccggagccgcagagtacgcattcgacctcgatcaactggaaagcgctaccgtactggagcagcatctgcaagatctggcccggcagccagagagcacggcacgtaataccgtggtggtctgcggcggcggcttcaccggtattgagatggcgctggagctaccgggtcgtctgcgggcaattctcggcgccgatgctaagaccagaattgtcgtagttgagcgaggcccgcagccaggctcacgcttcagcgatgagctacgcgaggtgattattcaggcttcagaagagctgggcgtcgagtggctggtcaatgccgaagtggagaacgttgatagctctggtgtgacgctgaaagagggtcggacgattgcatcacagacggtcatatggaccgttggcgttcaggctaacggcttaacggcacagatcgatgccccgcgcgaccgtcagggtcgtctgcacgtgaatgctaatcttcaggttgtggggcatgaagacatttatgccaccggcgacgtggcttatgccgccaccgatgataagggtaatcacgcgttaatgacctgccagcacgcgattctgctgggcaagtttgccgggaataacgcggctgcaagtctgctgaacgttgaaccgttgccgtatcgtcaggagatgtacgtcacctgtctggatctgggcgaatggggcgcggtttacaccgagggctgggatcagcaggtgaaactgacgcgcgccgaagcgaaaaaactcaagatgtcgatcgtcagcgagctgatttatccgccacaagccgataaagcggtggcgttcgagactgccgacccgcttgccccgtttgtataa

SEQ ID NO: 188479 - DNA, 504 bp, Klebsiella oxytoca
atggcattctacagttccggggttgaatacggcatccatagcctgatgtgtatggtggacagcaagggcgatgcccgcgacatgagcgtacgtgagattgctgacttgcaaagtgtgccctacgattacctggccaaaattttcacccgtctgtcaaaggccggtttggtacgcagcatcgagggtaagggcggcggttttcagctggcgaaagcggctgaacacattacggttctcgacgtggcgaacgccattgatggtgataaacggatttttgaatgccgtgaaattcgccagcgtctggcggtatttgaggagcagcctccgcagtgggcttgtgaaggcatttgcggcgtgcgctcggtgatggatatggcgcagcagcggatggaggaggctttaggccagcacaccatcctcgatctggcgcgtaaaatgtaccgcaaagcgccggatacttttgtggttgaagtgcaggactggattgccgcgcgaaaagcgtag

SEQ ID NO: 188480 - DNA, 333 bp, Klebsiella oxytoca
atgaataaatcacaggtggagatattcatgctgatggttcgggaggggagtattcatattgcatcgcagcggttggatattgtgccttcgttgataacaaccagcgtatgtgcgcttgaaaatgaactgggttttaacctgattacgcgcggcaggaatatcagaaaagttactctaacggagaaagggcacgctttttaccggcttgctccagaattactgagaatactcaatgcgattgcggatattcgcgcgggaataaaacggcccggcgagtcttcaccgccgggcaaaataatcagttcagcccgagaaaatactgggcgattttaa

SEQ ID NO: 188481 - DNA, 2100 bp, Klebsiella oxytoca
atggacaaattcggcgcagagcagcttttgcaacggatgctggcaaatcctgctgcaagctttcgcgaagggcaatgggaagctattgatactttagttaattatgggcgaaagttgctggttgtgcagcgtactgggtgggggaaaagcgcagtctactttattagtacgaagattttccgcgatcgcggtagggggccaacaataatagtttcacccctgctggctttgatgcgaaaccaggtgctggctgcggaacggctgggcattcgggctgaaacactgaattcaacgaacagggatgagtggctgcttatcacccgacagcttgtcgccggcgaactcgattgcttattaatttcacctgagcggctggcgaatcaggatttcattcaatcggttttagcgcccgtaggggatcgcatttcgatgttggttgtggatgaagcccactgtatttctgactgggggcatgatttccgccctgattatcgacgtattctggatatcctgcgtcagctacccgctaatacacctgttctgggtaccacggctacggcgaatcagcgagtcgtgactgatatccaacagcaaattggcgacatcgtcattcaacgaggaacgttatcgcgtaaaagcctggcgctggatgtactgactttgcgcgaccagccttcacggctggcctggctggcgggcacgatccccgaatttcccggcgctggcatcgtttacaccttaacgacgcgagatgccgatctggtcgctcgatggctcaggcaaaacgctattaatgctcaggcctactatagcggcgtggtccatccagggtttaatgataccaacgcgaccagagaatatctggagaatgcgctacagggtaatgagcttaaggtgctggtggcgacgaccgcattgggaatgggttatgacaaaccggatttaagttttgtcattcattatcaggctccggggtcgatcgtgggttactaccaacaggtagggcgcgccgggcgcggaatagaccatgcatcagggatcctgttgacgggagaagaagatagcgcgattcatgattattttcgccagtccgctttcccaacgcaaagtcagattgctgaggtgttacaggtgcttgaaagcagcgatgggctgacgcttcgcgatatagaagcgcgaactaacctgcgctacggtcaaattgaaaaaacgatcaaattactgagtgttgaatacccttctccggtgttgctggagaaccggcgctggtatcgcacggctgtaccatttgcgttcaaccagcagcgtattgatcatctcacccggcagcgggagactgaatggcaggaagtcaggcagtatatcgctacggatgaatgcaaaatggcgtttatccaacgcgcgctggatgaaccaacaacagaacgttgcgggcaatgtagctcctgccaaaagcatcatcttttagattatcgtgaagatcgttctttgcttgagtcggcaaatctctttcttcagcgtgccgatctcccgctgatactgaacaggcaggttgctgctggggctttcagtacctatggctttcaggggaattttccggattcgctacgcgctgaagaagggcgcgttttatcacgatggggagattccggttggggagcggaagtcgcgagagataaacatcgtggctttttttccgatagtctggttgccgggttggctgaaatgatttctgaccgctgggcaccaaatccgccgccgagttgggtttgctgtgcgccttctttacagcaccccgagcttgttcctgattttgcccggcgtctggcgcaacttttagaacttccttttgttgatgccattgttaaggtcagggacaatcagccgcagaaattacagcaaaaccgctatcatcagtgccagaatctggatggcgtttttcaggtaaactcagcgctgccggatggtcctgttcttttggttgatgacctcattgactctggatggactatgaccgtacttgcagcactgctgcgtcaggccggatgcgaaaaagtgtatccggtagcccttgcatcaacttcggtgaaaaatggatga

SEQ ID NO: 188482 - DNA, 1206 bp, Klebsiella oxytoca
atgaaccttaccgcgatcgcgcaagccacgcttttactcacctgtcacttttcggcagggcaggcgcatgagcaccagccgttaagccttgctgagtggggaaggctggcgctttggttaaggcatcagcgcatgtcgccagcggatctattaacgccagaggtcggtattcggttagtggcctggcaggatccgaaaattcccgttacgcggattatcggactgttagcacgcggtcatagcctggcgctggcgctagataaatggcagcgggcagggttatgggtggtcacgcgcgctgacgaggattatccgtgccgtttaaaagcaacgctaaaaaatgattcgccgccggtcatttttggctgtggtaatcgtgcattgctgcaaagcggcgggctggcggttgtcggttcacgcgcggcgcttcctgatgatttgcattttacgcaacagctcgccagcaaagccgcagcgcaaggggtgaatattgtttccggcggggcccgcggcattgatgagtgtgccatgatctctgcgctcgaagcaggaggaagcgcgaccggcgtgctggcggatagcctgctgcgggcttcaacctcggcaaagtggcgtaaggggcttatggatggcaggctggtgctcatctcacctttttatccggagggtggcttcagcgttgcgaatgcgatggcgcgaaaccgatatatttactccctggccgaagccgcgctggttgtccatgcgggtactaaaggtggaaccatcaccggtgcaaaagaggcgctaaaacatcgctggggaaccgtctgggtaaagccctcggatgaccctgaatcatcgaatgcgcttctggttcaactgggaggcgcctggtgtagtgaagatgccctcgatattgaaccgcagcagcttttattaccgcagcctaaccccccctcagccctgttgactcaaagcgtcgagcaatattcgctttatgaatcgcccgcggggtatcacacctcttctgatccgttttatcagctctttctggctgaaatgcgtcggctggcacaacagccggtttctctgcaaaagctgagcgaggagctgaacgtgctcccttcacagctacgtgagtggctggttagagccgagcaggagaaagttattaacaagctaaccgatccgcagcggtatcagataagctttgcatcccgctaa

SEQ ID NO: 188483 - DNA, 534 bp, Klebsiella oxytoca
atgagccatatagtcaacttccttccctggcgcgaaacgcgtcgacggcaacgtctgcagatggcggggctgctgattcttggtttgctgcttattctgctggcggcgctcctcacttcacggctcaaccagcgggtcagccactcgcttgaaaccgcgaagattagcgctgaagagcagctgtataccgcctttcagcagcgtgagcgcgccatgcgccaacggttacagcagcaggaacaacgacgcctgcgcgctctgcggcgggagaaaacctccgcgtggcagtcgaggttgcaggcgatagcggcgcttatgccggaacacgcctggttaacccaactggaataccgccagaataccctggtactgagcggactcacgttgcatctaaaggggctggctgagcttgaaaaagcgctggggagtgttgccggcttgcgtccgccaaaggcgggagaaacgcaccgcgacggtgaagggcgctggttatttcacttttccatggccggagaggacgacaatgcgggttga

SEQ ID NO: 188484 - DNA, 441 bp, Klebsiella oxytoca
atgcgggttgagattgaacgctggctgacggggcgcaaaagcctgttaacaatacctgtcgtcctggttttcattgccggagtctggggatggctactgcagcccccccaaccagacattaacgcgggcggcacgccgcgcatacaagcgcagtggcgcaaattgttgccgctgcgggctgcgctacaaaacgttggtattgatgagcaacaaacccaggctttctctcccattgacctcccggtgacgggcgctgcgcttatggactggcggccgatagggcgcggtggcgagatgcagctggcggttgactggcaagcggtaccggcgcttttttcctggctggcccgctgcgggatgcgagccacggctttctcaatgcagccggaaaatcaggctctacggctgatcctgcaactggaggcggaagatgcgccgtaa

SEQ ID NO: 188485 - DNA, 300 bp, Klebsiella oxytoca
atgagccgcgaccagcaggaacgcgaacggcaaaaggcgcttttgctacgtcaaatccaacagcagcggctggatctcaacgccagccgccgccgctggcttgaggcgaccgcgccaatcgaccgtggctggaacaccctgctcaacctgcgttcatgggcaatggtcggcagcggcctcgtcgcggtatggtccgttcgccatccgcgctttttgctccgctggacaaaacgcagcctcggtatctggagcacctggcgtatggcccgcaagctgttgcagcagaccgcatcgcgctaa

SEQ ID NO: 188486 - DNA, 1416 bp, Klebsiella oxytoca
atggtaaacctggttattgtttctcatagcgcccgtctgggcgaaggtgtcggagaactggcccggcagatgttaatgaacgatggctgtaagctggcgatcgccgccggcattgacgatcccgccagcccgatcggcacagatccgattaaggtgatggaggccattgaatccgtcgccgacgccgatcatgtgctggtaatgatggatattggcagcgccttgctgagcgccgaaaccgcgctggatctgctcgatccggcgattgcggcgaaggtccgcctgtgcgcggcgccgctggttgaagggacgctggcggcgacggtgagcgccgccgccggggccgacatcgacaaggtgattgaagacgccatgaatgcgctggaggcaaagcgcgtacagctcgggttaccatcgcaacccccttcgcttaccgccgcgctggccgatgaccgcgacgcgcgctcggtttccgtagtgattcaaaatcctaacggcctgcacgttcgcccggcgtcaaagctggtcgccgcgctggcgggattcaacgccgacctggtgctggagaaagagggaaagtgcgtcacgccggatagcctcaaccaaatcgccctgcttcaggtgcgccgtaacgataccttaaggctgctggcccgcggcccggacgccgacgccgcgctggcggcattccaggcgctggcggcggagaactttggcgagcaaacggaggcgactcccgctttgcagcccacccatgccgcccgcattcagggccaggtcgtgctctaccctcggcctcagaacagcgttacgcgggaaaagagcgccgccatcggtcagcagcagctgcgcctgaaacgggctattgatcggacgctggacgatcttagcgcgctgacggccctggcggaggagaagtattccgccgacatcgcggcgatcttctccgggcatcatactctgcttgatgatcctgatttatatacggcagcgtgcgatatcgtgcgcgacgagcagtgcagcgcggagtgggcgtggcatcaggtgctgagcgatttaagccaacaatatcgccatctcgacgatgcctaccttcaggcacgctatattgatattgaagatattttgcaccgcacgctgcgtcaccttaacgagagcagcgaagcgctgccgcagtttagcgcgccttcgatcctcgtagccgacgatatctttccttctaccgtcgtgcagctcgacggccgtcaggtgaagggaatctgtctgcaggagagcagcgagcacgctcacggcgcgattatcgcccgccaggcgggcattgcgatgctttgccagcagcgcgatgtgctgacgacgctgcaaaacggagagaccgtcacccttgatattcccggcaaacgcgtgattcgcggctaa

SEQ ID NO: 188487 - DNA, 1038 bp, Klebsiella oxytoca
atgcctgtaagaaaattatccaatggccaatgggttgctgatttttacaccgtagaccgaagcgacggtaaagacggtaagcgggtacgcaaaaaattcgccaccaaaggcgaagcgcttgcctttgaaaactacacccttcaaaaagtcgaggacactccctggcttggacaaggaaaggataaacgccgcctttcagatttgatacatctctggtttgagcgccacggaataaccctgcgcgatggtgaaaagcgtaagagcgccatgttatgggctgacgagtgcatgggttcaccgatggctactgagttcaccgcgcagctgttcaccgcttatagggctaaaagacttgatggccatttggcccgcactaagcgcgttgctcaggtttcgccgcgaaccatgaacctggagcacgcttatttcctcgctgtatttaatgaattaaagcggctcggtgaatgggatgcaccgaacccattagaaaacgttcgtcagttcagaacagaagaaagtgaaatggcctacctgactggtgaacagattgacaagcttttagaggcatgccgcctcagttctgcgaaagatctgggaatggtagtgaaagtttgcctgtctactggcgcccgatggggggaggctgaaaaactgaaacgcagtcagataacagcgggaaaggtcacattcataaagaccaaagggaagcgtaaccgcaccatcccacttgactcagaaatcatagccgaacttccaaaaaagaatggggcactttttagcccatgttattacgcctttagatcagctctggaaagagcggggattgaattaccggcagggcaattgacgcacgttctcagacacacctttgcatcccattttatgatgaacggcgggaatatactggtgcttcaaaaaatactcgggcataccgatatcaaaatgacgatgcgttacgcccacttcgcgccaaaccatctagaggaagcgttaaaacttaaccctctaaaatgtcgcaaaagtgtcgcagaaacttaa

SEQ ID NO: 188488 - DNA, 567 bp, Klebsiella oxytoca
atgattgactacaaaacagcatcaaaagatcagctgaaagcagagatgaaacgcctggctagcgttgtatctgataccccctttggtacaaaaaaagaatttttccatctccctgagattttgaactccggcgaacaaccattggcaattgccagtgggatgatggatgggaacacatggctcataaccctgaccaacaaacgagtaatcttccttgataaaggcatgatttttggggttaagcaggttgacattaatcttaataatattgttagcgttggcggtaaaacagggcttatgtttggggagattatgatttctaccagcggtcaaaattacacaattaaaaatgtaatgaagggttcagtaattccatttacaaacctagtgaatgaaacaagaaacactttgaactccgccgcccaaccaaaacaagaaccaactaaagccacccaatcttttgacgaacaaatgtcaaaaattgaacgcctagccgaaatgaaagaagaaggaatactgactgaagaggaatttcaacaacagaaacaacgtattcttaatggttaa

SEQ ID NO: 188489 - DNA, 582 bp, Klebsiella oxytoca
atgagcaaattttccttcgagcagatcggacacagtagcgacgtcttggatcgagtcgtagacgcctacggcttcacatcaaaactccaacttgcagaccattttgatatggcttccagtagcctatctgcgcgtttcaaaagggggatatttccggctgatatggttgttaggtgtgtagctgaaactggtgcctctctggaatggctcgctactggtcaaggcaggaagtttgacgatgaagaactagatattttgaaaatgcctaggcgcaaaatcgtggacggacttctatacgaagcaggcatgtacatgctagataaagtctcatttttacccggggttcctctaccatcagcaccgctatgcgttctggatggtaatacccagtttatcgttgatacaaccttcaacgaagtctatgacgatcagtggttagttgaaattgaaagtaaatccagcattcgaaccctcacccgcattcctatcaaaaaggtaagagttagcggcgttggaatggccttcgactgttcaattgaagatataaaaatacttggcagagttgtattaacaataaaataa

SEQ ID NO: 188490 - DNA, 222 bp, Klebsiella oxytoca
atgcgtcccaacattacaatcgtgatccccgatccatacatcccacttgatgaatattgccgtcgtactggcatgtcccgtagcactgctgagaacttgatttcatacggaaaactgccaatcaagcctaaaggagcgcagaaaaaagggctggttgaagtcaacatggccgctttaaccgtgatggcgttaagcgaatgcgatgtttcgcttaacgcgtaa

SEQ ID NO: 188491 - DNA, 504 bp, Klebsiella oxytoca
atgtttgattatcagacctctaaacatactcactttgatgctgcttgccgagcgtttgcgctggcgcacaacctggaagatgtggccgctgccgttggtatgcgtcctcagatcctgcgcaataagttgaacccgattcaaccacatcgcctgacgtgtgatgaattgctggcaattactgaccatacggaagatgcccgcctgctggatgggcttctgagccagattaactgtctgccgtcagtgccagtaaataacgccactccggggaatatgcagttctgtgccctgaccgccaccgccagtgtcggtgcgatcgctggggaagccgtatcaacggagtgcatgacctccgcccgccgaaatcaaatccttgaccgcgctcgcgatgctattcgcagcctttccgtgctcgcgtataccgtcgaaagccgttttcagtccgcgccggttctggccgctgctgtcgatattgtgacaaccagcgccactggcctgatgtga

SEQ ID NO: 188492 - DNA, 195 bp, Klebsiella oxytoca
atgcagccatttgttacttaccttaaacgccagtcgccgccacctcagctggccagcggtgccactggctggctggagctgccgaatgggaagcgctggaatcccggacaccaacacaaatttagtgccggttcataccgccgcccgtggtggtggcgaatgatggggctgctgagggggcgttatggccattaa

SEQ ID NO: 188493 - DNA, 429 bp, Klebsiella oxytoca
atggccattaatcaggaacagcagaaactggggctggcacaactgcgcaacatacgccgcaagtatttcagtaacagcagtgaggccgcggattggtgggacaagctaacgccggaatggcgcggggtggttctccatgctgccggtgtttcatcggggtcaggggcgtttactgccagcctgagcaagtgttgctggcgtgagctgttcgaacgtctggactatcgcgccatgatccaactgcgccaggggatatccagggcgcgtctgacttttgaggggtttggttcgttacgggattctgatttttcagccagtacagcacgtgacaggccgattaaaaaagcgcacccgattaacagccgcaacggggtgcagatggttgttgcacctcatatcgtaaacaaaatgcagcagggggatcactaa

SEQ ID NO: 188494 - DNA, 402 bp, Klebsiella oxytoca
atgtccattatttcagtagacgctaaagagctgggacgagagctggccgcatggggtgtaccacataattacgccattctttttctggagaaaagcacggttaaaaacaatcgtgttgcgctgcatccgtttttctttaatgacactgagcatgtgaccagtcagcgccactggctggcagtaaacgcggcttactggtgctgtgtttatcgtgaggcgcaaacccagtatcagcaggttgaagcgcttgccagtatccgttccatgtactacctggcggggtcgttgggtgctggcgaaattaaggcgctgatccaggagtggtggcgcaatacttatgaactgcataaagttcctgcgcctagctataccgccgtacctattaccttttctttccactaa

SEQ ID NO: 188495 - DNA, 234 bp, Klebsiella oxytoca
atgtcccggattcgtagagatttaaccgtttcaacccccgcagccaattttcaggaaatgctgagaatcgctgttcatgatggcaaagctgcggccgcagaggtctttttcacccggttggataagctggcaacgcatgcggctaatgaaggacttagcgcaaccgaaatagtggagctgattcgtgaggaagctgcggctatttgcagcaaaggcggtgcagcatggcaatga

SEQ ID NO: 188496 - DNA, 783 bp, Klebsiella oxytoca
atgccgcaattgttgccacatctgccaaatggcaagcgcctggttgagccgttcgccggttcctgctccgtcatgttgaatactgactatgacgaatatctgatcgctgatatcaatccagacctcgttaacctttatcgcgcgatggcctatcacccgacagagcttattcgtgagcttgaatgtttatttgccgctggttcagttggtgatgattctgatcgcgctgcgacgttctacgtggtgcgcgagcgatttaaccagtcagcttcaatgtcacatattgagaaagccgctgcgtttctctacctgaaccgccactgctacggcggtgtctgccggtttaacaggcgaggccatttcaatacaccttatggacggtacaaaaaaacgtatctgccagaggttgagatccatgcatttgctgaaaaagcgaagcgggcaactttcatctgcgccagctatgacgaaaccatgaagatggtcactgctggtgatgtggtctattgcgatccgccttacatcccggttacatcaacggcgaacttcacccaataccacactgatggattctgctcacttgatcaggaatatctggccgtgatgctgtatgcgttatcacgtaaaggtattcctgttattgcatctaatagtgatacaccccaggcacgtagcctttattacctctttacccagcataagcttaaagcgccacgcagtattggcgcaaaaaatggtgcagattcctccgcttctgagttgctaataaaggggcttgcatga

SEQ ID NO: 188497 - DNA, 597 bp, Klebsiella oxytoca
atgtctacacataatgaagaagaccccactaaacgcccttatgtttattcggtaacggaaatgtcggcctttgaaatcaccaaagagccgatgcggatcatttcagccgttgacatgttgggcatgtgcagcgcttttcttgatgcgacgcaatgccacacatcaggtcgatggcctctttcaaaagagagtcgacgtgaactaggtcggaagattgaatggaactgccctcacgactggaaagcacgcgaagaatggtcagggcatgtacggaacgcgttacaaattttaagtcaacgcgatcagaccatccgaatatctcaacaggatcagtggcagacctgggaagagctagagacagatattcatatttcggctcgctgcgcccgccagacagttgagttttaccgtgctggcaatccgcaacatctgccgaattctgcggagttatttgccgttcccgtaaacttttcaaagtttgtatcttcgatactttccggcgacattcgtcctgtatggactgtatggcatgcagatgccgccagcacgccaggatgctgcgacgggttctatccacgttacgcacctttgaaataa

SEQ ID NO: 188498 - DNA, 2034 bp, Klebsiella oxytoca
atggctaattcaggggcgggttctaacctatccgaaagaaagggcacaatcaaacagtgggcttatccctggaacgcgccactcaaggctatttgtagccctgtccccacatatgaagagttacagcgccgcgatcgagagaatgcggcgctggcacacgctcaggatttgctacaaaagcaatctgtgattattcgtatgtcggtaaatgcgacggccaacaagctggaaaaagagcagggcgtaaagcgtgcaaatgctttccttgctaaaacctttctcgaacgcattctgccgcgcatcaatattgtttcagagcgttatcatatcggcaaaatgaccgccgataccgtgcgtctgatgtaccgctttaatcacctgcctgatatgtcgaaagaggatattgacctgctggcgcaggatgtttcgacgttcatcacaatggaactcagtagcataaacgatgaaatgccggatgccggtgcgcttaagttgctgcatgcactttatgtccgggctgctgccattactcatgcattccgccagtctgcgccggattatgaaaagttaatgcgtcgttgcttcgaggagccaaaagccgccgcttctctcgccaaaatgatgtctgatcagtggtgggcgcttcgcctgcgccgccatgcgtcagagtggcgcgaacatctgcatatcgcgcttaaccatgtcagtaaaaaagctagcacctatgcgagcaagtcgctgatccgtgactggaaggagcagagacgccgcacgcgggagtttctgaagtcgatggagctggaagatgaattcggcaaccggatcagcctgatagacaaatactggggtagcgtggctaacccggccattcgtcgtacagaaatgatggtgcgcattcgtggctttgaaaacgtctgcaatgaactggggtatgtgggggagttttataccatcaccgcgccatcaaaatatcacgcaaccactattcacggccaccgtaaccgtaaatgggacggcagcagtccggcagatacgcagggctatttacgtaaagtctgggggcggatacgggcaaaactgcatcgcaatgatttgcgggtgttcgggatcagggttgccgagcctcatcatgatgggactccacattggcacatgcttctgttcatgcgccctgaagaagttgagcaggtgcgcgacattttgcgcgattacgcgatggatgaagaccatgccgagctgattaccgccaaagcgagaaaagcccgcttccacgctgaaagcattgatccggaaaaaggctctgccacgggctatgtggcgaaatacatttctaaaaatattgacggatacgcgctggatgaggagcttgacgacgaaagcggcaagccgatgaaagaagccgccgccgctgccgctgcgtgggcatcctgctggcgtatccgccagtttcagtttgtcggtggtgcgccggtaacggtgtggcgtgaattgcgtcggatggccgatcacgataccgcaatggggttaagcgttgaatttgctgcggtgcatgatgccgctgacagcggagactgggcgaagtatatcaatgagcagggcgggccattcgtaagaagggatgagctgattgcacgcacatggtatgaaaccagcccggaatttaacgcctacggcgaagaaatcgttcgggttaagggggttttctctcctgtcgttggcatggatgtgcctattttaacccgattaacaaagtggaagattgtcccgaagttagccgccgatcaggcggcagcagttagcggcgcgaatgcgccgcctaggagttctgtcaataactgtacggagggtgaagcccgcaggcggttaaaaagtgatttaaaccagaggggatttgtcggttccgacgaagaaatagccatactgatgcgcggcagcgggctgatgtatggccggggaacgttgatttacaggaatggtcggttacaggagaaacaacatgatgcgagcagccagcgctggccgggttggtcatga

SEQ ID NO: 188499 - DNA, 207 bp, Klebsiella oxytoca
atggatttgctggaggcgtcagctcagcttgaacgtattgagttactcgcaaaaatttcccatttggaagaaatgacaagtaaagaaaaaacagttgctttgggctggattggtgagatagcggaagtgcttggtaaggaagttcgaaagagtttgcaaagcccccagagcgggggcatttcacgcggcgggtgtggctttcagtag

SEQ ID NO: 188500 - DNA, 270 bp, Klebsiella oxytoca
atgcgcgtgctgaaaatcgaatgcccggaatgcggctcaaaggcggttattcgcaagacaaaccggaagcaccggcagattgctgatatttactgcgcctgtgcggacgtagagtgtgggcatacttttgttatgaacctgactttttcccacactctcagcccgagtgcgaaaacaggtgatgcgatggttcaggctctgcttaacaacctgtcacctgttcagaagcagatggcgctagatctactgaaagccacacccgccgcgtga

SEQ ID NO: 188501 - DNA, 1050 bp, Klebsiella oxytoca
atgacgaaaaaacgatataccgcccgtaacaagcgcggcgataaagccaaaaagatgagcattatttcgttcggcaaacccgagccggtgctgactaccggtacggattaccgggatatctggtacgacaacgccgccgatcactacacccagccaatagaccgcctggcgctggcgcagctgattaacctgaacggccagcacggcggcatcctgcacgcccgcaaaaatatggtgatatcggactacatcagcggtggcctgacccatgacgaacttgacgcggcggtgtttgattttctgaccttcggtgatatcgccattgcaaaaatccgcaatggctggggtgacgttatcgacctggcaccgctgccgggcctttacatgcgacgccgtaaggacagggagaacgcgcagccggttccaggtgactatgtggtactacaggaaggagagccactggtttacccggaggatgatattattttcatcaagatgtacgacccgcagcagcatatctatggcctgccggactacatcggcggcgtccactctgcgctgctcaacagcgaagcggttattttccgccgtcgctactaccacaatggtgcgcacactggcggcatcctctacacccgcgaccccagcatgacggacgagatggaggaagagattgaacagcaactgcgggacagcaaggggatcggcaatttttccaccattctggtgaatatccctggcggcgacggcgacgctatcaaattcattgaaatgggcgatatttctgcaaaagatgaatttgccaacgttaagaatatcagcgcccaggacattctgaacgcgcaccgctttccggccgggctggcaggtatcgtgccgcaaaatgcggcgggactgggcgacccggaaaagacagagcgaacctataaacgcaacgaagtacgccctatccagcgccgcctggcgatggccatcaacggcgatcccgaagttcccccacgactgcacctacatttttcagctgaaacaacggataaggatgcggcatga

SEQ ID NO: 188502 - DNA, 1779 bp, Klebsiella oxytoca
atggctaaatactcagaagaattaaaaggcgtggcgcgggcgctgtatctgcgccgctatacgccgaaagaaattgcatcagaattaaatctgccgaatgcgcggatcgtttactactgggcgcataaagacggctgggcggatttgctcagttttgaaagcactgaggaagcgattgaacgtcgctaccagttgctgaccgcccgcgacggaaaaaccgatctcgaccttaaagaaatggacatgctcattgctcacgccgtcaagctgcgggcgcagagcaataagcacagggagaagcttgccgcaagcaagggagcacgcgtcgaacacgcctgcgataacgagaatgacgacggtgaaccgcgcaaaaagcggaagtataagaagaacgatatttcctccctcacccaggaggacttcaatacctgggccgatgagcatcttttcgactatcaaaaacatctgcgcctgaacattggccagcaggtgcgcaacattctgaaaagccgccagattggcgcgacctggtattttgcttttgaggcgcttgaaaacgccgtcatgaccggcgatccgcaaatattcctttctgcctcaaaggttcaggcagagtatttccgttcttatattgtcaacatcgctgaacagtattttggtatcaccctgaccggcaatccgatccggctcagcaacggcgcagaactgcgctttttgtccaccaacaaaaataccgcgcagtcctacagcggccatctgtattgtgatgaatatttctgggtgccgaactttgccaggcttaacgaagtggccagcgcaatggccacgcatgacaaatggcgcaccacctacttttccaccccgtccgcgaaaacgcaccaggcctacccgttctggacaggcgaagagtggaaaagaggcagtaaaaaacgcgcggccgttaagtttccgtcatttgatgaaatgcgcgatggcgggcgactctgcccggatggccagtggcgctatatcatcacgatggaggatgcgatcgcgggcgggttcaacctggccagcatcgaaaaactgcgcaaccgctacaacgatactactttcaatatgctctatatgtgcgtgttcgttgacagcaaagacagtgttttcagcttctccgacctggaagcctgcgccgtcgaaacggaaacctggcaggatcacgacccgaacgctgcacggccattcggcaatcgcccggtatggggcggcttcgacccggcccgcagcggggatttatcctgctttgtcatactggcaccaccggtgctggccccggaaaaatttcgcgtactggccgtttttaactggaagggaatgaacttccgctggcaggcccagcagatagaaacgctttttaagcgctacaacttcacctatctgggtattgacgtgactggcatcggccagggcgtctttgacaatatccagcactttgccatgcgtgtggccgtcccaattcgctacgacatgagtaccaaaaaccagctggtactgaaagccgctgacgtggtggaaagtcagcgtattgagtgggacaaagagctgaaggaaatcccggccagctttatggccatccggcgcaccaccacgcagagcggtaacgccatgacctttgtcgcagaccgcagcccggagacgggccatgcagaatcattctgggcgatcacccatgccctgcataacgaaccgctgaactacgaaaataaaccaaaatcccgttggggaatgaagaaggcagcatga

SEQ ID NO: 188503 - DNA, 795 bp, Klebsiella oxytoca
gtgtcgcatttaaaaacgggttggctgtgcgtagcgactgaaggcgatacggttgacgggcgggtgattgagcgacagtggattatcgacatgggggaaacctacgacgctaatcattatgccgccctgctgtggccggagcatgagcgcgatttcgggaattttggcgaggtgctggaagctgaatggcatgagggtgaagacgggctggcgagattgtttgtcagtatccgcccgaataagcgcctgatttatgccaatgacgaaggtcagctgttgtttttctccgtagagccggagctgaactggcgaggtggtgatcgcacctacctgatggggctgggtgtcacggataatccggccagcacaggcacaacaagactgcgattcggtcgccgtcgattgaacaggcagggatattacagtggtgtgatctcccgcgatggcaaaattaaacaggatggactgatgaaaaactggcaaaaactttttggtctgaagccgaagtttgaaaacgaaaacccggctgaagatacgccagcgggtgatgataagttgcaggcgttggccagcgcattaaacgatctggaagcgcgtgtgggggctatcgaaacgcagcttaattctgtacaggacgatgttgataccatttctgaagtggtcgataccgaagagtttgccgctattcgtgataatgcggcagaaattgtgacccgctttaatgaactgggtaataacggtaaacgtaaacagcgtcagatcccaggcaaggccggaaaatttaatttcctgtaa

SEQ ID NO: 188504 - DNA, 1023 bp, Klebsiella oxytoca
atgcaccttaataaccgtgcgcgggaattactggacaaatattcggcggggatggcgcagcagtttggggcgcgtgataccagccgttattttgccctgaatgacccgcaggaaaatgcgttgcgtctggccctgctggaatcggtggagttcctgaacatgatcacctgtctggacgttgaccagctgagtggccaggtgatttccgtagggtcgtctgtattgcataccggccgcagcgaaaatgggcgctttatccgtcaggtcggcgtggacggtaacgattattccctggtggaaaccgacagttgtgccgccctgcgctgggatctgctttccgtctgggcgaatgccgggaaagaagagaatgagttttacaacctggtgcaggcgtttaccacccaggcgtttgcgctggacatgctgcgcattggctttaacggtaagagtcgcgccaaaaccaccgatccgactgcgaatccgaacggtgaagacgtcaacatcggctggcatgagcgcatgaaaacgctgctcaatggcaaccagattatgaccgatccggtcgtgctggatgatgccggagattatcactctctggatgcgatggcgtcagacctgattaacgccaaaattccggctcagttccgcaatgacccgcgtctggtggtgctggtcggggccgatctggttgcggcggagcagtaccggctgtatcaggcggcagaccgtccgactgagaaaattgccgcgcagctgctgggtaacactatcgcgggccgtaaggccattatcccgccgtttatgccgggcaagcgcatggttgttacgccgctcagtaacctgcacatctacacccagcgtaacacccgtcagcgtaaggccgagtttgttgatgaccgtaagcagtttgaaaacaaatacctgcgcaacgaaggttacgccgttgaggtgccggaattgtacgcggcgatcgacgagtccgccgtgaccatcggtaaggtcagtgagcagccggagggctaa

SEQ ID NO: 188505 - DNA, 702 bp, Klebsiella oxytoca
atggcactttctcccgcacaacggcacagccagcgcattgccactgaacgccagttacagcgcagtcaggctgtggacagcagtgagagtatgcacattctggtaaaagcgctggaaaaggacgtagagcaggcacgtagcattcagtttattcccgatcgcattgtgtttaagcgggatgtactgctgcctcgctggatacctacggtggaagcctatctggccagcggtcagatatacgcaaacccggttttcgcctggtgcgtgatctggctgtttgatgtgggaaatctggataaggcgcttgactgggcggatatcgcaatcagccagcagcaggccacgcctgaccgtctgcgcagcaactttcccacgttcgtggccgatacgatgctggcgtgggcggaagagtctgccggacgcggggaaagtattgaaccgtatttttcgcgcacctttgagcgcgtcgccaatacctggcgactgcatgagcaggttacggcgaagtggttcaagttcgccggactggaactgctgcgtaatgaggatggccagaagacggcggcgggcgtggacgatatcgacacgctggaaaaagcagatcggttactggctgtcgcggaacagcactatttcaaaatcggcgtgaaaacagcccggcagaccatcgccgcacgtctgcgcaaactgacgcaaggctga

SEQ ID NO: 188506 - DNA, 453 bp, Klebsiella oxytoca
atgttcagtggcaacccgattgattaccaggatgagcaactgagcaataacggattctggccggacttaaacctgaaggattttcaggcactgcgctccctgccgccagatatcgacgcggaaacactcgcgcaggcgttgctgagtgctgtgatggaagttaacgcagagctggaaggggtacaggccggatatctggcaaaagggcatctgacggcagaagcggtgccgggtgtcacgatgaatggtctgaacggtttatgcgcccagtacaccaaagcggtgtttgcgcggggaaaggcggatttgctgggcgagttcgccaccatcgggcggcgtgactcgcacccggggcaggaaagcgcggagacacgcgccgggctgttgactgaagcctcggtggtgatccgcagaatgaaggggctgaagagagcaacggtgaaaaaggtatga

SEQ ID NO: 188507 - DNA, 504 bp, Klebsiella oxytoca
atgaaaaacacacagctggaatcactgaccgcctttttcagggaaaacgtacccgcccgcgcaatgggggcatttaccagcgtcatggacgaaattcagtttattcccgcagcaaaggatttggggctggagcagtaccggcaggcggttatccgctacagcgccgtgctttcctgggaacgcttcccgtaccggatttgcgatccgcgcctgctgttttcgctgatggccgcgtggcttgacgacacagaccgggaattgttcgacgaactggggattaacgaagctgatcctgactgggatgtgtcggtggacaccgaagagacggccacggtgatagtcagtgtcccgatggtggaagaactggttctgatacctgacgaaaacgggccaattccgtggcgggggcagcgctggcgactggccgaccctgagatctggacggcattcagtgcgcagatttttggcgctgacagcaccggtgcgccggtaggggatgcctga

SEQ ID NO: 188508 - DNA, 717 bp, Klebsiella oxytoca
atgattatcggcggtgagctgaacaaatcccagttgtcggaactgcgcaggacactggcccgcgcagacctgccaaaagcgaagcggcagcgcctgctctggcgtctggccaaatacgggcttatcgccgccgcaaagcgaaacgtgcgcaatcaggccggtccggacggggaagcctggccgggtcgcaggacgaagcgcaaaggcaaaatgctgcgcaacctgccgaagctgctgcatatccgggatatgccggaaatcagcgcggtgcgggtgtatctccagggaggtggttatcgcaacggcacaggggatgtgcctgccggggtggtggcatacagccaacaaaacggaatgagcgtcagggtcaaccgcagcagcgtcaggcgcggcagtcgcgccgggcagatggcgacgcctgcgcaggtgaaacgtctgcgggcgatgggctaccgggtcaggaagggtaagcgctggcgcaagcccacggccaaagagctgctggcgtcgatgccctatgaccaggctggtctgctgatccgcaaactgtcgggcaaagcagtaaaggacagctggactgtcgatctgccagcccgtgagtttctgggcatgagcgatgaggatttcagccaggcgctggcccgtcagttgcaggggattggcttcggctgggatgtaagagcacaggatataaggggacgaaatggcgtggcctaa

SEQ ID NO: 188509 - DNA, 1119 bp, Klebsiella oxytoca
atggcgtggcctaatgttggagtgaatcagctgaatcagcagcagggcgaaaccacggaagtggagcgcgtgttgctgtttgtcggcaggggaaccgtgaataccggcaaaacgttgccagtgaacagccagagcgatctggatgtgttgctgggtgaggcggacagcgacctgaaacgtcagttggctgcggcccgcgacaatgccgggcaaaactggtgggcgtttgtgcgggtgctgggcgaggacgggaagtggacggatgccgtgcaggatgcgcagcaggtggcctctgtggaaggtgtggtgctgtgcgatgcggtttcagaaaaggctgttatcaatgaagccatcgcgctgcgcagcaacctgatcgcgaaatatggccgctgggtgtggtttatcctggctgttcaggcgatgcaggcggacgaagcccaggccgattatctgacgcgactgactgcgctacaggcagggatagctgaaaaagctgtttgtctggtgccggtgctgtggggcaatgagccgggcgtactcgccgggcgactctgtaaccgcgccgtgactatcgcagacagcccggcgcgggtgaaaaccggggcgctggtcagcatgggaagtgatgatgtgccggtggatggcgacggtgtatcgcttcagctggccacgcttcaggcgctggaagcccagcgcttcagcgtgccgatgtggtatgcggactatgacgggtattactggtctgactgccgcacgctggacgcggagggcggcgattatcaggcactggagatggtgcggatcgtcgataaggtggcccgtcgcgtgcgactgctggccattgccaaaattgccgatcgggcgctgaacagcacgccgggaagtattgcggcaaaccagctgtattttgcccggccgctgcgcgaaatgtcgaaatccagcgaaattaacggggtgcagtttccgggggaggtcaaatcaccaaaggacggcgatgtgaccattgtctggaaaacgcgcaagaaagtggaggtttacgtagtgatccgtccgtatgagatgccgctggaaatcaccatcaatctgatgctggatgccagccttgagggggccgcatga

SEQ ID NO: 188510 - DNA, 459 bp, Klebsiella oxytoca
atgagtaagcgtatttccggggcgtcgtttgacacctactggggaacggatttgatccacgtcgaaaagctaacactggatattacggataacactgcgctggcgcagacgaagggggtgccggatggctatgtggacggggatgtgtcagctgaaggggaaattgaactatccatcaaggcactggccaccctcaaagcgcaggccagttcggcggggtcgtggcgcggaattccggtcgcggacatgctcttttacggcaaagccggagaggaagaggccaaaattgaagcctttggcgtcaagctggtactgagcagcattctcgaccttgatccgaagggcggcgctctgtccacccgcaaaatcaaggtactggtcacagacccgcgctttatcaatatcgacggcattccgtatctggagccggaaaccacgcagagcctgatcgcgtcataa

SEQ ID NO: 188511 - DNA, 291 bp, Klebsiella oxytoca
atgcaggagtatgaaaaggggtttatcacgctggccatcatgggggcgctgattgcgctgggtaagatgctggccagcaatgagccgattaccgctcgtcttatcctggggcgcgttatcgtcggcagcgcgttgtctctcgccgcaggcgtggcgctgtactttgtgccggatatccacccgctggcgctggccgggattggctccgcactgggtatcgcgggtctgaacggtgtggaagtgtggctgcggaaaaagggttttgatctgggtaaaggagtcgggaaatga

SEQ ID NO: 188512 - DNA, 342 bp, Klebsiella oxytoca
atgacgttgagcgaaaaacaacagctgtttgtggtgatggtggccaatttgatccactgggccgaagagcacggcttccgtctgacgtttggggaagcgtaccgcacgccggaacaggcggcgctgaacgcgaaaaagggcagcggtatttcgaacagcctgcacacccagcgtctggctgtggatttcaatctgtttgtaaacggccagtataagacccgcaccgaggattaccggccactgggtgaatactgggagtcgctgggcggcagctggggcgggcgcttcagaaccaacccggacggtaatcacttcagtctggagcataacggggtgcgctga

SEQ ID NO: 188513 - DNA, 333 bp, Klebsiella oxytoca
atggaaaggcttgtcgcgggtgtgctgctgctttgtgtactggcatttgccggagggtggaaagtggccacctggcagcatgacagcatggcgctggcaatcagccaggcggcgacggctaccggcaaccgcctggcggacgcggccagccagtccgggcgcaggctggaagagcaactggaggctttgaaaaatgcgccaccgcgtgagatccgcaccgaagtggttaagccggtgttcactaacgtgtgcatgtctgatgattttgtccgcatgtacaacgacgccgccgccagtaccgaacgtgcgctttcaggaaaacctgaaaactaa

SEQ ID NO: 188514 - DNA, 264 bp, Klebsiella oxytoca
gtggaagaaaaaattattgaactgaccgtggccggaaaggatattgcttttgagccgaatattgccgcctacaataaattaattaatgatatgtcaatggataataaagtgtctccggcacataattatctgatgcgtattgtaacggcggaaaccaaagagaatctggccgatattctgaaattaccgggcgcagcgttgcagctggttaacgaagtgaataagcgctttgctcctgagctggatattgttgcaaaaaactga

SEQ ID NO: 188515 - DNA, 1884 bp, Klebsiella oxytoca
atgaacagcctggattttacgttaagtctgattgataaattcacgcgcccgcttaaggctgcgcagaattcggctgttcagtttgcggataagtccgttcaggcgtttaaacgtatcggtatcggtggtgctgccctgtatggcgtggggcaatccatcggcggaatgctggcaccggcatttgatatgtttaacgcgcttcaggagcagtccgccagggggattgattctggcgtgctgaagactgttcagcgcgacgcgctggccttcagcaccacttacggcacggtggccaccgattttgtcagttcaaccgcagagataaacagcgccatcgccgggctgaccgggcaggaactgccgaaggtgacgaaggtcgccaacctgatggcgtttgagatgcagtcatccaccgctgaaacagctgagtttatgcgccagatgttcgcgaacttccgcactgatgccgattcgctgggaaaagtgcagtttgcggaacagctggccgggaaaatgacgctgatgcgccagcgcttcgggctggaaatggggatggtcaaagacctgatggaaggtgctcgtggggcgggcaccaactacggggtcggcatgaatgagcaactggccgttatgggggaattaagtcgtaccctggggacagaagccagcagcgcctacgagggctttatgacctcagctatcgagggcggtaaaaagctgggcctctcgttcacggatacgaccgggaagatgctctccatgccggatattctcgccaagctacaggggaaatacggccagagcctggaaggcaatctgaaagcccagaaagagctggatgacgcctttggcgatagttcggcggtggtaaagcagctttatggcaatgtgtccgtgctccagcgcaatatcaccgagctgggcggcgcggacgggcttaaacgcacccaggaggcggcagcaaaactggttaaaccgatggatcggtttatggccattatccgggctattcagattgccatcgggttaacgctggttccggcgcttaaccctctgctggactgggccgcgcggacaggccagacctttgcccgctggatgagcttattcccgaatatcgcccgcgtggtgggctgggtggcaatggcagtactggggtttgctgcggtgggggcgatcctgaatattatcatggggctgtctgctttcatcctgacgggctggggagccgcgctgaaactggtcagtggagcgctgacggtggttcgtacggcagcgatgctgaccggtgtcgccattaactttatgagctggccggttttgctggttatcggggccattgcgctgctggtcgccgggtgttatctgctggttaagcactgggacacggtcaaagccgctgtgatggacacggccgcgtttcaggctgtggcgcaggctgccagttggctggcgaatctctttgcatccgtgtgggaatatatttcagcgggctggaatagttttattgcgctgctgacgggattttcaccgctcgacgcattaagcggcatggcgtcgggaataatgaaactctttgacggtatatggcaggccattaaaaaaagtttcagcgcatcatggaactggattgtggataaattgaacatgatccccggtgtgaatatcagcaccaccacgacaatgccacccgtgacagaaaataaactttcaacgggtgggcaattacacagcgttgagccgggcggtatcagccgaaccattaataacagcaacaataataaagtggataagcgtggtaacagcatcggtacggtgaatatttatccgcaggagccatttacaccgggtaaattgcaggagtggcaggagatgggattatga

SEQ ID NO: 188516 - DNA, 330 bp, Klebsiella oxytoca
atgagtgatttattgtatatcgacctgctgattacaaatgatgattttgtcctgaataccggtaatgagcctgttttatgtaataaccgccagagtatcggacaggacgtgattcacagcattattgaaagtgggctggcaacggaattaattgccgaacgtagcccgacactgcgcggcgatatttttacccgcatggaattgttgattgaagacgatgaacggctgatacccggcacggtatccattactgaagaaaccctgtcgcgcctgtgggtgacggcagacacctatgattttgggccgctgtcgttgagggtggatctatga

SEQ ID NO: 188517 - DNA, 1185 bp, Klebsiella oxytoca
atgacggaaaaaccgcaggtggatttcgaaaccctggtcaatgaaagcggtatgcctgctacggccgacgaggcccgtagccggtttaatgccattgcagctgatgaaggcattatcaccaacacgtcgaaaatgtcgccattctggcggctaatcacggccatcgtcactgcgccggtgatgtggctgcgcgatgtgatgatccataccgtgctggcaaatatgttcgtggcgacggcttccgggcagatgctgcggctgctggcctgggcggtcaatatcacggtgaaaccggcaacggccgcagagggcgtgattcgtttttacaaaacctcaccagccgcaaccgtcacgattaaagccggaacgctggtgcagaccgagcgaatcaacggcacggtataccgccttgaggtaacggaagatttcaccctcaccacaggcactgccagtgctttggtgccggtgaaagcggaggggacgggcggcgcgtataacctcgcgccgggatattaccggattctgcctgtggcggtgtcaggtatcagccatgtggtgagtgaagaaaactggctgacggtgcccggtgccgatgaagagagcgacgatgaactgcgtgaacgctgccgtaaccagttcaacctggtgggtaattatcacaccgatgcagtttaccgctccatgattgcgggcattgccgggctgagtattgaccgtatctattttgagcacgacgccccgcgcggccccggaaccgcgaacgcctatttgttgctggacagcggcgtgatctccgatccgtttgtggcggcggtgaatgactacatcaacacgcagggccaccacggacacggcgatgatatgcagtgttttgctatgccggaaacatcccacgatctggatgttgttctgtacctgcctgacccggacaacatgctggctgatgaacgcgatgcgctgctgtcgggggtggaaaatctggtgcgctgcgcgtttcgggaaaacacggattatgacgtgaagaagacgtggccgtatggccggttctccttctctaatctgggcagggagatccaccggacgtttacggcggtggattcagtcaccttttccctgcgggatatcgtcagcgatctgaacgtcccgcgtctggccagcctgacggtgagtatcgaacatgactga

SEQ ID NO: 188518 - DNA, 639 bp, Klebsiella oxytoca
atgactgattttgataaaaaactggccgggttaacgctgccgtcatggatgaacaaaggcgagccgcgcaaattactgaatacagcccggcgctactggaagctggtctgggagtggctcacctggccggttaaccagttcgacccgctgacctgctcggagtcaattttacggctgatggcctatgaccgggatattacccgcttcaacggtgagccgctgtacctgttcagaaagcgcgtggcgtatgcctttgtgaatgcggcggactcaggctccatcgccggttttattgccatctttgaacgcctggggattggctacgtggagttgctggaacgtcagccggaaattgactgggacgtcatcatcgtcagggtatcggacagccagatagcacagaacgccgacctgatgatgcagattatccgccagtacggccgcacctgccgccgctatcggtttgaggtgatgaccacgcttcagctgtatatcaacgccgggtggaatgacggggaattaatctgctattacgccggggaatatatcggtggggaaaaacggctggacggggaatatgtctgtttcccggccagtgatggaatcaatgataacgccatgtttggcgcaaaactgtag

SEQ ID NO: 188519 - DNA, 2712 bp, Klebsiella oxytoca
atgagtcagacggtgattacttccgcctttgaacagttaaaagcccaggaagcggcaaacggtggcgttgtcattcttgatgaatttgtgtttgcaaatattccaaatctggacattaccagtcctattgatcgtggtgaagggttgccggaagaggcgatgattgtccatcgtcaggcggtgggtaaaaccggcatggtaaacaataacgcggtggtgtattccgtcgtgatgggcgcggatgtcggggattttgaatttaactgggttggcctggttaacaaagcgaataatgtcgtggcgatgattgtccatgcgcccacgcagaagaaaattaaaacggcgactggccagcagggtaacgttttaacccgctctttcctgatggagtataacggcgcgtcagagcagacccagattatcaccccggcagatacctggcagattgatttcactgcccgcctgaacggtgttgatgagcggatgcgagctgagaatgtggatatctatggtgattctgcatttttcaaaaatggatttcttgtaacccggaatggaagtcagtattccgttcaaaagggaactggctatgttgccggaataagggcagagctggagtttgatcaggtcatatctgtagataaattgccgataaaagtctgggtggatacctgctggcgcgggacattgaccagcatctggggggcaggaaccagaattatccttgctgatgatttacaggattattatgaaaatgatgaaaaacatcatgtctgtgtcatcgcagagataaccgctgaaggagctgtcaatgatctgcgttatcagagtggccagtacagtaaaagtgttctggaagaaataaacagtaaacagccgttaaacccgattcttacagctttttctggtttagtttctggaaaagataaacttccttattttaaggaagaaaaccaggcttcaatgactcagcttactgagcttgggaggcggattatcggggccgaaacaaccgaagaacttgtcgataacattaatcttaaaactgttttctttgaagacggatttacaatttcttcaaatgccactatttgtgtatctaaagaactcagcaagacgctgatatggaatggtgaatatccgaaaacagttcgtccgggagataccccttatagttctggagggatgggaggggacgcatggataacgattgccagtggttcgccaaatatatccaactttatcggggaaggtgctctggctgatcaggtgttaagtgtcgcctgcgccattgccaggaaaactacgggtacggtactgatagatattgattgtgttgttgattcttttatcgttcctgaaggaataatactaaaaatattaccctataaaaaaatcgtacaaaaagagaatgcttccggggatatgtttattctgtctgataactctctgataaagtctgataacaaaaaaggaaggttgcgtggtaattcagccagtcagtcatcaatacgtcgttgtatcagcgcctcgggggtaacgggggccggtgttgatggcgttgatatccgtgatttcaacagctacggagcgtactttgaaaactgcgaagatactttctgcagaaggtcaaccatacgtgatattactggcggggcggtagaaacagccgcaggccagtacattaccaactgcattggtcacgagtccgaatataacgatatccgggatactgacagcaatggtatcaaattccgtgcagataccagcgggctgacacgcggttgtagttcgtttcatgacaaagtgacccgggcaggatttattggcattgcgcacagcaagatacaggaccatacgacaagccatgcgtattgcgttgattgcgttgataacggcatggacatgaatggttgccagaacgtcacgttcattcacagcacatgcgtacgatgccaggatggtttttatcttggggaaaacggtattaataactgccatgttattagttgctcagcacgaaactgcaaacgtgctggtgttggcagtcttggcgcacttgtgatgtgctcagttgttaatacaaatattgatggctgtggttgtggtatatatttatccggttttaacgtgttcaaaatacgcggcggcatgattatgaattgcgttaaaaatacctacgttgataacgaggataaaaacaaccccaacaaaatgagtacgggaataggaattcatattcagtctgatcttgcgagtaaccctgcatgtactaatccagatatacagggcgtgacatttatgaataatgcaggctatgacattgctctggggaatgccgggataattggagcgctcaggattaaagataacgcttttcttgataacgcgggcgacggtaaaatcaattacggggcagctacactggccgatcctgttatcagtaataatgttggatatcttgtagagagaacagtagtttattatctgaatggtgacggtaaaacagtcgagtttacattgtctcttcctcagaatgttattgatacgggataccggattgtgagtgttgagacggactggctgacaacgtcgcgttatctggatgaaacaaaagggaagtcttattttggattaacattcggaacggctcccggcaccgggactcgcagggttaatgtaaaatttgaacgattacgacctgagagttaa

SEQ ID NO: 188520 - DNA, 729 bp, Klebsiella oxytoca
atgcagaagtgggaagaaaaaaaaatcatcgcgggtaaggtatctgagccggttatgtgctcagttgttcaggctcatccgtggatttacgggcttggccagaaaactgagagcggaacatatctcagcccggctaatgccatttcgtatctgatgcagcaactggccggtatcggcgaaatctccgatgtggtgatagtcctcattactggtaacggacatgacgattttatgcagagtctgggtgcattggttgatgtgctgccggttcccgccatgacgcaggttaaacggctggcacagtcggcggcagagctggccactgaaaaaatgttgatcccgtcccctgcttccgtgtcagttgctgctatgccattttccacaccgacaacacgtgctgcgctgaatgcgcagcggattgctgatgcgcaatcgcaggccgcatcgggattcagcctgacgagcacaagatccgcgctggcggactttatagaggaaagaaacgacattctcagtgagatggccagcgggctggaattgctgaaagagaaaagcgcccgcgcctggacgttcaccgcgcagggagatatcaccaccacgctgcgcaatatggttaaagatattccggccgcatcggtggtgcattgcgcggctgtgatgatggttggggaaaatctggcaggactcagggagatgatacatgaactcgatagcgacgctggcgcttaa

SEQ ID NO: 188521 - DNA, 549 bp, Klebsiella oxytoca
atgaactcgatagcgacgctggcgcttaacggcgaaggtattccgctcaaaaacatgcgggtcacgctcactatgcagtttcaggacaaagagcagtccgggcagaccagttcaaccgcgagggcagagcagggaacgaagggcaaagagctgcgcgtatccggcgaagtgccgtttaaaaccccggaagtgctgaagcgcatctttgaactggccagcgccaccggcgacgatggccagcggcagaaataccgggttgcgcacgatgcagcccgtgcagtcggattccgtgaagcgacgtttaccgggagcctggatgcgccgcagcaggaagggcgcatgtcctggctggtcacgttcacgctgaccgaatttatcagcgtaccggaaaagcgggaagagcgtgcggccggaaaggtctccgcacagaagcaaacggcgggtaccggcgccacggggagcggaacagcctcagccggggaaagtgacgaaaaactgacgtggtttgagagcagagtacttaaaccaataaatgatgcctgggagtaa

SEQ ID NO: 188522 - DNA, 1680 bp, Klebsiella oxytoca
atgaaaccagttcaacgagtttatttatcaacgcagcaggttcactgcccggatatcgatctggtgctggagctgaacagctgcggccggggatttatcaccgcgcagacggatcaggactacaccgggaagctggtgcgggttgatgtgggctataccaatctgctgttgcgctggtttaccggatacgttgagcgctcccagccagcggagaacggcttccagcgtctctttgtgcgcgagctggcaggggtttttgataaacagtggccatgctccatacagcacccgacactgaaacaaattggcggctggctggcagagcagagcggcatcacggttcaggtgccggacgccgcgtatgcgacaacgccgatcccccatttcacccacagcggcactggctttcagctgcttaatgtgctgggccaggcgttttccgtcacggattacatctggtacccgctacctgatggcggactgtacctgggcggtgcggacgggggcttgtttgccggtcgggaagtggaaatccctgtagaatttgcccaaagcacggcgggaggcaacagtatgactctgccagtggtgcagagcctgcgccccggtgtggagatgaacggccagcggatcacccgcgttcatctgcataatgcggatatgaccgtgacctggacaccccgcaataaacagaccggccagccactacagaaaacgccgcttcagcgccagattgaggcgcattacccggagctggccagcggactgcataccccgaaaatggggcgggttgtggcacataccgaacctgtgagcagtggtaattttgccgatccgtttcgcccgcgctacgccgtagatgtgcagctgctggacgcgaacggcaacccggacggcagcacgccggtgtattcagccgtaccgctgccggtgccgatggcggggcatgattccgggctgtttcagttcccggcgctgggaacgctggtcgaaatggggttcaccggagggcgtccggataagccttttatccgtggcagtcatgcagacggtacaagcctgcctgacctgaagccgggagaacagctgcaacagcaacgcgaagatgtatcgcagcgcgtcacccaggccggagactgggaacgaaaaaccgatcaggctatccgtgaaaactctatgtccaggcaagtgaccgccgatacggaaaagcgcgaggtggtcacgcgggaaaccatggtgaaagccactgacaaaaccacggtgattggcacggcgcagctgacggccggggccgttcagcatattgcgaccggtgattatgccgtggtcgctggccgcaaccgcctggcaacaatcagcggcgatgatgaaacggaggttgctggccagcagaccacaaccaccggcaaaggtctgatagagaagattggcacgatacgccgcagcgtcgccgccgtgcagcagcagattgttgcgccagtagtctggattggctcagaacaaatcaatgtgacacagctgatgctggatacgctcgacgtggtaaaagaactggccacgctcaccgccagccatacccacccggacaccggcccacccaccaatgccggagacattgaaggtgtggcgacgaagaccgatacactgaacgagaaatactcccccgtcatcgctaagtaa

SEQ ID NO: 188523 - DNA, 162 bp, Klebsiella oxytoca
atgcccctgcttgactacatcaaaaaatattacaacggcaaccaggcatccttcgcccgtttgacaggcgttcagcctgcacaggtaacgcaatggctggaaaaaaaattcatcgttgtggatcacacgctttacagtccgcgccgcaagctcggcgtataa

SEQ ID NO: 188524 - DNA, 663 bp, Klebsiella oxytoca
atgaatagcaagcgtaaaattcagctggctgattttaatagaacggttattttaaccacatctaataccttatttctcagtcgcggaatagaaaataccaccatggatgtgatcgcccatgaaacgggttttagcaaaacaacgctttatacctattttgaaaataaaaaagatattctggatcatcttatccttcagggaatggagcatttccatcaggaggtgctaaaaatagccaatcggcaaaattcatttcgcgacttttatcgcgagctatgccatgcgctgatcgctctccacgaagcgagcattgcctattttcccgctattacaggcaaaatcgcgagttctgaaaaaatcactaaaaacaataaagcgttgaaaagtatctctatgattggtgagcagataaaccatattatcgccgcgcaaattaccgacgccgccgaaaaaaaagagatcgcgctgaatgctcccgccgcggacgtcacgatgctgttctggctctgcctgaccggactcgtagaaaaatcctcacatagagaatcctatcttttacgtcaccttgaaaaagaccgtaaatcctttctcgacttcgcttttaactcagtactattaatgatagaaaaagggaatattagcgataacgcaaaagctggctaa

SEQ ID NO: 188525 - DNA, 1053 bp, Klebsiella oxytoca
atgaaaaaagcaatcagttttttagcattattagcctgcctgttttcattccctgcgtgggcggttgactgctatcaaaatacctatggcggcccggtgagcgcaacgctaactctccccccattcaccatccctaacgacatccagctagggaaaaagatatgggaaagctcggacattaacattacggtttactgcgataaagcgagcgaatggtctccatcgaatcccacagaaaatatctatgcgtggataaagttatcagcttttaatagcggcgatgtgctcaacaatccctattttacttttggcgtaacatatgccggtgtcgattatgaaggcattaatcaagggatcaacaccggcgcctgtcttgataggatagatcaggctccaatcccaaatgtctatcatgatcctgtatgtaatggttcgtcactgcaaaaaaatataacctttaacgcccgcttccgcctgtacgttaaaattgcagcgattcctcccgatagctcaacggtctataattttggcgatattaacgtactgcaatttgatggccaagggggagcgaacctgcttagcgacgctaacaatttacgttactatatttcagggctggataatatccatattctgacctgcacagcatcagttaagctatatccagaaaatcaaactgttgatttcggagctatttataactacgaaaaaaacatgccggtcctgaaaaaaaactttagtctttcaactattcgagatcaaactgcaggctgcactgaacgatttgatattactaccagtttctatattaatgaaaatctctacgattccacacatctggatatagggaacgggctattattaaatatcgtagatgacacggctaatactgatgttcttttcaaccaatatatgccttttacaacatatatacccggtgaaccttcaacagtaacgcataactataccgccgaactcactaaaaaaccgtctgaatctgtggccgatgggccattcagtaaagatgtcatcatcaagataaattatcaatag

SEQ ID NO: 188526 - DNA, 735 bp, Klebsiella oxytoca
atgaagataaacgtaatgacaaaaggaattttatgcctggcgggcgccagttttgcggccaatgccgccgtatctcctgacagaacacgcatcatttataaccaatcggataaaagcgtctcggtgcgtctgaccaaccagagtcccgacacgcctttccttgcccaatcatggatagaggacaaggataataaaaaatctcgtacttatatcaccgcaataccgccaatgttgcgccttgaagccggcgagcaggcgcaggtgcgcctgatggggcaagcaacgctggcgcagcttcctgccgacagagaatcgctattttattacaatattcgggaaattccgccgcgttcagaacagaaaaacgttatgcagattgccatgcagagccggattaaacttttctggcgaccaaaggctatcgaaatacctgatggacaggtaaatctggtcggcaaagtcgacattagccgaaccgccagtggattgacgctgaagaacaagtctccctactttattactgtcggttatatcggcgttaacggcaaaacattgctaccgaaaaccgccagcatgatggccgaaccctttggccaggcggtccaggaaattaaaaatttaccggcgaatttccaggtcggctatattggcgattacggtggcctgcatatgtttaagatcagctgcaactctgttcaggcaacatgccagtccgaaccggtgaaaaaggaataa

SEQ ID NO: 188527 - DNA, 2529 bp, Klebsiella oxytoca
atgcgtaatctcatttattccgatttaacgcccaaaggattatctcttttaataaagcgggccctctattctgtatgtatggtattttctttatcaacgtcgatttatgccattgaatttaatacagatatgatcgatgccgaagatcgggaaaacgtcgatctctcgcaatttgaaaagaaaggttacatccctgttggtacctatttagtacgcgtaaaaataaacaaaaatacgcttccgcgcgcctataatctcgaatggataaaatcggataatgaaaatgggtctctgctttgcctgactcaagaacatctaacagaatttggttttgcggatgcgtttatcttgtctctacagccgctgaacccgcaaggttgcctcgatctgagccataaatcggacctggtcactcgcctggacaaagcgaatatgatactgaccttaacggttccccaggcgtggatgaagtatcgggccaaaaactggaccccgccggagttctgggacgtgggggttactggttttatcatggattataacctctacgccagccagtatgttcccagccatggcgacagcaaccaaaacgtaaatacctacggcacgctgggtttcaacttaggcgcatggcgtctacgcagcgattatcagtacgatcagtcgtttactgaaaataactccaacggcagcaacagcagtctgccgcgaacctatctgttccgccctattccatccctggcgtcgaaactcaccatggggcagtatgatctcagttccgatctctacgatacgttccattttaccggcgcttcactggagagcgacgaacagatgctaccgccggacctgcgcggatacgcgccgcaaataagcggcatcgctcaaacaaacgccagggtcaccgtttcacagaacggccgtactttgtatcaaacttccgtttcccccggaccgtttacaattaccgatctggggaccacgttgcaggggcaactggatgtcaccattgaagaagaagatgggcgtaaaagcacgtttcaggtcggttcagcctctatcccgtttctgacgcgtcagggccagatacgttataaaagctccgtgggcaagcctacatcaaccacccacaacgacattaacaacccactcttctggacgggagagatttcatggggctggctgagcgatatctctttatacggcggcgcgatcgttaccgccgacgactaccaggcggcgaccagcggaatcggctttaacctgaatagctttggctccctctcctttgatgtcacgcgggcagaggccaatttacgcgatgacaatgaaggcaagcagcgcggcttcagctatcgcgcaaactattctaagcgcttcgaggaaacgggcagtcagataaccttcgcgggttatcgtttttcggataaagaatatgtcacgatgagtgaatatatcaattcgcgtgatggtaacaataccaacaataatgaaaaagagagctatgtcctctcatttaaccaatatatcgaaccgttggcgctaaacagctatctgagcattacgcgcaatacctactggaatagtgataccaataccaactattcattctccgttagccgcaactttgatattggcgatttcaagaatatgtccgcctctctggcaatgagccgcgtgagctggggcgatgatgaagaaaatcaatactatttctctatttcagtaccatttgaaaacaaccgcaatgttacctacagtttgcaacgctacggcgacgacgccactacacaaactgcaacatactatgacagttcggaccgcaacaacacctggaatttatccgtatctggcagcgataaagactatagcgatggcgaagcggccttgcgcggttattaccaacactactctccctggggccggctaaatgttaacggcagcgtgcagcccagcaactatcgcacattaagcgcgggctggaacggttcgtttacggcaacgcgttatggggcggcattccatgattatagccccggtaatagttcccgcgtcatggtggatgcggatagcatctctggcgttgaagtgaataacaatcgcagtaagactaatatatttggtatttccgtggtcccatcggtgggtaactatactaccgccacggtaatggtaaataataacaacctacctgaaggtgtcgatgtcactaactcggttattcgcaccacgctaaccgagggagccattggttatatgccgctcagcgcgaccaaaggctatcaaattattggcgtcatccgcctggaagatggacgctatccgccgttgggcgttaccgtgacagataaatcgaccggtcgtgatatcggactggtggccgatgatggcttcgtgtacctcagcggcgtgcaggaaaatagtatcctgacgctcaaatggaacgataaagcctgcgacattacaccacctaaccacagtaatgctgatggtcaggccgttattttaccgtgtaagtctcaacattaa

SEQ ID NO: 188528 - DNA, 573 bp, Klebsiella oxytoca
atgttaaagaaaacactgctcgctgttgccaccactacccttttatctacagctgcttttaatgcaagcgcaatcgatcagggtcacggtatcgttaatttttccggcacagtaattactgcaccttgctctgttgctccggaaagctctcagattgacgtaaatctgggtcaggttgctgacaccgtgctgaatggcggccagtattctcagtctgctgacttcactattcaactgcgtgattgcgtactgaccagcactgatactgaaggcaaaaccactactattaacaaagttaatgtgacttttacctctgctaacgttgatgtttccgacactagcctgatgtccaacaccaaagaaaacaactacggcggcgcaactaacgttggcgtgcgtatcctggatgcaggttacaacaccgttactctgggcaccgcagttccggtcatgtttaccgataccaacccgactcaggatctgaacttccacgcacgtatggaatctccgaccaaaaaagctaccgaaggtgatgtttacgctcaggcaaactacgtcctggcttatcaataa

SEQ ID NO: 188529 - DNA, 852 bp, Klebsiella oxytoca
atggcgcagaccttaaatgaagaacgtctggaactgataaccctcaatgacgcaacggcgtcgtttagccggttattcgccaatacggtccgctatcatcactggcatcagtgtcttgaagtactgtacgtagaggaggggttcggcgtggtgattgtcgatcataagcaatacaccatgcgcccggggaggatgtttttcttccctccctttacgctgcataaaatcatcgtggatgagcaggcgcaggatcgttaccggcgaaccatcattcatctcgaccagtatgccctgctgaaaggattacgtgatttcccctactcccgccagcggctccataatctgacccagcgagcgggccaatcctgggtagtggacatcgccgatattcacccccacatcgattttttattcagccgctatgaaaagctggccggagactcgccgctaaatagcgagcaggtttcctgtctgctgctctctttactcagcatgctgagcgaagatcatcccagcatgtcgggaataaccgatggtaccgcaagccaggtgatgttctggcttgacgagaattacatgcgaaaatttagcctgagcaggctggcggaagagttgggtaaatcgaagagctatatttcgcgccgctttcatcaggaaacgggcgaaagtattgtcaattatctcaatacgatacgcctaagaaaagcgtgcgaggcgctattgcatagccagcagagcgtgcgcgagatcgcccgaatggtcgggttttcagatgtcacctattttatcagcgcgttcggcaagggcattggcgaaacgccgctgcagtaccggaaaagacataaaatttaa

SEQ ID NO: 188530 - DNA, 1824 bp, Klebsiella oxytoca
atgtggtcggcaacgaaagaaaaatcaaatccattgtcatcgcgtgacgacgttattcgcgctgttacaacgatgctgagcgcgctcgacgcccaatttccggccggtcaggcgcagttcacgctcggcgatacctgcgcgcattatgatacgaatattgccggtatggaggggttatccagagcgctatgggggctatttccgctgtgggcgggcggtgaagagacgccttttgctgagaaatatatccaggcgattaagctaggtaccgatcccgatagcccacagtattggggcgatacggggccatacgatcagcggctggtggagatggcggcctacggtctgggcctggcgttactgcagacgcgcctgacggatgtattcagcgaaaaggaactggcgaatttccaccgctggctgaatcaaatcaccgatgcgcagatgcccgacagcaactggaactatttcgctattatcgttcagcttgggtttaagcgcgcgggattagccttcgatcaggccgccatcgatcgccggtttgcgatgatggaagcctactatttgggcgaaggatggtactccgatgggccggggcggccaaaagattactacatctctatggcttttcatttttacggcctactgtacgccaccctgagtccggatgatgcagagcgggccgccacgttacgcgaacgctcccgtttgtttgcccgggattttatctatatgtcggcggcggatggttcatccgtaccctttgggcgcagtctgacctatcgtttcgccatgattgccttctggagcgcggtggcgttttccggggtggacgaattttctcctggcgtggtgaaaggactgatcctacgccatttacgctggtggcagcagcagccgattttcgatcgcgacggtattctgacgctgggttttgcctatcccaatctggcgatgtgcgaggactataattcgcccgggtccccttactgggcgctgaaggttttcctgattctggcgttaccggcagatcatgatttttggctagcggaagagttaccgctgccgccgctggctaaggtgcgcgtgataccccaagcggcgcaaattttgcagcacgatcgccattctcgccatgtaacgatgctgacgtcgggccagctggagttaaataattacgtcaataccgaagccaaatatacccggtttgcctactccagccgctttggttttacccttgagcgggggcggtatggccttaagcatgccgcctgcgactcgatgctcctgctatctgacaacgataattactggcgcggacggcgcgaatgcgaggaagtgacggtagcggagaacgcgattttctgccgctggtcgccgtggtcagacgtacatatccgcacctggcttatcccctgcggcgactggcacgttcgggtacaccacattgccagcgctcgacggctacagtccgtggaggggggctttgcggtactgaaggcggagccctgcctggaggccggcagcagcctgattctggccagcaatgggagcagcatgatagccaatcttgctcccggcatcgccaggcagggcgaggccgttatcacgccgcccaatagcagtattatgtttgcgccctgcgcggccattcccactttatccaccgagctggctcctggcgaacattggttggcctgtgcggttatcgccagcgctgagataaataaagtttttgccgatatgccgttactcattcgacaagatcgccgctttattattatggatagccaaaaagaaacccagcaaactatttatttttaa

SEQ ID NO: 188531 - DNA, 1269 bp, Klebsiella oxytoca
atggaaagtacctatacgaataacaaagttgagtattacaaaataagcgccttcatttttctgtattttttcacctggtctgccagtattggcctgctcgccatatggttagggcaaaaagcgaatctaagcggcgcggttattggcaccgtctttgccgtaaatggcgtattttcagttgttcttaaacccatttatggctatatacttgataaaatagggatgagtaaatatctgctctattttgtggtgctgatgtcggcattaatggcgcctttttttatttatgtttatcagccgctactgttaaccaagacgatgctgggtattattgtcggtgcgatctatttaagcttcgcctggtatgcgggcgtcgcggcctgtgaatcctataccgaccgttacagccgtctgaacaatatggagtttgggcaaattcgcatgtggggatcgctcggatgggcggtagcgtcttctttctctggcctgctgtttaacctctcgccagcgtataactttatcctgggaagcgtcacgtcgatagtgatgctggccgttttattaagcctgaaagtcaacgaaaatgcggagaacgccgcgcaggtgctggtcaaagataaaatttctccggcggatgtttatacccttctgcgtaaccgtaaattctgggcattctgcctgtacgtggccggggtggcgtggatgatgtttatcgcggagcagcagttttcgcgctattttgtcacgttctttgccgatgtccataaaggcaacgccatttttggttatctgggaacggtacagtccgggatggaatttattatgtatatggtcattccattctttgttaactacattggcgcaaaacgtggattattaattgttggcctgctggtaggcgccaggttggtgatttctggcctgtgtgattcccatctgttgatttcgctattaaaaccattgtatggcctggaaatatgcctgctgttggtttcagtatttaagtatatcgccgagcactttgacaaacgcgttaatgcaacgatgtatttgttaggttatcaggcgatgttatatgttggtaatgtggtcgtctcgtcacctgccgggtttatgtacgatcgtatcgggtttgagaaaacgtatattattatgggcatgattgcgctggtttttaccgtgatatcggcatttaccttatcgtcatgccagagtaaacggcgcagctctgccaccctcaatgtttcagaaaataacgcatcaaaataa

SEQ ID NO: 188532 - DNA, 1191 bp, Klebsiella oxytoca
atgttaaataatatcgtagaggaaccattgcgcgatttccccggcgagccgatctcaatggattgcttccgggaagaaatgaagcgggcgcgtgaagatgtccttgaactgattggccgtcatttaacggaattcggtgaacaatttcccgctgagacctgcgtcgaaggttattatccgttgactgaaaacgtcgagtggacgaccagtttttggaccggacagctatggctggcgtgggagatgagcggtgaagataagtttcgccagatggcggagaaaaacgtgcggactttcggtctgcgtattgcagggcgtcacgacaccaatacgcatgatttgggctttctctacacgctttcctgcgtggcggcctggcgtttaaccggtaatcgcgacgcgcgcgggttctccctgatggcggcggaggctctgttggagcgctttcacgcgaaggcgcagattattcaggcctggggcgatctcaacgatcccgcccaggccgggcggatgattattgactgcacgatgaatctgccgctgctttattgggcaagcgagcaaacgggcgacccgcgcttcagggatgcggctctggcgcacgtcaggcaatcggcggcttttctggtacgtgaagatgcttcgacctggcacacctattatatggatgttgtcagcgggaagccgcgctatgggaatactcagcagggttatgccgatgattcctgctggtcccgcggccaggcgtggggaatttatggttttctgctcagctatatctataccggcgacagggcgctggtcggcctggcaaaaaaactggccaactatttcctcaaccgcctgccagaggactatgtctgtcattgggatctggcgctgataaacaccgatgcgctgcgagactcttcttcggctgctatcgccgtatgcggtctgctggagttggttaagcagttgccaacgaccgacccggatcgcgaacgctatcaacagtgggcgatggcgataatggcctcgctgacgaagggctatctgatggcaaaaagtgacaagggtaatggtttactcaagcactcggtctaccatctggcgagtaataaaggcgtcgatgagtgctgtagctggggggactatttttacgttgaagcgctgatgcgcatgacgcagagctggaaactgtactggtaa

SEQ ID NO: 188533 - DNA, 657 bp, Klebsiella oxytoca
atgctgacgttgaatcaggtgacttatcgctggcccggcgcggcggcagactgtttgcaaaacatctcgctaaacctcggtgaaaacgaatggctggcgctcaccggcgataacggcgcggggaaatccaccctgctgcgggtgatggccggactgctacccgccacgtccggtaccgtcaatttgctggataagccgatggcgcattataaaaatcgccatcgcgccggtatgctcggcgtcctgtttcaggaagctgaaaatcaaatctttcacagcaaggtggctgaagaagtcgccttcgggctgcggctacagaaacggtctgccgcagaggttgcgcaacgcaccgcggcagcgctgcagctttgccagttagaggacgtcgccgatgcgcatccgctggatttgcataccgcccagcgccgcatggtggccgttgcctgtctggaagcgatggcgccagcagttctgctgctcgacgaacccagccgcgattttgaccagcactggctgacgatatttgaggagtggcttgcggtttgccgcaaaagggggaccagcgtagtggctatcagccatgacacggcttttatacagcgccacttttcccgcatggtgcgcctggaaaagggaaggctactgagtatttcctga

SEQ ID NO: 188534 - DNA, 678 bp, Klebsiella oxytoca
atggttacattagaacagtttcgctatcttccaacccatgccgcgcgcccacctgcctgcttcgattttcactacgccgagcccggtatggtggcgatttttggcgataacggcagcggaaaaagtacgcttgcgcagttgatggcgggctggtatccggatttcctccccggagaaattgaaggtaaaggaacgttactcgggaaccctatcggacagttgtcgctcgtcgaacaggcgagcaccgtccagctggttcaacaatccccctatctccagctttccggctgtacattcagcgtcgaagaagaggtcgcttttggtcctgaaaatctctgcctcagcgaagacgagattatgcgtcgtattgatgaagcgctgacgctgacggtatgccaggcgttacgtcatcgccacccggccacgctctccggcggagaaacccagcgggtagtcattgccagcgcgcttgccatgcagcccaggatattgatactggatgaagcgtttagccgtttgacggcgcaggctagcgccatgcttctggagcgcttgcggcactgggcgcaggcgcagcgttccttgattatcctttttgaacgaactccctcgccttttcttgcctggtgtcagcagggatggcgactgcatgatggagcgctttccccgctatgctga

SEQ ID NO: 188535 - DNA, 708 bp, Klebsiella oxytoca
atgcatccctttacctcattaagcctgtgggcgctcgccgcctgctccacgctcctgctacccgcgggtgcgcccttaagcctttacagcgcgctgactttcatctgtttactgggaatcaaggccacgcgaccgcgggcaaaatacgtactctggctgatgatccctttagggttaggcctgtggctggtgcacggcggctggttgagcgaatggatcgctggacaagcgcgtgaacctgaacgttgggccaatgccgtcacgctctggctgcggatcctggccatcgtatcaacatcgcagctgtggatgcactacgtgccggtttcgcggtttatgcgcgccctgtttgcctcccgcttgccgccgggtctcgcctatctgtttgccggcccgttgctggttgtcgagcagctcaaacgccagctggcgattattcatgaggcccagtgcgcacggggcgtcccgctggatgaggcctggtatcatcgtttacgcgcgatgcctgcattgattgtgccgcttacccataatgcgctcaacgatttagccgtacgcggtgcggcgttggatatgcgaggatttcgcctgcatcggacacgcaccacgctgtgggcaccaccggacagcaccttacagcgttgggcacgctacgccatggtggcgctgatagtcaccgagaccggagtctggatatggttacattag

SEQ ID NO: 188536 - DNA, 165 bp, Klebsiella oxytoca
atgagtgcaggtaaaattgttattaccgatcgaatttcaataattgatctgcaatatctattgataaaaacgatcaattttaaatatttaatagctttcaactatcattataatgatatcgatcgtttttgtagatcagtttatgcgggggatgtggtgtattaa

SEQ ID NO: 188537 - DNA, 213 bp, Klebsiella oxytoca
atgcgcgcccgctggatgtggaatatccgccagctgctactgagcgtcaggtccgaaggcgtcgctatccctccctcgttgtcacatatcaccaccgaggctcaatggtgcagcctgatactgaccgcgggcggcgactactggcacgtgtacatgtcaaaaaagatggcaggtggcaaaaacactgagaaatacctgggcggaagcggataa

SEQ ID NO: 188538 - DNA, 696 bp, Klebsiella oxytoca
atgtcgatcatagcaccaataccccgtaccgaacgacgcctgatgcaaaaaactatccataaaactcgcgataaaaatcatgcccgcaggctgaccactatactgatgctgcaccgaggaagtcgtgtttccgacgtcgccagaacactttgctgtgcccgttcgtccgtgggacgctggctcaactggtttaccctgtatggcactgaacgcctgatatcactgcgtacgggccgtgaacgccagtggccatttgagcaaatttgtgcacttctggtacagcttgtcagccgttctcccgctgattttggctatcaacgctcccgatggagtactgaacttctggcaataaaaatcaacgaaataacgggctgtaaacttcatcccggtgcagggcggccccctctgcatatacgcgatccgtacaagaatgaaaaaatggctgccatccgcaaggctctggataaatgcagcattgagcatccggtgttttacgagaatgaggtggatattcatctcaatcccaaaatcggtgctgactggcaggtacgcggccagcaaaacttgtggtcacccccgtacagaatgaaaaatattatctggcaggtgcgttgcacagcggtacaggaaaagtcagctacgtgggcggtagcagccaagcttcatctttgtttatcagcctgcttcaacacctga

SEQ ID NO: 188539 - DNA, 327 bp, Klebsiella oxytoca
atgggtaaacgtctcgccggtcgtgttgtgagttcttcacttatttccgccgtcttattggcaggcgtctctttttccagtcacgccaaaccgcaacaagacggggtactgcatgtagtgctgggcagcgatacaccgattatcgatccatcgatcaccgcccactatgtcatggcgtcaatcacgcataatgttgtggattcactggtcggtcaggcagaggacacattgaacggcactggtgattgcgggttatcgtatcgtgtaacgcctgcaataaccgctcaacatgattcacccatggtgagtaaacaggctgataaataa

SEQ ID NO: 188540 - DNA, 534 bp, Klebsiella oxytoca
atgtactctgctgtgcaatctttgcttgcagataaccactgcgaaaatataggtccggtctcgtcgttaaatgctatgtatattacgggtggcagtcttttagtcattaaaatagaaagcaacagggattttattgaagcactggttacgatttttgacgtcaatatttgcatgcctgtattaatcatagatttttctttggagtgttttttgattggtgttgccagacgtttaaataatgtcagtatcatatctggaaaatctgaagtcattgaattaaatagagccataaaaaaaaccatagagggggttaaatatacttgtgaattaaccaaaaaaaaacaggagggcgcaaaaccatcgttaagcacccgagaattaaggattctcttgcagttttaccgcggtgaactcatgtcaacgatcgcgatgaaaaataactgtgcaataaaaacagtttatgcacatattgcaaatatcaagaaaaaaatgaatgtcagtagacgtgctgaactctataaaatatttaagtga

SEQ ID NO: 188541 - DNA, 1125 bp, Klebsiella oxytoca
gtgaaaaaaatcagcattcagctggcggcagcgataggttgtagcttgttatgctattcagcgaccagcgtagcggcgacctgcacttttgccaataatagtggtgttaaagtgccattccatgaggatatgccgctggctattgctaatctgacggctggaccgaacctaccggatggtacagtcctataccgacagacgcaccgtcaggatggcaagaatattgtagttaactgcggtggtacgggtaaaacttttcttgattttaaggtcgaaacaccaggtagcaacggaatttcaagcgtgacagctcttgggctgaataatggtgcttcgggtaaagtatataataccaatattccgggcattggtattgctttctggtttgcttttaacaattttgattatcgtttctatcaagatagtttgacagcggcatcgtatcaatacgatattagttttattaaaaccgggccgatcgcggctggcgctatcaatacttcaacgctgccaacgatttcaatttctgccgggcaaaatggcgcaacgtcactcaaagtaatgaccgcgaagttaactggtacaattaatattgtttcccgaacctgtatcactcctgacgttttggtggaattaggaacttataaaagtagtgattttcctgccataggcgcaaccagtccatggaaggatgcatcaattaaattgaccaactgcccggctttctatggttactataacctgaatggaggtgaccgctacgtctcctacagtgcaaataatctggggactttcactcgcggcgcagccaacgtcaataatagcctaggctacacacttagacccaccggagcgatcattgatccggcgcaaggtattattggcctcgacaataccgcagggttaaccagtgctaaggggctggggatccaaatatcgaccggcaacatggcggtgccattcagtgccgcggaatttaatacccggttaccgtcagggctcactctgactgcaacagaaggtgccagttacactattcctttaaaagcacgttattttcgaactggaaatttaagtcccggcaaagccgacggttcaataatatttacgattgactaccagtag

SEQ ID NO: 188542 - DNA, 2532 bp, Klebsiella oxytoca
atgtcaaatcgtcattataagacgatgtttattttaatagttttgcttttgggtatcgattcaccactactggctactgtaatgccgccagttgatgacccggtaaccggcaaacaaatgcctagtgattcattgcgatttgatcccgtatttctcaatatggggatggcaaaaggcattgatatcagccagtatgaaaaaaacaccgtacctccgggaacctatcgggttgatatttatattaatcagcaatatattcttcgtgaaaatatcgaattcagaaaggacagtgtcggtgtcgtaagtgcttgtctgacggataaaacgctggccctgttaccactcaaaaatacattagcggagtctgatggcgaaaatgaaataaacagctgtagatttctatcctcggtgcttgaggatgtccgcgaagacttcgatatcggcaatttagtgttgaccttcacggtggctcaggctgatttactacgagatcccagaggttatgtcaatccatcgctatgggactacggcgccacggctggctaccttaattataccggtaatgcctatcattcgaccgccagtggcgtcgataatgattctttctacagtagccttaatggcggcctgaatctcggctcctggtacctgcgtcacaatggttcttattcatggcaaaaggatggcgaaaaacgttacgagagcctgaatacttatgtgcagaaagatattgttgcattaaaaggacgtctaattgtcggggatagctacagcgatggacagatgtttgacagcgttggttttcgcggcgtgaaattgagttcggacgagcgtatgctgccaccttcgatgcgtggctatgcgccgaacatccgcggtattgcacgtactaacgccaaagtctcaattcagcaaaatggctcagtgatttatcagacgacggttgcgccgggtccgtttgttatcgacgatctctatcctacgggttacggtggagacctgcaggtcaaagtggaagaagctgacggaagcgtgcagagttttgctgttccttacggctctgtggcacaactgctgcgtcctggaaactcacgctacgagctactgggcgggaattatcgttctaataatagtgataataacccacgtttatatcaattgagttatcagtatggtctgttcaatgacctgacattgaatgccggtatgcaacagggcgaggagtattccgcctatctgttggggagtgcaatcagcacgcccatcggggctatttctgcagatatcactcaggctcagacccgtgatgtaccgggttatggcacgctcaatggacaaagctatcgcattacctataacaaatttattgccgccagccagagcaatatcgcgctggcggcctatcgcttctctacccgaaattactacaattttagcgaggcgacacttattcagcagcgaatggacagcgatccgttgatgataatgacccagcgtaaaaatcgcctgagtctcagcctgaatcagactctgggagataacggcggtcagctttatgtctccgggtttacgcagaactactggaatcgtcgtggttcagatcaacaatatcaggtgggttatagcaataatttcaagtccttgacctattcgctgagtatttcgcggacgaataatatcactggcgcaatggagaatagctacgatctgatgttctccatgccgttggggggcaacagttcgggagcaagcgcctattttacgttgaatcgtgatggcgagggaaaatataaccaacaggtgagcatttcgggtgtggctgggcaggataatcaatacagttatggcacaacagcatcgcataactctggcaatcatacgactagcggttccgtcaatgggcagtatcgtagcccgtatagcaccttaagcagcagctatagtagtggccaccattatcaatcatatagtgccgggatgagtggcacgatagtggctcacccggcaggactcagcttcagcccggatactggagaaaccattgctattgtttcggcaaaaggagcaagtggcgccagtgtggagggatacccatggctgaagctcgatcgttggggtaatgcgatcatgaccggattgaccccttaccagttaaatgatgtaggtctggtccctacgggggctgattatggtgttgaactggaaagtaccagtatgcgtatcgctccgcattccggtgcgatagtgatggcccgttttaatactgaacggggttatccggtactctttaagttgacatcgaccgcagtatcgattccagcgttcggcagtgcggtagtggacgctgaaggtaataatgtcggttttattggtcagaatcaaatggcctttgtgcgactaaaaacggttgctggtcgtttaacagtccagggcgataaccagcgctgttatatcgattaccagctttcggaagaaaaaattaacattgggcagcagagctttattcaaatgccgggccagtgtcacgattaa

SEQ ID NO: 188543 - DNA, 732 bp, Klebsiella oxytoca
atgaccggttgctcattgttatggcgtgctttattgtcgccagttattggttttatttttgtgttatcttttcaggccagtgccagtttagtaataacgggaacccggattatctatccgtccgttcaaaaagaagtgacggtcaaaatagataatgccgggaaaaatcccgttttatatcagtcatggatagatgcgggtaattcggagatttctccggataaaattgatgtgccgtttgttattacgccccctattggtcgaattaatccaggcaagggccagtctttgcgcctggtatatgttggtaaaggattaccgaccgatcgtgagtcagtgttctggtttaatattctggaaatcccggcagaagttgaaaaatcggccgcggacctgaatgtcctgaagatggctttccgtagccgaattaaattattctaccgaccggccgttttagataaaaatgtctctttcaaaaattatctatcgattgcgacgatgggtgataagctaacggtggaaaaccgatccccctattattttagccttgtacgcattgaatctacgacggtgcataagttacaaaattttaaaggtgtgatggtcgctccttttagtaaacaatcaatcagtgttgaccataataataaatttagtgccggcagtcaggcaacggcttattacattgatgattacggtgctgaggttggtattcagacggtgatacattaa

SEQ ID NO: 188544 - DNA, 570 bp, Klebsiella oxytoca
atgaaaaaattatttcttgcgagttgtgtctctggcatgttacttatgtccgttacggcacaggcggccgatcaaactgcggccggcggtaaaattacgttcaacggtgcattaactgataacacctgcaaagtgaatgttgatggccagggcaacgatgccacggtgacactgccgactatcagtgttaatcaactttccggtgctgcaggaaatgtagccggtcgtactggctttaatattcagttgacagagtgcactggcacggcgttgaaaggagcgcaggcttattttgaagagaacagcgcaacggtggatttaacaaccgggcgcttgaaaaataccgcagtgagtggtgctaagaatactacattgcaattgttagatacatctaacgttgatgaagtaattaatgtcggcaatactaatcagcttaccaaaactgctcatgtcgatattactgctggcagtgcgaccctgccgtacgcggtacagtattatgctgaaacagctacacctgaacagggtactgtcagtagctacgttttttatagtattgcttataattaa

SEQ ID NO: 188545 - DNA, 702 bp, Klebsiella oxytoca
gtggccgagtatcaaagtaacatggatttcgacttcatctgtgaacctatctacagtgttaacggtgaatccctgatggcagtggaagtgctaacacatttctatgatgatgtgggtcaacgtaaaaaaaataccgctgatatcattgattcaatgtctttagaacaaaaggcacagtttttttattatcagatagaacaaataaaacaacagcataaatattttaagaaaagccaggtgttatgtagcgttaatatcgataatgatattgctgagagtcttaaatctaataagaaaatgtgtgatttattgttaacgctaccgtttgtcaggttggaagttaatgaaaactatcgtggtctcgatagctgtgatagtgaagagttattgctacccttgctccggtatgtaaagggaatctggcttgatgattttggtacgggaaaatcgactttatctacaatcagtaagaaaaactttgaagtggtgaaaatagataaagaatttttctggcaggagtatcaaaaggatagttttccggtactaataaaacgcatcaatcactcatgtgggcgtattgttattgaaggtgtcgaggagctgacaatgctactcactttagccgagttgaatatttggggggtacaggggtacgcctttccctctgtgccgttaaaaaatattatgacactcctggagtga

SEQ ID NO: 188546 - DNA, 648 bp, Klebsiella oxytoca
atggcagacaaacttagtgaaggaaaaatcatgcaggcactcagctgggcctacgataaagcactggatggaaccattccgggaacaaactcatcttatgagatggctgaaaactacctgaaaggtgaaggggacttagcaaaaaaggtcaactcccttattagatggcaaaacacaaaatctgccactaccggatttgtgtctggacttggaggtattattactctacctgtatcaattccagcaagtatcgcgactgtgatgtatgtccagattagtatgataacaacaattgctatcatgggcggttatgacgtaaaggatgatcgtgtaaaagcacttgtttattcgtgcctggctggtaatgctgcaaaagaccttcttaaggggacagggattgtcattggttcaaaactatccacgcagttaattaagaacatttcaagagaaacaataacagctatcaataagcgtgtaggtttcagactcctcactaagtttggtgaaaaaggtgctattaacttaggtaaaatgatcccacttgtaggaggagttattggtggaacttttgatggggtttcaaccaatcttgtaggtaatatagcaagaaagactttcattgaaggaaatatcattaatgatatctaa

SEQ ID NO: 188547 - DNA, 759 bp, Klebsiella oxytoca
atggaaaatgaactagaaaaattcaataaaaacataataaatattaatgatattgacactcctgtttataggatatttagtttagaacgatttttagaattatttactgaaaagcagttggtactggttcaaccttctatgtgggatgacccatacgaacacttcctccttaaaactgaagttgcttctgatgatggcgaagttgggtctctggaaaacctttataattcatggtatggtcaatgctggactgaaaacgaagacactgatgcaatgtggagaatatacagccccaaaaaaaaaggtgtgagagtaaaaacaaccattcgaaaactattctctgccttatatgacacttctgacacaaattatagtctaaaatattttattgggaaagttaactataaggataaagaagagattattgaattcattaattcaaccacattttctgaattcatcctcggtgggcaaaacacacagttcgcagaggtgttatgtacaaaaataactgcattttcccatgaaaatgaagtcagactgatagtcgatgacataggtgataaaaatgggagtggtggtctatataaaataaacataactcctgaggaactttttgaggaaatctgccttgacccacgtttatcaagtacagattttgtaaaacttcgggcgaaaattcagggcatgggtgtcagcacaaacataatacaatcagatctttataaattagaccttccgcgatttaaaatgtgttaa

SEQ ID NO: 188548 - DNA, 540 bp, Klebsiella oxytoca
atgggtataggaagttggtttggtttgaataaaaatgagtttgtgattggtggcgttaaaacaaaattgcctgaaacagatgatcagacaatggatttggcggcacaactggcccgacagttgggtagtaagctccctactgagcaagatgtttactggtttgtcattgaattttacgatcgagcgtctgcgtttaatcattcggccagaggggtgttgagtaaccttcctttccgtctgtttgagatggagtatgaaggtcgtaggtcggaaaactcgtatgtaggcaggaagaaccctggcgtcacttaccttcttgaagatgtagcgccttcgttcaaaaaagcggtatctcatcttggtgctggcccagaacaggttatagttgctattgtctatcttgttttttgcacagcacaggctgagatgattaaaaatttgcgcgttaaatatgcggtccactatcacaacaattgtatatcgagcgggagtttcaataacgcagaaaaatgggaggaagtgatcgacagcctggaatga

SEQ ID NO: 188549 - DNA, 480 bp, Klebsiella oxytoca
atggaaaaacagttaccgttgtttgcatatgaactgacgtcatcagcacaacagaccattcgcgaggcgctggctctgttggagcgccagttacgtgagcccggcgcatcgtttacctccagcagctcagtacgtgactggttacggcttcagctgaccatggaggaaagagaggcatttgttctgatgctgctggataaccagcaccggctgattacgcacgaaacgctgttcaaaggcaccatcagccataccgaagtccatccacgggaagtggtgaaagcctccctgaaatacaatgcggcagcggtcattgtcgcgcactgccatccctcaggccatgccgaacccagccagtctgacaggcgagtgacagagcgactgaagaacgctctggacctcgtggatgtacgtctcctggaccacctcgttatcggcggaatggatatcgtctcgtttgctgaacggggctggttgtaa

SEQ ID NO: 188550 - DNA, 381 bp, Klebsiella oxytoca
atgattaaggagagctacattttgtcgaagaaaaccccggtaacaacgcatgatatcagccaaccctggtgggggctcagacgcagtgtttccccgtgttttggagcccgtctggtcctggagggaaaccgcctgcattacctggctgaccgggcaaactttgatggtcagttctgcgatgcggatttgcgccatcttgaccaggccttcccggtagtgatgaaacagctggagttaatgctcaccagcggtgaactgaatccccgtcatcagcactgcgtcacgttgtatgcaaaaggtctgacctgcgaggccgatacgctcggttcgcatggctatgtttatatcgcgatttatcccactcccgtcgccacggcataa

SEQ ID NO: 188551 - DNA, 390 bp, Klebsiella oxytoca
atgcaaaccaaatcatcccccctcatgcgggcggcatcgtcacgtccgtctcccgtgtatatctggcagaccctgctgaccagcctgctggcacaccactatggcctcacgcttagcgatacgccgttcagtgatgaacaggtcattcagcaacatattgatgccggtatctcgctggttgatgccctgaattttatcgttgagaagtatgaactggtccgcactgaccgcccaggcttcagcatcctgacgcagtctccgtttatcacacccatagatatcctccgggccaggaaagcaacggggctgatgaaccgtgacacgtataaagaggtgacggctattaccagagggcaacatccgcaggtcagcgctccaggcaagcgatga

SEQ ID NO: 188552 - DNA, 840 bp, Klebsiella oxytoca
atgtccggaaataatattaatggacccgaagtatcaaccgggcacaccggtgtgatttgctccaccagcattgaacgtattgtcacaggccggaatgctgcactgacacggattgaaagccttatccgtgaacttgatgatatctccattctgacccgcgatatcggcggtggtacagcacaagagtggggaatgcgggagggacatcgatatgattgctggtttacggaaaaacccgataaagcgatgaaagcgattactcgcaatattgatcgccgtatctggcgcgatatgatgaacaaatcaggcatgctgaccctgatggatgctcaggcgcgtgacgagtggcacaaaagcctggagaaaaacgatatccccgcgatctctgaaaacaatatccttagtacctttgagcaactgaatcacgacaaacaggccgtttttgagcgtgttgttatcaacgtttttaaagcgttatcgtgggattataaaacgaactcaccctgtaggtttggaaaaaagatcatcatggatggtctggtttcttacaaccgctgggggtttagcttcacacatggctatcgacgcgaccagattgttgatctggaacgtatgctgacactatttgatggtaagctgcttccggacaatcgggctgacattgcctgtcggctgagtgaccatatcggccagcagcggacttctgaagtgtatgacgatgagctattcaggattaattattttcagaaggggagtgcgcacattgcgttcaagcgtcccgagctgattgagcggctcaacgatattattgccagacactatccggggatgctagcttga

SEQ ID NO: 188553 - DNA, 153 bp, Klebsiella oxytoca
atgttgtttccgctggtgatgattattgatgattttccagcttacctgaacacggatcttattcagtcaggtatgattaatattcaatactggctgaagcggcatcaggaggcgtctgcagataatcgtcacgtccagggcaacgttcagtga

SEQ ID NO: 188554 - DNA, 1548 bp, Klebsiella oxytoca
atgacccttaaaaacagaaaagtaaccattcctgtcagtatcggctacggtctgacggatattatgggcggcggcgcctttaccgtcattggcgcgtggcttctctttttttataccacttttgtcggtctgtcgccgattgaagcggcttcaatcgtggcgattgcccgtattgttgatgctatcgttagcctgtttatgggcagcttcaccgatcatttctataaaaattatctgggtaaaaaatttggccgtcgtcgcttcttcctgctgattggcgcgccgctcatgctggtttatatcctgctgtggatgaacggtatgaatttctggttctatctcgcggtctacctggcctttgaagttatcgcggcaatggtgcttatcccatgggaaacgctgccctctgagatgaccaaagattttaacgatcgtaccaaactctccacttgccgaatgttcctgtcggcctccggcacctttctcgccacctttattccaggcctgttgatcggctggctgggcgagaacaacgccgatgcctatttaatcaacggggtagtctttgccgttatgtttaccctctgcgtattcatttcctggaaagtcacctgggagcgcgagttaacgccggaaatgcaggcagaaatcgagaaagagacgcagcctacgaccttcggagagaaaatcacagccttcggtaacttgtttaaagagtacgcctctaccctgaaggtgcgcgcattccgtaaacacctggctatctatctcttttccttcaccgcgaaggatatctacaacacggtgtttgtctttttctgcgtctactgcctgaatgtgtcatcctctctggcgggaacgctgctgtcgatgagtatcgttggattgccggtcacgctggcggcgggcgtcgcgatcattaaatacggcccctcccggctttatgttttcgcctataccctgatgatgctgtgtctcggcggattcttcctggtctatcagttcccgacggataacaaagtaatgctgctggtgatcctcgcgggcgtttatcaggtcggccgctgcgtactggaatttaccccgtggaacgtattcccgtttattccggatattgatgaaatgataacccgccaacgccgcgaaggtctgtttgctgcggtgatgaccttctcccgtaaaacaacggttgccattgcgacctttgcggtaggcctgctgttacagagcggtggtttcatgaaaggtagccaggttcagcctcaggaagccatcaccacgattgctatgctgctatttgtcggcaccgccgggctgttgatcatcgcgctatggcaagcgctgactttccatctgaacaagcgtacgcacaaaattttagtcgacgagatcgaacgcctgaaagcgcatggtcgcaagcaggatgtgacgcctgaagcccgccatgttgtggaagatcttaccggttacgcttatgacaaactgtggtgtcaggatgcaactgcgccagcgacctccaataacccgggggctgccctgaacggatag

SEQ ID NO: 188555 - DNA, 1416 bp, Klebsiella oxytoca
atgccattgataaatgatagttttatgatcagcagtccgacaggaaaaaaactctatcttgagatagcgagagagcaacctattatcgattaccattgccatcttgaggcgaaggctatttgggaaaatgaacctttcgccgacattacgcagttatggctggaaggcgatcattataaatggcgcgcgatgcgggcaaatggtattcccgaggaaaaaatcaccggtaacgctaccgctgaagaaaaatttgcggcatgggcgcaaaccgttgaggcctgcttcggtaaccctctctatcactggacccatctggaacttaaatactattttaacattgatgacacgttaaatagccgtaactggcatgaaataatgacgcggtgtaatgagcaattacgccgcaaagaattcttacctcaggcgttaatacgccgttcaaatgtcgaggccctgtgcacaacggatgggccgctggataatctggaatatcatcagcggctggcggcaaatagtgatttttctccgcttgttctaccgactttccgccctgacgaactctttgataccgatccagaaagctttcagacgtttatttcccgtctggcggagaaaacccaaattcgtatcgcttctttgcaagacttgctggccgctctggaatcacgtatcgattttttccacactgtagggtgccgcatatccgatcacggtcctctggaaatcgtttacaaccctctggatgaagccgctctggccgcgcttttccagcgccgtctgaagaacgaggccctgacaaaagacgaacagcaggcgtgggatagcgcaatttttatcgcactcgccaaaatgtataagcagcgcgagtgggctatgcagattcactttggcgcaattcgcaacaataacaaaccgatgtttaagaaggtgggcatcaactgcggctttgattccgttggcgatcaaacgctcctcgccggaagcctcaatgcgctcctcaacgccatgggcgagaacaatggcctgcccaaaaccatcctttataacctcaatgccggctataacgatgtggtggcctctgcgatcgctaacttccagagcggcgaagatggcgtgaaatccccgctgcagtttggatccggctggtggtttaacgatactcgccgcggcatggtcaatcagctcaatacgctcgccgatcagggtttactggccaacttcgtcggtatgctcaccgattcccgcagcttcgtctcctatacccgacacgattacttccgccggatcctctgcgatctgattggaggatgggtggaaaatggagaagttcctgacgataaaaacattcttacctcaatgattcgggatatttgcgtagaaaacgcacgccgctatttccgtttttcacaagcctga

SEQ ID NO: 188556 - DNA, 1068 bp, Klebsiella oxytoca
atgcagatgacaatgcgctggttcgggccgcaggaagataaaatcccgctggagtatattcgacaggtgccgggggtagaaggcgtcgtcggggcgctttacgatgttgcccccggcgaagtctggccggtagaaaaaattaaggcgttgattgagcaggcccacgccgcaggcctgaagatggaagtcatcgaaagcgtaaacattcacgatgacatcaaaattggttcagcggaacgcgatcgctatattgacaactacaagcaaactatccgtaacctggcggggtttggcgtaaaagtcatttgttataatttcatgccggtcttcgactggatgaaaaccgatatgaattatgtgcttccggatggctcattaaccatggcctttgaaaagcgcggtattgataagtctctggaagacgtcgttaaagaggtactggagaacgcgaacggttttgctttgccgggttgggaacctgagcgtctggcgaaggttcaggagctgttcgcgcgctatcgcgatgtcgatgataccaggcttcgggaaaatctgttctatttcttacgtgaagtcattccggtatgtgaagaagtgggcgttaaaatggcgatccacccggacgatccgccgtattctatttttggcctgccgcgtgtggtaaaaaatcatgccgatctggcgttgatttgcgatacggttgattcacccgcgaacggtatcaccctttgtacagggtcgattgccgaagatcctgacaataatgtctatgaaattctggctgaatttacccggcgtaagcgtcttcactttgcgcacgtacgcaatattaagcttattaaagacaaggatttttatgagtcggcgcacccttccgcgtacggctctctggatatgtaccgcataatgcaggctctccatgataatggttttgatggttatattcgtccggaccatggtcgctttatttggggagaaaccgggcgtccgggatacggtctgtatgaccgcgcattgggcgttacctacctgatgggtctgtgggaagcgctggaaaagcaaaagtaa

SEQ ID NO: 188557 - DNA, 3720 bp, Klebsiella oxytoca
atgaaaacctttatttatcaggacgaaaaatcacataaattctgggcgattgagcagcagggccacgagctgcatctacgctggggcaaggttggcacacacgggcagagccagatcaaaacctttgccgacgcggcggcggccagcaaggctgaagtcaaattgattaacgaaaaaacccgcaaaggctacgttgaagatactcgcaccgagcagcctgccttacccgcatcgccaccagccgccccacagcccgaatacgcctcaacgccctcagacatcacccgtccgtggctggcggacgatggcgaactgcttttatcggatgagctgcttgaagaggtgctcccttctcgcctctttcccggtaaaccgatcgccgcgcctgaaaatagcaaactgatggacctcggcaacgagatccacaaacaatcagggaatatcgtcacctttaactctaccgactgctccgcgtactggcagcaaatcatcaaccaggccctgaccgatggcccgctttcacccgcggcgctggcggttcaggtggcggtagccacgcgccgcggctggcgcagcgctgataatgcctgtctgatggacgagattgtttacgtttacggtctggaatatgccatcgagatgtttatcgccctgcagcacattgagtttgattataattatcaaacccttcaggtgactttccgcgccgaacccacccgcgcgcgcgggccggcgctgctcgacgtgcgcctgcgcgcccatctggctcatgcggatgaggcgctctggcggcgctgcgtggataaactgatcgccgcgttgccggatatgcccatcgggcaacagccgctggtggcgctcttgctgccggaacgccaggatatcgtgaacgatatcgcccgtcgggtactggcgcacaaaaatgtgaagacggcggaatggctgaaggtcgtcgcccgcgacccgcaggtggtcaaagcgctggagccttaccagacggaaaatctgtttaacgattattaccacggcagcgtctggaacgcgacggtgatgcgcgaacagggcgtcgccggtatcgcccgctttgcgccctacgttcacgatgacctgtgcggagagcgggtaagcggcgtgaaccatccccaggcgctgatgcagctgatccgggtgaacgaacaaggcaaacgctgccacgagcggatggcccgcgccagcgcccgcttcccgcacgcggcgctggcggcgctggccgaactgctggcgcagaaagaagagaagcgctggcgcattatgctgatgaccctgctgagcgcgcagccggagctggcggcgcaaatttcgccgtggctctcgtcgcaggccgcaacgctgctggcagcctgccaacggcagttaagccagcgggtcgactgcgccggggccgatattctgccgccggtgctggtttcgcccccgtggacggcgaaaaagaaaaaatcaccgatccctcagctaagcttaacgccgctggctttagaaccggcctgtatgctgaaggaaaaggcggccaacgcgcttctcgcccagcggaactggtacgcgcagcaggtggagatgagccaacaggagagtgagaaagcgtaccttacgcgcctgggtttcagggtctggagccgtcaaaacaatcgctatgaacacgcctccgacgccgcagcagatgcctggcggcggcagaattatcccgcgctgatcgccgaattccacgcttaccacgccccttatccgggggagtggaatctttatatgctcaccgcgctgcccgccggccgggcagccgatgcctggagctcgctgagtaaagagccccataccggcggggaatatgtgatggcctatctgcgtcttgccgggctaccgggttttattcacgccctgtcccgctatccgcaggagaatttaccggtcgctatctggtttgccgccagcgaactggcccccatcgtcgcccgcgcctttcacaagctgaaaacgctgcgcgaagaggcgcgcgagtggctgctggcctatccggagcacgccattgccggcctgctgcccgccgctctcggcaaagcgggcgaagcgcaggacagtgcgcgcctggccatacgcatgctgatggataacggtcatcagccgctgcttgaacaggttgcccgccgctacgatcggctggaggtgatggcggcggtcggcgcgctactggcgctcgatccgctggataaccatccgacgaaaattccgccgctgcccgcgttttatcagcccgcgctgtgggcgcgaccgctgctgcgggaaaatggccttgccttgccggacgacgcattaaaaacgctcggcgaaatgctgcgcttcccgtcagaggaaggtatttaccccggcctgcagcaggtaaaagatctctgtaccgtggcatcactcgccgccttcgcctgggatctgttcagcacctggcaaaccgccggcgcgccgtcgaaagagagctgggcctttaccgcgctcggcatcttcggtaacgacgataccgcccgcgcgctcaccccgctgctccgcgcctggccgggagaatcccaacataaacgcgctaccgtcgggctggatattctcgccgccatcggcaccgatatcgccctgatgcagctgaacggcatcgccgggaaactcaagttcaaagccctgcaggagcgcgccagagagaaaatcggccatatcgccgcaagccgcgcgctgaccgtggaagagctggaggaccgcctcgcgccggatctgggactcaacgacgacggaaccttgaccctcgatttcggcccgcggcgctttatcattagctttgatgaagccctcaggccttacgtgcgcgatgaaaacggcagccgccttaaggacctgccgaagccgaataaaagcgatgataaggcgctggctaccgaggccgttaatcgctacaaagccctgaaaaaagacgcccgcacgattgccgcccagcaaatcgcgcgcatggagtccgccatgtgccagcgtcgccgctggacggcggaaaacttccggcagtttctggttaatcatcccctggtctgccacctcacccgccgcctggtatggggagtctacgacgccgaaaacaggctgctggcctgcttccgcgtggcggaagacaacagctacggtaacgccgatgacgatctgttcaccctgccgcaaggcgcggtccaaatcggtcttccgcatctgctggaaatgcccgcggaagacgccgccgccttcggtcagctgttcgccgattatgagctgctgccgccgttccgccagcttgaccgcagctgctacaccctgacgaccgccgaactggcggccaccgagctgacccgctgggccgggcgcaaatgcccgagcgggcgggtaatagggctggcgaataaaggctggctgcgcggcgaaccgcaggatgcaggctggattggctggatgcttaaaccgctgggccagtggacgctggtgatggaaatcgacgaaggctttgccgtcgggttgctgccggatgaactcagcgccgagcagctgctgagcaaaatatggctgtgtgccgaaaatgcgcaccagtacggctggggcggcaacggcaaacagcaggccacgttttcggtgctggataacgtcaccctcagtgaattgattaacgatatcgacgggctgtttgagtaa

SEQ ID NO: 188558 - DNA, 3597 bp, Klebsiella oxytoca
atgcacaacacagcactcccgccatggctggcggatgacgcgcagctggagctatcctttaaaaagggcaaacaaccgttaagccatcgccgctggcctggcgacccggtaccgccgatcgaagagggacgcctgcaacgactggcgaacgatattccctcgcgctatcagcatattcaggcccttacgtgggactatgaaacatgcactgccgaatggcggcaggctattgcgcaggcggtcggctatgtgggcgaagccaaaccggcaatgcccccccgcgcgctggcggcgcttacccggctggcagaagatgacagtcccgggctactcgatgaaatcgtccagctaaggggcgtggaatatgccaccgaagtggtgattgaacggcaatttatcaccgtgacccacagcaatcttcagccacccagcatcgttttttctcatccgaaaaaagcgtaccagtacggttttcgctgcgatacttaccacgaattcgatctgcgtctgcgaaaacacctttcgctggctgaagaggcgatctggctacgctgcgctgacaaacttatccgcgcgctccctgatatcgagcttaatcgtaaaccgtttattgccctgctgttgccggaacgaccggacgttgcgaatagcctgctcgacgctgataaatacgccagccgttcatcaagcgagtggttgaaagcggtagcgacagatcctgctaagctggcagtactggagcaatcctgctggcttgatgtctttaccgattgtcaggccagcgagatgtgcgacgaaaaccgctacggttactccgcctgcgcggccctgctgcgcgagcaggggctggcggcgatccccaggctggcgatatatgcgcaccggaatgactgcggcagcctgctggcgcaaattaaccatccgcaggctatccggctgctgctgctggtggcggataaaaacaaacccagccagcagcgcgtgtcaacattcgccaaaaaatatccccatgccgctctggccgctgtagcggaattgctggcgctgccggaaccgcccgctcgtccgggctatcctgagatcgcagagaaaaagcgtccgcagcagcagaaaaagcgtgaagaaagctggagaatgctgctgcggacgctgctcaatacgcatcctcagctggctgagcaggttactccctggctaagcacgaaggcacaggaacttctggcggccagccgaccatcgatgccttcagacgttacgctggcaaccgatcgctcctgcctgccggagatcctgcgctcgccgccgtggcgcagcaaaaagaaaaaagtcgcgcccccgcgttttgcgctaacgtcgctgaccgttgcgcctcaggagcactggcagccaggagagcgggaagcgctggctgccagcaaacccgcctgtttctttaataaccttccgctcgatgaacgtctcgccagcataggttgcaccatcgtcatgcaggagctgggctttcagagtattgaatacctgttccaccagtacacgttatgcggcaagcgggaccatttcgatacggagaaatattttcatcgctatgtctggtggggcaacgcctaccacgcactgcaaaacttcgatatcgctacgctactggaggcatggggggattacctggtaaaggcctacaaccctaacgactgctggaatctttatctgcttatgcagttgcctcgcgagcgggcgctggtggcctggcagggcatcaatgccgctaactttagatttgtcggcgccgaatatgcgctgagcattctcgggaccgatgccctacccggcctgctgctggcgctgcagcatcggccaaaggagatcttccccctgctgacgcatctcggcgcaacggagctggcgctaccgatggcccgcgtctggcgacgcttgcaggcgcacagccaactggctcgtcagtggctcctgcagtggccggagcacgcagccgccgcgttaatcccactggcgttcgataaagcgggcgatagccgcgaggcggctattaacgcgctgcgtctgctgtaccaggaaggccaccatgaacggctgaaagcggtagcacaacgctggaacgaaccggcactgtggacgaagctggaacagctgctgacgcaggatccgctggacaactaccctgtccgcattccaaaagtgcctgacttctggcaaccgacgctctggcgcaggccgcggcttatcggcaccgaccagccgttgaccgacgatgcgctggagatcttcggcgaaatgctgcgcttcgcccagggcggccatcattacggcgggctggatttagccaaagccgcctgccagccccaatcgctggccgctttcgtctgggatttatttaacgcatggcagactgccggagccccagccaaagataactgggcgtttcaggcgctggggatttttggcgatgaagcgacagtgcgtgatttaacccagcttatcctggcctggccgcaggaagggaaatccgcccgcgccgccagcgggctgcatcttctcacccgcatcggcagcgatatggcgctgctgcagctgcaccacatcgcgcagggcgccaaatcccgcccgctgcgcgaaagcgccaggcagtctcttaaagaggtcgccgaagcccgcgatctcagcgaagagcagctgcaggatcggctaacgcctacgctggggctggacgatccccaaacgctggcttttgattttggttcccgcggcttttatgtccgttttgatgaaaatctgctgccggtgatttacgaccagcagggagcgcggcaaaagagcctgccgcgcctgcgcgccgaagatgaccaggtaaaagccgcggaagcgctggccaggctgaaaggcctgaaaaaagacgcagcccaggtggccaaacgcctgctgccgcatctggaaaacgccctgcggctggcacggcgctggacgcgaacggagtttcaatcgctgtttgtcgatcatccgctgaccaacaatcttacccggcgcctggtatggggaatctacgccgccagtgaaccccgtcgcctgctcaacgcctttcgcgtcgccgcggaagaggaattctgcgatggccaggatgaccctatcgctctaccggaagaggcgctgttcggccttgctcatccgctggaaatggatgacgcgacgcgggcagcatttagccaaatttttgccgattatcagctattgccaccgttccgccagctaacgcgccagacggtgcagctgctggcggaagaaaccgcccgcagcgagcttacgcgctggcagggaaaatcaacaacctgcgggcaattattgggcatccgcagtcgcggctggtggcagggcgctgaaaaccgtttctgctacgatgtcgggcggcatcgactgattctggaaatcacgccagggttcgtgcactacaacatggatgcgaaggctcctcagcggtttgccgccatcagactctatgatggcgaacggcccgctgcgttctcacagctcgatccacaggatctcagcgaggcgctaagcacgattgaggtcattttccgtggataa

SEQ ID NO: 188559 - DNA, 2286 bp, Klebsiella oxytoca
atgccagaacagccgttaatcatcggcgttcgtcaccacagcccggcctgcgccaggctggtgaaagaacgaatagaacgcgtgtgcccgcgctacgttctgattgaaggtccggcggattttaaccatcgcctggacgagctttttttaccccaccaacagcccatcgccgtctacagctactgccagcagcagcatggcggcgcggcaggacgcagcgcctggacgccgttcgccgaattctcgccggagtggcaggcgctgctggccgcgcgggcaacgggggcgcatatccgctttatcgatttacccgtctgggcgcaggacgacaacgacagcgatccctctgacgcccgccgcgccgatgaccatcagcgcctgctcgaggtcagcggcatggagaataccgacgcgctgtgggaccatctgttcgaagatgaaaaccagcgcgccgggctgaaacaggcgctggagacctggtttgtccagctacgcggcgacagcggcggtggcgaaaacagccggcgacgggaagcttatatggcccgctggctggcatgggcgatgcggcaaaataacggcccggtggtggtggtctgcggtggctggcacgctccggcgctggctaccctgtggcggaactgcccggcgcaggagcaggagccggcattaccgcctccgccgacgcccgatgccgtcaccggctgctatctgacgccgtacagcgaaaagcggctggacgtactggcgggctatctttccgggatgccggcgccggtctggcagcgctggtgctggcagctcggtcagcggcaggccggggaacagctgctgaaaaccctgctcgcccgcctgcgtcagcatcgccttccggcctcaaccgccgatttggcagccgcccatctgcgcgccatggcgctggcccggatgcgcggccatacccagcccctgcgctgcgactggcttgacgcgctggcgggctcgttaatcaaagaagcgctaaacgccccgctgccgtggagctatcgcggcgccatccatccgcaaaccgatcctattctgctgaccatcgtggatgcgctggcgggggcggatttcggcaagctcgcgccgggaacgccgctgccgccgctgccgcaggacgtcgaacgcgagctggcgcgcgtcgggattgccccgccggcgaatctgaacctcaaccgctttgcgcccgacggattagcgaaaagtcaggtattacaccggctggccattcttgagatccccgggttccagcagcgaaccggcagcgcggtagccctttccggcgatggcgaagagcgctggggagtgtttcgcaccatggaacagcatgccgtcctgattgaatccgcccgctacggcgcctccctcgcggatgccgcgcgacggcggctggaagggaatattctctcctcctttggcatcaaaagcctcgccgccagcctcaatcaggcggcgctggcggggctcgccacctttagccagcagatgctggaacagctggcgcagctgattgccgaagagagccagtttgccgaaatggggccagcgctggaggtgctgtatgccctctggcagcgggatgacatcggcggcatgcagaacgccgccgtgctggaaatcacgctcagcgcggcgcttgaccggacgctgtggctctgcgaatccagcggcgtcgccgacgagaagcagtttcacgcccatctgcatagctggcagaccctgtgccacatcctgcgcgatctccacagcggcagcgttttaccgggcgtttcgctcagcgccgctctcgcgctgcttgaacggcgaattcacgcagccgatgccgcaccgctcgaccgcggcgcggcgtttggcgcgctgatgcgtctcgagcaccccgccgctaccgctgaaacggcgctggccctgctgacgcggctgcccgcgcagcgtctgggagaggcggtacatggcatgctggcgttggcccgctatcagcttgcctgtcagcccgcctttatcgccggcttcagcgagcgtctcgcccgtctggcggaagaggagtttattctcgcgctgccggatttacgcgcggcgatggcctggctgccgccccgcgaacgcggcgcgctggcccgccaggtgctcgatcactatcacatgaccatgctgccgacccatgcgctacaggcgccggtttcctgctcgccgcagcggttaatccatcaccagctgttggagcagcaggcgctggcggcgcttcgccactggggaggacgctaa

SEQ ID NO: 188560 - DNA, 2007 bp, Klebsiella oxytoca
atgatgcctttacgccctgaattactggagctcacgccgcaggcgctcaccgcgctgagcaacgccgggtttgtgaaacgcgctcaaaaagagctggataacggcaatatccccgcgctggagcaggatgaggccggtacgctgaccgccgtttttcgcgatggtacccgtacccggctggaaaaagatcgggcactcaaagagtctagctgtacctgcggcgctagcggcatgtgccgccatcgcgtgatgctgatcctgagctatcagcgcgccaacgccggtcacgcggctcctgaaggggagccaaacgctgacgagcgctggcatcccggcctgtggcaggaggagctggccaccctgcccgagtcgattctcaagcgggcgcagcagctggcggataaagggctgacggtggaattgttctgccgacccaacgaaacgccgtcggcaaagctgccgatgagcgatgtgcgtttttattcccgcagcagtatccgctttgcccgctgcgactgcatcgaaggctccctgtgcgagcatatcgcgctggcggtgcaggcctttaccgacgccgaagcccaacagccgggctttacgcatctggtctggcaaacccgcagccgcagggtcgccgcccgcggcggaccttttgctacgcccgagggcgaagcctgtcgacaaagcctccgtcagctaagccaactgctgtggcaaaacggcgtcagccagccgccaatcagcttcgaagccgcgttcacccgcgcgcagcgcgcagcgcatgcggccaactggcgctgggtcatcggcgcgcttgccgagctgcgcgaaggcgtcgatgcctgccagcagcgcgccagccactacgtgcctgagcagctgctggcccagctcgcgggccttaatgcccgtcttgagagcgccgaccgaatggcgcagcttgccgatgccggccagacgccgcccctgccgtggcgcaccgtcgtcggtcagggtattgccggtgaagcgcagctcgatcatctgcggctgatttcccttggcatgcgcggctggcaggataaccagcagtacggcttacgtctctggtttagcgatccggataccggcagcattttgcatctgtcgcaccgctggccgctggctgaacgggcgcaaaatccgctatggcagcgccgcctgtttacctttcaggccggcatactggcgggcgggcaaatcattacccggtcagcgcgccgcactgccggcggcgagctgctgctgggcgcccgtcagcgcctgagcagcagccttccgctcaccgaagatgcctggcttttgctcagcgcgccgctgcggcagccgggcgccgcggccctgcgtgagtatctgcgccagcgccccccggcctgggtgcgcccgctcaatcaggttgataacctgtttattctgccggtggaggcctgccttgccgtcggatgggacgccgcccggcaaacgctggatgcgcaggtcctcagcggcgtgggagaaaacaacgttttgtacttgtcccttcccgcctccgccagcgcgccgtatgccgttgagcggatggcggcgctgctcagacaagaggacgatccggtggtgatggtttccgggttggtcagctttcatcacgggcagcttagcctggagccgctggtcatgatgacccgtacccgcgcctgggcgctgaacgccgagccgcttcccgtcgcgccgttgcctgttggcgatgtactgccgccgcgctcgccggccctgagcctgttgcagcgcgcccggacgctactgatccagatagcgcacaacggcctgcgctatcagcaaaagagcctgtttcgcgaggccgccacgctgggcggcgagttgacgaaccagggttttagccatcttgcgcgtctgcttcagcaactgggcgagagcgaaacggccaccgccgaggatacgctcagcgccatcgcgcaactctgtatacaattagagatgatgattgattaa

SEQ ID NO: 188561 - DNA, 1191 bp, Klebsiella oxytoca
atgaaagagaaattatggactaaggatttttgggcaataactattattagttttattatcttctttgttttctatgtgcagctaacgctgctccctatttatattgccgataatttgcatgccaccgctgacaaagccgggctgctggtaacctgttttctgatcgcggcgattattattcgtccgtttgccgggcagtgggtagggaaatattcgaataaaacggttctgatgctttcttctctggcctttttggtagtgactgcgttatatccgctttgccattctatcgaagcattgctatttattcgcgtgcttcatgggatcacttttggggtgataacaacggtgaagggaacgatttctgcgcggttaataccggcctcccgacgtggagagggcatcagttttttctcattagcgatggggctggcgatggtggtgggaccgtggatcggtctgaatatggcgcggcatagcgcgtatattgaagcgttctggttgtgcaccggcgtctcgattgtcagcatcgtgctggcgctgattgtggccgtgccgccggtaattcgccatgcagacggttcaaaaccgaagctgggttttgctgctatgttcgatcgcgcagccatgccgtttgccctggtcaccttctttatgacctttgcctacgctggcgtttctgctttccttgccctgtatgcccgcgaattagatctaatggccgccgcgagtaattttctgctgtgctatgccatatttctgatgatctgccgtgccttcaccggtaacgtctgtgataaaaaggggccgaagtatgtggtttatccctgcctgctcgccttcactgtcggcctggtggtgctgggctatacccacggcagcatcaccatggttttatctggtgcgctgatcggcattggctacggttccgttacgccaatattccagacgcagatcatcagttcggtagagccgcataaaatcggcgtggcgaactcactgttttttaatgcaatggatgcgggactggcgttgggcgctttcgttatgggcttgatggtggatggcgtgggctatcgttcaatttatctgatgggggcggtactggtggtacttgccggcgcgctgtatatcctgcagatgaaaaaacgcggcgacgttaagctggtctccgcgcacgaagtacattaa

SEQ ID NO: 188562 - DNA, 849 bp, Klebsiella oxytoca
atggtgcttgaatgcggcgggtttaccgaggcgggaaaacgcctgtacatgacacaatcagccgtcagtcaggcaattaatgcactggaagaggagctaggggtcgtgattttggtacgcgagcggcgaaaggccatcacgctaacggcagtcggtgaacggattgtctcccatctgcgacggctggcgcatgaggtcaacgcggtgaaagaaatcgccgagcaggaaaaacagtcgccgttacgattactgcgtattggctgcttccccagtatttgcgcctgcattttaccgcaggtagtgcgctattttgaaacatactacccgcagattaaaattattccccacgaagccaacagtacggaaattattgaatccctgcgccaggataaaattgatattggttttgtccactctccggtacccaatatgtattccctcccggtctacaaagataaattcaccgtcgtggttccggaaaaccacccgtttgcacagcgcgactccgtaaagcttgaagagctcttcagcgagccgttaattaccagtacaggccgctatgagctaagtattatgacgttatttaaagagcacaatattacgcccgagattaaatatgaattcaaccacccggcaacggccatcagttttatccgccagggactgggcatcgcgctgctccccgaactgacgctcaaagcgctggagcatccgctgcgttccgtggccctggagccagccttttatcgacatatttctctcattgccaaccaccctccagtgacgggcagccccttgcagatactcaatgagtgccttcatcaactggtcacagaaggtaaaatttaa

SEQ ID NO: 188563 - DNA, 1521 bp, Klebsiella oxytoca
atggatatctggatttatctgtcgcagggcttcgccgtcgccatgacgccgaccaacctgctgatcgcgctgattggctgcttcgttggcaccatcgtcggcctgctgccgggcctgggcccaattaacggcgtggcgatcctactgccgctggcctttgccctgcatctgcccgctgaatcggcgctcattctgctggccacggtctatataggttgtgaatacggcggacgtatttcatcgatcttgcttaacgtgcccggcgatgccgccgccattatgaccgccatcgacggttatcctatggcgcagcaggggcgcggcggcgtggccctgtcgatctccgccgtcagctccttcgtcggttcaatgatcgctatcggcgggatgattctgttcgcccccatactggcgcagtggtcgctggcgttcggcccggcggaatatttcgccctgatggttttcgccatcgcctgcctcggcagcatgatggcgcaaaatccgctcaagtcgttcctcgccgcgttgatcggtttggggctggcgacggtgggcgttgatgccaataccggggtgtatcgtttcactttcgacagcgttcatctctccgacggcgtgcagtttatcgtggtggtgattggcctcttttcggtttcggagatcttgctgatgctggagagcaccagcggcgggcagaagctggtgcgcaaaaccggccgtatgctgtttaacgctaaagaggcgggacagtgcgtcggcgcgaccctgcgctcatcggtggtgggtttctttgtcggcattctgccgggcgcgggggcgaccattgccagcgccatcacctatatgaccgagaaaaagctcagcggcaacagcgacaccttcgggaaaggcgatattcgcggcgtcgcggcgccggaagcggcgaataacgcttccgcctgcggctcgtttattccgatgctcacgctcggcgtccccggttccgggaccaccgcggtgatgatgggcgcgctgaccctctacaatattaccccggggccggcgatgtttaccgaacagccggatatcgtctgggggttaattgccgcgctgctcatcgccaacgtgatgctgctgattatgaacattccgctgatcggtctgttcacccgcatgctgaccatcccgctgtggtttctggtcccggctatcgccgccgtgtccgcggtcggcgtctacgcggtgcacagcaccaccttcgacctgctattgatggttgggttgggcgtgctcggctacatcatgcgtaagatgcacttcccaatgtcgccgctgatcttaggcttcgtgctgggggagatgctggagcagaacctgcgccgcgcgctctccatcagcaacggcaacgtggcgattctgtggcaaagcggcgtgaccaaaacgctcctgctgctggccatcgcggtgattgttgtgcccccgctgctgcgatatatgcgtaaacgtcagcaaaaaacgcccggcgatattccctcctcctga

SEQ ID NO: 188564 - DNA, 759 bp, Klebsiella oxytoca
atgatcctccacgcgctggccgaacgcggccagccgggccatccctggctggtctttttgcacggtttttccggcgattgtcacgaatggctgacggtcggccaggcgtttggcgcgtattcgcgtctctatattgacctgccgggccacggcggttcagcgaatattgcggcaaacagcctggctgaggttggtcatcttgttgagaaaacacttaatagttacaacatacttaagtactggctggtgggttactcccttggcggacgggtggccatgtactttgcctgccagccgcgcgaagggctatgcgggctggtggtggagggggggcatccggggttaacggatgaaaaccaacgcttgctgcgccgccgcggcgatgccgcctgggctgaacgctttcgccgcgagccgctgacccaggtgtttgccgactggtatcagcagccggtctttgcttcccttaatgccgcgcagcgggcggcgctgattgcgctacgcagccgcaataacggcggtgcgctggcggcaatgctgcaggccagctcgctggcggaacagcccgatctccgcgaaccgttacgggctcgcgagttcccttttcattacctttgcggcgaacgcgacggcaagtttcgcgccatcgccgatgagctatcggccaccacgcacgtgattaatcatgccggacacaatgcgcatcgggaaaaccccgatgctgtcgtggcttgtctggcgcagtttttagcgagttaa

SEQ ID NO: 188565 - DNA, 1671 bp, Klebsiella oxytoca
atgtcagtaagcgcatttaaccgacgctgggcggcggtgatccttgaagctttgacccgccacggcgtgcagcacatctgcattgcgcccggatcgcgttcgacgcctttaaccctggcggcggcggaaaaccacgcgtttattcaccatacccactttgacgaacgcggtcttggccatctggcgttagggctggcgaaagccagcggccagccggtggcggtaattgtgacctccggtaccgcggcggctaacctctatccggcgctgattgaagccgggttgaccggcgaaaaactcattttgttgactgccgaccggccgccggagctgatcgactgcggcgcgaatcaggctatacgccagccgggcatgttcgcctcgcatccgtcgcacacaatatcccttccgcgcccgtcgcaggatatctcctcccgctggctggtctcgaccctcgaccaggcgctcggcgcgctgcacgtcggcggcgttcatattaactgcccgtttgccgaaccgctgtatggcgatatggacgacaccggcgccgaatggcagcagcagctcggcgactggtggcagagcgataagccctggctgcgtcagtctctgcagacctcaagcgaaaagcagcgtgactggtttttctggcgccaaaaacgcggcgtagtggtcgccggacggatgagcgcggaagagggcctgaaggttgccgagtgggcgaaaacgctcggttggccgctgattggcgatgtgctctcgcaaaccgggcagccgcttccctgcgccgatctgtggctcggcaacgcaaaagcggtcagcgaactggcgcaggcgcaaatcattgttcaactgggcagcagcctgaccagcaaacgcgttttgcagtggcaggctacctgcgaacccgaagagtactggctggtggacaacctgccggggcgtctggatcctgcccagcatcgcggtcgtcgcctggtctgcgccatcgaccgctggcttgagcagcacccggcggaaaaacgccagccgtgggccgtcgttattcctgaactggcgcgccaggcctggcaggcggcggtggccagcagcgaggcgttcggcgaggcccagctggcgcagcgaatccggcgctatctgccggatcaagggcagctgtttgtcggcaacagcctggcggtacgtttaattgacgcgctgtcgcagctaccggcgggttacccggtctacagcaatcgcggagccagcggaatcgacggcctgctggcgacggcggccggggtgcagcgcgccagcgcgcgccctacgctggctatcgtcggcgatctgtcggcgctttacgatctcaactcgctggcgctgctgcgtcaggcttcagcgccgatggtgctgattgtcgtcaacaataacggcgggcagattttttccctgctgcccacgccgcaggcgcagcgaagccagttctatctgatgccgcagaatatccatttcgcccatgcggcggcgatgttcgatctgacctatcatcgccctgcggactggaatgaactggaacgggcgctggacgttgcctggcgagcgcccggcgcgacgctgattgagctggtggtcaacgaaaccgacggtacgcaaactttgcagcggctgctggcgcaggtgagtcagctatga

SEQ ID NO: 188566 - DNA, 510 bp, Klebsiella oxytoca
atgaaaaaggcgctatggttggcattgttgctgcctgttttttcatcctggggcggaatacccttaaatataaaaggcacgatttattattatccctgcgatgtgagcactgatacaaaatatcaagaggtgaatttcggtacgctggtgaaaacaaattttcaggcggccggctccgcttcggagtggaaaacctttaccttaaatgtcgaaaactgcccggcaggaaccactaaagcgacggtgaagtttgacggcgtgacggacggcgatgacgccacgcatttcgccaatgtggcggccagcgatgcggcgcagcgtattgcgctgcaaataaccaatagcgaccattccacgacctataaaaatcaggacaagatgacggttgcgattaacagcagtacgcaaaagggcgtttttccgctggctgcccgtttatattcaactcagggcggagcgacggcgggtaactttgaatcggtggtgcagttaacatttacctatcaatga

SEQ ID NO: 188567 - DNA, 1044 bp, Klebsiella oxytoca
atgaaacgatttttatgggcaatattagcaggcctgtcggcgctggcgctatcgccgcaggcgatggcggcaaccgggtggtgtgagacgacttcggctggtcacgctccatttcgcaatacattctcatttattgaaacctttactaatccctcgcaaaaccaggctgggatgacgtttcctcgcctgtaccgttggaataccgggggaaattataatgcaaaatgtgattgtggcagctatatcactgggcctacatattttaaagccacggtacctgggatggctgcgacgcaaagtcgaggcggggtaaattattatcagcttaataaatatctggaaattgccagcgagctatatattgccgggggcgtgaatgactatttcccaacacctatcgacaataaaagcaataacaataaccagggctttgcttgcaatgcgggcggttcaacttttcagagtggttcagtgggatacgtttcgctctattttactcgaccatttgttggtcaggtgactatccctccgacggttatccttaatgtctatggaacaagaatctctggaagctacggtgcaaatccattaacgcagatctcaatgagcggctcggttacggtaccgcagtcctgcgaaataaataccggtcagccaattaacattgattttggcgatattgctggcaataacttcaaaacggccaaccagatgccgacgggcttcactccttacgaggtaaatatgaccgtggcctgcaccaatatttcggcaggggttaaaattgctctctcattccagggcacggctgactcccatgacaacactgcgctggtgacgaccaatagcgatattgcggtgcggattgaaagtattaccggaaccaaaattccagtgatttcagggctgctgccggtcgatctgaactattcgacccagaccggggataccactatgaaagtctatccgataaataccaccggtaatttacccgctggcggtgggtttaccgccacggcaaccattcaggctgaaattgaatag

SEQ ID NO: 188568 - DNA, 528 bp, Klebsiella oxytoca
atgaaaaaaacattacttgctgctgttgttgccgcctgcgcgacgatctctggtgctgcgctggcagatgacggtcaggtgaagtttattggcgacatcattgatgctggttgcgacgtggtcaacgacctgtctaacccgctggaagtccaaatgggacagatcgccaagacggcgtttaccggtaccggttctactgcggctgagcaaggttttgatatccaactgaaaaactgcccgactacggttactaaagcatcggtactgttctccggcactaatgtcggcggcgacaatagcaaactgcagctgaccgcagaacctaatgtcgctacaggcgtggctctgcagctggttgatggcagcactaacagtaccctgccgctgttcacccgttctaccagcctgaccatcccatctaccggtgatatcgatctgccgttccgcgttcgttatatccagaccgacacaactgttgttgctggtaaagctaacggtagcgctaacttcactatcagctacaactga

SEQ ID NO: 188569 - DNA, 255 bp, Klebsiella oxytoca
atgaaggaacatccggataaacatatcagagccgctattgactacgcgctggcgcgcggctggatttttctccctggcggcaaaagcgcgcactgttttgggcgactgatgtgcggaacagcccaccatcgggaacacatgatgagcatctggtcaacgccggcggcgcccatgcaccatgccaggcaaatcatccgcatggtcgatcgctgtctggtacccgtatcgggtcagattaaccacaagaaggattaa

SEQ ID NO: 188570 - DNA, 774 bp, Klebsiella oxytoca
atgattagtaaaaccgaaagaaatatatggaaacaaaacaatatcccgccgttagaatattgttccatttcccgcgcgcaaaagctgctagattgtgagattgaagatttactccactggcatgatatcggtgcaataaacctgtgcgtaaaattaactagcatcacaggaacgttaaatattgctctgactcagaataaagaaagcataaacaaacgctctctttatagtgtgaatcaaagcgatactttaaaaaaaaacgaagcgacatggtcgtattattccagggtagatcgagttttagagctgaaagatagcgtttcggctatagagacgcagcaaggtaaccatgcaatacaaatccagcttaaagcgattgtttctgggctttggtatgttacctcaaaaaatcttggagaactgctagaatgccccgaacacaaccatttagcaaaagaggttagtgcaataaatcctgctaacaacactcttttttgccatttttctccagataatagtagtaatctgccaatatcgatcaataaaatttacattatcagcaaggatgtagagaagatttatgagcataccataagcagtcgcccccttgagctcgccagggagcccacgattattttaaataaaaagatcattaatgaacctcaattcactttacaaaataaaacccttactgacttcattgatgaattcatgaaattaaacccagagctcgataagaaatccctctacgttaatgagaatcttgatgtgtaa

SEQ ID NO: 188571 - DNA, 1398 bp, Klebsiella oxytoca
atgcaaactgaaccgcacgtggcgatcgtcggcggcggatttagcggcgcggcggtggctattcatctcctgcgcctggcgccggctggcgtgcgggtcacgctgctggagccgcgcgaggtgcccggcgcgggcgtggcctactccacgaccgaaccgagccatcggattaacgttcccgcggcgcggatgcagcttgccggggaagaggagggcgcgttcgaccgctggtaccgcagccagcctgcttttgctgatgatccgcaggctctgctggaagacggcgctgtctatccgcagcgcggccagtttggccgctacgtcgcccagcgtttcgccgaggaggcgagcgccagcggcgggcgtctgacgcatctgcgcgagcaggcgctaaggtttaaagatggcgagattatcaccgatggcggtcatcggctgccggccgatctgctggtgctggccatcagccatccgccgccctcgctgccgtcgctggcgacgccgttcgcgacccatccggcgctcatcgctaacccctggcgaacgggcgtgctggacgctatcgcgccgcaggcgagcgtcgcggtcatgggcaccggcctgacgatggcggataccatcgcgacgctgacgcggctgggacatcgggggccgataacggcattttcacgccgcgggctcctctcccgcagcaacctgagcggcagcgctgacccttgggaaggcgagtatgcccacggatcgctgcgccagcggctgcggcaaatccgccgggatatcgaccgcgccgcggagcgggggcaggcctggcaggtggtgctggacgcggtgcgtaatcaggggcaggagatctggcaggcgctgtcggtggccgatcgtcagcgcttcctgcgtcatttacgcagctactgggacgttcaccgctatcgtatcgctccccaggtcgccgggattcttgagcagcgccagcgcgacggcagcctgcgggtgctggcggccaggctgacggcgctggcagacgacgcgcaaaaattgacgctaaccctctcgccccggggcggtgaagcgcagtgggtgagcgttgaccattttattttaactaccggcccggcgcacggggccctcaccaacagccagccgctgctgcgccagctgagccaggaggggctgattcgcgccgacgcgtttggcctcggactggacgtcgatcgccgctcgcgggcgattggccgggaagggcgggccgcgcccaatctgctggtctccggacctgccgcgcgggcccatttcggtgaactgatggggctaccgcaggtggccgaccatgccgccgccgtagccgccgaagcattgctggcgctgggcattaaacaatccgcccgatgtccggcgttctga

SEQ ID NO: 188572 - DNA, 2556 bp, Klebsiella oxytoca
atggtgcaggataatatccatagtattaatgattatcttaataaactggggcttcatcatagagaacaggcggcacaattttttgcatggctattatgctggcatgatattggaaagtttgcccactcttttcagcagctttatcgtcatgaagagttaaatgcgcaggacgaatatataaaacattatgaagccatcccgcatgcgactctgggatattggctctggaatgcttttttaagcgagtgctctgaactttttcctgaatcctctctttctgcccgtaagttaaagcgcgccattgcgctttggatgccccttacgacaggccatcatggtcgaccgccttcttcagtaacagaactaaaaaattttcgtcagcaggataaagaagcggctcgtgattttcttatcagggttaaatcattatttccactgattgaggttcctgatttttgggatgatgatgacggtattgcgctttttaaacatctctcatggtttatttccgctgcgatagtactggctgactgggtcggttcttcaatccggtatttccctcgaatcgctaaaccaatgggcgtcgaggaatactggcagcagcatgcgctggttaaagcgaaagtagctataaccgttttccctccttcctctggcgttgcccctttttccggaataaaagcgttattcccttttattcaacagccaacacctttgcagaaaaaagcgcttgaactggatattgataaagaaggtccacaattatttattcttgaagatgtgactggcgctggaaaaacggaggccgcgttgattttgacgcatcgtctgatggctactggaaaggcgcaggggctctattttggtctgccgacgatggcgacggcgaatgccatgttcgatcgtatgttggagagctggctggcgctgtatcaaccgggttctcggccaagtcttgtcctggctcatagcgcgcgtggattaatggatcgtttcacgcagtctctctggtcgggagatttatcaggttcagaagagcctgacgatcttctgccttccagccaggggtgtgccgcctggtttgccgacagtaataaaaaagcgctgttagctgaagtgggcgttggtacgcttgatcaggcaatgatggcggtgatgccgtttaaacacagtaatttacggatgctggggctgagccataaaattctgttggcggatgaaattcacgcctatgacagctacatgtcgcggatccttgagtgcctggttgagaagcaggcaagcgatggcaataccacgattctgctttccgccacgctatcacagcagcaacgggacaggctggttgctgcttttgctaagggcgcacaggggcgggtagaagcaccgttattaggccatgacgattatccctggctcacgcaggtgaccggttcgaaggtggtttctcaatatgtggagacccgtaaagaagttgagcgcagcgtcaaagttaactggacgcacggcgaacaggagtgtcttgaacgcattgagcaagcgataggccagggaaaatgtattgcatggatacgcaactccgttgatgacgcaattcgtatttatcgccagcttctaacccgaggcgttgtaccttccgaaagcctcttgttattccatagccgtttcgccttttacgatcgtcagcgcattgaaaaccgggcgctggcgcagtttggtaaacaaggtgttgcgaagcgttgcggacaggttctgattgccacacaggtcattgagcaaagtctggatatcgatgtcgatgaaatgatctctgatttagcgccagtggatttgttgattcagcgagccggtcgtttacagcgccatatccgcgatcgtaatggcttattgaaagcttctggaagagacgaacgtaacccgccagagctgctgatcttcgccccagaatgggatgacgaaccgcaagaggattggttctcaaacgctatgcgcaacagcgcctacgtctaccccgatcatgggcgcctgtggctaacccagcgtgtgctgcgcgaacaaggggaaattcgaatgccgcagtcagcccgattgctgattgagtctgtctatggcgaagaagttgatatgccaccggggttcgtgaagacggagcagttgcaggaggggaaattctactgtgaccgggcatttgctaagcaaaacattatcaactttgcgccgggctacagccctgaatgcagtgattatctgccagagaaactttcgacgcgtctggccgaagagtcggtttcattgtggttggcgaaaattgtcgatggagcagttatgccttatgccccaggagagcacgcctgggaaatgagtgcgctgcgggtacgtcaggactggtgggataagcaccgtggagatttcgttctgcttgacggtaagcgactccagcagtggtgcgcggagcagcatcagaatcaggagtttgccttagtaattgtagtatcggatctggaaacgtgcggctattcagcgcatgaagggttgattggaaagatggaggtatag

SEQ ID NO: 188573 - DNA, 1059 bp, Klebsiella oxytoca
atgaccacatttattcagctgcatttactcaccgcttatccagccgccaacctgaaccgcgacgacaccggttcaccgaaaactgtggtgcttggcggtgcgacgcgtctgcgcgtttcttcgcaaagcctgaagcgcgcatggcggacctccgaactttttgaacaggcgctgtccggaaatatcggtatccgtagcggacgtattgctcgtgaagcggcgaagatccttattgaaaaaggtattgatgacaaaaagaccatcgagtgggcggcaaaaattgcggattacttaggtaaggcaaaagcagataaaaaagcaaaagatccgctgaccaacaccgagaccgaacaactggtgcatatcagtccggctgagtttgatgcggtcatggccctgacgcaccgtctggcggaagtaaagcgtgcgccaaacgaagacgagctggatttattgcgtcacgatcgtatggctgtcgatattgccatgtttggccgcatgctggccaataaaccggaattcaatgttgaagctgcctgccaggttgcgcacgccttcggcgttagtgaaacgattgtggaagatgacttctttaccgctgttgatgatctccggaagacttcgctagaggatgccggtgccggacacctcggtgaagccggatttggctcggcgctgttttatacctatatctgcatcgacaaagatctgctggtgaaaaatctgaacggtaatgaggaactggtgaacaaaacgctacgtgcctttactgaggcagcgctgaaagtctcgccaaccggtaagcaaaacagcttcgccagccgcgcctatgcgtcctgggcgctggcggaaaaaggcaccgatcaaccgcgttcgctggccgcggcattttacaatccgatcaacggcaccaatcagctggatgctgcggtaaaacgcattactgaactgcgtgaaaatatgaataccgtttacgaacagcagacatcatgtgtcgattttgacgttatgaaaaagaagggaagtatcaaagacgtactggactttatctgcgcgtaa

SEQ ID NO: 188574 - DNA, 651 bp, Klebsiella oxytoca
gtgtaccttgcaaaaataacgctgcataccagccagctattaccatcacagctattacaactggtggatcgcggtgaatatgcgatgcaccagtggctctgggagttatttccagaagggccggagcggcagtttctttatcgccgggaggagcttcagggggcgtttcgtttctttgttctttcccttgagcctcccgctgaaagtgagatttttgatattcagtatcgaccatttgcaccaacgttgatcgcaggacagaccctgtgttttagcctgcgtgctaacccaacgatttgtaaaggcggtaaacgtcacgatctattgatggaggcgaagcgccaggtaagggggcaggttaatggcccggatatgtggctgcatcagcagcaggcggcgcagggctggctggcgcgtcagggggagcaaaatgggttttcactgcgtgaagtgaatgttgatgcctatcggcaacagcaggttgtgcgggtgaaatcgcgccagatgatccagttcagtagcgtggattactccggcgtgctggtggttaacgaacccacgttattcctgcaacgtttgattcagggatacgggaaaagccgggcgtttggctgtgggttaatgttgattaaacccggagatgacgagtga

SEQ ID NO: 188575 - DNA, 378 bp, Klebsiella oxytoca
atgaatcgctatattgcggaagttattgcggcccacgtggctatagaacactggctgaatcagggggaagggagcgccgaagcgctgctgcatcgctttagcccggaatttagcatgatcccgataaacggtatgcgcatggaccatcagtcggtcagcgctttttttcacggggctcgcgccagccgcccgggcttgaagattgtcatcgacaatgccgccatacttgccgaatggcgcgatggcgcagcggtgctctatcgggaaacccacgctttacccggcaaaacggacaccgcacgctggtcgacggttcttttccgtctgcaggaagagaaaatcatctggctgcacctccacgagacggcgctcgcataa

SEQ ID NO: 188576 - DNA, 549 bp, Klebsiella oxytoca
atgcgtcaactcatcgcatcaatgatactcataggttcgctatccgcagctgctccggcgcatgccatcggagagctgatcggcggcgatttaaaattcaagggaaccgtcatttcccacggttgcagtatcgtgccttcgtcaaaaaacatcaccgtagattttggccagatttcaacccgcacgctttatgcggagggaaaatcgcagcccaaagcgtttgttattgaactccaggattgcagcaccgatgtttttaattccgtcaccgtgacctttagcgggacggaaaataccaatatgagcgaccgtctggcgattacgccggtcgcgcctcaaaccgccagcggtattggtataggttttgaagagagtaacggcacggcgattttgctcaatacgccgaccaccgccgtcgctatttccgatgccaacatgcagttaaattttaaagcttttgttgaaggtgaaccggacgccttgagtaacaaaaccctggaaaccggcgccttccaggcaacagcgaattatacccttaattaccagtag

SEQ ID NO: 188577 - DNA, 807 bp, Klebsiella oxytoca
gtgaagcggctgcgctatacccttgcggacgcccggcagtgggcggcgttttccggcgacgataaccccattcacttcgacctcgcggcagcgcgcgcgatgggcgacggccggctgagcgtccacgggatgcgcgcgctgctcgacgtgaagcgcgacgtccagtcgcggctgacgaacccgctcaccggttctgaacgctacctgaaatgcgtggttcgcctgcgcaggccgctatggtgcgatagcgactggctgctcactcccggcgccgcgaaaaatcgcgtcttgtccgccgcgtcggtcagcagctcgcaggatgatgaagtctgtttgtcatgccagatgagcctcgccgccgggccggaatcgctaacgggaaaacagcccagcgaacttgcaccaaagacgctgcttgcgctgcaatcccatttcaatagcgcctggcccgacctggcgcagtggcagtttcttgacgcgctgctgttccgccagcttattagcgatcccgcgctgctgcgccaggcgaatatcgcgactctgctcggagcgggggaaacctcgttgcagcaaatttttacccgctatccggtgctgcaaacccaccaggaggtggtgtttgatgttcatctcgcgggcaaagcgacgccgatctggcccgaatcgctatcgctctggctgctgccctcgctggtggtcggccaggttgagcagggcgcgctggtgcgcatcgcggcggcggcgcagctggataacctgataatgaccaatgtggtcacgctcaaagttggcccaatgaccaattga

SEQ ID NO: 188578 - DNA, 489 bp, Klebsiella oxytoca
atgcgtaaatacgctataatattcctcgccactgccctgatgctggtagtcgctgcgttcctctatatagatatccgcagccatgacaccttttcctgtaaatcacagtacgacctcacagaggatataaatgagaatattctccgctcacagggtttgctatccgctcagcttgctaataaccgtcttttaatcagtcttgagggattgctcaccagcaatggcgataaatacattgtctcccgcaccattgctatcacattaaaaagaaccactgcgaccagtcatctcttttatatcattgattcgcaaatcactcgccatcacgctgacaatacgcctgaaaatatcgcccggcaaaatctctttggcaaccaaagtaatgatcgaatcatctatatcaatcacgttaatgatgatactattttattcggtaatcaaacgtttccacaatatggttgccagcgtcagaatacaatcattgattga

SEQ ID NO: 188579 - DNA, 1605 bp, Klebsiella oxytoca
atgatgtaccataagggggaattgaatatatataatcttcgcggtcttgcgattttattgtctctctttacccttattatgatgtctcccgctcgtgctgagagaggagatttccttgataatatatcgaaactcgaaatcaacaatccgccggtctcagacgccgccagcggggattcggcgtcggctaaacaacataacgatagccgtgataaaaaagcaccgcaaaagcaggacgtcgtcagaaagaaagtgaatcagacgaaaactgaaagtacgcttagcgctttgcgcaaacaaaatgcggagctgagcgctgcggccaaagcggcggagaaaaagctcgatgaaacgacgcgccagctgtcggcgcagattgccgcgctgaaagcgcagcgtgggcagcaagagagcggcgatcctgccgccgctagcgcgctgatgaagaaaaacgccgagctgaccgccgccgccgacgcggcgcaaaaaaagctggatgacacgacccgcgacctgtcggcgcaaattagcgcattgaaggctcagtatgcgcagcgcgaaagcgggcagaaaaccgcgcttgatgcgctaacgaaaaagaacgccgagctggccgccgctgctgctgccgcgcagaaaaagctcgatgacacgacccgcacgatgtcggtgcaaatcgccgcgctgcaaacccagaaggagcagggggagagcctgcaaaaaaccaccatcgatacgctgatgggaaagaatctggaacttcgcgcagcagcaacagcggcgcagaaaaagctggatgagaccacccgcacgctatcggcgcagattgccgcgctgaaaactgagaacacgcagggcgaaagccagcaaaaaaccgctcttgacgcgctgtcgaaaaagaacgctgagctcatcgcggcggctgaaacggcgcagaaaaaatatgatgcttcagtcgctgcgttgaatggtaaaaataaagaattacagtcaacgctcgatagcctggccatcaagcaaagcgatgtaaacctggaggataaaagcaacaaaaatgcctatgcgctgggtgttttctacctgactcaggcgctatccgatgtgaataaaatggccgacaatgatgtcaaactgacaccttcagcgttggtttccgggtttaacgatgcctataataaaaaacttagaatgcaggaaaacgaaattgaaagcatcgtcaacatgcttaacgaaaaactatcgtctaagtacgttgatattgaaaaaagaatcatggctaaaatcaaaaacaaaaaatatgaggttttgcctaatggtgtctattttgtgattgataaaaaggggaaagctccgtacaagcagaatgagactttatccttgaatattctggagaaaaagctggatggtacgccgatacttaatacgatgaattcaacgatggtgtacgataaacaaaccgatccgctgctggctaaggtattatcatccggttttaaaggcggaacggtaacgctgtatggtcaggccggctcattatatagcaccacgccggctgacgtgaatcctgatactttaatctccatcaccttcgagttaatgccctaa

SEQ ID NO: 188580 - DNA, 411 bp, Klebsiella oxytoca
atgacggagggcgaaatagtgatgaatggtggatggatatacgttttcatgactgccagtgactacggtcgttacaaagtgggattcactaagcgtaatccgatgttgcggctcaagcaacttcgcacgggggatcccaagattggattcgaggtggccttttttattccagattcattaggtattaaactatcagcgttagaagcaatgcttcatgaagaactgggaccgtcggtcgaattctgggatgaacagaaatcagaatggttcaaaggtgaaccctctgatgtatggtatgaattgcaatctttattaacaacatttggatacgaagtaacagacttctaccagccatatgagaataagattgtgcgtttttgggaggaagaaatcatttctctatttagctaa

SEQ ID NO: 188581 - DNA, 1068 bp, Klebsiella oxytoca
atgaaccgaacaatccttctgctcttgccactattatttttagcatctatcttgatattttttttattagttgtttacggtatcggttctgaagcccttttgtctgttaagcttaccaacccaaaatttggagaatatctagctgctcttggcacatttggtgactttgtcggcggattaacaaatccgattattggaatggtcggttttttagcccttatgtttacgattaccttacagattagacagaataagcaaacctctgaacaatcctacgaatcaagcatattcaatctaataaacttacaaaataacatcattgagaacttggaatacaatgataataaaaaaagatctgcattctcagagtttcttgatgaacataaagaagatttcaatggtgtagataaaaacacggtcatgagacctcaccatacatatagcttagcgcgcataagttatgagagctttaacaataattcgaatgaggttttcggtcactattttcgaaatctttacactatactcaaaacaattgatgaacttccagaatgctttaaccgaaaaaaatattactcacgaattgttcgctcacaactttcaatgagtgaactgacagttttatttctaaactgtcttttcaaagtttgtgatgatggaaagtttgctgaattactgattaaatatcagatgttggaacatttaaaagtaacttcaatatctaaccctaaatccgcattggatattgaacctcgaaaattagattacaaaataggagacaaggcaacagtttcgatctatgaaatggcatattacatgtatggtgaaaaaaaattttcggcaaacaacttcgcaagtgaagaaaccacacatggtgcttttgggaaaaatagagcgaattgcctgaaccaaatacaggaaatggtattggtccaacctacgaacacgatcactgtttatggggaacggagcagaaaaccaaatcttttaaatcgttttatattaaagattaagtgggcgacttataaatggaaattaaataaaatggttaggaaaaaaccattttaa

SEQ ID NO: 188582 - DNA, 537 bp, Klebsiella oxytoca
atggtcactacacatgttttcatcgcggtcagtcttgatggttatatcgcccgacaggatggcgatatcgactggctgttgaagcgcgatgacccgactgaagatcatggctatgccgcattcatcgcagacaaagattggatcattatggggcgaggtagctatgagaaggtgctgacctttgacgaatggccttatgatcgacccgtgctggtgctttcccggcagctaaccgatacccccgtgcccgaggcgctgaagggaaaagtgcagttttcatgccgcacaccaagggaggctcttgctgacctgatggagaagaacgtgcaccgggtctatatcgatggtgggcagttaatacagtcgttcctgcgcgaaggtctggttgccgatatcgttatcacaactgttcctgtcctgcttggttcgggaaaaccgctattcggagtattaccccatgatatcgatttgacgctattatccagccgcagcttcccttcgggtctggtgcagtcgcactatcggctgacggcataa

SEQ ID NO: 188583 - DNA, 1152 bp, Klebsiella oxytoca
atgtccctccctacaaattttaatgatattcttcgtgtttttgaaaaagattacgatacagccaaagaagataatgccctaagtgcacgcggccaatttctgcaactttacccccttaatcacctaaaaaaaatgacgcttgatgactatgtcatcggcaaaggtacagcttcattttgtgcttatgttgaagtaaaaaccagaacatgggcaaatatgcaaggtgcgacggcgctcaaatttggtatttattatggaaaatcaaaatcagatccaaccgtccgctatcgttttactcagaaatttggcgatgatgatagtactaataaagaagttttcgctaatgttaaagacgctttactagacctaatacagtcagggaaagaattagattttagagcgattgacgagaaccccctatcccaaatgtttaaggctaaaatattgagcctttacttcccagaacactttataaacatttgcagcaaagaacatcttaaagatattgctatggaaatgggtataaaagagcaacagtttattagtaaatatcaacatttgttattcaagaaaaaactagagcataaaatcacccgaaactggagcaatccaaaatatatgtccttcctttatgcccagttcatacgtaaggatcttagcagcgctcctgctgttatagttaaaaaaccacaaaaaagaaaccatcccgaagtcaatttcgaagaaataacggaaaatcgtgatttaataggcaaaaaaagcgaagaatatgcattaaactgggaaaaaaaccgcctaatcggtctcggctattcaaaactagctgaggaaatagatgatcgccgtaatcgtccaacttatggttacgactttctttcttttaatgccccaggtgatgagcgatacatcgaagttaaatcaattggccgggatagaaaagagggagcattccgttttttcctgtcaggaaatgaactcaccgtttctaatttaagtaaccacagtaaaaactattatttttatcttgtacagtatgggaaagatggagagccatgcaatctatatgtaaaacatgctcaagatctttacactaatagtgaaatgtccccttgtgcttacgttgttaggttcgatctggaagaacctgcttaa

SEQ ID NO: 188584 - DNA, 285 bp, Klebsiella oxytoca
atgaaaaagtcaacaaccaaagactggcaccccgccgacatcgtcgccgccttacacaagcgcggtaccagtctggcgaaactgtcgcgggaagcggggctggcctcgtcaacgctgtcgaataccctgacgcgcccgtggccaaaaggcgagtggctgattgccatcgcgctcgacgtgcatccgtcagagatctggcccgctcgttacctcaattccagtaacaaacgtgaaccccgaaaaccactttaccccatgacaacaaccgacaactccgggacataa

SEQ ID NO: 188585 - DNA, 315 bp, Klebsiella oxytoca
atgttcaggtgcagggtggcaatcgtgattggtaaaagattaaagatttcaagagtcagggctgatctgacgcaagcggaactgggtgtactcgcagggctggatgaagaatcagcaagcgcgcgtatcagttcgtatgaaaaggaagtccatgcacccgatttcaaactcgtctgtaagctggcggcagcgcttgatgtaccggaagcgtatttttatgctgttgacgatgagcttgcagaattgatccttcagtatcaccgttttaagaagaataatccgggccgtacattactgttttcaccaaatccttaa

SEQ ID NO: 188586 - DNA, 276 bp, Klebsiella oxytoca
atgaattttgatacattcgagacaccgcagacaagatcggagttcgaacttcgatttcactgtttacacaatatgatgaagcaagggaagtttcatgttggccccaatgtatccatggagggagtgctaaaagttagaaaattgccaaatgggcgaattgattttctcagtgttaatgaacaagctcgactcaatgctaatatgatgtataaaatgcgaaatatgcagttacctaatagcatcaattctagtgatagccgggagcacactgattga

SEQ ID NO: 188587 - DNA, 5763 bp, Klebsiella oxytoca
atgttagataccgaaatgaaagtagcgacttgtaagattgaatgtggtgatgaatctggaactggctcattaatcgcaccgagagtagtcttaactgcaaggcattgtgtagtcaatgcaattgatagtgattcagagataagtgtagtttttgattctagctccccctctttagtaatgaaagctcatattcttggtcatgacataaagttagacatcgctctagtacaattagaagatgagtgcgatatttctcctatcaaacttagtggcatattacctttaggagggagtcgatattattcctacggctggcctgtcaataagttaacgatggggcatcgcttagggggaacaattattcagatatttgacagacctaagctatgtactgatatagaggtcagtatagatgaagcattgtctttagatgactacaaagggttttctggagcttcagtggtttgtaacggagcttgtgtaggtgttattagagtttctgtagaaaaaaccattggcgctgtttcgatatatagcatacgcaactttttgaaagtctatggattcaatgtcgaaactaatgacgatagttataagcgccaagatttagcatccagaaactcctttattaagcaatttgataaattcgctattgaccaaaacaacagctacctattcattaatggcgcacatggtataggtaagtcaacattttgtgaaacatatacccctttagattcttctttagaacatttcggtacatacagcttcaccccccgaaaaggccccaaaaatgccactcagttagcccaacctcaggagttctacaattggttaaacatgcaagtttcgattttcatcactggctctcctggacgtatagaaaatggtgattattcagagataataactaagacagaacaactttttataaagctcagtggcgcgttctcctcaaaaaatgtaaaaggagtgctgttcattgacgggttagacgaagttgaacgccaagatgccgaagctcttaacaagttcattggactattacctatgtcattacttccaggattggtaattgttctttctgcacctaactatgaacaatttgcaactagattaggtaaaagacttggaagtgagggatgtatttctatgccttctctcacagataatgctgttaaaaatttttgctacagagcccttacaagggagcatgttagtttaaaaactgtaaacttaatctgtgaacgagtccaaggacacccattatatcttcgctatttaatcgatctcgtcaactcaggcacgaacgatgatgagctcagtgaattgccattaattgatggcagcattcgaaaatactatgacttgctgtggctgaaactgatggaagataatgatgccataaatttactagcaattgttgttcgtttgcgctggggaatccctattaaccatttcgctaaaatgttgaatccaaacgaacagacgatattgattagcaccttagcaagaatacaacacttattgttgtctccaaataatacaacagtctatcactcttcattttctgactttttaattgagaagacaacattacgtgagcaggatattcaatcgcggctagttgagtactgtaaaaaacaaaaagacgaaaagtacagtgtacttaatttaatctaccatggactaaaatctgagggacaagataaagaacggttggtagctttatgtactcaaagttgggtggatgagtgtgtttatcatggggctgagcccgataccatccttgaagatcttaaaggtgttttgaaagtagcaactgagctaggtagtttagttgaaacagtacgaatccttctgcttaatcaaagaattcttttccggtacaatactctatttgcccaatcggctgatctaacagcaaatgcgttgatctctatagggaaagcacaggaagttctgcagcatgtcagtcgatataagcagttaattattccgctggaagaagctctgagaattgcattaaagctagttgactctcacaactatactgacgctttagaattattaagcattgttgagaagaacttaactgaagaacttgaacaagtgtctgacgggaatggactttcttatagagatttcctggatatttatgaccttcaattgcagcaatatcttctaaggattcgagctggagataaaagttcgcaagtatcaattgctaactttcaactttattggatgaaagccatcgacgagacttcaaaagatgaggagacaagcaagtatcttcgaagtaagatgatgacttacatgcttgccgcatcaatgtgcttatctggccgttacatttcccttgagcaaataaaaaaacattacgatggaccactagaagagatagcagatccaattgtattttcaactatgttatataagggtctatgtgatagatatggtgttagtactgataaggttctacttgaacaagtgttttctgatttaaagattttaattttagatcattgcaatggaaaagtaaaatttcatcctagtgtaattgatgtacttttatctctgggcgcacctaaagacatcattgtttctttagccaaaatttcaaatgataaaccatcaccgataacatttatcgcagaggataatatttctattgattactcaaaactagaagatggtatggcagcatggagactcaaggcgttcattgaccctgaatttacctgccctgacttatcccctatatttctccgtacttggttaaacgacctcaattcagtatgtaacgttgtggcttggtgcgatggcgctgctagaagattcaaagaacttgaagacgatataggtttaacaaatgtttggaaaattttaagtgaggatgtttttgactatttaaatttcagtctcgcacatcgagttcaatgggaagatgcttatggtttaccagaaagcatagttccagaaatatataaatcattaacaattctcattactgatgtgtatcctgataaaattggtgacttacttagctttgccgaggaacagtttaattctcaatacggcatctactcagagggatttagaaaaactttaaaactagtcctagaaaatgttattaacaagccaattgacttaaatactgaagatcaagtattcgccctagtggagcgttggaaagagttcgtagttactaacttggacaatagatatgaacttgtaccagaactacttagtattattccattttataacaaacttgatgcttcagacgaagcaaataaaatatatcaacttgttttatcattctcaatgggacctagttggtataaagaagatcagtttggactaagcgtcaccgttcttcagtctataagccatgcatcaagtttagcgtcaggtgaacttagcaaaatagctggtctactagatgctgctgctggagagatgacatttcagcgatttgtacggtacgctaaacgtgattttctcggggctttatgctcacgtaatgaattttctaatgcagtcaaatattttatacgacaaacatacggaaccttagggcaaatgtatcaagaagtaacccaaggtggcatagatagaatatctgaattaaaaggaacccgtttccctggaggagcactagatgaacaggattcaatgctgtctttaattaacccaataatctcagttgccgactggcaactctgttgggcgttattagaaagttttcaatttggtgactctcgctatattaatagatttgctgaaatctataaaattttgattgacaaagtatcagatgatgatgacgctctcatcatgatcatggagcgattagaaattatttgtgaatctgaatttgaaaataaaaaagagtgttcagaatttatcgttttgattgcctcatctataccagaacgatacaaagagacattcgaaattagattcgccaaacatataattttgcccgagaacaaaaaaaccaaagttaaaatacatgaagaaagtacggttaaggaagagaatcgagtaaatgagcatgaagaagatactgactctatatatatgccgggaatttttggatctagagttgcaatctctgaagccactatagctctagccaaagcagagaaatatctacgacgccgtaatttttcggaagcgcaaagagaaatcatttcaggattgaaattaattcaaagtggtgggtggtcaatatggacgagtcaagtttcaaatgtctcggatgcacaatctctacttttgaaaactaatggttcagtttctgatttagttaagctttactcacccttaatacttaatgaacactatacggaaaattggcggatagcaaatgacctaatcgagtggctagcaagttcttcttctaatgacgagcaagtagagcttcttcgtataactaacgagcacaccgaactcatggttggaactgcggacaaagaaaccacaggttataggtttctagatgagagaggggataatgagttgtctcattgcttagtcactttgcttcttcatgtaattgaccatcctctatggctaaggcgagaaaaagcatctgaaatgctaatttggttatcaagaagctatccagaatttgtccgattttttggccccaaagctttttcaatggatacaggcattcaccctgatgtcatatgcggtgctcttgagcaaatgcctataacacagcaaacttgggatacgttggctcaagagcttgactttaactctataaaacagaactgtaaacatgtcggaagatattccgttctaatacgcattgctagtcaagccgttataaaagattttaaatctgcatcagaagctttaagtatattaaaaagtcgattttccaatgctattgataaaagcggatttagagatgttgacttaccttcatgggccgaatgcattaggcccaattggttacaactaaagaaactaggtttaacaaactcctatgtattgactcaagctgagtcggttttgaaaaatgagtgcttaccattatccaaagaaatttgcttggagctagaacagttgttgtcagaaggatattatgcaaataccaagctccctaatcgttggtcggatagaatttgctatgcatttcaagtggcattacaagatgttgcaaacgaatcagaatataaacacattgaaaatattttcagaaaatataatcctacccgtttagataacctgagaattaagaattttgattctccggctttacattggcttcattccaaggagccaaaaccgctacatggagatagtatctacttagattattttgaaagggtctggtttaaaggtcaactgagattagtaaggttaacagcatacttatgtgataacccagaacatcttccgcttccttcagggcgctttttatcactagataagccttcgctagataagacttgcatgattgacacttgtgctaatgttgatgctttacctgcgtattttggtagcttcactcctgcaataccaacaacgcattttatgagaatcactggagcaactagttcaaatttaaaacgaaattggtggaaatcaggacgactgaaagaaacatatgaaggtgcgccttttaatgagggttgctatctctcgattgatgtaaatgctctcaggttaccgcatggcttcaaattgatttgggtatttgagttagatctagaacctattggattagtttctttctaa

SEQ ID NO: 188588 - DNA, 1182 bp, Klebsiella oxytoca
atgcgaataaaaatgtacccagcccaaaatggagatgcttttttattaagtaccggtagaactaacatccttatagacggtggttatgccagtaccttctattcatacatacaaaaagatctcgaagagttagcagctaaaaatgcctgtttaaatttagttatcatcactcatattgatgccgatcacattggaggtataatttgccttctagcttcaaacggtgattcgaatgtaaacaatattattactattgaagatatttggcataacagtctacgaagcctgacttcagtaaatcaaacagcgctactacctgaagaccttgaagttattgattccattattaaacgaggccatccgaaagagttcagttctttcccaagctcttacgagattagcgccagacaaggctctacattagcaactctgatcaaagctggggagtatgtctggaatagaactgatggcacacgaagtatatgtaccgactgtgtgcagcataagcaattccaggatggttttgtaaaagtacttacgccgtcaagagatagactgaacaacttaattaatgcatggcaacgagacttaaggcgctatggttttaccggtcctgtaagcacaaaccaaactattgacgatgcttttgagcttaactttgagcataacaataaagtccatgcaaaaggaaataaactaatatctgcagggtgcaataaaagtcttgaagatatatataaaccggatgactcaccaactaacgcgagttctattgcaactattatcggactaaatggggttcgattgttaatgcttgcagatgcattggcagaggatattttgatggaactacagagactgaagtctcaaggagaggacatgatgtttgatgcaatcaaaatatctcatcatggaagtaactacaacactagccctgagctacttaagattatagacgccccaagatatttcatttcctcggatggtagcaaacacaatcatcctgatattgaacttcttcgagcgatagtcggtagggaagcaagttttacaagaactctctattttaactactcgacaccagagtcgagagaaatcagaaatcttcaagtaactacaggcgctaatttcattattgaagaaaacgcgactaactggatagagatcacaaaggaacaataa

SEQ ID NO: 188589 - DNA, 438 bp, Klebsiella oxytoca
gtggtcagcgatattcttcatcaatcagcatctcaacggcgggccgcatggctggcgctgtttgcgatcgcgctgatcgtggtggcgccgttgatctcagtcgcattgcaaaaagatccgatgagcggaatgcaccacgcaatgatgacgatggcggaagatgcgccattacatcagatggcgatgatgcacgccgacgcttcgacgccgcaacgctcgcacggcgtaccgctcgatcatgctgaagcctgtggctactgcgtgctgttagctcacgtgccaggcctgattttcgcgctgatgctgctgcttgtcatggtgcttcgacgccagcgggtccctgttagccgaccagtacacaaacactggcattactttccctggctttatcctcttacccgagcgccgccgcgtccgtctgctttcccccttacataa

SEQ ID NO: 188590 - DNA, 1371 bp, Klebsiella oxytoca
atgactacctgcacctcgcgcgcggcatggctgaacctgctgcggcgtcttcatttctatatcggactgtttatcggaccgtttatttttgcggcggctctgaccggtacgctatatgtcgccactccacagctggaaagctggctctatcagaatgcgcttcgcggtacgctcagtggagaaaaacagccgctcagcgcgcaaattaccgtagcaacagaggctatacagggaaacctgcgcctgcatgcggtacgcccggggatactggctggcgatactacccgagtgatgtttattgacccgaaccttggcgagtcggaaacgcgggcaatttttgtcgatccggtgacgttaagcgtgaaaggagatctgccggtttacggtaccagcggtattttgccgctgcgtcagtggattgattatgcccaccgctcattgctcctggggagcgttggccgcctgtacagcgagctcgctgcgtcctggatgtgggttgccgctctcggtgggatcgcgctgtggtcgatgacccgcccgcgtcgtcgcattaacaataagatgcagaatagccgccgcctgcatgtctctctcggatgggcattgctggtcggtatgctcatattctctgcgaccggtttaacctggtcacaatgggccggtggtaacgtcgataagatgcgcgccgcctttggttggctgacgccacaggtgaatacgcagctggaaagcgccgttccggcagttcacgattcgcatgcggaacatcatatgggaagcaagatgatgggcgaggcggcatcgccgctgcgcgtagaggagtttgacaagattctgctggccgcacgcgctgcggggttggatgccggcaagctggagattcgaccgccgtcgggccccgggcgcgcctggacggtaaatgaaatcgacagaagctggccaacccaggttgatgctgtcgcgatcgaggggtcaacgatgcggatcgtggaccgtacgcatttttccgactttccgctcatggccaagctgacccgctggggggttgatttccatatgggaattttgttcggccttgttaatcagctattgcttatcgcgttcggaaccgcactctgcgtgatgatagtggtgggataccgcttgtggtggatccgccgcccggcgcgcgcggcggctaacccggccaatacgttgatacaggcgtggtttggattagcatggcccgctcgtctgctgactgccgttattgcggtgttgttgggggtagcgctgccgctaatggggggcagcctcgcgctatgtctcgccgttgattatctgcgctggcgcgcagcaacggcgatgttagaggctaaatcagtcgaatag

SEQ ID NO: 188591 - DNA, 528 bp, Klebsiella oxytoca
atggagacttaccgattacatcgtggcaggcttatcgaccatatccagcttgtggtaaatgatttcgaggccagccaagcgttttatacagccgtgctggcggtccttgagatccctgtcgtgaatactacgacgattatttttgggctgatgagcttgttgtttcatccattaatagccccggttccgcaggtaagccgacaggacggcatcacctggctttccaggccagggatcgtgagacggtggatactttttaccaggcagcgctggcacacggcggcagtgataacggcgcacccggtgagcgaacttatcacccgggatactacgcggcctttgtactcgatcccgatggtaacaacatcgaagcggtttaccatggcgagggggaacgcagtgcggcatcggtggagattggcttcagtctttaagcataacgacctccgggcagggccgtattgggcggttggcattaagtcagaccagcagccagcccaggaattcgccatattgaagccctcataa

SEQ ID NO: 188592 - DNA, 633 bp, Klebsiella oxytoca
atgaatgagcagcgtccacctccttcacgcccgccacaggggccaatcggctggctgctgtcgctggccggtcattttatcgggctgatcatcggcgcgctggtgctgcgggtagtgctggaactggcggggctctatttctggtggccgcaggaggggagcaggcatgtttttcaggtgatgacgcaggagcgggtggagctgattattacgttacagccacatccgcagggggaaaaaattgtcatgctgctggagaatgggacaactcgcatgcttatggccaactggcttctgaagaaaccgttcaccgccctggcttatacgctgatgagttttatgcagcgcctgacatggcttgccgccatgctccccctgctctgcctgtgtgcggtaaccgggcttacggagggactggtgcagcgtgatttacgacggtttggttctgggctggaatctgtttttcttcaccgctacgtcatcaggtccggcagttcagtcgccaccacgctgtgggtgttttatctggcacagccgctgtttatccccgcgatgctggttttactgcccgccgccttagggcttgggataacggtatggatgacggcagggagttttaaacgctggttataa

SEQ ID NO: 188593 - DNA, 2457 bp, Klebsiella oxytoca
gtggcaaagatgatcccttcatttggacctcaggcaactgaaagttatggagaggtggtgctttataagttaattgagagtcagctttctaatgattttaccgtgatacatagcttgccttggctgtgctcagcaataaaagaaatagatcctcatttcgcacctactggtgaaattgactttttaataatccacaaggaattgggagtacttgctttagaagtcaaaagtggcaaatatagagtagatggagttacatttgtacatttatcaaccggcaatataacttctccaattcaacagacgcgccataatgtccatggactggcaaggtggctagggggaaataaagaactacgattacgaattgggtatggtttggtctttcccgacagtgactttactaatcaaattttcagtgcagcattagttgatattagtgtgacgccaaataagtcgatagcaattgataaggggcaaattccgtcgttgggacagagagttattgatatcatgaattactggaaagattctcttaatgtaccagtaatgtctgatgcaaaaacacagaaattaataagtatgctttgcccacagtatgatggaaccccaaaatgggggactagagtattttttgataataaaatttggctacctctaacaaatgagcagaatgaagtggtaattacagcatgcaaccgcacacgaatgcttgtcaccggatggccgggtacgggaaagactttgattggtattgcgattgcccgagaaatggtaagtcgtggaatgcgcgttcttgtattaacttttaacagtttactggctgagtacctaacaaggcagttggattctgatcaagctaaatgtactgtttcaacatggcatcgtttatgcgtaattgcacgtcaccaactaggcatcaccactgaacaactgaatgatgattggtttaaaacaggatgtttagatgatataagaatggctatcgcgagaggtatgattgataattatgatgtgcttattatagatgagtgccaagctctgcgtcctgaatggtgtagatatcttgtagagtggtttgcagggaaaaaaatcatcgccttttgtgatgaaacacagctctttccatttgagtctggtattgatttacttcaactttgtgatttactgaaaattgaatctccgtatttactaactatagctcttcgaactcccaaaatgataactgaaaggttgttatcagttaggccaacttcttatcagttatactctatgagagagaaagaaccagaaacgttaaaggaagttgttttcagcactgattggtctttaacagagctaatagaaaagctcatgcatgaaggagtaatgaaaaaagatattgtcgctttatataaatataatttacctctattatttgaaacgattcttatagaatatgacattagaacagaatcagtatctcgctatcgcgggctggaatccccaattattataattctggatgccgacagcatggtggatgctgagcttttttgtgcatattctcgtgccacaacattagttattgcaatttataatccaagagcaatgggtggtaagtctgcgggtaaatttcaagagcaagtactggccatagaagaaaatagggacaagcttaacgaatatcatctcacttccctagtgtgtaatatcatgcgtgcccatcttggtttcaaacaattcgatatagaaagtattaatttgagctggcacaaagcatggggagtatggcttgttgaattgaatgatttaaatggatacgaatcattatggcttgattatcttgcttctaactttaagtctccaattttttactgggataaaaaatctcagtttgttttttactcttacaacctgaatggcaattttccaggtgactctagtgaaacaacgcctctaaaattagaacactgcgataactgtgatacatttgttccatatacaattggtctcaaatctgaatgcatattctgccacggagataccaatacattttacgaaaaactcaatccagatacgattgagggcataataaaatatgacacaactattttaatgaaaaacaattcaattccgattaaccaacttccaatttccttagctgcctttggggccaggcgatatgctgaaaaaaagagagagatagctaaagatagctttgaattacctcatgggagaattttatatcgtgcggcactggcattcgtacaatcaagaataatttaccaccccaaaggtacggaaattgtcactattgaattggctactgagttatttaataaatataatgatattcagctgtcgctttcattgtctcaatggaaatcaatcgtttccaacgcttttagtacctgctttcagaaagggttgctcacaaaaaaaagcaagggcatttacattatcagctctaattaa

SEQ ID NO: 188594 - DNA, 309 bp, Klebsiella oxytoca
atgttcagccgctcatcatttctgttactggctctgctcattggaccacaggcctacgcctccccggaatccactcagctcgccctcgcgctgaagcaactcaatagcgtaaaaacctcgctggaccgcgcccggatcagctccagcaccgatccacaatcgcgctatttcttcgactacttacaggcgcagcaggacatctctgccgttgaacagggcatccgccactaccttgccccggcaagggctcagccgcgcaccgttcagccactgagcaccagctatcagcgggagaaccccgatgactga

SEQ ID NO: 188595 - DNA, 180 bp, Klebsiella oxytoca
atggaaaccgctgcacggatagctgatgtgctgaatgttcccctaccatggttgttcacttcggatgagaatcttgctgagctgattctcaacttcgctgccctctcttctgatgcgcaacttcagttactggaaacgtcccgccatatggtaggcatctcccctgaagaagatgcttaa

SEQ ID NO: 188596 - DNA, 375 bp, Klebsiella oxytoca
atgatgacctactgcgcgcgtatcgccgctatcgggctgttcgtcgccgacggtctggcagacagaacgctgatcactttcgataacaatgggccgaaagactgcctcgactactccctgtcgctggagccctcattccgcgaagaaaacctgctgatactgcccggagatcggctgatgctggcgactcacgactacctgattaccgctgtgggcaaagaggcgcagcggtcgctgtttgaacttggtcacctgaccatggtgtttaacggcagcctgaacgcttgtcatgccagggctgttcatctctccggcccggtcccgaaactccgcgatctgtccgacaacctgctgattgaggaagggcggccataa

SEQ ID NO: 188597 - DNA, 1359 bp, Klebsiella oxytoca
atggaactcgacagaagcctgaaagcccgccacctgacgatgatttccgtgggtggcgtcattggcgccggatttttcctcggcgccggtgcggccatcgcccgtaccggcccgtcggtggtactggcctaccttatcggcggcgtcatcaccctgttcattatgctgctgctcgctgaaatggccgtctcccgcccggtctccggctcctttgaatcctatgcccgcacagccttcggcccgtggtgtggctttattaccggctggacctactggctggccttcctgattggcccggcgtcggaggcgatcgccgcaggcaccttcctcaacctgtggtttcccggcgtcccggtctggctgttctgcctggttatcgcctcgtcgctcaccgccatcaatatggtcggcgtccatttcttcggtgaggtagagttctggctgagcctcgtcaaggtggtggcgctgctggcctttatcgttgcgggctgttacagcctcgggctggatgagacgtctcctgccggcgtggcgaacgtcaccagcaatggagacttttttgccgacgggctgcccggttttcttggcgcgatgctgatcgtgattttctccttcggcgggacggaggcgatcggcaccgccgcaggcgaaagcgagaacccgcagcgcgatatcccccgcaccctgcgcggcaccgtggtacgtatcctgctgctgtatgtcggttcgctgaccgtcctgttgctggtgatgccatggcaacaggctggcgtcagcagcagcccgtatgtggaggcgttcggcatcctcggcggcgatatggcgcggcatatcatgaattttgtggtgctgaccgccgcgctctcctgcatcgataccggggtttacgccacctcgcggatgctgcacgccatggcctctgacggctatttcccggactggtttgcccgcctgcacccaacacacaggacgccggataacgccattctcgccagcagcctggtgctgttcactggcgtcatcatcgccattctctcgccggatgcgtatgtcatcctggcagggatttccggcttcggcttcctgttcacctggctgatgattgcgctgagccagccgacgttgcaccggatcgccctgcacgacgggacgctgaaataccgggctccggctgcccggcacatccagcctctcactgtggggctgattgtgctggtgatggtcgggcagttctttgccgatggcggcggcatcaccctggtcaccgttctggcctggttggcgatagccagcgcgtactacttctttgtcgtccgtaaaaacaggagacagtccgatgaaaaaagtcatgctgaatga

SEQ ID NO: 188598 - DNA, 804 bp, Klebsiella oxytoca
atgaaaaaagtcatgctgaatgaattaactggccgcgaaatccgcgaactactgcactccggccaggaactcaccgccatcgtcagcttcggcagttgtgagaaccatgccgaccacctgccgctcggccccgatatgtttgttccggaaacggtcgcctgccgggtggcgcagcgggtggacaacacccttgtactgccctgcacaccgttcggcacttccgttcactacaacacccatccactggcgatcaccctgcgttatgaaaccaatattgcgctggcggaagatatcttcaccagcctgctgcaccacggcatccgccggatgctggtgatcaacggtcatgacggcaatatcccggcgattgagatcgccgcccgcaacgtgaaagcccgccacccgcgggcggcgatcgtggtgattccggcgtggtgggatctggtggggcaccatctcgggaagggtttctttgactcatgggataacagcggactcgggcacggcggcgagggagagacgtcggtcatgatggccctgcttccggaactggtggaactgaaatatgcgcagaaacagatccccgcagaggtgttcgccgattatggcgtaaaccggatctgggacatcggcgaaatcagcaccaccggggcaaccggcgatccgcgctgcgcctctgcggagaaaggcgcacggatcctcgcctgcctggtggatgtactgtgcgcgttgctggcaaagctgaatgtaacgaactggcagtatggtttagccaaagaaacggataaatcatccggcaggtag

SEQ ID NO: 188599 - DNA, 891 bp, Klebsiella oxytoca
atgatctcacaatgtttcgattcccgtttctataccttcaaagtggattcactggtttactcaagggcattaccggtgaatgtaaaattcagtaataagtacaaacagattaaagcctcggttgatgaatttgggttgattgaaccgattatggtttatattaatgataccagtgaaaaaatcatccttgatggtcatctgcgcgttgaaattttaaaagagctgagcattgaaactgcccactgcctgatatcccccgttgaagacacctattcatataataaacgggtcagtcgccttactattgttcagacccagaatatgctgcttaaggcagttgagtccggcgttccggttgaaaaactgtgtgcggtgctggggattacgccggacactctgattggcaaactgaaaatctctgatgggattgccccggaagtgatggcgttactggcagaaaaaaatgtgccgcagaccattttttcggtgctgaaaaaactgaagccttataagcagatagaaatggttaatacgatgattagtattaataattttacgcgtaagttcgcgatgtcgatgctgcatgctgttgcgtccgaacatctggttgaaccgaaaaaagatgccagaagggacacggatatcaggaaaaatcttgatcgactggaaaaagagatggcttctgtgcaggttgaaacacaacaccttcaggatgaatatgcggagaataacctccggctggtcattatcaagaaccatattgaacgcctgctagcgaatggtcagatagttaactggctttatgataaccaccaggaatacctttctttactcaaacaaatatcggggctggacgatttgaataagctgagccagaaggccggggaataa

SEQ ID NO: 188600 - DNA, 891 bp, Klebsiella oxytoca
atgatgaaatcttttgatgaacagatagagcttatcgatatcagtgatatttatatagctaatccgcggaaacggaataaatttatacataacgagattaaagaaaatataaagacaatcggcctgaaacgccctgtcagcgtccggcccgtcaatgatggtaaatataaatatgccctgatttgtgggcaagggcggcttgaggcctacattgagtacggcgaaacgaaaatcccggccattattaaacatgttgacgaggagacggctcacctgatgagcctggcagagaatatcgccaggcgaacgccccgcgcggctgaactgatggaagatatccggagaatgaaaaccagcgggctaacggacagggagattggtttgcgcctgggttataactccagttgggtaaacggcgtaattaccctgctctcatcgggggagaaacatcttttacgggcgtttgagacgggagatataccgttgtatctggctgtggaaatttcccgctccggtgacgatgaaacccaggcgttactgaccaccgccctgaaagagggacatatccggggagggcaaattaataagatcaggcgcattctggtacaacgaaaaaaaggggataaaggcacgatcagtacggcattctttccgggtaagaagcagaaaaaactcacgcctgaagagctggctagtgtttaccaggaaaacattaatgagcaaaaagccattcttcttaagtccacgatggttaaggaaaaattactggcagtgaaacagatctttggtcacctgctaaaaaatgatgaatttgttacgttgctgcaccgtaataatatccatgatgttccttcattgctggacgaaagtgaagcacaggaggtaaattaa

SEQ ID NO: 188601 - DNA, 1539 bp, Klebsiella oxytoca
atgtctataacagaggctgaagcaggcggtaaaactgccgcgcaatatttaagaatgtccacggaacatcaaaaatattctcctgaaaaccagcgggaatatattgaaagatatgcaaaggaacacggtattactattttgcatacttatgatgatgccggaaggagtggcctcagcctggataaccgtccgggcttgcgctccttgctgcatgatgtggaaaacggaataatcactatttcattaattcttgtttatgatgtcagtcgctttggccgattccaggatattgaggaggccgcacattattcctggctgctgaaaagtcatggcgtccgtattatttattgtgcagaaccgttctcggaagaacagacggaactgtttatgctggggctatcttattcccgctatggcgcagccacctacagtaaaaatctctcggaaaaggtcttcctcgggcaggcaaaccttgtccggcggggatatcatcaggggggaatgccgggatatggtatacgtaggctgctcatcgatgagcatgccaaaccaaaaggactccttcattccgggcaaaggaaaagcctgcaaacagatcgggtgatattgatcccaggccctgatgaagaagttctgatcgtgaaccggatatatgacatgtttattgatgatggcaagcctgagtttgttattgcctcagaactgaaccggaagagtatccccgcagaaaatgggcaaccatggacccggtgcaaaatccatcagatactgaccaatgaaaaatatatcggtaacaatgtttataaccggacctctagccgcctgaaaacccgcagcgtcaggaatccacaggaaacgtgggtgcgctgtgatggggcatgggaaccggtggtatcaatagcgaagtttgaggcggctaaaagcattattgaggtcagggctgtacagtacagcgatgatgaattgctggataagttacgtcatcttcttaagctgcggggcaggctttccggcattattatcgatgaagaggaactctttccatcaagcagtatcttccgctcacggtttggcggcctggtgagggcctacagtcttatcggctataaccctcagcatgactactcttatcttgaaataaaaaaacagatcgccgaatacaacctctcttttattgataatctggttcaggatatttaccgctatggcggctggggctcggtacaggaagatggttctttgtatgttaatgatgaattttttatctccactcatctgatccgctgccagcgcctgtcatcaggcaagctgcgctggaaaattaaattcaatgtattgcaccgttgtgatgtcatgatatttcctcggctggacagtaccaacaataacgttgttgattatttcattttccctgtcatagatattctgcatagtgatttaacgcttcatgagagcaatggttttattctcgaattgtaccggtttgacgatttgtcatgtctggaacgtcttgttaaacgaaccaaactggagttgtaa

SEQ ID NO: 188602 - DNA, 960 bp, Klebsiella oxytoca
atgaggcagaacagcattatattcatactggtggcgacattactgatggtatcagggatggcgagggcatcatgctatctggcggacggggtatcgggtgaaattcccggctatatcagctttggtaatgtcactgtacagcgggatatcccggtaggcagtgttattgcctctgccacgaccggggcatataacgggggaaaccgcattgccggatgtaccgaaccctggacctaccggtgggaaatgacgcagtggagcaccctcagtgcgttgggtaacagcatctatgacaccaatgttcccggcgtgggcatccggctgactaatacagcatccaataaggtcatcccttacgacgaaagcaggggcgttgttgatgtggtgatcaccggtgacggtatcaaagctgaattgatcaaaacgggagatatctccggtggcacattaacgcccggcgtgctggcgagagcctcagtggtgaaccagttctattttgccaatgccaccctgaacgggaacaacaccatcaccagtgccgcctgccaggtcaccacgccggatccttcagttgatttgggcagccatgataaaaatgagttcagcggtacgggttccaccacggactggaagacattcaatattggtctcaattgtaataagggcgcaaagatcaatgtgcgcatcgatccggcggctggcgcagtggacaccatggcggatgtgatgaagcttgatgatgcggggagcagttcgacggccagcggcgtcggcgtccagctctggttccggcctaatggcggcagtgcggtgacgtttggccaggagacctattactggacgtcaggttatggcggttcggaaacagtccagcttcaggcgcgttattaccagactgcgcagacgatcacgccgggcgcagctaatgcgacagcaacgtttacgctgacgtataaataa

SEQ ID NO: 188603 - DNA, 1488 bp, Klebsiella oxytoca
atgacagccaacagctatttcgagtacgtgctcaccctgctcggctggctggtgaacaacggcgtctggcagacgctgacagcctccgggctgttcgccctgcccctgctggcaaaattgattgccctgtggctgaaagcgcgcggccagggggcggatgaaggcaacgtcgcccgcctgctggtcgtccaggtggagcactcactctacagcgccctgctggtgatcctcttcgcgggtgtgccgttcctcaatgtcgatatcaataccctcacctacgacagccagcgcacaaagcagtgcggctggtcggtggtacagcccggtgattccggctatgcaccgctgatcaacgaactcagcggccagagcgcctcggtgccggtatggtggtacttcacccacgcgctgggcaaaggcatcaccagcgccgccgtcgcggtgctgccctgcaaaccggacctgcgccagctgcgctttgaggtgcagcacacccggatcgccgatccggcgctggcgcaggaattacaggatttcgttaacgactgctatggcccgtcgcgcgcacggctcaaacggctcggcagtgacatcagcgaggaacagagccgggaagtggactgggtgggatcgtctttttatctctccacgccaggctattacaaccacgaccattcccgttcgccccgcgccgcctggccttatgacgccagccgcgatgatggcctgaacgatacaggtggcggaggctatccagcgtgtaaggagtggtggtccgatggcgatgcggggctgaaaaaccgcctactgaagcaggtcgataccacgctctggcagcaactgcaaaaactggggcagtctaaagacgagtatgaagaagcggtactgcgctcgctggtgagcccacgcaatatgcaggtgtcgcagggcgggctggtgtacaacggatttggtgggaatgcgggagataacttgaatgcatcgcaagcgttaagccggttggggagtatcgccggaatgtcggtttccagcctcgcgctgttccctgccttcgatagcgtgcgtcaggcgctaccgatggtacaggcattccttggaatggcccttgtgatttgtattcctgtgatcctgctgttctcggcatgggagcttaaaacggtcatcacgctgagctttgtgcagttcgccctgttcttccttaccttctggtgggaactggcccgctggctggatagctggctgatggagatgatttatagcgagaatggcgcttcacatttcaacctgtacggcttacagaacacttctgatgatctgatcgtcaatatggtgatggggacgatgtttgttgtgttgcccgcattctggctagggggactgacgtgggcaggggtgagggttggtggtgctgtggccggggttgtgtctgcgggaagtagagatgttaagaatggtggtgggcaaattggcaaaattatactcaaataa

SEQ ID NO: 188604 - DNA, 924 bp, Klebsiella oxytoca
atggaattgatgtttacctatcgaaaaaatgataatcacacccatcaggtacgtttattatctccgcttggggtttatcccattaaaacatttattatggatgattctgctctatttattagcgaggatatttgtttttcggttacacctttagtgactttcgttgactctgaatttgaagatgaaggctattataccgagatggaatgggcctctataaatgaaataaagttatactcgtcggtaatgctaagtcttgacagaaagcatggttattcagttatttatcctttttcaacctgccattatgtgaaaatgagtggtgatgtatctggctatctatctgaaataaaaaaagaattgattaaagcaataattatgcctgcaggagttaatggatggcatccatttataggacagatcaatagaggtctgtctcttcctccagtgacaagtgatggggaaaaatatgatttaagagatcaaggattcgatgtcaatatacaggaaaaagtgtttgagaaaattgatgtgaataattttattctaattagaggcctatctaccttactgagaagtagaatgttattggttcatgggtattttatggaggaagccatttattctctattcatatcacttgatgcttcatttaatatggtattagataagctaaaagaagttggaatatctaacccaacctcgaaagatgcagctatgtttatctctaagatatttaatgctccagaaacagaaaaatattttggtgagtattacgaagatagaataaaaacatttcatccaaaatctagatttggtgcatatcctcatgccccattgacaatagatgactatttttttctttctgaggatcttattactgtttatttgtatcttacatgtggatatgtatcacaagaatga

SEQ ID NO: 188605 - DNA, 1008 bp, Klebsiella oxytoca
atggctggcaagatgtggatgattcgtggcgatggtggaaaactatatgatgattttcgtgataagcaagtcgcggcgatagggtggtcaccctttgcaccacatgtaaaaacagggttatccagaggacagttgttcgatttataccaagagcttgaacctcaaattaaaccgggaactgcacgttctggtacttctcagatttggcgttttgtgaacgaaatgcagaaaggtgactgggccattacatattccccctctaatcgaacctacttgttaggaaagattgtttcagactttgaatatcacgcagagtggcttgaagatggtatgggcattgcccgccaggtgaaatggaatacggaagaaattgatcgtgataacttgagtgatgctaccagaaatacattgggttcaacactgacggttttccgtgtgccggattttgctgtgaatgaattattgcaggggaaaaaacctgcacctgacgttacgccagaagtttctggttcagttgacgaggaggacgccgtatccaacctcttacgcgatatggaaatgatcgcctttgaaggcatcaaagatcgtatcaatcgtcttgattgggatgagatgcaaaatctggtggcaggtgtattgcgtagtatgggatataaaactcaggtatcacccgctggtgcggataggggtaaagatatcattgcttctccggatggtttcggttttgaaaacccacgtattattgtcgaagtgaagcatcgccgtgaacagatgggtagccagcagatccgcagctttatcggtggccggcataaagacgatcgcggattgtacgtcagcactggaggattcagcaaggatgctcgctatgaagccgatcgttcaacgatcccgctgacgttgtggacactcgacgatctggtgcgggcgttggttgaaaactacgagcaggttgatattgaaaccaagttgttatttccattgaaaagaacctacttacctgcctga

SEQ ID NO: 188606 - DNA, 1389 bp, Klebsiella oxytoca
ttgatagctgaactcatcaaaaattttcttaagcaagcagacgaaaaatcatcacaaagcacgtcttcataccataaagaatatcgtaatctaaaaataacgctgagctttggaaaaggaagttacgcagatgtcccatggatcgcatttcttggtggtgggcaaacaccgtcaaatgggatttatcctgtaatattatattataaagattacaatgaattaatccttgcttatggtgttagtagtattacaaaaccagaactatcatgggaagggttgccgcctaagaccatcaccattaatgattactttaaggaataccataataaacctgcagagaaatatggcacttcattatttcactctgtttaccaaaccaataatgaagttgattataactctctagtatctggactgaatgaagcaattgataaatataataatttaataaacaaagaaactaataccaacaagttaaataacaacaaaaaagaaattaccacatataatttcaataatgccagcgaagatttattccttccaactgacacactcaacaagataattaaaaagctgaacaacaaaaaaaacataatactacaaggtcctcctggagttggtaaatcttttattgccaagagattggcatacctccaaattggaagtaaagatattaataaggttggtatgattcaatttcatcaatcttatagttatgaggattttattcaaggctttcgacctaatacgaccggcttcactagaaaaaatggtattttctatgagttttgccagaaagctaaagatgaccccgaaaataattatgtatttataattgacgaaattaacagagcgaatttgagcaaagtattgggtgagctaatgatgctcattgaagcagacaaaagaggccccgagtgggcaatccctttgacttattctgaagatgaaaaggacacttttttcgtcccggaaaatatattcattataggattaatgaatactgcagaccgttctttggctgttgttgattatgcattacgtcgtcgtttttcatttattgatatagcaccgggattcgatactgagcaatatcgctcctatatgttatccaaaggtgtaagcgaagaagttattaatctcattcgtaccagcatgcacaaattgaatttagagatcggtcatgacaaaaataaccttggaaaaggatacatgattggccacagtttcttttgcccttcgagtaatatcgaaaaaggattagactatgaatggtataaagaaaccatcatgtctgacattggccaattattagaggaatattggttcgatgaaccagaaaaacatgaaaaatggttaaacatactcttggtgaatatcgatgaatga

SEQ ID NO: 188607 - DNA, 1050 bp, Klebsiella oxytoca
atgaatgaaaacaccattccaattaaaaacatttattacatgctctgttatgcttgggggtatatcaggcaagcaaaaacaataaatttatcgtcgctaaaaggagataatatctatgatcttctcagcattgtattaatacaaggaacgcagcatatttatagaagaggattcgagttaggatacaaaaatcataatgatattctaagcggtgttaaaggaaaaattgacataacaaatacaaccaagcgtttcttaacacataatggtaaattgcattgtgtctttgatgaactcaccgtcgacgttattacaaatcaaataataaaaagtacgcttaaattattatatacaaataaaaatattgacaatgacttaaaattaaaaattagttctgtgttgaagtatatgcatcctattagagaaattgacttaaactcaaaaatcttcagaataatacaacccaatggtaataataaattttataaatttattattaccatttgccaattagtatacacttcatcttttatatcgcaagaaaaaggccgtgttaatttttatgattttatacgagatgaacgtgaaatgtcacggatatttcaagagttcttgtatcagtttatgaaaaaagaatatattggttggagtgtaaaccgaccgcatatcaaatgggatgcttctagtgatactgatccagaattaaaactcttacctaggatggaaagtgatataataatgtcaaatgcaaataaaaccattatcatagatgccaaatactataaaaacatgtataccaacaggtacaatagagaaaaatttcgctcaaacaacctttatcaattaatgtgttatttgcataattacgattttcaagaaacaaaacaaaataagaacatagatggcatgcttatatatccaatgacaggagataatgttaatgaaacatatacaataaacaattataaaattactctcagaactcttaatctcaatcaggagtggaacaaaattcatgatgaattattaaatattttcatcactccttga
